United States Patent Application Publication US 2005/0181375 A1 - sequence listing, part 2

SEQ ID NO: 626 - DNA, 193358 bp, Homo Sapiens
gatcatggacaagttaccttacctcattgacttcagttttctcacatacaaaatagggatatacataagttgtatggagttcttttgttttttgttttaatttttttttcagttgttcacatgtatggcaaagttgtatggagttctaaggatctgaatgagttactagataaaggtgtagaatattgctgacatatagttagtgctcagtatatgttaactattactattatttcactattattatcttagttaatggtatcacctctcatctcgtcactcaggcaaaattctcaggagtcacaaacccaggctctgctttgtagatatatactgaacttaactactctttactatctttcctgctaccaacctaattcaaaccactgatgacacccttacataccacttccatccagtactatcccctcatgtttcctatacttggaaacaccataccgtcgttgtttgtttgttttccccacaccatctttaaagcccaggtcagattgtagcactcttgcttaaaatcctccagtggatttccattgcaattagaataaaatccaaatgctttaccttggcccttaaagccctttatgacttggcttgtctttctctgcaaactcatctcttatcactgtcttctgtgttcactacacttcagctgtagtgcttttttctttaactttttgtactttaaaaatgccaaaacatgtttatactttaggttcttcagcttttggttccctttgcctgaaatattcctccttggacccttctaatggctatttccttctcatcattcaggcccttaatcacgtttttttgttctatttgtgatagaaagctccagggaaggagctcacattcatcactgttttcttagcaccttgaatagtacttgatgtgtaatcgttgcttaatacatagtttgttacttgaatgagtgaaaatggctgctggaaaggctatatctatttatttatttatttttctagatgagatgaatgatgccagattataccaatttagtatccccaaaccatttttccacatctacatgtccaacattaggcaaacttaaattattaccagtcttagaagatggtttttttttttttttttttttttttttaggcagagttttactctttcacccaggctagagtgaaatggcatgatctgggctcactgcaacctctatctgccccccggggttgaagcaattctcctgcctcagcttcccaagtagctgggattataggcacccaccaccacacctggttaatttttgtatttttagtagagacaggggtttcaccatgttggccaggctgatctcgaactcctgacctcaggtgatccacctgcctcggcctcccagagtgctaggattacaggtgtgagccaccatgcctggcctagaagttgttttaatttacattatattaacatatgtaattgattattatttataagagctcattgtatatgaaggaaattggtcctttatcattcatatatatatatatgtatatgtatatgcatatgcgtgtggtatttcttacagttagtcttaagtgttttgcattttaaccatttgttttgtacagaatattccagtttagatacagttaaataatgtagaccaggtgcggtggctcacacctgtagtcccagcactttgggagacctaggcggctggatcacctgaggtcaggagtttgagaccagcctggccaacatggtgaaatcccgtctctactaaaaatacaaaaattacctgggcgtggtagtgggcgcctgtaatcccgctacttaggaggctgaggcatgagaatcgcttgaacctcagaggcggaaattgcagtgagccaagatcacaccactgcactccagcctgggcgacagagctagactctgtctcaaaaagaaaaaaaaaaaagtatgagtcattctctttctgggttttatgtttagaaaagccttcttcctttcaagattataaaaaatttattcttggctgggcccactggctcatgcctgtaatcccagcattttgggaggccaaggtggttggatcacttgagcccaggaatatgagaccagccagggcaacatagtgagactccatctctacaaaaaataaaaaagaaataactggccatagtgttgcgcacctgtaatcccagctccttgggagactgaagcaggaggattgcttcagcctaggaagctgaggctgcagtgagccaagaccgtgccactgtactctggcctaggcgacagagtaagatcctgtcttaaaaaaaaaaaatcttatttatttatttatttattgagatggagtctcactgtgtcacccaggctggagtgcagtggcgcgatctcagctcactgcaagctctgcctcccgggttcacaccattctcctgcctcagcctcctgagtagctgggactacaggcgttggccaccaagccgggctaattttttgtatttttagtagagacggggttttaccatgttagccaggatggtcttgatctcctgaccttgtgatccgcccgcctcagcctcccaaagtgctgggattacaggagtgagccaccgcgcccagcaaaaaaaaaatctttttaaaaaattctccctctcccttcaggattatatttgttgcttcttttttatttaagtaagtttttttttttaaatcagatgactggactcacatatttatttaataaatacatatctttttacgaatgatttagagatgctttttgttgttgttgttgttgttgatgagacagagtcttgctctgtaacccaggctggagggcactggctcagctcactgcaacctctgccttccaggtgcaagtgattctcctgcctttatcacctgagtagctgggattgcagccgtgtgccaccatgcccggctaatttttgtggttttagtagagacagggttttaccatgttggctaggctggtcttgaactcctgacctcaggtgatccacctgcctcggcctcccaaagtgctgggatttcaggtgtgagccactgcacccagcaagagatgcattttttattgtataatgaaagtatcatatgtttgcatctatttctgaactatagtctgctccacatatctgcctgccccccaccactagttaccatttgatttaatcacccacagctttatatttcaatattccaactttaatggcttttttttttttaatggagaagatgcagcttgaggagaggaactttaaaaaataacactgaagtcctgccaaatgatccctaaaagttctgagaaagaggctgggtgtggtggctcacgcctgtaatcccagcactttgggaggctgaggtgggtggatcacgaggtcaagagatcgagaccatcctggctaacatagtgaaactccgtctctactaaaaaaaatacaaaaaattagcctggcgtagtcccagctactcgggaggctgaggcaggagaatggcgtggacccgggaggcggagcttgcagtgagctgagatacgccactgcactccagcctgggcgacagagcgaggctctgtctcaaagaaaaaaaagaaaagttctgagaaagaaagaatattagctgtttcaaatgttaaaatgcactatagaattctagtgattaatgttttaaaaacactgagtgatcaattttaggacctgagtgtgtgtaatgtcttttactgtacatttcctatgtgatttctctacacttcacttttctcacctataaaatgggagaaatgatcagtattatatgtagatttaaagattaaatgagtgtgtgtgtgtgtgtaaagtgcttacttagtatgggacctggctagaggaagtacgcaacaaattacaactgttttatttatctcttttaacaaccttagttttaggtgatattgaagctcatagtggttaagtaacttttccaaaaggtagcagggtaggatttaaacttatagccacatgataccaaagctgtactccaaaccactataaatacacatgccattttatactattagcgcagtttatatttctactgaccttaataattgattgatgatacttattttcctatattaataaggttaatccactaaaattatattgagcacagtagtaccatttgtagagaagcagaaaatcatagtgtttacaaagggaggctcttccactcctagttacatacccaagagaagtgaaaaaaatatgtccacacaaaaagctgtatgtaaatgtccaagtagcattattcctaatagcccaaagtgaaaacaacctaaatgtctgtcagctgatgagtggaaaagcacaatgtgatatatccatacaagggaatgttattcagcaatcagaagcaataaagtattagtaaatgctgcaacatggttgaaccttcaaaacattatgccaagtgaaagaagccagatacaaggccacagtatggtactgtttatatgaaatgtccagaataggcaaattcagagatagaaatcatgttagaccgtcaggggctccggagaagggcaatagggtgtggctgctaatgggtacagagttttgggggtttgatgaaaatgttctggaatcagatagtggtgattattgcacactttgtgagtataccaaaaaccactgaattgtacactttaaagcagctaatttcatggtacatgaattatatctcaatttaaaatggaagaggggaggcttttggtgtttgaacctcagctttcagatttgctacttgttagttatatgtcctatacaagtaacttaactttttccttgccgcaggttttcttacttgtaaaaaaaatgtttaattgtaatatagtcttcagaggattgctgtaaaaattatacataaaagcctatagtaatagggtcttgcaaacaacaggcgctcagtaactgttagccattgttattaatatatccaatttcaacatgggcaaacatgggcaattctgatttacctttataataatcttgtgtgatatgttcagtatttggtatatggagtcagagagtcagagtatacctccaatctaacttttgatttataagtgaaataggaatataatgttagtttgaagtattaaccattcacacttttttacatgagtatcaacttacgaatactaagctaaacacctttatgtattgcttttaaatgtatacttaaaggctgaggtgggcagattgcttgagcccaggagtttgagaacagcctgggcaacatggcaaaaccccatctctacaaaacatgtgaaaattaaccaggcatggtggtgcatggctgtcatcccagccaccccaggaggctgaggtgggaggatcgattgagcccaggaggttgaggctgcaataagccatgattgcaccacggctgggtgacagcctgggtgacagagcaagaccttgtctcaaaaaaaaaaaaaaatagtatacttaaagtgcttcttaataactagtgataatggctttctatattgaataagtttcatggtatggtctagttgaaatttgagaaaatagacttaaaagtcagtttcttataattagggcgctttgtaattcattattaaactgctgccagttttgttgattacttccctgtcagtttaaagtatgtttttaattgatacagattcagcgtttgttggaagcacagtctctgatgccctgttcccctaagacaactgctgttgaagacacagtgcaagctggaagacaaatggagttggtttctgtggaagcacagtcttcccctggcttgcacatgagaaaaggtgtaagcattgctgtgagcacaggtaatttcagtttttttttaatttgtaaggaaattgttaaaaatgcttttcatatctggtttttgaattttatgttcaaattggtgcatggtgcagtaggaccaaaaccaaggtgatgagagtatgacttaagtttttgtgtgattttagtctttgtgaaataaaactacacctgcaaactgcataacatgataaagtgtttgattttgctacttttctaggctggacccaattctggttttttttttgttttttgtttttttttttgaaatggagtctcgctgtgttgcccaagctagagtgcagtgtggtgcactctcagctcactgcaacctccaccatcctaggttcaagcaatcctcctgtctcagcctcccaaagtgttgggattacaggcgtgagccaccgcgtccagccagtcttgtttgtattaatttattttcataaaatcacccaagtatatcctcagagtagaaaccattttgactatgatttacttttttttttttttttttttgagacggagtctcactccgtcacacaggctggagtgcaatggcatagtctcggctcactgcaacctccgcctcctgggttcaagtgattttcctgagtagctgggactacaagcgcctgccaccacacctggctaatttttgtatttttagtagagatggggtttcactatgttggtcaggctggtctccaactcctgaccgcatgatccacccacctcagcctcccaaagggctgggattgtattacaggcatgagccactgtgcccaggctactttttggttttaaccatctgtttaaaccattatgtattagcaatattccccaaattatagaatgcctatggctcgtggtacaaaagatgatttagggtgttatacagattaatatttatattttgtaaatatatcttttccaatactcataggtataaatacaataagcatatcaaatctgtgattttagagaaataatgaggctcagtaaaaaaagagttaatttaaagaaagagtaagtaaacaatattacatgcaaatagctctgaagataggtgtaagtgcttcataaagattgagaaattggctgggcgcagtggctcatgcctataatgtttgcactttgggaggtcaaggcaggtggattgcctgatgctaggagttcgagaccagcctggtcaaaatgatgaagccccatctttaaaaaaaatacaaaaattagccacatatggtggcgcacacctgcagtcccagctactcgggaagctgaggtgggaggatcacctgagcccagggacgttgaggctgcagtgagctgtgattgtgtcactgcactccagcctgagcaacaaagtgacaccctgtcttaaaaaaaaaaaaaaaaaaaaaaaaagattgggaaacacttgattttttttaatacctgcctgatattacagatattacagatgtctgatgcatcaccaatgtagtcttttaaatattgcatttaagtgtcaaaaccagagaacctagggatttgtattttatatattatctcatattattcagagcagcagttttcaacatacacaccccatcccacggatcatattcagaatcttaatatgtaaagcaaatcatttcagagccacccttcttgaaaaagcagaacccagaatgtgcccttccacccgacccgtcccctagtgttttgtctttctgtcttccacctacctcttcctggcatttctgaggaaatataatctaaaaacttagttctaagtaattgtgtgtgtgtgtgtgtgtgtgtgtgtgtgtgtgtgtgtatatatatatatatttttttttttttttgagccagagttgcccaggctggaatgcagtagcacaatcacagctcattgcagcatcgacctcctgggctcaagtgatcttacacctctgcctcctgagtagatgggactacaggcacaccaccacacctggctaatttttttgtattttttttgtagagacaggatttctccatgttgcccaggctggtctcgaactcctgagctcaagtgatcctcccgcctctgcctctcaaagtgttgggattataggcgtgagccattgcacccagccaatatggctattcttaacaaaggtttggcagagtattatttttaaagttgaatgtttgtttcagtatcttaaattatttaacctccaggtgctagcttgttttggaatgcagcaggtgaggatcaagagcctgactctcaaatgaagcaagatgataccaaaatttccagtgaggacatgaatttttctgtcgatattaataatgaagtcacaagtcttccaggtagtgcatcttcattaaaagcagttgatattcccagttttgaagagagcaacattgctgtggaagaagaatttaaccagccactttctgtatccaagtaaggtctctttgatttagtctttcatcctactttcaaaaaaaattttttttgatagacaaataataattgtatatatttgtggggcacaatgtttagatgcatgtttacagtatggaatgattaaatcagaccaacaaatctatcacttcacatacttaactttttctgtggtaaaaacatttgaagtctactattagcaattttgaaatatacaatgtattattattcattacagttgctgttctgttcaggtttttttttgtttttaattctaatttctttaaagtcttctaactcagaaatgatatattttctaactggtattttcttttatgtctttacttgatatgatttctatgtaactgacaactctgagccttctagaaccatttccagatgtcagtctttggctatattaacagtctggatgaatcagaaatcggaagaaaacttcaaaaatacacaagctcaggcctcaccctagaggatctgataatattaggttccagatacagatggagaaatttttttttttttttttttgacggagtcccgctctgttgcccaggctggagtgcagtggtgcaatctcggctcactgcaatctccacctcccgggttcacgccattctcctgcctcccgtgtagctgggactacaggctcctgccaccatgcccggctaattccgtgtttgtatttttagtagagatggggtttcaccatgttagccaggatggcctcgatctcctgacctcgtgatctgcctgcctcggcctcccaaagtgctgggattacaggcgtgagccaccacacctggcggagaaatttcttttatttaatttatttatttatttatttatttatttatttatgagatggagtttctctcttgttgctcagtctagagtgcaatggtgcgatcttgactcactgcaatccctgcctcctgggttcaagtgattctcctgcctcagcctcctgagtagctgggattacagacacctgccaccatgctgggctaattttgtttgtattttttttagagatggggtttcgccgtgttggccaggctggtcgtgaactcctgacctcaggtgatccacccaccttgacctcctaaagtgctggaattacaggcatgagccactgtgcccagcctattttattttatgtatttattttttgagacaagagtctcgctttttcacccaggctggagtgcaatggcactgtcttggctcactgcaacctctgcctcccaggttcaaggcattcttgagcctcagcctcccaagcagctgggattacaggcgtgcgccaccacgcccagctaatttttgtatttttagtagagatggggcttcccatgttggccaggctgatctggaactcctcacctgaggtgatccgcctgcctcagccttccaaagtgctgggattataggcatgagccactgtgagatggcgagatttctaaagattctccgtattgccattatatataaaagagtctatttttgagtgatagaaccttaatatttatatatgaaatgttatctgagatttgcttcaaattaattctgtgggagaatgaaatggctaggagtataaatgaaataagattggctatttggtaatttttgaaactgattgtatatggtgatttgtaaaataattctctcatgtttgaaatttttcattatgaaattttccattaaataaggatcgtaggctaggctcagtgactcttacctgtaactgggcacggtggtgcacacatgtagtcccaggtacttgggaggctgaggcaggagaattgcctgaacctgggaggtggaggttgcagtgagccgagattgcgccactgcattccagcctgggtgacagagcaagactaagtctcaaaacaaaacaaaacaaaaaacggattctaaagtaaatttttttttttttttttttttttagatactcgctctgtcgccctggctggagtacggtggcgtgatcttggctcactgcaacctcagcctcccaagtagctgggactacaggcacgggccaccacacctggctaatttttgtgtttttagtagagacagggttttgccatgttagccagggtggtcttgaactcctgacctcaggttagccacctgcctcggcctttcaaattgttgggattactggtatgagccactgcacctggcctaaagtaatttatatcctcagcaaatttggaaacaaactcagcaaatatttgagtttctggtacgtgctaccacaaaactagacactaaatatcaaatactaggttaggcaaagctcctaactttatggaatttaaccacatgagcagcaaataacatagtttcagatagtgacaactgctctgaaaaagtaaactagagtgatcaagtggagtgtaactgggatggtaacctgggaacaaggtgttatattaagtagagtggtaaaggaaaccatctctgtgagggggtgacatttgagtagtgacctgaatgatgagaaggagccagtcatgataatatctggggatgagtattccaagtggaggaaaaagcaagtgtaatggcaagtgtgggtttaaaagttacagaaaaaagcatgaaagccagtgtggctggacatagtgattgagagggagagtataggaaatgaagtctgagatacaggcaggagccaagttatatggggctttgtaggatatagaaaagattttttaatttattgcatgctcattaaagctagtggaggattttagataatggagtgttatgatctgattttcattttttgaagaccattctaattgtttcgtggagaactgaaggatgttaagagtggaagttaagatactaactgattaataaactaaagaccaagtgagatgaagatgtcttggacttgtggaattcgtggaagggatcaggtgtaggataaattttgaaggtaaaagaaaaatgtaggtataaaacatcccaggataatagcacatgaaacagtttaaagaggttaatttgaaattcaagaccaggctaggcaaaatagtgagaccctgtctctataaaaaaatattttaacttagctgggtgtggtggtatgtgcctgtagtagttccacctactcaggaggctgaaacaggaggatcgcttgagaccagaagtttgaggttgcagtgatctatgataagtgccattgtactctggcttcaataacagagtgagactccatttctaaaaataaaaaaaggtgaactggtaaggtgacatggggcaggcagtggattactttttagaaattaataagccttgtgatatttgacattttaaatcattgtgattacaataatggttaagacaataaacatgtcccttcagaaaactacagagaaacatctccttttagtatagtatatgttttaatcatatgataaaattaagcactcattgtgtgtgccacagtatacagaaaagctcttttgtgtatgttagattgagttcctgcagggtaaggatcatagtaatttccatatttttagaatttgctgggcttggtggctcatgcctgtaatcttagcactttgggaggccaaagtgaaccgattgcttgtgctaaggtatttgagaccagcctgggtaacatggcgaaaccctgtctctaccaaaattacagaaattagcccttggtcccagctgttcgggaggctaaggtgggaggattgctggagcctgggaagttgagtctgcagtgagctgtgatcacgccactgcactccagcctgggtgacagagagagactgtttctttttttttttttttttttttttgagacagtcttgctctgtcatccaggttggagtgcagtggcgcaatctcagctcagctcactgcaccctccgcctcccgggtacaagcagttctcctgcctcagcctgccaagtagctaggattacaggcacttgccactatgcccggctaagttttgtatttttagtagagacggggtttctccatgttggccaggctggtctccaactcctgacctcagatgatctgcccgcctcagcctcccaaagtgctgggattacaggtgtgagtcaccatgcccggccaactctgtttcaaaaaaagtaattaaaaaaaactacagtttgacccagtgtctggttccccatggggtgagccccaaagtaggtctgcagtttatttagaataattatagaaactgaggacaaagaggagcaaaccatgggatctttatttattctccttaactctgtaaactgcagactactttctagaataatgggggttttcagattggaattttaaaaaatatccaatcttgtgtttttttttttttttttttttttgggagatggagtgttgctctgttgctcaggctggagtgcagtggtgtgatcttggttcactgcaacctccacctcctgggttccggagatccttctgcctcagcctctcaagtagctgggattacaagtgtacgccaccacacccagctaatttttgtatttttagtgaagacggtgtttcaccgtgttggccaggctggtctcgaactcctgacctcaagtgatctgcttgtctcggcctcccaaagtgctgggattaaagatgtgagccaccatgcccttgttttggctttttttttttttttttaactttagaaacagatctgagttaattgatagaatgaagttaattgctttttcagagcaattaattaactctgtcgatcccaacacataactagatgtaaatctaatctttgctcagcattgatttgggttgttgatttggattaaatactttctccagtgttgtctatgatggttttggtgcttctctgggatccttctcgcacttttggtctgattcgtgctctggttcccactgctgagtattcatagatgacacgcaactccagggcttccagtcccccttagatgtcttgttggaccagtgtttctgatgttgaagtagtctgtgaaagataaatttatttgccttgcagcttcattggttattgattactttttcccagcagtgagtagtggtatgtagtatttatagagactttcttttaaaatgatccatatttttctttagaagctgtgctttgggcatacctaataatacttggcatattagaagcattttaaaattttttatttaatcttaaatcttttgttgagatttgacatttttatttattcctttttcttccccctaaagagtgtagacatttatttatttattttggcttataaacaacagaaatttgtttctcattgttctgaggactggaaactccaagattgaggcgccagcagatgtaatgttttgtgaggacccatttcctggttcatagttgatgcctcttccttgtgtcctcacgtggtgaaaggagctatctagctcttggtgttattttattaaggacccttgtaatctttaatgatttgggtttgttctttttcagttttagtttttgcttcctaggttagacaccaagacagatatttttaaatccttgaggccaggtgcagtggctcacgcctgtaatcccagcacttggggaggctgaggcaggcagatcacctgaggtcaggagttcgagaccagcctggccaacatggtgaaaccccatctctactaaaaatacagaaactagctgagcatggtggtgcatgcctgtaatcccagctactcaggaggctgaggcaggagaatcgcttgaacccagaaggcagaggttacagtcagccgagatgacgccactacattccagcctgggtgacatggtgagactctgtctcaaaaaaaaaaaaaaaaaaaaaaaaaacttggaatgaacaaataacatacctaaaatatttaaatgctctaaaaatttccattgccatcaagttcaggagaaatcaacagcttgttttccaggcttcaaagaaagttgtcttaaatataagtaacacaagttaaaaggtaccatggtttagtttatatgcagcctgttaaaacgaggtgttttcgtttttgtttcttatagaaatagggtcttgctctgatgcctaggctgagtgcagtggtacaatcatagctcactgcagcctcgaattcctgggctaagtgatcctcttgctcagcctcctgagcagctaggattacaggtgcatggtgtcacacccagctaattaaaacaaattttttgtggagatggggtctcgatatattccccagtctgatcttgaacttcttacctcaaacttctcttgccttgctctcccaaaacacagattacaggcatgagccactgcacctggctaagatggggtgtttatgtagcatcatcactaagagctaaaaatacaaccaggtgctgcttgagtcttaacccttttttctaaagttactacatttcaattatatgttaaaggtacctcaatgactaacacattatatatccttcccagcagctcttctctagttgtgagaaaagaacctgatgtacctgtgttctttccaagtggccagctggcagaaagtgtaagcatgtgtttacagactggaccaacagggggtgccagtaacaattctgaaacatcagaggaaccaaaaattgagcatgtaatgcaacccttgcttcatcaaccatcagataaccagaaaatttaccaggatttattggtaagaaaatgtagagcatttcatctttttgagaaggttatttagtataggatatactagttaagcttttcctaggtttaaactgattgagaccttaagataaaaagattttttgtctaattaacaatgtaatttttcttttagcttttcataaattataacttaaattcactaatttaccataaacatacttaagtacttagaaaaacacagctttatttttaaagtataaatattgatattatgcctaattcaaaccaaaattagtattagaaaataagcaagagtttctcggaaatttgaaaattggaaagtagtgggatatttatgataacatttactgattttagttcaggtaagccaatgtttattaaatacttagcttagtctaagacagtaggctaagtgaaatcgataatataaaggtgaatatgacactctgtgcccttgagagcctaggggaaacaacagcacatgcagactagtaacaattataagacaggctgttgaggagtagtagtgtaaagcaaagagaacacagaataaaggggtaattctggttggaggaactagtattataaaacttaaaatgtgatctgggacttaaaggatagagaaaccctgactgtcactttcatccaaattgtagaacatttgatttgtccatttgcgagaaggcaacatacttcacagggccctatgtattcatcaatgaacacatatttgttatttgcttgctaggtcctaggctggtgctagcagcttgtatgctcagggaatgaaatatgcagaaatagtatcacaggtcattcttactttgagaaagtgagaagaaaaggagcctaactctgtgaacatcataaaggcctaatttataactgaaacattatcactttgcaaacgaaagcattatttaaaacttgtttataaaaaatttagcataagtcctcgaaaatacttggagaattactcaaaagatttttttttttttttttgagacagagtctctgtcacccaggctagagtgcagtgacatgatctcagctcactgtaacctctgcctcccaggttcaagcgattcttgtgcctcagccttccaagtagctgggactacaggcacctgccaccatgcctggctaatttttttttttttttttgagacagagtctcactgtgtttctgttgcccaggctggaatgcagtgacatgatctcagcttactgcagcttctgcctcccaggttcaagtgattctcctgcatcagcctttcaagtagctgggaccacaggtgcacgccaccacacccggctaatttttgtatttttagcagagatggggtttcaccatgttagccaggctggtcttgaactcctggcctcaagtgatctgcccgccttggcctcccaaagtgctgggattacaggtttgagccacacgcctgtactcaaatgatttttaaatacgttggtttttatttttatttgtttattttctattttatttatttattttttttagacagagtctcactctgtcacccaggctggagtacagtggcgccatctcagctctctgcaacctgggccttctgggttcaagtgattctcatgcctcagcctcccaaatagccgggaccacaggtacgtgccaccacacccggctaatttttgtatttttattagagacagggtttcaccatgttggctaggctggtcttgaactcctgacctaaagtgatccgcccaccttggcctcccaaagtgctgggattacaggtgtgagccaccacgcccagcttatgttggtttttaagtgaatgaagtctgaacaagcattctgttttctctagggtctgatgaaattgttcattaggatgtgcttctataaaaacttcataatacctgcaaataataccataatacctgcctacttgatactttgtggaatttgacaagatactgattttccctggccttgttgtatcattaaggtcttactgtaaaattgttttttaacttttttttaattttaatttttttagagacagagtctcactttgtcacgcaggatatagtggcacaatcacggctaactgcagcctcagcctcgtggctcaagtggtcctcctacttcagcctcctaagtagctggaactacaggcgtgtgccaccgtgcccagctaatttttagttttttgtagagacaggatctcgctgtgttgcccagggtcttaaactcctgggctcaagcgatcttcctgccttggcttcccaaagtgctgggattataggtgtgaaccaccacacccagccctaacattgttaatagtgatttttcaaaaaaattttttttctttttgtcagggtcaagtaaaccacctattaaatagttcctccaaggaaactgagcagccgtctaccaaagcagtaattatcagtcatgaatgcaccagaacccaaaacgtttaccatacaaagaaaaaaacacatcattcaagactggtggacaaagattgtgtccttaatgcaactcttaagcaactaagaagccttggagtaaaaattgattctcccactaaagtgaagaaaaatgcacataacgtggatcacgccaggtaacttttaaaattttgttttaaagagtgaataaattttattttttaaaaatttttatttatttttgcccatcattggctagatgaataaattttagatgtattgtggcaatctcatcagaaaagttacgtttgtgcctcaattgagttgattcacgatttattcagggcctaccatatgcatgatgaataagagattcttcattttagtgggagagagggttacatacataagtaatttgagagatattgtgggatgactcctggctggataggccaacaaaatactttaggagtcttgaggaaagagaaaggagttttgcttggtagcatctgaaaagtctttctggaggtgataaggtctgttccagctactggatgtacagttacacagtcgtgccatctaaaaagcaaaaatatttcttttttctgggaatgtgcccaactggtcatgtccttctgttcagattcctttctaccaaagatgacctcagcacataacttattaaaaagaaaataaagtctggagattatattattaaggctggcatattttctgttaattattttttgttttctaatttaaaaagtaataaaaattcatggttttaaaaaacaatacagaagagagtgtaagataaaatgcaaaagccacaactccccacattcctgcctgactcttccaaagttacttctcttaggccgggcgcggtggctcacgcctgtaatcccagcactttgcagggctgaggcaggtgaatcatgaggtcaggagttcgagaccagcctggccaagatggtgaaaccccgtctctactaaaaatacaaaaattagatgggtgcggtggcgggcgcctgtaatctcagctacttgggaggctgaggcaagagaattgcctgaacccggggaggcagaggtcgcagtgagccgagatagcgccactgcactctatctagcctggacgacagagcaagactcagtcaaaaaaaaaaaaaaaaaaaaggccgggcgcggtacctcacacctgtaatcccagcactttgggaagccgaggtgggcggatcacgaggtcaggagatcaagaccattctggctaacacggtgaaaccccgtctctactaaaaatacaaaaaattagctgagcgtggtggtgggcgcctgtagtcccagctactcaggaggctgaggcacgagaatggcgtgaacccaggaggcagagcttgcagtgagccgagattgcgccactgcactccagcttggatagcaaagcaagactgtctcaaaaaaaaaaaaaagcaaagttacttctcttaaccatttcttttgtattctagaaatgttccatgcatgttcaagtatatgtgtatgtgataagctttgtgatttgattttttgttgttgttgctgttgttttaattttgagacagtctcgctctgtcacccaggctggagtgcagtggcatgatcacagctcactgcagcctcaacctcctggactcaagtgagcctcccatctcagccttttgagtagctggcactacaggcttgcaccagtacttagctaattttttattttttgcagagatggtgtcttgctatgttgcccagtctggtctcagacaaactcttagactcaagcaatcttcccaccttggcctcccaaagtgctaggattacagccgtgagccactgcacctggcctgtttttttgtttttgttttaaacatgatattataatatcttggatacttttccttatagggatatacagttctttctcttgtatttaaacagctgcataatattcttttgtacccttgtactagaatatattgaaccccagtgctctattaatggacctttaggccaaatctcttatttgttatttcaagcaatcctaagtgaacatcattctacaggtacaagtatctttgtaggataaattcctagataggcaggatcaaagagtatgtgcattcaaagtcttagtagatgctaccattgctcatcaaatagttgtaccagtttatattcctaccaatagtgtaaaagagtgaggctagcatttttgagttttttatccatgttgcaagatagaggctatgtatcctaacccttcccctcttgtcagaactgagaaccaacttgtcacgttagttgtggtttcttactattttaatgttgctgtgatgatcttttgcaaatattgcttttcagttttaggattatttccttagaatagaatctcggaaatggaaagactaaggtaaaatgatacaaaaattttaaagctgttgctaagttgctttctgaaagagtaagtattattaccagctacacatatacatgtgtgccagctaccatttcaccaatacattcacttcaacaaatacttactgagtttctatgagccagcctataagagatatcgtaatacacaagataacctgataaagaaagacatctttgttctcatagagtttacagttcagtggggaagacacagatagtcaatatcttttatgcctgctatgaaatggaaggatagggaatgccatggaatcacataggaaaggtagctaacttaatttataaaggaaaggaaaaaagaaaggtagctaactttaggagtatttcatactgtgttgtaattgatctacatcaaaatggccccttttaaagatctgtactaattaagaccaaaaatatcttaaagttttgaaagttatattttattattgatgcaatatctgtatatttaaaacttttttttagtttttaaaaataggatcttgctctgtcacccaggcctgtcacccaggctggagtatgatggtacaatcataatttatgtaacctcaaactcctgggctgaagccaatcctcctgcctcagctttttgagtagctgggaccacaggcgtgtgccatcatctctatgtcattttgattaaataggaaactgtactgcaatagtttctccaacataagagttaaatttagtttccctgttatcttaggctccgtctggaatatcctcccagcctatctgaggcctacctgattaattcgcattgtttcagtttgacttaaacttagttttttagtataatgtcctaccattctctaccaagttccagcctacttgccattggcatttgcaagattccttgatgttacttttatctgaggtgctctttttttttacctttctgcttgccaaaatccttatccttcaaagctgaactcaaatgtcacctctttggtcagtttcctggacctctcagagtgtattgatgttttgtactcttattgcccaggctggagtgcagtggcatgatctgggctcaccataaccttcacctcccggcttcaagtgatttctcctgcctcagccttcctgagtagctgggattacaggcatgcgccaccatgcccggctaattttgtacttttagtagagacagggtttctccatgttagtcaggctggtctcgaactcccaacctcagatgatccacctgcctcggcctcccaaagtgctgggattacaggcgtgagccaccgtgcctggccgatgttttgtactcttaaaatacctcgttctcagtaaattgtagcatgtacttatgacacattttcagcaagatttttttttttttttttttgagatggagtctcgctctgtcgcccaggctggagtgtagtggcatgatcttggctcactgcaacctccgccccccaggttcaagcaattcttctgcctccgcctcctgagtagctgggactacaggtgcgcaccaccacgcccagctaagttttgtgtttttagtagagacggggtttcactatattggccaggctagtctcaaactcctgaccttgtgatctgccagtctcggcctcccaaagtgctgggattgcaggcatgagccactgctccagcgaagattttatatagttctaaatcctcattgcctctaccactaacttagtgggccttcaatgagtcatttgctgaatgaacgacattcctcctactcaggtcatcaccgacgcttacagtgaaggttcatttttagtgtctttgtagtatttactgtcagtatttataatcttatattgttaactttttaacatgtgtaggtataatataactggtatactaaaagtttataaggccgttgtttagaatgtaagacacatttttctatagaaacagtgttacagattataggttgaatattctaggaaactaatccttataatccatgctgttcctctagctctgtaaatcagccgtcttttatcattgtgtctatgtgaaaactcatttcatgttccagttctggactccaggagcacatcattccgccagaagagtggctaaggcaggggaaggaagacctgctttctattttcctgttaatagaatgccgcagagattaagagagtctaaaggcaggaaggcagggaaaaagggtgccagacaaacctagaaattgtgcaggaaatggagattgtgggttcgaggtctggaagcaacctctacatattcccaattggagtgactttttgaattcaaaacctgtctcaagtagtctctctagttgcttctttaccttgcttcctggctatctgcttagtagttgaaaaactgtgtaggataagtagtagataactaatctggattcaaataggatcatgaatcaaagttgacttttttttttttttttttgagagacagggtctcgctctgttgcccaggctgcagtgcagtggcacaatcatggctcaactgcagcctcaatctcctgggctcaagtgatcctcccactttagcttcctgagtagctgggactacaggtgtgcagcagcacacccagcttatttttatttgtagagatgggggtcttgattgtcatctgagttggaataattttagagcttcccataaattgttgacatgtggctaactcaaatttattcatggactttcatcattccttgtggctgcacatctaatgagattttaacataggcatatatttgtgctcaggcttttaggatttgattagtggaatgggttcctttttgcttttcgtcttaattaccctagtgtttatatgctttggtttctgagtattattgattttttttttagtgatgtggtctctattttgcctagggtggccccttgaatgcctgggcttaagcaatcctcctgcctcaggctcctgagaagctaggactacaggtgtgcataccactgtgcctgtcttgatttgttttgctattaaagtaatgatatctcattgcccctagcccaccctccaaattgaaattggctagcttgtgttaggcattgaaacttgaatagccttctaaactgatattgactactttatggatcttttaaccattctataaaagaagccctagttaaaattaagaggctgggcatggtgtctcatgcctgttatcccagcactttgggaggccaagatgggaggatcactggagctcaggagttcaagaccagcctgaacaacatagtgagaccccatctttacaaaaagaaaaatttttgattagctgggcatggtggcatgcacctgtagtcccagctacttgggaggctgaggtaggagggtcacttgagtctgggaggtcgatgccatggtgagccatgattgcgccactgcactccagccttagtggcagagtgagaccttgtctcaaaaaaaacaaaaaaaaaacccaaattagacctgctttctttaaatatttaacattttgaattagtagtttttctttgcttttatcaaattatttacattaacattatctatagactgaggaaataggcaaagtagaaaaagacttccaaaagtattgtcactatgaataaaagaataatgtctggataaattagtagtatctctttcatcttattaaaatagtcttcaaagcattaaatgccaagaagattaagggagaatttcaaggttgtaaagaccagcattagtgagcacactgttccattgtttggtgatggcatcactggtttcagagaatttttttttttttttttttttttttttttttgagacagagtctcactctgtcacctaggctggaatgcagtgacgcaatctcggctcactgcaacctccgcctcctgtgtttaaccgattctcctgtctcagcctacagagtagctgggattacaggcacccgccaccacgcccagctaatttttttgtatttttagtagagacggggttttgccatgttggccaggttggtctcaaactcctgacctcaggtgatctgctcacctcggcctcccaaagtgctgggattacaggcgggagccaccatgcctggcctggtttcagggattattagtggttggaaatagttttttgcgaatttcaggtgcttataagaatgaaaatatataatggttgtttgatttttgtgggtctgtgaatgcaagcagtggctagcacatataaaacagctgaatttcttcatgggatgatgtagaaagccatagcatatttgactagaatataatgttcaccacaacaaatagtgcacaaaggactctgatagaaaaaatccaagttactgaatatagtacagtaaaagagtggttgcagagccccagagagtaaggcagtcatggattatctcagcttgctatgtactatttagcttggaaaaaatagctcaaatctctattcctcagttttctcaactgagagtaaatataacaatagtacctactacttttattcattcaacaagtacttactgagtgcctactatgtgtgtccaggcatcgaggatactgcagtgggggccaggagaacagacaaaactctgtccttattggctttcatgagggtgctagacaataaataagaatcgagcattgattgaatatgtagatgtgtgtattcaatgtatagaccgcggtaagtgctaaaaagaaaacaaaaaagtaggggaaagggaatgtaagatgttgaaatggagaataagatagaaatattccatagagaatacctccctgacaaaggttactgtaaggaatgtatatgaataatgcatgtaaagcattaatagagtacctggcatatataacgactcagtaattagcaggctgggtacagtggctcacgcctgtaatcccaacacttttgggaattcgaggagggaggctcgctttacctcaggagtttgagagcagcctgagtctgtaattgtgccaacattagcaaatgacatgcagttgccactgtactctagactgggcaacagagcaagaccctgtctccaaaaaaaaaaattagcagctatttattatatatgtgatattaaggaaaaggtaagtcagttgacttaacactaatcaaagtaagttgaagattataactaatgaaaaaagtattcgtgtgtgtgtgtgtgtgtgtgtgtgtgtgtgtgtgtgtgtgtgtgtataagcccatatccagagactggttgatgttttttattaattgcaaatggaatctcttcaactatgaacaatttaattttctgagctacttactaaagcttgtactgttatataatcaaatgtgttttgtgtttgattttatttttatgttttactttacattaaacattagctgatctcttgtgctgtttgggctaatagtcgtaaattaaatgactcatagctatgttgatgacttttacatttggggccttgtatttgttcttaaaaccatgactgatatacagatttaggaaaattaatttgtattccactttaaacctgtaaatcatggattaccttctaggctattatttgtatccctttttttattttttctttattttttcttttttaagagacagggtcttgttctgttgcccaggctggagtgcagtggcacgatcatggctcactgtaactttgaactcttgagctcaagcaatcctcctgcctcagcctcttgagtagttgggactataaatgtgcaccaccatgcctggccaatttttaaatttttttgtagagacaagatcttgctatattgcctaggctgatcttgaactcctggcttcaagcaatcctcccacctcagtgccccaatctgctgggattggaggcttgggccactatacccagcccatatgtatcctttgtgtatctggatcatcaagacttagatgtctgagtagttagataaaaggaccatgaacttaaagctgaagatcttttgttgcttgtatagaatggaacacattgagaactatgtattacttagaatatggtaaatgatggcttactactttgtgtctttcagtgtgttggcatgcatcagcccagaagcagtgatctctggattaaactgcatgtcatttgctaatgttggcatgagcggcttaagccccaatggtgtggatttgagcatggaggcaaatgctatagctctgaaatatttaaatgaaaatcagctgtcacaactgtctgtcactcgatcgaaccaaaataattgtgacccattcagccttctccatattaatacagacagaagcacagtggggcttagtttaatttcaccaaacaacatgtcatttgcaaccaaaaaatatatgaagagatatggactcctacaaagcagtgacaatagtgaagatgaagaggaacctcccgacaatgcagatagcaagagtgaatatttattgaatcagaaccttaggtccatacctgaacagcttggtggtcagaaagagccttctaagaatgaccatgaaataattaattgttctaactgtgaatctgtggggaccaacgcagatacgccagtattgagaaatattacaaatgaagttttgcagacaaaagcaaaacagcagttgactgaaaagccagctttcttagtaaagaaccttaaaccaagtcctgcagtgaaccttcgaaccgggaaagcagagttcactcaacatcctgagaaagaaaatgaaggggacattacaatttttcctgaaagtttgcaaccttctgaaacgctaaagcagatgaatagcatgaattcagtaggcaccttcttagatgtaaaacgtctcagacagttaccaaaattattttaaccttttaactccctgcccttttaatacagggacagggtgtctcctgaagatacttagggaaaacaggagcctaccacaaggctcctgatcattctggagtcactgtttcttggtagcagccaattgggaagagtgacttctgtgagatggctggctggtgataggactaagttctcattgttcaaatagagctgttcaacatcactgaaacctttaagaaaagccctgagatcagttattcctacaagtttaagtagtagacagatactatccagctctaagtctcaactgctcttttatactgtacttttttttttgagacggagttttgctcttgtagcccaggctggagtgcaatggcaggatctcagatcactgcaacctctgcctcctgggttcaagcgattttcctgcttcatcttcccaggtagctgggattacaggcatgtgccacaacgcctggctaattttgtatttttagtagagactggtttctccatgttggtcaggctggtctcaaactcccgacctcaggtgatccgcccgcctcggcctcctaaagtgctgggattacaggcgtgagccactgcgcccagctatactgtatattttaagaagttccagcatgttgcatctctgcatttatcctatatcattaaaagaacataagttatcatggtgttgggtaaattagcgaaatcaacccttcctaagtttaagggaaaagttatttttaaaaacaacttaataaaaacttacactcttttatacaagagtgtatttccccttaattaggatgcatgttgattaaactcgagatacagctttttgcagtatggtgggttggttttggtgtaacatcttcaacatgtcacactggctatcaaagaataagaaaattattgagtatgagtgtgttttataaactttctgagtttttcagatgtcttaatattttttaatagaacttaataaaatgtctagattgactattttcctttgttgtctgttatagtttattctccactttttaaaaaactcttagactgcccccaaattacaaaaataatacagagagttcccgtatacccttcttccagtgtcctccagtgataatatcttacataagcatagtaaatgagcaaaaccaagcaattgacattggctataatgctaataactgaaccacagacctatcaggtttcacaagtgtttacatgcactcatttatttactttttggtatatagctttatgaaattttatcttttttttcttcttcgagatggagtcttgctctgttgcccaggatggagtacagtggcgtgatcttggctcacagcatcttctatctcctgggttcaagtgattcttgtgcctcagcctcccgagtagcttggattacaggcatacaccaccacgcctggctaatttttatagtttcagtagagatggggtttcaccttgttggccaggctggtctcaaactcctgatctcaagtaatctgcccactctgcctcccaaagttctgggattacaggcatgggccaccgctcccagccatgaaattttatcttttgagacggagtcttgctctgttgcccaggctggagtgcagtggtgcgaccttggctcactgcaacctctgcttcccggattctagtgattctcctgcctcagcctcccaagtagctggaactacaggtgcatgccaccacacctggctaatttttgtatttttagtagagacagagtttcaccatgttggccagtctggcctcaaactcctgacctcgtgatctgcccacctcggcctcccgaagtgctggttataggcgtgagccactgcctggctgaaattttatcttttatagaatcacataactactaccatagtcagcatacagaactattccatcaccacaaactccctagtgctacccttttaaaacacacggtctctccaaccctaacccccagcagccagtgatttgttctccaccactagaattttggccttttgagaatcttttatataaatggaatcatatagtgtgtacctttttgaaatttgctgttttcacttggcatgatgtcctaagatacatccaagtcgatgagtgtatcagttctttcctggcacatcccccacaacctttttaaaaggtcttaaattgttacatttgaatataaattaaagagtcctcattgagttgaaagataaggcttttctgatgaagttaaattgagatgttgttgcttcatatcaaagttgatatgtaaactggaaataaatggactttggatccattttcaacccagctgtggctttctgagaaaacctgatatcactttacagtagcaagcccaagtgtagtaacatggtggctccctactcttccccactggagccatggaccagttagtgcatctttccctacatcattgctctttcaagttaaaattaagacatgtaagtggcagtggtgatgtcttgccctgtgtttccatgcacattgtttgagactttagttattttaataaatagcataaaaattcacttacatgttttattggagtaagtttacgtaatggaattgtcagtgccacttcaagtgtgttctgtttagccctcagtttcactcaacgagtgtagatacgatttatattgcacactattgaagaaacagtgaattaactgacagcctcatcaagtacctttatcactgggagccctgtaatgtttataccaaacgaagctatcttaatagtaaaaatggaacctaagctttttaggcaaagtctaattaccacatccaatttaaggccacatttaattttttttttttttttttttgagacagagttactttttcgccctggctggaatgcagtggtgcgatcttggctcactgcgacctccacctcctggggttcaagtgattctcctgcttcagcctcccgagtagctgggactacaggggcgtggccccacacccagctaatttttgtatttttagtagagacgggggtttcactatgttggccaggctggtctcgaactcctgacctcaggtgatccacccaccttgacctcccaaagtgctgggattacaggcatgagccaccgcacctggccaaggccacatctaattaaaatgtctaagcagttttggagcctgaatttagactgcagattaattcaacaaaacaatgtctctttctactaaacatgtgccaagagaagaggaaccattaccgaagcctactctggaaggtgttttacaatgagaaggttgatagagtttggatgtttgttcccaccaaatctcatgttgaattgtaatccctaatgctggaggtggggcctggtgggaggtgtttgggtcacagggacaagtccctcatggtttggtgttatcttcaagatagtgagttcaggtaagatctagtcatttaaaagcttaaaaagtgtgtggtgcctaacccgcacccctgccaccaccgcaaacctcctttctttataaattacccagtctcagatgtttctttagagcaatgcaaaaatggcctagtacaagttatttggcaaattagttgctatgatagcttttaggcatctttagagaaagcattagtactgggaaaattggattttaaaattttaggtcgggcgcggtggctcacgcctgtaatcccaatactttggttagccgaggtgggcggatcacccgaggtcaggagttcgagaccagcctggccaacatggtgaaaccccacctctactaaaaatacaaaaattagttgggcgtgatgccactcccctgtagtcccagctactcgggaggctgaggcaggagaatcacttgaacctgggaggcagaggttatggtgaatcgagatcgcgccactgcacgcgcctgggcaacagagtgagactccatctcaaaaaagaaaaaaatactttggagatacttgcctatcaagtgacatatctctgaatttctttcctccagtcctgcagcatactgtttataagataacatggatgctacttcaaatggaataggaaaatgatggaacttatattacctaacttctgggaaacaaacctgttagtccgagtcctggccagttggcaaccactcttaccccacttcgccaaaagtctcctcactcaacctctaagccccttgccggttagtttaaatcaataactactccatgctccacttttgtcctctgctttatcctgccctgtgctaagccccacagaagtggatgtagacatgttaaacagtatccttgcctttgccagctgtaaagattctacagaaaacagatacacccaggaaatagtcacaagagttatgagagtatgatgaaaagccaacatgaatgatctagactctaaggagccaaaacaatgtattggtgatcatgtccatctttttaagacttactgtgtgctcacagggcactgtgcagagcacttcacatgcattagttcatttaagactcctggctgacaccagttggtgatagctatggtttgaatatctgtcccctccaaacctcatgttgaaacttaatcttcaatgtggcagtgttgagatgtggggcccttaagagctgattgggtcatgaggattctgccctcttaaatgggttaatccattcatagattcatggattaatggtttatcatgggaatgagactggtggctttataagaaaagggaggccaggcgcggtggctcatgcctgtaatcccagcactttgggaggctgaggcgggcggatcacgaggttaagagttagaaaccatcctggccaacatggtgaatgggcgtggttgtgcgtgtctgtagtcccagcaactcgggaagctgaggcaggagaatcgcttgaacctgggaggcgaaggttgcagtgagtcgagattgcgccactgcactgcagcctggcaacagagtgagaccccatctcacaaaaaaaaaaagaaaaagaaaaggtagagagacctgagctagcatgctcagacccctcaccttggatgccctgtgccacctcaggattctgcagagtccctgacagcaagaaggccctcacaaaatgcagcccctcaactttgaacttctcagcctctgtaactgtaagaatgaatttctttttataaattactcagtttcagatatttctgttataggcaataaaaacagactaagacagtgattgttatcttcatagttgagggaagagcctcaggtaagtaatttacccatgtaagttgctaccagagattcaagtttaagtataactctagagctcaaggtcttactaagccattgagaaatataacctctccggcctgaggaattcagggagagctttctgcaagaaatagatcttgagctgaataaattatttcaaatactacagccaatgctgtctttaaatactgtgctctcctccaagctgccccactttccttttcttcaggaaggaatctcttgccctttagccaagaccagaagcaatcattttttactcatatgttctgaagcaggcaaccccagctctgttaatgttaaagtgttcacttccattgattttacaatgtgataaactagtactgagtctgtactataagggctctgggaaattggaggaataaaaagttccttctgtgcccttgttttctaggcattgctcctgaaggcagaaccttccctagcctcctagattaactgaggggcccttataccagcaatataaatttcctgataatgtctgacgtttgcagactccttcacactttgcaaagtgcttttccacatatttttcacatagaattctcacaacaaaaccctactgaaatatgtatggcaggcaaaattgatccctttttaccaatgatgagacagaaccaaagtataactgggctaaaatcatacacttatagttaacaagcaggacaccagcctagtgtccctccacagcatctagcccaatgcagccactccctccacctttcctctacgcaccagtatcgtttttgcacctagtcattcaacagataaataatgttgatcctgctggacaccgagctagaagctgagcgtaagatgatgaataaaatgtgccctctaggaactcagtctaatgagggagagacacgcaaacattagcagtaccattagataagtgcttataatgaaacaacacaacgtgagaatataagagaagatgggaggttattttcagaatattctacagaggcggtgacattttcccagaatcaggagtaataggaaagaaaagaggagccggggatatttctgatggagggaaccacttctgcaaaagcaaggagctatgaataggtatagcatttggaagaggggatttggggaagggaaccaaagataggaaagaaaagacacacaagtagatagaacaccaaattaggagtcagcaaaaattggcttcctgttgttgctctgtcccaaactctgtgacattggacaagtcactggcttttagtttctcagtttttgaggtgaaggggttagccctgagtttctctgatatgctgtgattgtatgaaatgatggtgtggaaatcgtatgtgagcagttgtttgaaaatccagaggagagaaaggcttcctgcaagagagagcactggagttgggctttgaaagattttgaaggatttccacaggcagaagtgatatttccttactttttatttaatacagtgtttaacatatttcataatttaaaaggaaattctgtcattccccacaacagtgttaagtactatctgttcaaagtaccaacatatctttcttcagctctgaattacgcattccgtttctaaggagctcaaaacataaagcccatgaaaaggtgctttaaggtttggaagcctggatgatgctccctatctcttcctccccactccccaaaccggaactgtctgggtcacagagaacatcctcagaggaaatcctgttttcccacttcctggtcagaggctgaactccaggaaaaggatggatttggggagagctctgtgtcctgcctcttcatgggaggtctggggccacaaaggggtgagggaggggctgatcacaaacacaacggaaagatgacatcaggtatccaagagtgtgagagcttgagggctttaagcaatcacttagtcctcctatgcgtgaggaccctggggtccaaagaagagatgggacctgctcaagttcacacaatgttgtaagcaagagctggggctggaattcaggactctagccttccaggttttactaccatatgccgtggcatgtgagtcagaaagttaggtactgagcaatcaaacccaggcctctctgttcgcctggacataccacaaaggacagaaaaggaaggcagcccccatgcacgcagacactcttcagccttcttacctttgcttacattactccctttgcctccaaactctctacaggttcaaagtcctgtggacccccgaaaacctctgcctcccctcccatcctaaaagaatcttcctggaatcctcatgtggaagtgatattatccttcttagagacttcatagcaggccaagcacggtggctcatgcattataatcccaacattttgagagggaggatcacttgagcccaggagtttgagaccatcctgggcaccatagggaggctctgtctctacaaaaaaataaaaataaaataattagctgagtatgatgccatgtgcacctgtagtcccagctactcaggagactgaggcacttgactgcaggagatcaaggctgcagaaaagaaaagaaaagaaaaaaaaaagaaaagagaagaaaagaaaagaagttccatagcgctttctctggtccttgtcttgtcctctcagaattcattacaaccagcttgggagctcctcaagaacagggactgtgtgtgatcctcttgtccaaggaagagctacacggaaaagatctgctgaatgctcctgctatgtcatgggcgatgtgctagactctgaggagcataacgaagaaaaagaaggtgctgttagatcctagtgttgtaggtgtgcatgtgtgcatgctcggactcatatgtgcagaatcatattcatctaacactgatcagagtcctactcagtatctcatttagacctcaaaatagcccttccaggtaagtggaagcaaatatgcagcttcacatgcagacactcagaagtactcagaattaccaagaaatgggacaaatcagaagaaaagacctgcaataagtgacaaactcctggttcaggatagtggaataagaatgagattgagggaaggaaaatgaaactattcttagagatctttttaaagaccagaaactgtctgctatggaaccaatactatttgcttgccgcattggggatcagtagggtttaaaggaaagcattattacacatattccttcatctaatcatcacaatttggtgcagtaataacaatacttaacctttactgaacacacctgctatgtcttaagtctgttacatttgttaactcatttattccttacaactgtatgaagtcgatactattctaatctcccatttagtaggctggaaataggaatagagagattaagtaatgtggcccaagttcacacagccaatatactgattcaaatcttggcagtctggttccagatctcatgcccttctttttggtagagatggtgtttcaccatgttgcccagattggtcttgaactactgggttcaagtgatctgcccacctcagactcccaaagtgctaggattacaggtgtgggcccccacacccggcccagatcccatgctcttaacctgaacatcagattaggattatccctgtgaggaaatggagactcaagcgtaaagtgacatgcccaaggccacacaggtgaattaagtggtgaagtcaggatttgaactctggcctgtgtggcttcagagcctaggttctccttctttttctcctccttatcccttgggagcagcaggttgaaataagcatgtgcttcagttccctaaaaccgatgttcctaccttgataaagtgatactgggtcttagatgctggttggaaggggagcaggttcatgttttatagctgagtcactcctgtgagtgacttgctccaaacccccaaaaacacgaggggcctgtgctgtgactctccaagacctctgcttgccctcacctcccaacccagcacagagaccatctgtggagatagggagagtctacccatccccaaacccccattaaggcctgcatttcctgggctgtcccaggaaggggctgggactcacagctcatgcagtcatggaaatatttatctctcctcacaaggacatacaggatgtactttcacatttccctgtggctggtttctaggaccaggagggctagccagttccgcttccttcaagttcatggcccaggttcctgctgggtgatttccctttctctcaatttctttctccagctctgtctctgctcctcttatttttaaaacatacatatatttgctcctactctgcctccatgatatgctggggtatagacaaaccacggatgtggtcccagtttttgagagtcttggtggggtacacagacaccaagataagtgtggttggcaccatgttgtgggcatgtttaagggacacaggagaaggagctggaggaagggacacaggagtagaggaaggaccttcagctccgctgcgagtcccagggcaacctaactccttggctctctctgccttgaggaggttcacgtggtgttcacccttccccctcctcctgccacccagttcagcagggcccaattccccaagggtgtggggaaacaagacaatgtgggagccgggcgtggtggctcatgcctgtaatcccagtactttgggaggccaagtcgggcggatcacaaggtcaggagattgagaccatcctggctaacacggcgaaaccccgtctctactaaaaatacaaaaattagctgggtgtggtggcgggcgcctgtagtcccagctactcgggaggctgaggcaggagaatggcatgaacccgggaaggggagcttgcagtgagctgagatcacaccactgctcttcagcctgggcgacagagcgagaccccgcctcaaaaaaaaaaaaaaagacaatgtgggaataacccaggagaagcaagatgcccacctgtgtgccaccaaaggactgagcttatgtacaaaattttattctattcctctcaatttttgtaagcctctagcaggcacacaccttagtctcctgaggcagtgcaaatggattcttgggtcccctcacatccccagcagccagcacagggcccagcactactgctcagaaagtgtttgtttaaaataaacaaagaagcaagggccatgcccactgtacagactatgaaactgagttccagagagagtgaatgactgccctcctcacaggttgcagtgagccgagatcgcactacttcactccagcctgggtgacagagtgagactctgtctcaaaaaaaaaaaaaaattgatacttagtaactgtggaataaaatgaatgaatgaggctacaacactttgggaagccgaggcaggtagatcacttgaggttaggtgttcaagaccagcctggccaacatggtgaaaccccatctactaaaaatacaaaaattagtccggcgtggtggcaggtgcctgtaatctcagctactcagaaggctgaggcaggagaaccgcttgaacccgggaggtggggttcaagggattctcctgcctctccttctcactgcaacctccacctccagggttcaagggattctcctgcctcagcctcctgagtagctgggattacaggagcacgccatcatgcccggctaattttttttatttttagtagagacggggttacaccatgttggtcaggctggtctcaaacacctgacctcaggtaatccacctgcctcggcctcccaaagtgttgggattacaggcgtgagtcaccgtgcctggcctcatgtgttatttttacctctattttagagatgaggaaactgaggcacacagaagtgatgtaacttgcttagggttatcagctgctaagttgttgaagaggcattctagtccagggtggcgtgaaagtcaaccatgtgctcttaatcagctataggctgtgtcctgtggcatgggttctggactgggcacacgggctgggccgtgtggaggagagggccacagcttttcttgggaactcagagcttctgccagagtccagcaggccgaatcccctgcatccagtgtaccaggcgtgtgtgtctcctgaacggtgactttccaaatctctccccttccctttctacccttcttttcatttccccttctccccagtcccatatagctgatagaccagcttatgcctttctaacaggtccagcctgtcgggaatgtggcaagagaatcggcatgccttgcttctatggggtacctgtgcacagctggagctcttattgacagcctgaacagagaccaaaaaagaggaaggaggcaatgatgagaggcagattaaagacagagatggagagacagggccggggtaggaaagaggagcagacttagagacagagagaatgcacatgcgcttaaaatagagatggcatgatgagaagcagagtgaaagagatgataagagataaaagggagagagagatcctgtggttgccccaccccattcctattacagataaactgagggtcacagaaagacgtaaccctacttcctggcagatgtctctgtcactttttcaaataccattaattcagttcctcccttgtctacagatccttttttgtgccctgtgtgcctggccctgagcagcatgagttagactgtaacggagggctccagggtatgctaatcaggagagcaagtggtgagaggaggagatataaatgcagctgaggacagtattgatcagaaaaggtttcctggacaacataagattgatgtggggccacaaagaacgtttatagtcaattttttgaggcataatttacatactataagatgtactcattttagtgtacagtttgttgagttttgacaaatgcatacactcatataaccaccaccacaatcaagatatagaatatttcctttatgcagaaagttccctgtgcctctttgcagtcatatgtcctcttccatcacccctgatctgagctttgccattagaaattagctttgccggccgggcacagtggttcatgcctgtaatcccagcactttgggaggctgacgcgggcggatcatctgaggtcaacatggtgaaactccgtgtctactaaaaatacaaaaattagctgggagtggtgacaggcacctataatcccagctacttgggaggctgaggcaggagaatcgcttgaacccaggaggcggaggttgccgtgagcccagatggcgccattgcactccagcctgggtgataagagtgaaactctgtctcaaaaaaaaaaaaaaaaaaaaatttttgctttttctagagtttcatataaatggaatcatatgctaaatagtcttttgtgtctggcctctttcactgagcctgttgttgagaggtctatattctggcatttgtcagtaatttgtttcttttttattgctgagtaatgttctattacatgaatgtaccacaatttgtttaccattcacctgttgatggatagttgaattgttgttttttgctttacaaataagggttctatcactgttaatgtacaggtgttcttgtggatatatatttttcagctgtctcagtaaatgggtgtttataaactgcacattcataggaactgcgaaagagttctccaaagtggctgagtaatttttgcatttccttcaacaatgttgctggagaactccagttgctccttcacatcctcagcaatacttggtattgtcagtcttttaaattttaatcattttagtggatgtgtcatggcatctcattgtggttttaatttctgtttccttaatacaagttgaagaatcttttcatgataagtttggctatttatcttctttaaggtcaaaggatttaaaccgggggatatcacaatgctatccaaagtgttcaagattttgaaacagttctcccaaagtaacacatagttcattctagccagcaggaatggagaagacaccggggctaagctgacttggatgtataccaagtgagtgactgggtgagatgagcctgtttcctcatttttaaagtggggatcacacaagcagcccggcaggttatagtggaggatcaagagacagaacagcggcagaagcaggaagcagtgcaggcacacatggcagtgcccaggacatagagtccccttcaggggcccaggagtcttgtccacatgtattaatgtgtactcctgggccaggactctgtctcagtgagcatcaacgactatttgctagccagagaactggtggctatgcacatgttctgtccttttctaacagctctgggaataaaatcattgatggcagagctattggggttctctgctcatgaggacagttaagtttagacactatctcttctgtaagtctggaaagcaacttcggtcttctgtatgctttggtcttccgcatgggttagggaaagggaaatggctttgaaacattaaaaagcacaggccgggggcggtggctcatgcctgtaatcccagcactttgggaggctgagatcggcagatcacctgaggtcaggagtttgagaccagcctggctaacatggtgaaacttcatctctattaaaaatacaaaaaaggccgggtgtggtggctcatgcctgtaatcccagcactttggaaggccaaggcgggcggatcacctgaagtcaggagttcgagaccagcctggccaacatggtaaaaccctgtctctactaaaaatataagtaattagctgggcgtggtgatgcatgcctgtagtcccagcttcttgggaggctgaggcacaagaattgcttgaactcatgaggcagaggttgtggtgagccaaaattgtgccattgcactccagcctgggtgacagagggagactctgtctcaaaaaaaaaaaaaaaaaaaaattagctgggtgtggcggcatgcacctgtagtcccagctactcaggaggctgaggcaggagaattgcttgaacccaggaggcagaggttgcagtgagccgagatcacaccattgtattccagcctgggagacagagtgaaactctgtctcaaaaaaaaaaaaaagcacggtgttttcttaacacaattttactttggcctttgctacagatgggggttgtaaactagagaagtggttctcaaattttgtgtgtgtgtcagaaatcatcaggaaggcttgtgaaaacaaattgctgggcctcaccctcagagtagtagtagtaggcctggggtgaggcctgagaatttgcttttctaacaggttcctcggtgatgctgaccatccactttgagagccactgagagtgaagttccttccatccctgagaattctgacagcagcgttggggtttggaagcacagacgtgactcccaagctcggaattcttgaggcctgcttactgatggggtaggggttcttccagggcaagagacagaggcaaaaatggagagaatagtcctttgaaagtggaagagggaaataatgacatttcctcaaattgaaattttcctcattaaaaataatccttatataaacagtattatgtatggaaaatgagcacctctcttctgcaaataaggaaagtgaacctcagagattaagtaatttgcctggtatcatacagctggcaactaggggagcagggataggagctcaggtctgcctgaccattgtgcttgctttgctgctttcgaagcactgtggcctgaagccagactgccctaggtgtgaattttgcctccaccacttacctgctgggtgttctctgcaagttgctcaacctctctgtgctacctacaaaatggagtagtccctacttcattaggttcttgcaaggattaactgaattaatacttacaaagtgcctaggacagtacttgtcacacagtaactgcagtgtagatttgttaaaaataaactcggctgctcatcagagtgcatgcatggcatctttccggagaagaagctcgggggagaagctcagagatagtccagtactcagagagggcaggcagaaacacttgaaaaatggtaagaggcttggctttggggtttagggagaacccaacctttggtggtggggaacaacggcctcagggccagagcctagctagcctgttcttgtcccctgctcttgctgccccagttccagactccagacttaccagtctgggtctcaacctcccctccctcctcgccacccccaccccaggcgctccgggtttcctgcccgactggggcctccgtttggggcgggtggaggaggggtggcatttcctggctggccccggcctgtcactctctcgtggacgctcggacaactcgctgaccgacaggcaccagatgctatttcaggcagcgccccgcttagcgcacagcttccgtttttccactgaccatcggaaacaggggagggggcagatgtagacgtcatgagaccccagcccctggcagggctttggtggatgaggtcgggagtggctgcctgactgtcagaatctggagcttggcagagaacaaatgtgtggaattggagggttggtgaacgtcacctcctcgctccacagacagaggcctgggcacaccctctgccacagggctgagaaacgcctttccacctgtccatattccttcaccacaggaaaggacactttccttggaggtgctggctggggacatttaatgccctgtaaaataatccaacagtctgcaggtgtctcaaaggcatctaaacttaaggagttcaaaaccaaatatataagccctccccatgtcccctcagcctccaggttccccatctccaggaataaccaccactagctctgcaggacagccagaaacccaggggttttcctggattccttcctctccctcatccccccaaacccaattctttttttgtttgtttgtttgagacagagtctcgctctgtcgccaggctggagtgcagtgtcgcgatctcggctcactgcaacctctgcctcctgggttcaggtgattctcctgcctcagcctcctgagtagctgagactacaggcgtgcgctgccacacccagctaatttttgtatttttagtggagacagggtttcatcatgttggccaggatggtctcgatctcttgacctcgtgacccgcctgcctgggcctcccaaagtgctgggattagaggcatgagccaccatgcctggcccaaatccaattattataaacccagttttataccccaaatacatgtcatcttcacttgcctcttgtcatctcttctgccagcacagtggtccaagctctaatccgcttcccctaaccactgcattggctccacaactggcctcccagagtccttccccctccacacttcatccaaagaactttctagaaatgcaaatcttattctatacaaggtaccacccccaccttcaaaccaaacaaacaaaaaaatgtcaaaaaatcttttaacttgtccacaagcatgctccagccatactggacacttttctattcttttcacgaacctaccacccttctgttctagcccttggtccagctgtttcctcagcccacctggaaggttctggatactgatgcttctccccaccccccttcttcgcacccccaaatttcactcttagatctcagtccaggcctcattttctcagagaagcagtccccacctgggctctcccatatgggaatggctagcctgtttttacagtggctcagagacatgaaatcacttctctaagggtcccacagcccaggaatggcagagttgtgtttcagactcagaattatatgactctcattttctaataagtgatggagccaagcaaaggccttatggtaggggggaactagactttttcttaggatgtgggattctgtgagagttatctgtatccccatgacagcctgacttccttcagagagcacaggaggaacagaggggacaggcggcactgaattaactgtatcttctcagagggtcaacctgatgaccaaggagaagccagatcccagactggggccatgctctctgctcagtctttgactgggactcagtttgttaccagagtaggggttttcccccagttctcaggctccaaaaaaagctcaaaagcagagacactagaaggacaaatcagcctggcatggaaagtagagttgtggactgggaattggacaccaaagtttgggtcctggcttttcctttgggttactgtaagttttggctaagtcacatctctctgtgtcttaatttctttctctatgatgataaccagaactcccatgcaagtgcatatgatgttttcctgggctgtggactgagtgacgttccatacattattatcctcaccaccaccttttaaaggtcatataagttagttctcataactttgtgacgtcgacattatctccccattttacaaatgagaaaactgaggttcagagatcagtgactaaaattcgaacatgtgttctttccactccaccatgaaagaatgaacccagagaccctccgtgggctgagcgcatcatccagctggcactgaactcagatttctaccccacagtaaagaccctggtctctgcaatgagttgagcccaggtccctttccctggctaggttttggctgcccctcttcatcagctgagccgcagagaagactccgtgtcaaatttccttccaaggcagactccaccaagcactagctatgtatcattcgaaaagttactttgactttctgtgcctcagttttctcttctgtaaattaaggatccagcttctcaggactgtttgtgaagagtagattagtatttgcagaatgcctagaatagtgttacagtcgctagattaaactttttttttttttttaaataccatgtggggagcagtgttcctgggctctgggctcagcctgaaacctagcagaataggcattttatgtccctattgacaggggttctgccaggccgccgtagagcccatggatttgagttaccggctctattttagaagggggtgaagaggtagggaagggctggggagctttctgggatagggagactgcccattgaaatctgggtgtctgggacactggaggaagaataagaaagaagccctgggaggtgacgattttggtatcatggtggtcttcagaggtagggacagagtgctggggtgagagtcgctgaagaaaggtgtctgaaaggttaagggactgaggttgtgggaagctggggttcctgagaggccttgggattagagatgggggctggatctgctgggtcctagacagcgcgtccaacgctccccgcagcgcgttccggagccggtcctagcgccgctcaaccagtccccactccctccggtgaaattgccaaattaaaatgaatcatttggcccataatggccgaggcgcttatcgggggcgggcggacccgcggcagtgccttatctctgcggcgcacacggccccggcgcgcctcggcccatgctaacgaggcctggaacgtgagtgggattacagcgcgtcggtggaggggccgggcgggcgcggggcgggcgggggagcgggggccgcgggaggggccgggccgccgccgctcaggaccgggcctcaaaatggccacacgcgtacccccgtagcggaaaaacgtgagcattctggcctttttctaggggaaaagcaacccgcggcctcccaccgaattcttcatcaatttcctcctctttttccccacgtccgcaaaagaggtcttcgctccctttccctcggttcctttcgatggccggggggggcggtgggggggcattttccacggacgcccccgccccggctgccgccgcccctcccgcctcggagactctcttccttccttcccccttttccttacgcaatatacagaaatgcgcgaggctgtggttggttttcatttcttcttcgtggttgtgtgcatgcggtgggattgtgagagtgcgttcatgagaactgtgggcggcgttggctgcttctaagtgtggtcttcttggcgacaggctctgtgtccgagtgtggtgtgcctgcgcggttggggtgtgtagatgtggacccttcgaggcccttctgcgttttcttcgttgcgtacgattgtgctccgttggtgttctcagcagggatctgattctgtgtgtgggggtgtgtggcccctgcgactgtgtttgggtggtgtcgtcgttatgtcgggcgtgtgtgatcccgactgtgctggattgtgtgtccgtgagccgctgcgtttgactgatttcgttgtgtcctgttgggcagtgtgcggggctgaccaagtcggcttctggggcagtgctaggtggtgtttgtttgctgcccttctgtggggctggaccctgtgtggtcctgtccgcactgagttgtatgcctgtgtgcctgtgtcctttagaggtgcgtttgcaaatcgctgggggcgggagtggggggagggcgagcgagagatcgaggcgctggtgggggcggcggcatgggggcggggagcgggatttcacattttattccaaattatgatgtattcgggagccagttgttggcttgggtgggcggacagcgcccggtcggcggctgctctgcccggaggcccgcctgtgcctaggtgtttgaggggttcgttggtgagtgggaggctcctccaggcttgaagctgagcagcgctcgccgaggccggcgccttcgagccggtagctgcgggcttcggttcccgctgcactccggcttcatccatttctggtcagtttcgtgggtgcggccgccgggctccaagggagaggccccgaaaggacaatgggcacattcaccaggcctcgagcctcgggtggggacattcgggatcacctcctgggaagattttcccgccccctcttcgggtgagcgacgttgccgcttgggtctgatacccgtcgcatccgagaccgaggccgaatccgggctctgggagggaccgggttagtggggccctagctcgggttgaaagaattttgttttgtcaattattgtaattgctaatgccatcaccatcacaatcgtcatcattaacatctattttaattaaaataatcatcccagagcgcagcagtttgtcccttttggctcctttggcgggagaacaaagcagcgggtttttttccgctacagccgttttctaagttgctgggtttgaggtaggaagagaaaatggagagaggcacggacacagagacttggtcataaggcaaacattaacccccagcgaacacgcaacattaaccccccgcgaacacgccgggaatggatggattcccctcttctttcctcccctcccctcttttggattagaagaggagaaagaaaatcttccgcattgtattgcaatccagggaagaattattcctatatgtccaccaaagccgcggcaaatagaaggaggccttcgcagttaatccaagacttcgatgtgtgatcataagcctgacgatttaggcaaaacaaattaaacaaaatccactaggaaaaaataaaagcaagctcaatcctgctacatccttgaaagtagtgtcgggtttgtttttacctcctttccttttaccttgtttattgctgtaacaaatcattagaattctcccttactctgtctaaaccccgaaaaatcgaaaatcatttcgtaggggtggtggaggggaaggtgggggacttttcccctttgtttctttctttccccctttgttggtctttatttccttttctttttctgtctctctcttcctctctctttcttctttctcttaatcagtagggagacgagaaaggacctgaacagatcagatatctctctccaagcccccttcccaactccatttctgtaggaaagtacagcccctggaattgggttctggtttcgctttgggctggaggtgggtggatgggggtcagagagagaatgaggtgggggggacttcaaggttctgtcccaccgaccagagtctgaagactattcgcctttcccaacacggacctccgcccatccaggcccgggactatcccttcgcggtgtagcggcagccggagacctggctgaggaggcaaccgcgtagacacctccctgcttagaaaacaaacactgaaccagaccgatcccagttggagggttcgaaaatgttccagacagcctgtcgggaggggttgttgttgctgttggactaaatagctattcctgattggtcatgtatagggttttttaaggcgggtggggggaggagggggtagaggaaaggctccaaacacctgcaggttgggggcggaaagctgtttgcgattccctggactggttggtcggggacaggaggtaattcccagccattgacccccatttctctctctccctccctcttgccctgcctctttctctccacccctatctttcctggaaactcgctttgggcgcggcagatcgcccaggaccacaccgcagcgtaactgcaggcctctcagcgaaaaagggggaaagcaaagacccgggtgtgcatcctcttcctcggcttccgcccctttccggcggagtggagatcctattcagaggggccggtctctctaaatatgccccaggtgagttttcaggggaatggtgccggtggaaacggtgtctaggaaggccttgtgttccggcctggggtgaggaaggctcaggacagaggagagcccattctcagattgggggtggggggaggggaggaccagccagagcttggaatcgggatctgactgctgtagctgcctctgtggcattcagcggctttttcccttttccacccagggtaaaaccagctagttggacttagtcgtccaggcctttcccattggtcccggttctgtggacgtttcccaaggccggtaactttggggcggctgtatccgggtggtacagactgtgcctggagctcccgcaggaggaaggcggcagccttcctggctagtgcagtcccagctcgagtgggccctgatcccaggcctgaggcctagggtggggaggcaggaacacccctcttctccggtagaggcgaggatggtggtgctgttccctggtgggtttggtacttgtgcaggcttggggcttctccagggtgttgtgctggtgtgggcccagaagagagaccagaggctgggtctaagggcctgaggctgttttcatctaagaaattctctgtatgggggattgggtctgcttgagacctgtccccaggaagaatctcctggggtcttctgtcttgttctggcacaggtggaaatattctggctgtctggcaactgcagatgaggatttcctgttgggggctataagcagggtctccgtagtacaaagagagaggagctgtagtcgtcaaatactctagaacgattcagtctaaaatctccctcctccttcattctccccaaataaaaacaaacaaaatctctcgggcgttcctttctgtaatccaaatcaagtgatgcagcttagtcgccaacaaccatcagtgtttgtgagtggcttctttggggcatggacctctggctggtaatcctaaaccggcaggattttcctaaaatgtggggaggagccgggagaggtcctccacagatcctgggatccaatcatatatttcttacaaggaaccttggcgatgggatatttataggtgtctggagaggacatttgtggccagggtcaattcatctggaatatgtactcccattgcctctcaggaatccaccgctagagcaggagcctaagaattaattggagggtaaaaatgtgtcataacagagcttgagctcagtctgcaactgcagtgcacactgtcactcggttagaagctggggcttaagcatggatcactgggctcacaccggtgtgtcaggacggagagcagtgaggtagggaaccaataccttgaagcttgtatgtttcccaggggttggtatatttctggcacatttcgctgctgctgggagcaagaggacctggctgatatacttctggtgcatttccagtggccttggtgtcttggtggttgcattctatggatagagacctattgtctccaccaaaatcataaactcacttccaatgaagtgtcagggacctactgcctttacagcttgtatacaccaggacttagggaattttgtggtttctgtgccagacctggggggctggcattcccaaagaaggtgtacagcagtctgaatcttgactctctgtcatcctgggtgtctagtggcaattgagccaagctccagaggaggctgcagatgatccattctcccttctggggtgggagggatggttcctaggatgactcctgtccagagcattgcagtggcagtatgggagctcaatggctgctatgtatgatttagatggactctgcatgggggtaaattgtttttttgtatttgttttcttcttttaaatacccaattatataattcagagagcagaaagcttattttaaacaacttatgtggtgttgatcatatatgtacaactcacaactcacaaactctggcccttgagtctcctgatttttctgttttggttcttgctggtgcccagctctatctggatgaagccaggtgatggaagagccccagcacacctgtgggaagtagagtggctgtggtcatctcggagtatgcttgtggggtcacaaggtggtttcactgctctgggaatacaggagggttgagcaaagtgagattattgctctggtctggctctctcacagataggctgtgagtgacttgacattcggccaggcagttttctcactggcccattctccttgttaataatgtttacttgaacgtttgcacagcactttcaaatgcataaaggaggtattcctcccatttcccaaagaacaccaaggcaggagatggcggtgaggggggctggaagagttcaagggcctcatgacatcctgtcctgctcttggatgggagtccagaccccactggcctcagggaacccttcaaatgcccagctccattctacctcagccaggcctctctttgagactcgacctcacttcagagtccagctgagcagaacgaggtggactgtgcagggaggttgggccagcaccatcttcttcccttggcgacctctcatctctgtctgagtgggagtaaagatccgctgggcgggcagaggactcacagtggatttgctcagtgtagacagacactccctcactccccagcgggggcgaatgtgtgtgtgtgtgtgtgtggagggagctggttcctcgggattattctctgccagctctggcggagtggatcccagtccccgtagcctccactttctaattccctacttccatccgcaccgggtttctgggtgtgtgcctgtaggtgggctgggaatattgctgagaggccaagggaggttcctaaagcaacgaacccctgcctgacagattccccgctaaaaccaaagagcacgatccggaatttgttccctcctcttccctttaggcctgagaaaggggacagagtaatctctttcttgcctccttgtacatttccttcctcctgatttccccttctgtgtttctgtcgctggctgtattccttttcttccggtgtctctgtcgtcttcctccatctctgtccttttggccctcagtctctgtgtctcccaggcacccctcccttctcccaatccagagaccctctttccctcccaccctagccccaaccggcctcccgccctagccccacgtggcgctaactttgtctgcctcttctcacgtctcggtgcgtgagttcctctctctgcccttctcccctttaccccagcccacgtcggtgggtcaggggcggtcgtcagagcgggcatccgcttgtctgtctgtctgcccacaggatgaccgagcggccgccgagcgaggcggctcgcagtgacccccagctagagggacgggacgcggccgaggccagcatggcccccccgcacctggtcctgctgaacggcgtcgccaaggagacgagccgcgcggccgcagcggagcccccagtcatcgaactgggcgcgcgcggaggcccggggggcggccctgccggtgggggcggcgccgcgagagacttaaagggccgcgacgcggcgacggccgaagcgcgccatcgggtgcccaccaccgagctgtgcagacctcccgggcccgccccggcccccgcgcccgcctcggttacagcggagctgcccggcgacggccgcatggtgcagctgagtcctcccgcgctggctgcccccgccgcccccggccgcgcgctgctctacagcctcagccagccgctggcctctctcggcaggtcaggggccaggggccaggggccaggggctgggcgggtgggcagggcgaccacccccaccggggtttccttctacacatcggcggcggcctgccctgggggccgagcgggtggagcgcagggagaggaggtcgttttaaacccagtggctctagagcctcaagctggagcccccgagtgagtgccagtgagggaggggccttctgtgagagagagtgtgcgtgtggctgcggggtgcatggctgtgtggaagccgagaggaggacgtggacaccttcgcgggtgcaggcatgtggctggtgtgcttggtggtggtgtcgtgggggacggagaggaaggagtcccctgagcgtgggtaccaggaaagagtgtgcctgcatgtgctttgctgtgagcagaggtagatgtttgtggtgtgaaattcattcggaaactcagcgctagctggacaggcaagagataaggatctgagggtggtggcagaggcaccctcccccgaatctctgctggagggcccgcctgaggactgacctgtccctccactcccagcccctctgctcctagccgtggtctctggccccagcctgtactccggttggtgtcagggcatccgtttccctgctggcgctactgtgatgatgagggagagaagccatagggttggaatagaaaccggcagatggggcagggatagagtgtggggcagtcaatgaacctggcgggcacccgagacagagctatggggagcttagggtgggtgagggcagagagctaggcggagcatttcagctgaggggagtcagggtttcctgtctgttgtgtatctacagccccttatgggtggggtgaggtggggagaggggacagtgtgcccctttgtggtgaccaagatgcacaccatcaggtgtgaaggttacatttgcctgagtgggcatgtgtttgggagtggaggtgtgtgtggattatgtgcttgtttctggggcgggagaatggagagtgtttctatctgtgaagtgtgtgtgtgtgtgtgtgtgtgtgttcatttttgtgtttattccatgtgttattcacctctgcttctgcatatgtgcctgtgtttgtgtggagggatgtgtggttaggtgtcttttcctccctttgcttgttttatgacagacagagtgagggcattccgtgtgtatgtgtgtgtgtgtgtctgtgtgtgcctattcccagctcaagtgtgaagggaccagggttgcccagaggtggggggctcaagacatgtggggaggatccctaaggaagctctttctcccctcccctcaacatgggatcttgtgatctgcccgttccctcccacagcgggttctttggggagccggatgccttccctatgttcaccaccaacaatcgagtgaagaggagaccttccccctatgagatggagattactgatggtgagtctgccccaccccaccgttgtacctgcccctcacgctggttagagccctctggaggagggaacatctgggactactccgtaggtatctcacaaagatgggcgggccactttccaaacccaaactgccgaagcccttcaccctgcagctgagctagggctaagtaaagtcctggatggggctagcaggaccacactcacagtcctgcaaagaggaggcatgggagagagacacataatggcgcttagcccaaacctctggagttagttcccaaacctttggagttagttccagtccccagtccgggctccattcctacactttggcaaggatcccaagtgggcgcagaatcacacagtgtcccccgatcccccattctaggcactgaccctcagggattccctgcacttcctcccaagtcttccttagagtctggagtctgcttcctccctgcaatggagtcatcaagggttttctccgaggtccctacacagtaggctccccttgtctcccgttaacacattctgggcttagacctggagttcccttcctgacatcatggattctaccttgccccctggattccccgagaagggccttggcactgctcctttgaggtacttgaatattccctgaacttgcaggggtggtttggacaaatgggagatttggaagaccctcgccatctttccaaggttgaccttgtatagtagattggtcccagcaccaggggtaggagagcaggcacttcagagctgagggactttgagccagacccagatgcccccagaacttcagcttggctgtggcctggggctcctgtaggaaggctgcccaaggcctcagagcaaggctgggatttatgctccaaactggtgggaggaatatgagtatggagctggagcctctggagtggagccctctgtggtgttctggagaggagcggggctgggatctgcacaacagaaaagacttcaaaagacccaagcagcctggggcacaggtgtgcagggctgagaggcaggggtgccttctgctagattagagaggagttctctagtctaagagaggtgggtgtaccaaacaggaagaagacaggaccagccctgaagttccccagggatgaggcattttctacaataggcagaagaggcagagcataggggcgagggtttgtggggtgtgcaggagtgtagggcagtcattatccataagtgttggcaatatttaccgagcacctactcagtgctggccagagagaggcagaggacaccaggaggggtagacagactcaggaaagaggaaggtgaggagagggggtggttctctggaataaaaccagagaggaataggcagacatgtaggcgaagggtagggtatgagtgtgcaggatgtgtctaggggacactgaaattagagattgaacccaaaaagagtccatagaagtagaactaatgcaagatctagagttaggacttgatgtggattcctgttgctgaattgctactaccatgtattggacacctactatgtgccatggactatgtgtgcttgatttctgtttattccttaccacaagctcatgagggcaatattattgtttacatctcacagataaggaaattgaggctgagagaggttacccagcttgatcaaggtcacacagctaagtcctgggtcacacagctaagtcctggaccaccctcataacactggtcttaagctttggaataagtcctgaccacttccccaccatctccccttctggatgtagtctagctccagctgtgacagcagtcataagtaccccctccccaactaggagctccctcaagatcaccagcattagccatggtggagggactgtcctccctatgtcactgctgagggatgctctctgtctggcctggaggcctgaaagcagcaagtaatttcctcagaggccgcccagggtagaactgccctgcagttgtgctgtgtttttcccaggctgggtctggcctttggcaaacagtcagctgggctagggcctgctatggtttggaaaggcagcttcagaggtaccatgggcaggggatggtgatccttcccattaaaagtgtgtgtgtgtgaacacccacacatgcatgtgcatgcctgtgtgcgtgtaggagagagaaagagatgatcaggcagtaagtgtggcatggatgagctgattcacagactgaccactgaggtgaggtctgcttccatcccagcctcagtctccttagctataaaatgggcagtgggacttaggtgaggtcttagctcttctcctctacctcggttttcacactctgaggtctggttccaggggttactagaagagggaaaataaatatcctaggactggcagttccttcagtgctcagagcttcctggactatgtgaccctggcttgtgcctcgatgttagggagagaagcagtctcctcagcccagaagttcaagagcactagtaggacccttcactgtcttcccctggctttacaaatccccagtgagtcttgaacacagcacagtgctttgcacaccataagtgccctagacatgtgtgctggtatctgccactgctccataagtctttatacatggaatgttagtgactattgggccaagccatagtcagtggattgtagacatgaggagactgaggcagccttcagaagcctgcctagagctataggccatggctgtgcatagctgtgtcttcacttctctcctgggtatgagagcccttctgcatcgatctctgctctcccctccattccccacctgccaccatgatgggtcagttagcagacattttctaagcccctactctgtgctttccatcacccttaggataaagtccccccgccttactgcaaggccctgtggagtctggaccctgcctactctgatcttgtgcacaggactccagccagcctggcttcaggccttgtctagtgcagggcctgtgcattcccttggcttggatactcttcttcctctccccttcttgtgcctggctgtttcttcacagcctcagacaagccttcccagccactggagctaaacatggagcttcttttcattacaattcagccctggtttgtttgttttttaatattcgtttccccattaacatgtaagctccatgagggcaggcactcaatttagttcaccattattcctcagtgcctagcacagtgcctggttgttagcaaaaaactgatacatggataataatagctaacatttattgactgctaagctgaggcaggcattgtcttaagttctttacctgtgttaggtactagacccatgtaacaactcatgacttagtagtattacctccattttgcaggtgatgaagccaaggcacttcacaagtttttatgtcacttgcccagagtcattcatttaggtaggggtagtcaaataggaatggagtctgtctccttagacatagctgtaaggcctcttggcacaagtgaatggatgaatgaataacatacggtccctgtcctcaaatatatcacagcccagggagggagacaagcacagaaacataagtaatgatcaagagtgatggaactccagggattgcggtatcgtggtggttggttacatctgtctggaggggttgaggaagttcccatagatgaggaagcacaggaacttgaatttgaagggtggatgttttctaagtaaaaggaaagtaggcattctaggcttcccaagtttcccaatgtatggagatgcctttggggaaggaatctcaagcccattctcctaactcttgtcctcctaatctccaggtccccacaccaaagttgtgcggcgtatcttcaccaacagccgggagcgatggcggcagcagaatgtgaacggggcctttgccgagctccgcaagctgatccccacacatcccccggacaagaagctcagcaagaatgagatcctccgcctggccatgaagtatatcaacttcttggccaagctgctcaatgaccaggaggaggagggcacccagcgggccaagactggcaaggaccctgtggtgggggctggtgggggtggaggtgggggagggggcggcgcgcccccagatgacctcctgcaagacgtgctttcccccaactccagctgcggcagctccctggatggggcagccagcccggacagctacacggaggagcccgcgcccaaacacacggcccgcagcctccatcctgccatgctgcctgccgccgatggagccggccctcggtgatgggtctgggccaccaggatcagccaggagggcgttcttaggctgctgggatggtgggcttcagggcaggtggggtgagaattgggcggctctgaagcaaggcggtggacttgaactttcctggatgtctgaactttgggaagcctttactgaccctggggctggcttttctgtttcctgtaccagtaggagatcagaaaaatggagcaaagtggtaggtactttttgtgaagacggcacggtcttccctcttccctcagtcccaaatccttcccaagtaagaggctggagttgtcactgcttttggcctggagtttgggatccctgtctttcctaagacctggggttgtcagctctcatctgaggcatccagcagtctctgccttgcctttagcccctcccaagctggctggggtggcctgtgtggccacttctgtccatatttataggtacccaatagctgcccatttcgtgagccccatcttcacccaggcctatgttgatccatccagcttgccagatgctgcagagtcacaagcctcgaggtgccttcttcagggcctggttgaagaagatgatcagtggacagtctgctctagatgagctgggccggagggtcaggaaacccagtcgcccttacttcttgccctggggatcaaagttctgctttctccccaatgagacttgccttcctaagcctgtggctgtggagacaatgtctgcagccctgagaaagccctgtcgggctttgtgtgaaggcagagaaagggacaatgatagtagagtgatatggagcaagagatattttgggcatgtgggcttcaactcctcgacatcactgttcatgctggcgagtgaatgccagtgtgctgatgggcgtacgctggtgctgagtagatgcgcagccccatctgtgcattctcctggatgcttagagggatttctttgctgtaagatgtctgtttgctgatggtctggtctatgttccgaattgagcacaaaacctgtcctatgaatgctttgcatttggaatttttgcttgacttcagttattggtggaatctttagcgctcaataggaccaggatccagcctcacttctagggtatgggaaatccaatcagagaccaggccctggctaagacccaaacatatgcacattcacttagcagaaccttaaacacccctcagttgtgcagcttttggtcatcaagggtgcgtctgggaggttggtttaatgcaatagaagtgctcccctctgaaagttgtacatgaaatttttgtaaatcacatccttatccttcatcttttaaagaaataaccactgcaagtccttttgtaaagtgaagaatccttttgtagaatgaaccactgccccttcattgatttcctgtgtcaatccagatggtgggatgtggttttcttaaggtgaggcctgtctgtgacctgcatctaagcccatgggacaaattgcacagaagtcctgtatgtctgtcattgtacccttaagtcaccctagccctctccctctaggctctgccttcgaggtcagaggagagatagcctgtggccctgtcctgccatgcaagaactcatcactgtggctgtctggaaagcccccccttatagtttgggcttcagcctagtggcttgtcctcaccatgatggggccctaattcagccatgtacagacagagaatatgtctgctcctttccccttccttttaagtaaggtccaattctcgagcttggggcaacattgttcacctttgtagcactcaggctctccattcaatttcaggctccccagatcatgttttggtgaaaattagggttggttcctttccaacgtttggaagatcctgtgaggagccccatctgtctaaagatagagtcattgctgtaggatctaaggctgtttgcttcaccgtggattcgcttgagttaggaatgagaagtagccacagtatggatgggtggatgggttttatgagatggatcacatattttattaagaactcaaacttctggctccctcttctttcagacttgccatgtgactctggcttggcctatctcctagggctatggtgtggactgaatgggatcatgaaagtagacagttttgagaacgtaaagaactttttcttttccctcaatctcaatcctgcagtggggtttcgcagcctgagtccacgacctaggcagtaggccggtgtgcctgactgcccagcatttgggtaatttagattgtaaaccgctttggcctgagttattgagattgtcctcatttctccagattatctatttgtgtgtgtgtgtgtgtgtgtgtgagagacggtgtcttgttctgtcactcaggctggagtacagtggtgccatcattgctgtctgcagccttgaactctgggctcaagcaatcctctcacctcagcctcccgagtagggaggaccacaggtgtgagccaccacacctggctaatttttacttttttttttttttggtagagatggagtcttgctatattgcccaggctggtcttgaagtcctggcttcaggcaattctcctgcctttgcctccagaagcactgggatcacaggtgtcagccattgcacccagcccagattgtcttaatttctatcttgttccaaggccagggacagtaataagaatggaaaagagatatgggaacactggcagactgtgtaaaatgtaatgcaactacccaaaacaagcctggtaggaaagggcaagtctttaggtctttgtaagaactaaagaagatctgtaatttttattttcaccctctgtaccccatgaccttatccttcctctccttccttgttacccatgaaaaactggcaacattccaagaatagcatctgtacaaaggggaaagaacataaaggtaaaacaaaacaaaacaacattttgagaacaaagatgaccataaccactgaagggaatcacatcttttaagacaaattcatattcttttatttgttatggcagatgacaagatggtacaacctttattcttttccaaaataaaacaaagggcacagcatctgtagtcagccgacaactatttcggccttttgggggtgggtctggccgtacttgtgatttcgatggtacgtgaccctctgctgaagacttgccccctgcccgtgtacatagtgcattgtttctgtgggcgggcccagcactttccgtcaacgttgtactgtatgtgatgaattgcgttggtctctgcatttttctgcagaagaggagtaaccgctccaggtaccttgacctttgtacagcccagaggccaacactgtgggtgtgtgactctttagcaaaaaaaacccatgtggtgatgatgtgtatatatatgtgaggatgtatcgggaagatttctaaataaaagttttacaaaggggccttaggactctgtgcttgcattgcacccctaggcctgagacgggatattgaaagaaaagtcatggcaagaacctgtttctcctgacatggggagcctccaagactcagctgtagtcttaggaagtgggattccaccctcaaccctgaaggcaggcctggtggggaggagacagccttcctccccagggtttccattctttctctccacaggcctcatagagggggcctgtccccttggcttcatgcacccatgcttgtatctcaggaagcctcagcagacatcccctctttgtgttggggtgagcttccatggctgggacagttgtatgtatcctaggttcaggacagattaaggccataccataggagggccccaggttccctgatgactcaacggctgcagcggcggctgcagctcttatgcctggctcttaaggattggggactcagagatgaagtctgaaggtaatggaagtcgagagtggaggctctgtggcaggctccatatcatctgggaggacttccctggaggctcaggaatggaaatgtggtttagatgatacaacccttattcttttccaaaaataaaacaaagggcacagcacctgggtctgggggaagccactgcatgtggaccatttgatcctcagggatttcagtaggtcatgcaggcacttctaatgaagtatcatgccttcctttctttctttcatttatttatatattttttcaagatatgggatcttgcttcttctagcctttgcccaggctgatcttgaactgagctcaggagttcaagggccatcaaggtgaaaaagaaacaaaaggtgcaaaaaccagaaggtttttgtctcagtcccttgagtagttaggactacagcatgtggaactggcaccctgtttcatttaacaaatatttattgagcatctagtatgggcctggtattgttctacgtaccggggatcccacactgaataaaacaaagatccctgttcttgttctggtggagcttaacttctagcaggggagacggtaaacacacagacacacacaactgtaataaatatgttgattctgtagtaagttacaaagtgattagtattaagaaaaaagttgtgccaagaggtgagttcaaggacctcacagataactctggcttttttggggtgagccttgttcatcttgctaggctctgacttggctgctcttgtcctcagggtgcttccaaccacagataggagggcagaggcagggtagtccttggggaccatgctctgccctgtagagaagctccttggtttttggaagctcccaggtgtgcctctccctggcacaggacaaggaggtacctgggatgataggatggtgagatttagccgtggggtgagctggctgtggatctcagcagtggtggtgttggcctggtctgtgctcacaggtgagaggagcagtatgaggaagggacctgtggttaagggcttgagggagagaaatgagaaagagcaatcagagaggaaggagaaaaacagagagtgtgctgttttagagactgtggcgtttcagaggaaaagggtgagggaagtggttaggcaagtccagcgcagctgagtggtcaggcaagaaaggcctgcaagtgttgattggatttagcaatatggaggtcactgatgacttggatgacagtgacaccaggggagggatagaggcagaagcctcactgtcctggactaaagaatgggaagagaggagcaccatttccagaaggatttttcccaggagagggcaaggcattccacgctgaggtctggaagggcccgtgaactctgcggccagcaaggcagaaacgatgaggtgatagaatgtccaggttggcctgaccctggggggccatgtgggctagtgtacatgtctccagaagaggagacagggccagagaggaaaagagtctttccagggccacacatcccatagtgatcggcaggggaggaccagacttcccacctcccaggacagctcagtccctgaggcactgggggcccttctgtcctccagggaaaagagctgcaactggggccttgcctgaaatggccctgctgacccggtcagcctcaaccctcaccacttttttattctctttgctccgattgtaccatcctttctattccagatcacattattttattttttttaatgaccttccagtttttgcaccttttgtttctttttcccaggacaatctacccatcctctctttctgccctcctttcatttggttaacttgtcctcaacatccagcaaactgtcctgactactctatggggtcaactgcctccttggtgccccccacgggccttcctttccttgtctgctttcccactaaaacatgagctccttgaggcaatatcacgtgcgatctatctcttcgcctccagcaccctatgatagacctggcacaggttcctttcagcatttgccgaatgagaaggttcccctgtgtagaatctcagttttgaggccggcatggaatgaaagagtggagatgggtgggaggcagaatcattgttacagagatgcagctccagtgccttctgctgtagccatggtcctgagctagtcaggggcagatgtacagctctgcccttgcactgcttttgttgctgtgggcagagggaggacaagtgtgggctttcttgggctgggccgcagttgcctggttatcatactggagctgggtggggtgaggtggggagataggaagattgggaggctgttgatttggtctgctcatggcagcccagcctcctcatgcctgcccgctacctccttccctatgtgcaaaacaactaactgttccctagaagccagtgttccccctctggccgcactgcccttgcgaacgagtaaagtaccactgaccagcccatggggacacaggccatggtgttgggcatggtgtccagcaacagaggctctgcaactgtgagtcagagtaaggtagggagtaagtctgggtcacccaagtcatcctctccattgtggggaggaggaaatgaggcctagaggggaagcagcttgactaaggttacctaggattggagtcagatctgagtccagagccagtgctcactacctctcaggaaaggaagacaaaatagtcaacaggtagttggtgtccttagagcaaataggcctgtgctgtgcagggacacagcagctcagcctgccccagcaatctgctaggactatgagcaatcagtgtgggcgctggacagcttgcctcaagcagtgggcccgacttgaggacaagcccagtggacagtcagggcagtcaatttggtatcagttcaagaagagagaggccagggcacagaaggcagtgaatgggaagggcaactgggccaacagaaagaggctgatctttggagtcagaccactgggtttaagttccagctgtgtgactttgggtaaatcactttacctctctgaggttcagtttcttcattggttaaatgaagatattaacacccatcttgcagagctgtcatgggatttcaaaataatggatgtgaagtgcttatgttttatagaaaacagccgttattattcgtggaaatgggatttggatagggggtatgcttgggaatggcagaagacagaaagaagaggaagatgtgggaaacttaatcattcacagcaacaggaattcctgctgagcagtgcaggggagccagcaagggactgccctggccctgtctgcaggggttcacaggctgggtggaagtggggtgaagggaatggatacagagcccttccaccctggaggcaagtgctgtgtgagagaggcctggtagccacgggagatcctgctctggcagtagagaccagggtgaacattagctaaattgaaggagcctgaggaagaggcttggggaaagcctccaggagggagtgccattttctgtcctgggccccagcatctctcaatgggggatgcaggccgccccatggatgctcatcctccctcctgggtcccctactcctgcccaggccacctggctcagggcggagctggtggagctccctgctgcccactgtcctgttcctctggctcctcctttctcttcctacctctccccacttgcttggtccgagctctgcctccctccccagctcccggccttttctttccacacaataacaggatgtgatccgttcgaagagaggaagtggggaggacgggcagtgctgatagcgcgtttctgactctccactcctcccctcccctttggaccagcccctgcagctgcctcttcccctaggctctgcctgggtctccctctgggttcagaagagatgagtttgggatcatcaggcccactctggcctgttcaagcctatggagagatgcacactggccgtgctctctgcagagcctgccttcctaggagactcactgggttagctttggaccctgggttattctgagctgctggagcctgagggtgggtccctcacctctaggcagccaggtgccgcctgcccatctgcttccccaagtccacgtgtgtctgatccaaagcagtgggatgatggaatcagtggaatgtccttgtcaggtactgtctatgcttggccttgcacagcatgtgggatgggctgcacagatgaggaaagtctcagagaggcaaagtaggaaccaggaactaagctgaagctagaacctagatctgctggtgttctatcaccactcttaggtcagcactgtccaatagaactttttgtgatgatggaaatgtcctgtgtctgtcctgtccaatattatagccactaactatatgtggctcttgagcacttgcagtgcaactagtgcagctcattgcatttttattcatttaacacaatgatttatttatttatttgagacagagttttgctcttttcccccggctggagtgcagtggtgcgatgtcagctcactgcaacctctgccttccagtttcaagcagttctcctgccccagcctcccaagtagcttcaggtgcctgccaccacactcagctaatttttgtatttttattagagtgggggtttcaccatgttggccaggctggtctcgaactcctgacctcgtgatctgcctgacttagcctcccaaagtgctgggattacagatgtgagccaccgtacctggccaacaacattaattttaagttgaattattctgaatgtaaagggccatgtgtggctagtggttgccatgctggacaacgcagttttagcctctctaattcattaagtcattgtacacttactgtcatctttgctgaaccgggcagttctaggaatgcaggccaatcaggtagttgcaggcatgtggagtgctgccctagaagtcagccagggcaggagtctgactcacttgggggtcaagcaaggcttccagaagaagttggttcttgaaggatgaataggaatttgtcaggtatgcaaagagaggaatggcattcagggtagcaggaacagcaggacagaggtacagccttgggaaagagtgggctgtgctttggaagctgcagcctgggcagctggtaaggcacctgcggtggagagtgttggggctgatgaggtctcagggccttgaatgctgcaaaggcaatgggaagtcatagagggttgtgagcaggtaggaagacatcagatctgtgttttagggactctctggttagttaatgtggaaaggccagactgaaggcagggagaccaccgaggagtcagagagctgcaggccctcacagcatggcacagcgaggctgcttagagagaggcaggaaagtttgtcttcctgcttccacagagtcagacagcaggatatgtttgagaaaagcaagactgcggtgctatggtcctaggacttgaaggcccggagctcaggagagcctggaatcctcctgcagccaagcctcagtcagctctttcttttcccagcacacttccccaacctctccacccattccaccatcctacttcattcctattacgatgccagtccccagagaagagcagagctgagtctctgatgtgtcagagtaaaaagactttatgcaaatcctctgtaaagagcaagtgttggtagaaggaggccgggggcctccacatcccagacctgggaagctcagaaagaggatgtgagtcaccaaagtttagcctcacctgctctaagccttgtgctgtttatgtccaagggctgtgctttcatttctgttgtcctgctgttccctccctagaatccagggtagaggggacagttactcccattttacagatgaggaatactgaggtcacagaagtgatttgcccaaggtcaagtggctaagagagaagcctaactgagattccattctggactgtttggagaaccagtacccgtaccctacatcaggtgagcccttgaatactgccatgatcactatagacaggcactgcacagttccaggctattaggacaggacttctctgaggggaaatcaggggagggccccatatacagggggaggggtagtttggctctgcattatttcatgagttccctgatttaggggagacacaatgtctcctgacccagtctcacttatgcagatggtggtctgatgataacatcacctgcccctgcctggctcccacacccttgccatcccatgacaagagtccccaagacccctgcctttccaagaccgagtagagctacgggaccaagttggaaaaccctttcccaccctatgcctggtgacagctcagccagctgagccgcaggagcccagagtcctcagctcttcccagctaaccctctgcggcttgggacctgtggtgttcctgtgtcccaggctctgtgggatctcagagggggctgcgccttctgccctctggcagttcccacacgggctggctgaggctcctactctctgcactccgcccctctctccagcaatcccctgggagccactgtgttcaatgggctatcaggcttccccatcactctcacgcccccctccattacccctgaataggtgggatccagacccacacaagcactcccagccccaagtccccagccaatctttcccaggatcgcctgggacctcacagttctgatgcactacctgcctagccctgctcaagactcaaagtcctgggcggctggcactccaagaggctgccattctattgtttggcaacagcatattctaaagcagcagtgtaaactcagcgccaacaccctcagattgtaagattctgctcagcgagcctagtagcaggtaaaagttgggatctctaagatctcagtttccatcaccctaagcaccgacattcagggattctatgtgtctccagcgtcctttgggtttttggccactgcagcagcttctggccacaatacaaggagaggcctacacggggtggggcaggcaggacaggcggtggttgcctggcttgtttttttgaggggaggtgggaggctgttggccatgggcccctttagggtccacatctgctgggttggggctcagccagagcccggctggctggtccagttgccgggctgcagaggcgaggaagggagcccggctggcaggctgtgtgatgctaatgaggcagggaggcacggcttttgtcctgcacttgtccttgctggagggtcctcagagagagagacaggtccctcctcagacccaagtggctgtgattagccttcaatcactccctttgatggctcccagtgctctgaggggcgtggacagggactggggagggaagggaagcaagcctggtcccgtgcccatccctgtgctttccagggagcgtccaaaaaaaccgcactgagtcaagaccagagtgacaacactgctccatcctcttctccctgaagggccctcgagctccccaagggatccagtgcatcctttctgactttccagctctgagcctttgccacacctgagatgccctttctgtagactcccacgccaggagcaggttttgggtcagactcagtctcagatgctgcaactgctgcttccctccaccccgggaactggggcctctcctatttctgaatgcacagagtccctgagctgtgtctaggtgctactcaccatcccctacattcgagtcctggcctcatcgccctgtttgttcatgagctgctcagtcctggggcaatgtgtcactggttggtcgctaatggtcccatcctgcccagtgtgtgtggggctcacccacaggaggtgcttagtgaatatttactcatcagactccagggtgggcgagcacaaatgaatcattaaagtttgtaatgattcattgtacagatggggagggatgtgacttgtacagggccacgcagggtggtgagtgacttagcacccccagcatcagctccagatctcttctagagcagggcatctccaaggtgagtccagggacacccaagaactccaaggagaaaactcaacgggacataaacctaaatgggaaaaatgttacatctttattttcatcaccctgtgactgaaacatagcttttccttccattgttaatgtaggcagcaaatcacagcactagcaaagagtgtctgcgactttcgttaccaacagaaattacatcccagatgatagattaccttgaaatattgttcccaatcattattttgaaattatggttggtattagacttgttgctagatcttttcatttaatccatgagtaaggaggcacacatataattacatcataaaaatttaaaatatcttgacaattgtatttcaatgcctttgattttcattattctatgtattttattttatgtgtttaaggcattaatttttaaggggatcatagactccaccacactgccccagaggtccatggtacacaaggccaaagcctctgcacagagtgtcctcgctgaccctccagcccagagcttgcatctttcccggctccatctctagtcggaaagggtttgcatcatgcactggcatcctgattttgcaggaaagttgcaggagaggtaggcacctgcttgtgtgattgaagggggcttcaatgctccaatgtagccccttggcatgtcacttttaaaatcaatatgtgttgagcacatcacacatgccaggtcctgttcttttttttttttttttttttttttttgagactgagtctcgctctgtcacccaggctggagtgcagtggcgcgatctcggctcactgcaagccccgcctcccgggttcacaccattctgctgcctcagcctcccgagtagctgggactacaggcgcccgccaccacgcctggctaattttttgtattcccaggtcctgttcttaaagcaatgaccagaatagagcaatgaaaaagaaacattttctttggtgaagtttatattcttagtggagagacagatgataaataagaaaaataagttaaataattagtggattggatggggataaatgccaaagagaagaatgaagctgggaaagggaatagtgagtgtgtgtgtgtgtgtgtgtgtgtgtgtgtgtgtgtgtgtgtgttttagggggttttcaatgaagggagggccttttttggaagtaagcaagagggtctcgcagaataggggtcaccggagtcaagacctgaaggagatgaggcaataagccatgcagatatttggggaaagagtgtaatggaggggaacagctagtgcaagggccctgaggctgcagtgtgcctggcatggactggttcagggcagcaaggaagcaggaatggctggaatgaggaggagaggagtgagagatgggttggagaggtaccacatggagcctctagtccacatagggactttggcttttactttgggtgggatgcaataacattggaggatttgttttattattcttttatttatatttatttatttatttttgagacagggtccctctctgttgctcaggttggagtgcactggtgtaattatagctcactgcagccttgatctcccaggctcaggcaatcctcctacctcagcccactgagtagctggaaccacaggcaggcgccaccatgcctttggtttttagtagagatgaggtctcactatgttgcccaggctggtctcgaactccagagctcaagcagtcctccagcctcggcctctcagagtgctgggattataggtgtgagccactgcgcctggccccatcagaggatattgaataggcaagggactaaattttcgaaagaatctctctggctgtcatggtgagagcagacagaatggagcatagcaaaattggggagatcagttaggacactattgtgataaggctaatgagcgataaggggcttggatgttgcagcaatggaggtggtaataagtattattatagaagtctagatatatttagaaagagccaagaggatctactgatggatccagtgtggaaagcgtcagaggggaacgtcaaaatcaactatgagatccttcctctgaatcgctggagggccagaacaccgcatactaagcaggaaggctgtgggaggagctggttttcagtggggtgagctcaggagctcagttcaggacatcttacgtttgagaccctgtcagtggagtggtctgggttggaaatgtaactttgggagagatctgcatttggatggtgtataatgcagacagggctgggtcatagtgctcagtgagcactatgccaagtgctttctagcaccttctcacctcactcccccaacaaacccaagaggagggtgctattatcacccccattatttagatggataaactaaaacccaagggggcaagggactcactaaagtcacaccacgaggaaaaagcagaaccggatcccaacttatatgtgtcccatttcaaaactcaagctctgtaacccatatatactattgtaatttcttcttttttattttatttttattgatacataatatttgtacatatttatggggtacatgtgatttttgttacatgcataggatgtataatgaccaaggcagggtatttaggacatccatcacctcgagtatttgtcatttctttgtgttgggagcatttcaaatcctcttttctagctatttttttttttttgaatcagagtttggctcttgttgcccaggctggggtgcaacggcacgatcttggctcactgcaacctccaccccccagattcaagtgattctcctcctcagcctcccaagttgctgggattacaggtgcccaccaccacgttcagctaatttttgtatttttagtagagatggagtttcaccatgttggccaggttggtctcgaactcctgacctcaggtgatccaccagccccggcctcccaaggatggtgtcaatttttctaatttgaacaaccagttatatggtggttccatttactgaggagcatagaacgacagggggtacaaggagaggagcaggcttaggggaaagagtaaattcactctgggtatgctgagcttgagatgtctgtgaaatcaagtggagatgttgacaacatagttggatatgcagacttgaaactctgcagaaataccaagcctgtaaatatagatttggaagttatcaacatagaggtggtaatttacatcatgggattcacccaccaagagggtgtggaatgagaagtggaacaagatttctgaggaatgcagcatctcaaagctgggcaaggggagagaaacagctggaggagacagaaggagcaaccagagaaggaggagaagagtggggaggtgtggagtgctggataatggggaagacaggggttcaaggtgctaggaagtgctgggattacaggcttgaacaaccatgcccggctgctattttgaaatatgcaatacaccgttgttagctgtagtcaccctattctgctattgaacagtagaacttattccttctatctcactggatgtttgtacccattaaccaacctctcttcatcccacacacctttctcagcctctggtaactatcactctactttacctgcataagatcaatttttttaagtttccaaatatgaataagaacatgaaatatctgttttcctgtatctggcttattttacttaacataatgacctccagttccatttatgttcctgcatatgacaggatttcacccttttttatggatgaatagtattccattgtgtatattcaccatattttctttatccgttctttcattgatggacacaagttgattccatgtctttgctattgtgaatagtgctgcagtaaacacgaggatgcatgtatttctttgaaatactgatttttttccctttggataaacacccaatagtgggctccctggatgatatggtagttctgtttttagttttttgagaaatctccatactgttttccataaacactgttctaatttatgttctcaccaatagtgtataagagttctcttttctctgcatccttgccagcatctgttattttctgtctttttgataatagtcattctaactggggtaagatgatatctcattgtggttttgatttgcatttccttgatgattagtgatgttgaacgttctttcatatgcctgttggccgttagtatatcttcttttgagaaatgtctattcagatcctttgcccactttttaatgatattgtttcttgttttgctcctgagtttcttgtatattctggatatagttccttgttaaatgactagtttgcaaatattttctcccattctgtaggttgtctcttcactcttttttttctgtggataagctttcaagtttaatatagtcccatttacctatttttgttttaattgcctgttcttttgggatcttagccataaagtctttgcctagatcgatcaacctgaagtgtttctcctatgttttcttccagtacttttgcagttctaggccttacatttcagtctttaatccatcgtgagttgatttttgtatatggtgagagataggagtacaatctcattcttctgaatatagatgtccaatttccccagcaccatttattgaagagggtatccttttcccaatgtaggttcctggcatccttgttgaaaatcaggtgactataaatatatgaatttatttctggtttctctgttctgttccattggtctatgtacgtatttttataccaataccacacagttttggttgctatagctttgtaatatattttaaagccaagtagtgtaatgtctccagctttgttctttttgcttaggattgctttggctgtttgggctcttttttggtcccatatgaattttagattttttttatttctgtgaaaaatatcttggtattttgatagggattgcattgaatgtataaattactttcaattactattgtcattttaacaatattaattcttccaatccatgagcataagatgtctttccatttgtttgtgtcctcttcaatttctttgatgagtattttgtagttgaccttgtagaggtcttttacttccttaaatttatttctaggtattttattttattttttgtagctattataaatgggattgccttattgatacaatttcttcttttgtgctcctccatcccacctccctcctcctttccttcccttcctcccttccccctcccttcctgttttttttttttgttttttggttttcaagatacttacctttagctttcaagtatttttgaaagaggtcaaagtatagttagagtgaacactcagcatttatttttatttttattttttgagacggagtctccctccgttgcctaggctggagtgcagtggtgtgatctcggctcacaacctttgcctcctaggttcaagccatcctcctgcctcagcctcctgagtagctgggattacagacgcatgccacctccccggttagtttttgtatttttagtagagatggggtttcattgtattggccaggctggtctcaaactcctgacctcaggtgatacacctgacttggcctctcaagtactgggattacaggcctgagccaccacgcccggccaacactaagcatcttttaaaattgtcttaaattttttattatggacattttcaaacatatattaaagtagagaataataaatggcatgaatccagtttcagcaattgtcaacatgtgagtaatcttgttttgcctatacttctatctgtctccatgctccctctccccacaatggcttattatgaagcaaatctcaaacttcatattatttcatctgtaaatgttactatctttattagttgatttaattaaaaattactgaacatctatctgctctgtcaggttatatgctatgttctgataaattcttaatcatctttcaaagctcagttcaagtgtcacctcttcctggaagctttccctggttttcccctctcccaaaagaacttaatgactcctttcctggcattcagattatatgcctccttcacagcgctcactgtttaatagcaattattttaaatgtgaggagatagtataatataatgcttaagagttttggaaacaaatagacgggttaaaatttcaatttctgctttggaatcaaataaagttgggttaaaattctgctttctgagcttaattcctttgaacctccgtgttcttatcagtaaaatggggatatagcactcaccttatattgtggggaataaatgggttatgaatccaaagtaccttgcacagtgcctggcacatagtgggcattccttcaagaagttacatgcttctctcgccacactgtgctggaggcaggaccacagctgtctcctgtgtgtgtgctggcacgtggaagcctctgcggaagaatgtgggaggggaagcctccaattacagaaagcaggcagactgggccctagcagccctgcctggctgtggacagattctctggcaaagtgggcctctggttcaacttttgggctatttaaaggcattagtaaaaatccgaaaaatgacttgattttgtcttttaatgcacacttattttgtttagttggaaactacaaatttgtccctcccctcaactaaataatctttattatagaaactctggaaagaacagaaagagaagaaaaaaatcacagaatcagcccagatcacccatttatgtattattttatttccttcttctttttaaaaaaatttgttttactttccatctatgaaattataattgcattttgtttactttttggtccatctccagctttttaaagtcatcttcattttgagggttgaagtctgacctttcaaacaaaagctccaagtgtgaaagggtccgagggtttggatgtggcttcttgactgagcaaggggtgtccaatgtgtggctggcaaaacatgcctgcaacacctctcactgcccacctccttctggaagctcaaggtttctattcacatacctctgggaatgggaagctcaccacctttcagggtcatctctgtcatcactagacagctttctctcactgaaccaaatccagcctcccagtgactcttttcatcatcctcagctccatgctcagagggcacagagcacagtttctctctctgatctggtgcagccctgcagatatctggagacagaggcctctgagactgctactcttcaggctggaaatttcagctcctccaagtatttaacagactaaaggcaaaattagtaacaagggaagaaaacagttttagttaattaaaatgttgaatgaaatcagttccatgactccacatgccctgaaatgtgaggtgtggccaatgcttgtagtcttaccctaagtggtctagaagacaatgtatattgcttctttatttactcctcagttcagatagataccccctccccatccatttaagcaggtgttgcttagggcgggtgttagcccagcttctcatccccctatcctggaccgtgtcatccctgccggaggcctcagtcaccatccataagctgttgaattccaagcctctattcccagcacagatccctcccaggaatgccagaccaaaacatggagctgcgtcctgagatgtcctccgggtgctgcaaacagcctgtccacactgggactcatcgtcatcggcgcattgctctttgctcactgcacccactaacctgtgagctccctttggcacggctgtggagctatggtactttagaacagtgcttggcacaggaagacacctacgaaaggtgtgttaaatgaataaccacatgccctctcctcaatcccagcttgctgctcttctagtttcctctagtttaaaaaatagcaccggccaggtgcggtggctcactcctgtaatcccagcactttgggaggccaagccaggtggatcacctgaggtcaggagttcgagaccagcctggccaacatggtgaaaccccatctctactaaaaatacaaaaattagccaggcgtggtggcaggtgcctgtaatcccagctactcaggaggctgaggcaggagaattgcttgaacccaggaggcggaggttgcagtgagccgagattgcaccactgcactccagcctgggggacaagcaagatatttcttctcaaaaaaaaaaaaaaaaagaaaagaaaagaaaaaaaatagcaccaagtttcaagcactgtctgaatcagaagacgaggcacctccttgattgtactcttttgaatatctcacttctgcgtctatgcagctagcttatcctgccacttgtaccccttaaattgctcttccatcctccaattctctctgtgcactgttttaacccaagccatcaccatccttctcctggatcccttccacagcctgctcactgcccacttccctgttcggaccattcttccagctgcagttggagagagcttgccaaaatgcaagactttcccacatcgcatctttgcctaaaacctgtattatctgtattatctctaaggtgatgatgaccgcatctcttaggtcctgcaaggctctcgagacctctttcctgaccaccctctgctctccagccaggcccatctcccatcagctcattgtgtggtgtgactttccctccctgctcctcccaacctggaggtgctctcttctacaccactccccaaccccagttgttgcagattttctctctctaggtcctagaggagtgcctccacggctgcacccacatgtcccaaatgtacgtctccagcctggacctcagttctgacctccagactcacattcctttctccaaaccaaactcgtgaatcctgcccctccttcagaaaaaaagcctcctcctcctgcaatcttctccatctcagtctgctccagctgagcagactaaaaacctcagaaccattcttggcttctctcttcctctcacattccagaccaggttgggtttacccgcaaaatacatctagactcagagcacggatcctcagctccacagctgctccagatcccagttgccttgagttgtcctcgcctctcacctggagcactgtggaaggctccttgccggcctccctgttctctcttctttctcccactgtctcttctccacatggcagtcaaatcatgtctcctgtgctcagatccctccagtagctctttggtctcattggagtaaaagccagagtccttacaaccactcacaacacgccagatgagggggccacacccttgctttccaacctcatctcctccgctctccctgcactcccttcagccacactgactccctccagcctccttcctcagggcctttgcacttgcctgtctccttgcctggggtcttcccccatccaccgctgaacatcttacttcctcactttcaactcttggctcaaatgtcacttcttagaggcgccttccctgagaatctgtataaaatagcacaccctcttcttgtagcccccccccaccattttcctgatcctgaacttttccatattgtcattggaactgttttatctgtctgtttcctggctgacccctctagaatgtcatttctataaaggcaggggctttgttttgttcattcctgtatccctagcatcttgaacagtgcctggtccacaggaggctctcaataattacttgttcaatgaatgaatcttagatttcatactaccttttcctgacttcctagactagatggcaaactcttttatttacttttagcaactgtaccttccctttgaaacatttactgcaactgtaattacaaaactgtataatgtaatcttgatcttattctctacaggttgggcatccctaatccaaaaatctgaaatccgaaatgcttctcaatctgaaactttttgagcatcagcatgatgccaccagtggaaaatttcacatgtgatctcatgtgatgggtcatagacaaaacacagtcaagaccgggtgcggtggctcacacctataatcccagcactttgggaggccaaggcagatggatcaccggaggttggaccagcctgaccaacatggagaaaccccgtctgtactaaaaatacaaaattagccaggcgtggtggtgcacgcctgtgcgcctgatcccagctactcaagaggctaaggcaggagaattgcttgaacccgggaggcagaggttgcgttgagccacgattgcgccattgcactccagcctgggcaaaaagagtgaaactctgactcaaaaaaacaaataaacaaacaaaaacaaacaaaagaaaccacacagtcaaaactttgtttcacatacaaaattagttaaaatattctaaaaattacctttaggctatgtgtataaggtgtataggaaacaaatgaatttcatgctcagacttgggtcccatccccaagatatttcactatgtgtgtacaaatattccaaaatcagaaaaaataaaaaatctgaaacacttctggtcccaagcatctcagataagggctactgtatttccagtcccatagtagccactaaacatgtgttgagtgaatgaatgaaagaaagctaggatgttatttgagaaactgaccaatagcaggtgcttgacagagggactgaaccctgggctggacatagggactcctggagtttagccccatctctcccattgacttgctctgtgacttttagttgatgactgtccatttctgggtcacagtttccccagctgaaaaataaggagcaagattacatcatttagaatgagctttcaggcttgaagagattgtgattctagaacccagtactcccagcttgcttccactgctggcctggagccctgggtagggaaaggatgtgcttggaaccagtagggtaagatttggctttgggacctctgctggcaggccgggcttctggcatggggccagcccttgaatttcttggctggatgagtgggcagcaggatgggttgattgatcttcccccactgtggggtcctggccataaatctcctcagcccaatggggtcgcctaggacccaggagtcacagccagtgcattccttggcttgactggctctgggctggtgctttctgccccttccagctcccagacactggagaccctgtgggcgttagcacccattcaatctgatcatagagcctagctctgtgctccagaaagcctctgtccagagagctgccaatctttctccaggtctgaccttaagatcacatggcattgttttgagcagatatgccctaggctcccggtgagccaggacttaactctctttgtgccatggaacccttgggcagtctgatgaagcctaaggaccccttctcacagtaatatttttatttattgataaattaaattaattaattaatatatttctgagaccgagtctcactctgtcacccaggccggagtgcaatggcacgatctcagctcactgtaacctctgccttccaggttcaagcaattcttctgcctcagcctcctgagtagctgggactataggcacatgccaccactcctggctaatttttgttatttttagtagagatggggtttcgccacgttgcccaggctggtctcagactcctgacctcagatgatctgcccgcctccgcctccaaaagtactgtgattacagatgtgagccaccgtgcccggcctctcacaataatgtttttaagtgcataaaataaaatgcatagcattgcaaaggaagtcagttatattgaaatgtacttatcaaaatactaaaaatataagtttgtaatatagtgatttatgtgtccatttataatgtattcaacaacaagatcttgtggaaggtccaatgactattgtacttctacagtggtgagtataagatatatctagatatctgcaataattatatggtgatatgaaaatatcacagacagtctgtggtttgttgccttcatcctacggaagaaaatggtaaattttatttatttttatttatttttttttgagatggagtttcgctcttgtgcccaggctggagtgcaatagtgtgatcttggctcactgcaacttctgcctcctgggttcaggtgattctcctgtctcagcctccccagtagctgggactacaggcgcccaccaccatgcctggctaatttttgtatttttagtagacacatggtttcaccacgttggccaggttggtctcgaactcctgatctcaggtgatccacccgcctcggcctctcaaagtgctgggattacaggtgtgagccaccacatctggccgaaagtggtaaatttaagttagaggttagtgaaatacagatataatgtttccctgtccatgttcatgagctagagttctgtccacagccctctgggaagggagtgttacatgaaggggagccaggtgaatgaattcttaagtctgagaggagaggggctcaccacagtcctaaccagcctgcttccttgggaccttatcaaaatatgaaaagctatcatattctgttaacggaatcacaggatcataggctccagacctggaagggctacaaccctgctacagtttcagtatatgtccctctaaaattcatatgttaaaacttaaaccccaattagctgggcatggtggcgggggcctgtaatcccagctactcaggaggctgaggtaggagaatcacttgaacccaggagggggaggttgcagtgagctgagattgtgccactgcacttcagcctggacaatgagagcaaaaactccgtctcgaagaaaacaaaaaaaaacaaaaaaatccttaaaccccaaggtggtgatattgagggctgggacctcttggaaaggggttaagtcaggagggcttcacccccgtgaatggattagtgttctcaaaaacggggttgaagggagtgtccttgcccctttcacctttccatccctcccaccgtgtaagggcacagcaagatgtgtcatcttggaagcagagggcagctctcaccagatgccaagcctgctagtgccctgatctgggacttcccagcctccagaactgtcagaaagtaaatttctgttctttataaattacccagtctagggtatttttattaaagtggtacaaagagactaagacaaaccccttttgcagacacctcattgggtgacctggtccatggcctctgctcttacatgtctagggaaggagagctcaccctccaggacaccctcatatcaggctgaacagctctaactgtcagaggaatggttgccttgtcttctccttcacatacagagatgaatcagacacagtccttgccccacagatagagagtggagagagacaaggactcaactacagctaaaatgttttattcattgaacaacctttctctgagcttctgctctttgttaggccagtggtaggcactgcatatactgacatttaatttcataaaatgtgtgtcgagtgtgtactcaggcactgtgctcagtactggctgctgagggagagatagacatgataccttccctccatggagacagttattaaatgagtaaacatacaaatcagtgtgtaattgcaacttgtgatcatggctgtgaggagatgagcaaaggagactcatagaagggagtgacttcagatgggagagaagggaagtaaagaagtattcttgaagaaagggatgtaaaggaagatcagtttgctgggcaaataggagtggaagagtgttccaggcagagaaaagagcaagtggagagaagtctctgatgtgggaaagagcttggcttttgttaggaagtgacaggaggctccggggccagaccaagctggagtggtgggtaaggaagattgcctgtgccctcaaacccatgcaaagaagtttgcatattattttaagggctgatgaatgccataaaagggtttaagcaagatacgtttgaaagaataaaacaaggtctccaggagctctctggcttacagcaatgatattaacaagatgaagtattataagaattagtaaagagctgggcgcggtggctcacgcctgttatcccagcactttgggaggccgaggcgggctgatcacttcaggtcaggagtttgaggccaccctggccaacatagtgaaacctcgtctctactgaaaatacaaaaattagcttggtgtggtggtgggcgcctgtgatcccagctactcaggaggctgaggcaagagaatcgcttgaacccaggaggcggaggttgcagtgagccaagattgaaccactgcactccagcctgggtgacagagagagacactgagagggaaaaaaagaaagcttttatatttgtgttctaaacacccttcttgaatgttctctgtactttttctcaggctaagctctttgcctggattcctctccccagactgtctgccgagtacaacactctggctaactttgcctgcattacctcctccaggatgccttccttagcaatgtagtccaccacgctgccctatgtcagagccctgagcactccctgtatgctgttcccagactatttacatgtcaatgtccaccgtccctttcttcagaccacccctggaggagggcaaaagtgggggctggagggaggggaagttgcagaatcttcagcagcaaactggctccctgcacgcccagtctggtattggagctagacactgccacctgctggcagtgagtggaatggctgacaagatggggttgggaggaaggagactgctggaaacagtccaggcccactttggcttttctgaagggcaatcgcataaggtctggctggatggagggcttgtctaaggggcctgatggttttgcgtgacagctgggctggaacaggaaggaggaactgaacgtcgatggaacagctgctcaggacacacggtgcagccctgtggggctgctgagaccttagtccagaccctgggccccagccagaccagtaggggggcccaccttgttaccatggggatcagggctgtgtccatacagctggggagatgaccctccacccgtgtgaagacctccagggaggagggaccagcctcaaagccaagtgtccacccatgctccctcttttctggaacaacttgttttgctctaaagcttgggactttgacccaggaggtatgttttcctcctgttgatcacctggtgtccttcctgttcatccccttcccccaccactcccaaagcatagcccaggggatcctttcctttccctgggtttttcagggaagtggaggatactggggtggggaaggcagaacctgggacttgagtgctgagggcactggttggagggggtggcacagctgtgacccccccaccctccttaagtctgtccttgcttggctcctgggataccccactttcctggggttgcttcctcctgtttcctcctgccccttcttcctttgaaagacctttgtgtgttgggggcgtgtctccttctttctgtgctctcccctcaacacccctacccccgctacacacactggggagaccatgagctcccaggcctcagttaccatccctgtgctgcagacggctcccagatgttccactccagatgcagggattttgcagccttccagatgtctccctctggaaagtccacaggcactgcaagcataatacctcaaaatctatagctcattaatcctccaaccccccaaacttgctctggcccctactgaggcactagcatctacccagctgcctacgccagaaacctgggagtcacctgaagccctgcctcctgcctgtacccattctcccagcttggcactgtgttccagcagccacaccccggcttctctacctcctcaacagggctcagatctgttcccatgggcacttcctgcccaggtccaggcactggtgttgtggccactgtagcagatccctggatttctcttctccagcctttgcatgcccctttcactctccacactgcatggagaggtgttttcccaaacgcaaaactaaccatgtgactctcctccctaaaattcttggagaaggcaccagtagatgtttgttaaattcagccccattccttacattccaatcagtgattctctggctgttcattaacatgcacagtgcttactccagtctgtgttagaagattctgaggacaccaagttgggtgtgggagggaggccaggatatacatgtttgggaggcatcactcaactccaagcaaagttctcccagatcaccttgagacactccatctttggatggcaatgggcccgactgcacacgcatgtgaacacacacacacacacccacacacaccacacacacacacacacacacacacacacacacacacacacacacacacaggaagcaggcctgaggcatgatgtctgagtgctcccgctggagcaggaaggcagaatcaacctgccataggaagggttgcccaggaggcctgatgaataggagtttggtggcttcagggaagagaggctgtggaggtgccttcagctcaggtgctggctcctggggaccttccatctctgatgagactttgttccagttggcccgctcctttctagggagtcagcatctcagcttcccatacttctggggtggggggtggggcaaggagaccagcatgacccttggtcaggggcttgcacaggaactctggccattctcattccctgagctggagggccaggtggacaccacgtgatcctggggaggcttttgcctcttccgagggctctggctccagggcctccctgttccaggggctaggtgtgccttcctcaatgctgcttttggctatgagggtgacgggcccagggcttcagggccccagatcgcaccttgccatctggggtgtccgtcctttgtcccccacagcaggctgtgtttgcccattttctcctctgccatgggtggagatggatctgaagttgggtgttgaagcctctgaccaaggctgtatcttgttttgaggccctgcccggtttccagggaccacatctggggccaagaggaagaaccgaactgggactaggttagctgtgctgggtcagggcctgggcatgggctgtgaaagctggggactgggaccttcaggccctctattgagatctttgcagaagggggtggatttaggaagctactgggctgggccagggcgtggaaggcactgaagccgtagtgtgtcccagcattagagtcccagagtttagcttggcggggcaggggcaggtggtggggagaacaggaaataggccaggctctcggcggagtctggcagctttgagccttctctgggcttctggggttttccccaggctcctgagccagccaggacatttcttaatcccactgtcagccttccaagaagccccgcccactgggctcagtcaaggcaggagcgactgtgtgtcacccctttccctagaatccagccccactgccaggaaaagggagctcagggcatggaggtgaggctgggactctcccacatctgcttgttcctcatacccacctccttagctggcccctggaagatgacctcgaatgccagcccaagtgagctgggcaccagccaggggaggccaggtctggcagctcattaccatgggagggagggcacgttctctccgacgcccgtcttcgtgtctcctccctccctcgccttcctccttcctagctcctctcctccagggccagactgagcccaggttgatttcaggcggacaccaatagactccacagcagctccaggagcccagacaccggcggccagaagcaaggctaggagctgctgcagccatgtcggccctcagcctcctcattctgggcctgctcacggcagtgccacctgccagctgtcagcaaggtagctcaggaggagagggctgggcacgggagacccaggggtggacaggtggtgttctggctcccctccccagggccttgatacttacagtttggagggggagcagggactgcgctagctgaaagaatgtcccaaggcagagacctctgaaccaagtctctgcctgtcacttgttttcaacgagtgaaaactggcagcagttggttctaggatctcagggaggaacaggatttgaggcccaagccccaagagcaggcattgcccaagggatggctgggtcctgagtacaggggacccgggggtacaagtagggtgagagtggggcccaagccacccctcaaagacttgggctttgtctcggcctcttgggcttggatagagaacagtgcccagtgtgactcccccaaatatctgacctcttcgtcctgctctgcctgaatggatgtgtgaccttgagcaaatcactgccccttcctgagactcagttttctcacctataaaatgagaacaataaaccccaccctgcccacctcccagggctgctgccaggtcagaggtgaagaagggctttgcacctggtgaagtaactaacccaaggtctggctttcattctacactgtcaggctgcatctgcagccaaagtctggggactctgcaggtgggacttggtccagaggggactggcaaagatgctttcagagctcccctcccacccccaccccgagctcttatgtgtgtctgcttcaactctgtctcccaggtcttggaagccctctggggaactgcagaccagagaggttgagtcacagagcacggcaagaaaggacagggttcagaccacctttctcctgccccagacactgccccttgctgtatgtgcatgggaggaggagcagggactgtggtccctggggtgactggagagaattggctgcagggtctaggaggaaacagggaggggcctccaagggttgagccctaactccccatgcttgagcaaccactgacctgagggagcagtctgaacccctagggaaacaatgactcccaaatactgctttttggcaggtgtggaactgagggtaatcacactgtgtgtcttctgcttcccctggagataagtgaggtctgacctcactacaggccagagagttcctagcctccttcctccttcccaatatttgccaggctcggagaagaggtcaggcctccactgcagcaggagagcttttggtagactcaaaggaggacatttgagcaggagtgagccagaggaaggttttctcatgtccagcttgggtccctcaaaatatagggatgcaggtatattctggcctggaggcaggacccctctgaagccccctgctgacctgtgttttgtcctgggacttctccccgctgagggtcttttctctacaaggctgagctcctgcaggctcatggagtgcagtgatgctggggaagaggaaagtcctttggggaagcagaggcctgaaggcagggacttcaggaaaatcttgagggactgtgttggtgtcaagggtcaaaaagcagagaagggacctggtgcagtagctcatgcctgtaatcccagcactttgggaggccaaggccagaggctcgcctgagcccaggagtttgagaccagcctgggcaacgtagtaagaccctgtctctattaaaaaataaaaaaagtagagaagggtgcaggttggggcctcaacctaatctctggccctagtccctgggcacccagctgggggaatcaaaaggagctcaggttttgaggcttctttcctggtccccaagacccagagtagagttcacccctccattctgcccttctaaagatgtcctggtccactcctctctctgggtaccccaggcaccccagatctccccagctgagcagccctgagagtctcccactctcatacccttcctaccatcagagaaacgtcttgctacagaacaggatcttctagatcccagaccagtcttgtcagctgtgggtcctcctcagccttctgggagccactcccagctgcaaggcctaggccggctgtccagggggctgccctttggtccctggggctgcatgtgacccacctgcgggagggaaagaggctctgggctgcctagatacagcactgaggctcttccctccttggcttctcactccttccaactcccttctctctgagcctctgttgttcctccagctccctccttttcctaagctcggtggagcttaagatgcataagtgggtcagatgggctgtatcccacccctgcctccccacaatgtctccttgctcctggcagctggctgagggccttcagcataggtggggtccttgaagagtgaggcccctcgctctcctgcacatgcagccccactgtggccccgtctgctacagcccctctccctttgttaggcctggggaaccttcagccctggatgcagggccttatcgcggtggccgtgttcctggtcctcgttgcaatcgcctttgcagtcaaccacttctggtgccaggaggagccgtgagtgctgcccaagggtccctgagcaggcagggtgggcccaggaccactgctcttgctctagtagcagtgagaagggcctcagaaaccctgtgtccaatcctccccctgaggctcaagggaagggaaactgaggctcaaggtcatggggtgggttggtgacagtcgggatgagggaatgagagcctaggcttgctggctcccagacctgggcactgtgggccccacagctctggtgcccactccctgtgagttttggggaaacggcttcgcttcttggagtcttggtgtttccgcagagccaggatagcggcccagcctgtgatgggggctgtaaggacctctagaaggtgcggtccctcctttgggtgggtcagctgtggtacagagagggcatgggacagacacacctcctgccctcacaggctcagactggagtgagctgtcagaagttcaagagttgctgctgagggagagcgcagaggacactgcagggcctgacctggtccggggtggccagagaaggcttccccattgcacatttatcccgaaacctgactaacgaggaggagtcactaccaggatagagtggcgtgggaagagcgctgcagttgagggaagggtacacccaggtcctgagttaggggcacggcaccagggctgctggggacagacacacacaggtgaagggcaggtgggctgaaatccagctcactctgcactcaccaggtcaggaccctcaggcaaggctgcctctgttcccaggggcatttcttcccagatctcacaaaggtggcctggtggcttgagtgctagccccatgcagggttgctgaggaaaccccagtggctcagtgggtggagacagggatggagacacctgagatgaggctggtgaggtgggcaggcccaggccaaccaggctcttgcacaccaatgacctgagctttggactttacctaagtgagcaggaatccagtgacaagttttttttttttttctttttttttggagatggagttttgctcttgttgcccaggctggagtgcaatggctctatctcggctcactgcaacttctgcctcccgggttcaagcggttctcctgccccagcctcccgagtagctgggattacaggtgcctgacaccacgcctggctaatttttgtatttttagtagagacaggtttcactctgttggccaggctggtctccaactcccaacctcgtgatccgcctgcctcagcctctcaaagtgctgggattacaggtgtgagccaccatgccctgcctccagtggcaagtttttaagccagtttcgggatgagacacggccttagcagaatgactctggctgcctcgtggcagatgcacggcagcggtggaagagtctccagtctgcaggcctggagagtggtgagggggtgggcatgaggtcaggagggggtctggactgtagcggtggcagagaggatgaagtgaagagacgagtctgagcgctgtctaggaggtgggcaccctgggagttggtcgtcacagacagcagcggactcgaggggaggaaggcaggaatggcatctaagtttctcatggcggatcactcaccgaggcccagaacacaggaggatgagcagacataggggcaactgctaagtttaattggagacatattaagtctggggtgcctgtgggatgtctaaggaaatgagcaggtgttcgggtccctgtaaccctcatgagagcagcttctgggaggcttcagggagagcccacactgcagggggtttaaacttgagtaagagacgagaaggttgttgttgaatgcccttcagatagactttctccacctgccccagctctgcctgaagggccaccaaccacatctgtgcccactgcccaaggcacgagctggggaaatttggggcagacactgcatcctgcagggcctgctgtggaggctgaactgagggcgtctgggacagagagaggctttggactcaggataaatcttttgcaaatatttggccccccactatggagtggggagaaagtgagagaccccatgggtggggccagtagccgcggctgacatgccctgttgcacacagctctgggaagggcagttgctagccttcgggcttgtgagaaccaggacccagaatagggtctgcttggacgaggggggccccactgaggagccccactgatgaatcccatccccagggagcctgcacacatgatcctgaccgtcggaaacaaggcagatggagtcctggtgggaacagatggaaggtactcttcgatggcggccagtttcaggtgaggtgcagggcagggctgcccggtctgtgctcccagggcctaaggagaatctcaagacaggtgctgctggggggaggtggctggggaggacggagactcatgtgggcaaaagctagtgaggcaatgggggctttgtgaggattgcagggctctgtggggaaaatgcagcccctgtgtggggcgagggctgcagaaggggacggagacttggtagggtagggttcagcgtaggggaggggactcatagggcagtgggtacaatggggacaaagggttcaatggaggaaggaacaaatgagtgagggactcagtgaggggaaggctcagtagaggatgcagctcagtgggggatgggttcactggggtatggactcagtgggggatgggttcactggggtgtggactcagtggggtatggactcagtggggtatggactcagtgggggatggagctcagtgggggatggagctcagtgggggatggattcagtgggggatgggttcagtgggggatgggttcagtgggggatggactcagcctcagtggggcatgggctcagtgggggatggactcagcagggtatggactcagtgggggatgggtttaatgggggaattggttcagtggggatggactcagttggggatggagctcagtgggggatgggtttagtggagcatggtgtcagtgggggatgggctcggtgggggatgggctcagtaggacccagtggtgcagcagtccacaggaggagggagataggtgtcagggaggggatgctgagaggcctccagtctcggatgcataagcccagatgtggtcaggacaatccccttctgggagtcaagtgtttattctggaagctattactgtcacaagtgcaggaaggggcagggagaaggggatagaatgggaggagcgatgacccatcaggcccatgccttcttctttcaggtccagtgagcatgagaatgcctatgagaatgtgcccgaggaggaaggcaaggtccgcagcaccccgatgtaaccttctctgtggctccaaccccaagactcccaggcacatgggatggatgtccagtgctaccacccaagccccctccttctttgtgtggaatctgcaatagtgggctgactccctccagccccatgccggccctacccgcccttgaagtatagccagccaaggttggagctcagaccgtgtctaggttggggctcggctgtggccctggggtctcctgctcagctcagaagagccttctggagaggacagtcagctgagcacctcccatcctgctcacacgtccttccccataactatggaaatggccctaatttctgtgaaataaagactttttgtatttctggggctgaggctcagcaacagcccctcaggcttccagtgagtccccatcttgctttctgaatcatgacagtcaccttccgactctgttgtagtggctttgggggattatgcaggaagcccctgtgcccacagggcagctgggaccgagggggcccaggctggggaggggctgagagtgtgtggccagggtgagggtaagagagggttggtgcctttctggtgtttgagagtgaagcaccctcaaatgggagtgtctgatgacacctgggagaactgggaggcagggagaccaggacaggtgagcccatttctgccaatgggctggtttttgtcccctcaggccaaaccctttcttcaaccagagcagccaggcaaggcttcccagggcagggcagagcagaccctaatatgagctaggttcccctagtgctgatcagtttcctgtatgtagggaaggaagaggatgtcagaggcccatgggccagagagctcacccactctacccttgctccaggtagcgcccctcttggaaatccccgcccccaaacatccttcatccctgagactctgggcttttccttgctcagcgccgctcaccctctgcctctgtgctggaggtgtcacagtgggttcacacagatctagctctgtctccctccagtagcccctccgtgctgggctttggcataggaagtgtcaggaagcagtcttgggttgagactcaggaagcccagatctgagtcctgggtcctctggcaacttgtgtgtgaacttgggaaagctgttgtcctctctgagctgagctttctctccgtggaagatttggccagtctcacggcagagctggaggagagcccagtccttgcctatgcctgccctcccaatgcccagtcctggggtgggagtcagggttgggaagggaggatctggaaactgggtcctagtaggagcaggggagaggggaggcatgccttgcctggctggctgaacctggaggcccctcacctctgtgactgttggccttatgcgaacagcttctgtctctgtccagggtgataacctgagagactcatccaggataattcccagatccagagaagtggggccagaaggtaggaggccatccaccttgtcccaaaggtctccctctgccacttgtctcaacctgtcacagcccccttgctttatgttatggccattgttttgctattccaaggcttcaccaagtaccactggggaagactcatcttaaatgggaatcatctcttctcacctcattgggtttaggatgcagcctgcagcagagggaagaggcctgtgggtcggggagcagcggctttgctccaggcctatccttgcttttctgcgtgtcttgagacaagtcacctcccctctctgggcttcggcttaatgaactgtggcttgtgatttctactctaggcttttgcttacgtggctgcctgtgactcatgccttttcaccccacctctgccagtttaaactctgcgcattgttttttcttgacccaaccaaggttcctcctcttctgggaagtcttccttgattagaccagagggcaaagccaggccagcagccagcccagcttctccactcactgaaggagagacagaggttcctagagggtcaggcctctgctaaggcacaaacagtcccctcttcctttcctgtctcctggtgggaagcttctgactgccggatccgattctccttgcacgaggccacatttcctcccagctctgccctcagttgtccctggggggtgggagtgggttcgagtcaggtcactccaccagcctgccagggccagaaggcagagccaccatccctgtctccctgcagcaagtgaatcccagcccctcacacctgtgaggttttgccaggagaagcctgcttctgcctgggctcaccttgctccccagcagctgtctgaggcctctccaagagcctccttggcccccttctcattctgtcttgctcaatatgggcagatctaggagagtgggaaccctaggggctcctgcaggggctgggccggcactgaccttacagcccttcaccctcaccccatgttcctgccctgatccagaggggagtgctgggagcagggagctgctggccccagaactgctgagacccccaatccttatcgctcattcccacctgccagcctggccagatcggggagggaaaggaggctgggcccgggccagggtggcgcttaatgaccctccgggggcctaatctcagactggcagccacggagtggctcaggcgcgctcctggagaaggctgataacgcaccagctgggcccccaccatctatcgctgcacagccagtcccaggggcagcctcccagggcctggggagggggagcctctggactagggcggggctggaggcgagctctccacccccagccctgagggaggggatcctgagcttcgtgattggcagacaagggagagacccagcctgcaggaggggtgggctgggcctggtgggaacctccagacacctgtgctccttctctctttcctgctctcttcccaaccttttctccccacgtaggacctctcctgcccaggcctgtctcctctttgtctctcccagcctccatccatctctgtctccctgtttctcagtctctccacctctgtttttgtctcatcctctgcctctctctctcctgtttgcctttctcctcctccacctgagctcagtgcccacctcctctttctctcttgcatcccttttcagtttccagctggttctcttggttgtccccttcccagctgtcccctgcctcctaagcttccttgatgtcaacccttggccgggcagttcccacgatctcattggtctcacttctgtgtgtggtatcatctctctgtggtcccttccaccagctatctgccaggattgcaggctgcctcaagccctggctctcagcccagaatgtcctcttactgttgaggacatttttgctcttcctggaacagggcttgcaccttgttttcccctctcccacctaaaacatgtaagtttcatagggttacattataggttatacccaaactcaggcagaaaagaaaagcctccacccagcaactgcacagttgagggaagactgcagcactgcttacttcatttagacttgaagaggaacttccagccaggagttggctttgaaaacaggctgtggagttccgtctccagagtgccaggtggtcaaggggagtttcaagattactgccgtcatactcagagtgacacatgcagaaatactatctgtttattgtgcttcaaggatccattagatcaggactattgctgggcaaagcctcttcccgcagcctaggggtagtaaaggtgggggtagaggtgctggggctggggccagaatcacacacagtctgctctggcctctacccaccttcacagggaagtcaggtggctgaagccagcagaacttgctctgggaccagggtggaggcacctgcctcccatccagacctggctggagggtcttgactccctagcttggctctcctcccagggtttttttttttttttttttttgtccctggcagtgcaggggtggccaaaagcttgagcttgggaatcatgccgattggttcaaattccagcctgctcctcgatgcttgtgggatcgcctagcctttcagatcttccattcctttgccggtaaaattggctctatagtacattccttgcagggctgctgggaggaaacagagatgacatccgtgttattattgctcctgagacttgccagaaagccctccatgatcagcgtagatgccatttcttcccagatgctcctttccccactcctgggttcagcacttcctccgggcaacttcagcccctgctcctccctctctttgcacccgccccacctgccccactcactccacccaccccagggtgctgtctacttgtctgcatcctgctcctgccctgggtctgggagctcctcaagggcaggaatggagtgacttccctctctgtgcacccaggacagggctggacaggagaagggaagcccaaggagtggtgaagagccccgaaggaagggactaaactccagccatctgtcccgcggtgtctgttcatactcctcctccgtgcacgggctcagacatacatatgcgcatatgctctgtctctttctggttgaaggtcctgggagccctccggaactctgctgcctggcagtccttcagtttcgggagcttttctgtctgcccgtggcctcggctgccacctggtggctgcacgctccaaaggaagcgtagattgatgagagcctcggaagttgagcttcaggcgcggctcttccccgtcacactgggaccggacgcatttccatggcgtggtcccaggaacctctcaggtcatgccagcaactgggacttcctgtggaatgcaagggcagtggggcctccgcgagagagagagagagagagagagagagaagagagagatattaaggatgaatcccagtgtctgctctgagcaaattggaagacgatggcatcaggggcactgctctgggctatatagactgtgcctccactaaagggtccctgagaccaggtgtgggcccgtatccctggagggagaggtaacttcctctgattcgaaggcatcatataggctagtgaatggcactgagaatggcagatgccagggacaagcaggagcatgtgtgggatgaggatgcggcgtggatgtgtgacgtttcagagcctgcaacacatccgtagggaagtcctggaggagcagttgggtgcatggtggagttctgaaacagctgggcagtcggcacttgagccagagattctgctttcgacctggatgcccattgagaggttaagagctcaggtctgggtcaggcagcttggaagcagcacagcttggacacttggtagcctgggactgtggttaaatcaacgtgactctcggagctccagttcactgtaaattagggcagtaaatgatgtctacatgataagtggtgttatgaatgttaaacattcacatgaaatacatagaatagtgcttagcatacagtacacaataactgttagctatttggaaaattactattgttattatgattatttattacagagtgaactgaattggatgcaagatcacggtgcgtcagagctagcaagatccttaggatcatttagcctggtttactaatattacactatggaatttaagcccaaggaatggagagtacccgacgagcgttatgtaaggagtcgagtgagaagtaagctggatgctctgcttggctggcaggtacagaatgtgccagacccatctgtaccagcctggatctcttgaggcatcagcacaatggacctggccacaccagtttattccacaccgctgaggctggtacagttctggacatggactttgtaaataaataactgggcctttggtcagttctagctgtgagcttggaggtatggggtgggatggtgaggacaggtgggggcaaagtgaggaaaggggcagggaggagaggggagagagaaaaaggggaatgagacaggctgagctagtgagctggaattggaggttgggaacaggctttccttgatggtggtggtgctgttttctttttaattttaatttaattttattttaagttccaggctacatgtgcaggatgtacaggtttgttacataggtaaaaacatggtggtttgctgcaactgtcaacccatcacctagatattaagcccagcatgcattagctatttatcctgatgctctccccacccctgccccaacaggccccactgtatgttgttcccctcttttttgttcacttaaaagatcccacttttaagtgagagtatgcagtgtttggttttctgttcctgtgttactttgctgaggataatggcctccagctccatccatgtccctgcaaagtacatgatctcattcctttttatgtctgcatagtattccatggtatatatgtaccatattttccttatctagtctatcatttatgggcatttgggttgattccatgtctttgctactgtgaatagtgctgcaatgaacatatgcttgcatgtatcattatttttttattttttttgagatggagtcttactccctcacccaggctggagtgcaatggtgcaatctctgctcactgcaacctcctcctcccgggttcaagcaattctcgtgcctcagcctcccgagtagctgggactacaggtgcctgccaccacacccggctaatttttttgtttttttgtatttttagtagagacggggttttaccatgttgttcaggctggtctcgaactcctatcctcagatgatccaccctcctgagcttcccaaagtgctgggattacaggcatgagcaaccacacccagccacatgtatctttataatataatgatttattcctttgggtacacacccagcaatgggattgctaggtcaaatgctatttctggttctaggtctttgaggaatcaccacactgtcttccacaatggttgtactaatttacatttgctggtgctgttttctacattgaatctgagggctactgtatgatgtgtaagacactttctgattggagcctcacaatgatcctaccaggtgattacaactgagcccaagttttagaggaaaaaaatgcagactcagagagagaaaagtgatttgcccaaggtcacatagccagctagtggcattgaaccctggccttttgactttaaatctattgcaaattctaccccagcatagggttctctttggggtgtgtgtgtgtgtgtgtgtgtgtgtgtgtgtgtgtgtgtgtgtgaaatggggagataaagaagccaacagtgtttgcctttgcagagcatgcagtccatttggaaacatgcatgtgggaaagtggggagggaccctgtcaagcatctaagaggagtggtggcatttgctgtgtccacctccatccttcccactcactactcagcacctatagccttgtcgctctccccaacactctgctgagactgttgtcaccaaaaacactattgtccggctccctgttgaaaggtaagatggtctatctgattcttccgctctcagtataataggatgatcaccattttatctgggaagctgttcctgaccacctgccctcagctcatcaagcttctgtgagcctgcaggctcaccctggtcatgccgcccatctctctgaacaagattgtgaactctgaactttgtgaggcaaagaccacatacacctctttattgcaatgtgcaagtgtcctggaatataggaggtctccgagagctatgtgttgacatggagaccttatcccttgcactcagttacactgcttccagtaaagtatcaacttctagatcagcgccttcagctccactccctcctgcacagctccacaggtacctcaggtccaaaatggaattcttgatctttcaccaacctgagtcctctgttcctgtaagtggcatccattcacccagaccagagataggggagtcacccagaatccccctctccctcagtccctgagtttcactttccaacatatctccctccaggttctttccaacacatctccctccaggttcaagcctcgatcttgcctgatgtttgcagctgcctgctcccttgtttttatttttacccccaagttttcctctacactgcagctagggagacctttcctgctggaatacagccattcacatctgcgagaggaatctaaactcaaggcaggtgtagcctagtggctatgtgcatgagcttgaagccaaatttccctgagcaaatcccatcctgccaattttatattagtgggatgtaccccaacgagggtatatcagggactgaatatgcaaattagggataaaatgaggcccatcttatgaggttgtggtgaagagtaaatggatgtaaagaaagcatgcagtatgctcagtgaatgacagccatcgtgattttcctttccttgcctgcaatatctcgagcagccactagatgactccacctccttctccctttccagtgctgccaacactactgctggaacttctgcctcccctcccctccctcaccacacatctccatgcccgtgttgttcatgtttttccttctgctagcctcaccgtcttcggggcgtctccctgacatcttttactacatctcaccctcagctcttggaggacgggatgtccccacgaaaactggcatagtgcctgcattgaacaagtactcagtgtttgctgaatgaatgaatgtgggttagtcaatactagctcagctgcttacatcacttagcctccccgggtctcaggatctccttttatctgtggtgaccatccaatgtaaagccctagcataagacctagcatgctttagacccatggttgccgtgcacagccagctgcctgtcaatcattgcccattcccattgcccactagccattgtccactctatgttcacccctgttacctcacccagctgagggtcttaaacatagttttacctcttctcaaaggtcattctttacttggtagggtagggtctagaaagagtctgcaatttggttagagtctagatttagtttgcaacccagctgggctgggtgagcccaggcttggctgatggttcagctgagcccagatggctcccatctgcctggaaagcataggctcagcctcccccttccctgaacccctaccaagcatcctggctggctgtgctcctggtcctcttttactctagtccagttcctgtcctggcttgggctgggggtaagggcacttgtttctggccactcctcatggatctctagtctctgcctctgtctttgcctgcttgaccctggtccttgtgccacttacatcaatgtcctgaagcaatgactattttttataggaccgactctcaggagatgaagatccaatcactctatcaaagaatatgagcatttccgaggctcttgtaaggtacatgctttctattgttttccttaagggttgaatccatctacacttaatcaattccaccacagtgtaaacagtgtgtgtggaggggcgtgggggtgatggtggactaacagaggctgaacactttccaaaaacttgttcccaaagtttattgctttctccatatgtaataccagttcctgttctctgtattggttgcaatatcttttttttttttttttttttgagatgaagtctttctctgtcacccaggctggagtgcagtggtgcgatctctgctcaccgcaacctccgcctcccgggttcaagcaattctcctgcctcagcttcccgagtagctgggattacaggcgcacggcactatgcccggctaatttttgtatttttagtagagatggggtttcactgtgttggccaggctggtctggaactcctgaccttgtgatccgcccccccttggcctcccaaaatgctgggattacagatgtgaaccaccgcgcccggcctgcttgcaatatcttgaacagccacaagatggcagaacttatatagttactggttcagcattgatcgtcccatgaatgtgaagtttactttttgtcctttacctgttcagttgggcactgccctggtgttatggactgaatgtgaaaactgatgagaagatcaatactggaccaggaactcccccattaccagtgcatagaggggagtctgcccaggctgggggtctgagtggagtggccattgatggatccttggggagatgtgagggcagatagaaccctggctagaagtcaggtgttcgggatgctagaactggccttgccctgcctcaagttcagctaccattcatttcttgaggactatctctatgccgtattttgtccaaccaccacagtgaaagcacccatcaccagggtttgtgtcttaggcagttggttgttttatagaggtctcaggcaatgcaaagcccaagacaaaactgtgtggtcatggcgacctggcaatctttattaaaatggaagctctgatggctgaatttgtaaaccaggtcgttgtgatgcaggaaagtattctggcaagggtggatgagtttggtaatgttagacaccacttctgggcaggagtctaagggttccggaagagaagaggtggagcagcatactaacggatgaaatgactggtggcgaatgagtttacttcttgtcctttactcataacctgttcacttgggcactgccctggtgttatagactgaatgtatgtgtccccctcaaattcatgtgtttaaatcttagcccccagtgtgatgttattagaaggtggggccttttggaaaaaattaggtcatgaggatggagccctcatgaatgagattagtgcccttataaaagggaccccagcaagctctcttgctctctttctgccgtgtgaggacacagcgagaggacagcagtctgcagccccgaagagagccctcaccagcacctgaccacgctgcaccctaatttcagacatccagcctccagaactgtgagtactatgctgaagagagccctcatcagcacctgaccaacctgaccatgctgcaccctcatcttagacgttcagcctccagaactgtgaatactatgctgaagagagccctcaccagcacctgaccatgctgcaccctcatctcagatgtccagcctccagaactgtgagtactacatttctgttgcttataagtgatccattctgtggtattttgtgagagcagcctgaatgactaccttgtgactgaaggtatacttcataatagtgttcggggtcactgggaaatgtgttcagaagatttcagatgtgcatcagcaatggtcttcttccatttgtcctggaaagagatgaaaatcacatcacaaaaatgctcatcagtgtctactggcccttttccttacatatgcctgaaactccaacctctatgggtgccttttagtgcttgtttgggctgtgacatagagagaaattgaacaaaataaatgtacagtataattacaactactgtaaagcaaagcaatttgcaaacatcaaaaggaaatcctgtgtccaaactgcctacgtcctatggaccacactgtggggctctgacagtattctgtgtgactgccagaagataacttgaccctctttagctaaaggtaacaccaaccagagtctctatgatctctcacacacaatgctcagcatttaataagaaatcagtaggcatgatgacccattcaccaaaagccaaagaaaaaccaaagcagacaacagaaataatcccataggagaaacagatattgagtattcagacagaaatattaaaatagccatgattaatatgttttagaaaatagagagaaagatggagcatctcatcaaagagttccatctataaaaagagtgaaatgggaattctgtaatttttattttatttttaatttatttatatatatatacatatattttttattatagtttaagttttagggtacatgtgcacaacgtgcaggttagttacatacgtatacatgtgccatgttcgtgtgctgcacccattaactcgtcatttaacattaggtatatctcctaatgctatccctcccccctccccccaccccacaacaggccccggtgtgtgatgttccccttcctgtgtccatgtgttctcactgttcaattcccacctatgagtgagaacatgcggtgtttggttttttgtccttgtgatagtttgctgagaatgatggtttccagcttcatccgtgttcctacaaaggacatgaactcatccttttttatggctgcatagtattccctggtgtatatgtgccacattttcttaatccagtctatcattgttggacatttgggttggttccaagtctttgctattgtgaatagtgctgcaataaacatacgtgtgcatgtgtctttatagcagcatgatttataatcctttgggtatatacccagtaatgggatggctgggtcaaatggtatttctacttctagatccttgaggaatcaccacactgtcttccacaatggatgaactagtttacagtcccaccaacagtgtaaaagtgttcctatttctccacatcctctccagcacctgttgtttcctgactttttaatgattgccattctaactggtgtgagatggtatctcattgtgcttttgaattgcatttctctgatggccagggatgatgagcattttttcatgtgtctgttggctgcctaaatgtcttcttttgagaagtgtctgttcatatcctttgcccactttttgatggggttgtttgtttttttcttgtaaatttgtttgagttcattgtagattctggatatagcactttgtcagatgagtagattgcaaaaattttctcccattttgtaggttgccttttcactctgatggtagtttcttttgctgtgcagaagctctttcatttaataagatcccatttgtcaattttggcttttgttgccattgcttttggtgttttagacattgaagtccttgcccatgcctatgtcctgaatggtattgcctaggttttcttttagggtttttatggttttaggtctaacgtttaagtctttaatccatcttgaattaatttttgtataaggtgtaaggaagggatccagtttcagctttctacatatggctagccagttttcccagcaccatttattaaatagggaatcctttccccatttcttgtttttgtcaggtttgtcaaagatcagatggttgtagatatgtggcattatttctgagggctctgttctgttccattggtctatatctctgttttggtaccagtaccatgctgttttggttattacagccttgtagtatagtttgaagtcaggtagcatgatgcctccagctttattcttttggcttaggattgacttggcaatgtgggctgttttttggttccatatgaactttaaagtagttttttccaattctgtgaagaaagtcattggtagcttgatggggatggtattgaatctataaattaccttgggcagtatggccattttcacgatattgattcttcctacccatgagcatggaatattcttccatttgtttgtatcctcttttatttcattgagcagtggtttgtagttccccttgaagaggtccttcacatcccttgtaatttggattcctaggtattttattctctttgaagcaattgtgaatgggagttcactcatgatttggctctctgtttgtctgttattggtgtacaagaatgcttgtgattttcgcacattgattttgtatcctgagactttgctgaagttgcctattagcttaaggagattttgggctgagacgatggggttttctcaatatacagtcatgtcatctgcaaacagggacaatttgacatcctcttttcctaattgaataccctttatttccttctcctgcctgattgccctggccagaacttccaacactatgttaaataggagtgctgagagagggcatccctgtcttgtgccagttttcaaagggaatgcttccaggttttgcccattcagtatgatattggctgtgggtttgtcataaacagcttttaatattttgagatacgtcccatcaatacctaatttattgagaggttttagcatgaagcgttgttgaattttgtcaaaggccttttctgcatctattgagataatcatatggttttgtcgttggttctgtttatatgctggattatgtttattgatttgcgtatgttgaaccatccttgcatcccagggatgaagcccacttgatcatggtggataagctttttgatgtgctgctagattctgtttgccagtattttattgaggatttttgcatcgatgttcatcagggatattggtctaaaattctcttttttttgttgtgtctctgccaggctttagtatcaggatgatgctggcctcataaaatgagttagggaggattccctctttttctatcgattggaatagtttcagaaggaatggtaccagctcctccttgtacctctggtagaatttggctgtgaatccatctggtcttggactttttttggttggtaagctattaattattgcctcaatttcagagcctgttattggtctattcagagattcagcttcttcatggtttagtcttgggtgggtgtatgtgtccaggaatttacccatttcttctagattttctagtttattttcataggggtgtttatagtattctctgatggtagtttgtatttctgtgggatcggtggtgatatcccctttatcattttttattgcgtctatttgatttttctctcttttcttctttattagtcttgctagcggtctatcaattttgttgatcttttcaagaaaccagctcctggattcattgattttttgaagggtttttttgtatctctatttccttcagttctgctctgatcttagttatttcttgccttctgctagcttttgaatgtgtttgctcttgcttctctagttcttttaattgtgatgttagggtgtcaattttagatctttcctgctttctcttgtgggcatttattgctataaatttccctctacacactgctttgaatgtgtcccagagattccgatatgttgtgtctttgttctcgttggtttcaaagaacatctttatttctgccttcatttcgttatgtacccagtagtcattcaggagcaggttgttcagtttccatgtagctgagcggttttgaatgagtttcttaattctgagttctagtttgattgcactgtggtctgagagacagtttgttataatttctgttcttttacatttgctgaggagtgctttacttccaactatgtggtcaattttggaataagtgtggtgtggtgctgtgaagaatgtatattctgttgatttggggtggagagttctgtagatgtctattagaaccacttggtgcagagctgagttcaatcctggatatcctcattaactttctgtctcgttgatgtgtctaatgttgacagtggggtgttaaagtctcccattattattgtgtgggaatctaagtctctttgtaggtctctaaggacttgctttatgaatctgggtgctcctgtattgggtgcatatatatttaggatagttagttcttcttgttgaattgatccctttaccattatgtaatggccttctttgtctcttttgatctttgttggtttaaagtctgttttatcagagactaggattgcgacccctgcatttttttgctttccatttgcttggtagatcttcctccatccctttattttgaacctatgtgtgtctctgcacgtgagatgggtttcctgaatacagcacactgatgggtcttgactctttatccaatttgacagtctgtgtcttttaattgggacatttagcccattacatttaaggttaatattgttatgtgtgaatttgatcctgtcattatgatgttagctggttattttgcttgttagttgatgcagtttcttcctagcctcgatggtctttacaaattggcatgtttttgcagtggctggtaccggttgttcctttccatgtttagtgcttccttcaggagctcttttaggtgaggcctggtggtgacaaaatctctcagcatttgcttgtctgtaaagtattttatttctccttcacttatgaagcttagtttggctggatatgaaattctgggttgaaaattcttttctttaagaatgttgaatattggcccccactctcttctggcttgtagagttactgccaagagatcagctgttagtctgatgggcttccctttgtgggtaacctgacctttctctctggctgccattaacattttttccttcatttcaactttagtgaatctgacaattatgtgtcttggagttgctcttctcgaggagtatctttgtggcattctctgtatttcctgaatttgaatgttggcctgctttgctagattggggaagttctcctggataatatcctgcagaatgttttccaacttggttccattctccccgtcactttcaggtacaccaatcagacgtagatttggtcttttcacagagtcccatatttcttggaggctttttttgtttctttttattcttttttctctaaacttctctcgtcatttcatttcattaatttgatcttccatcactgataccctttcttccagttgattgaattggctactgaggcttgtgcattcgtcatgtagttcttgtgccttggttttcagctccatcaggtcctttaaggacttctctcattggttattctagttagccattcatctaatttttttcaaggtttttaacttctttgccatgggttcgaacttcttcctttagctcggagtagtttcatcatctgtagccttcttctctcaactcatcaaagtcattctccatccagctttgttccattgctagtgaggagctgcgttcctttggaggaggagaggtgctctgatttttagagtttccagttttgctgctctggtttttccgcatcttttggttttatctacctttggtctttgatgatggtgacgtacagatggggttttggtgtggatgtcctttctgtttgttagttttccttctaacagtcaggaccctcagctgcaagtctgttggagtttgctggaggtccactccagagcctgtttgcctggatatcagcagtggaggctgcagaacagcagatattggtgagcagcaaatgttgctgcatgatcattcctctggaagttttgtctcagaggattacctggccatgtgaggtgtcagtttgcccctacttgggggtgcctaccagttaggctacttgggggtcagggacccacttgaagagggtccattctcagatctccagctgcgtgctgggagaaccactactctcttcaaagctgtcagacagggacatttaagtctgcagaggattctgctgccttttgtttggctatgtcctccccctagaggtggagtctacagaggcaggcagacctccttgagctgcagtgggctccacctagttggagcttcccggctgctttgtttacctactcaagcctcggcaacggtgggcgcccctcccccagcctcactgctgccttgcagcttgatctcagactgctgtgctagcaatgagcaaggctctgtgggtgtaggaccctccgagccaggcgcaggatataatctcctgttgtgccgtttgctaagaccattggaaaagcgcagtattaggatgggagtgacccggttttccaggtgccatctggtcacccctttctttgactaggaaagggaattccctgatcccttgcgcttcccgggtgaggcgatgcctcgccctgcttcggctcacacttggtgcgctgcacccactgtcctgcacccactttcagacactccccagtgagatgaacgtgatacctcagttggaaatgcagaaatcacccgtcttctgcatcactcacgctgggagctgtagactggagctgttcctatttggccatcttggctccacctctatattaatatttatctttgcatgaattcaatctcttaccttaacattaaaaatatgaattcccttatctatgccatatccattaattattataaacttggggacattatttattttatcagtttcaagcctagctttatactccatgctaagttcaggatgaacttcaagttcaaaacatgccttcttaagtatacacatgaggagcagcagcacaatttcattcgaaggaagtttagtaattacgttacaatcagttatatgaataagtggatcatttacactctctactcttataattaactaagggtatttatgattaattttcccatcatggccacttaccatcacagaacttaaactttaaatttaaaaagattaacatttacaagaaacaactggactgggcgctatggctcacgcctgtaatctcagcactttttgaggccgagatgggcagaacacgaggtcaggagatcgagaccatcctggctaacatggtgaaacccatctctactaaaaatgcaaaaagttagctgggcatggtggcgcatgcttgtaatcccagctactcaggaggctgaggcaggagaatcacttgaacccaggaagtggaggttgcagtgagctgagatcgcgccactgcactccagcctgggagacagagtgaggctccatctcaaacaaaaacaaacaaacaaaacaacaacaacaaaaaactggggctgggcacagtggctcacacctgtaatcccagcactttgggtggctgaggcgggtggatcacttgagtttgggagttcaagaccagcctggccaacatggtgagaccctatctctacaaaaaatacaaaaattagccaggtgtggtggcaggtgcctgtaattacagctactcaggaggctgagggaggagaatcacttgaacccgggagttggaggttgcagtgagctgagatcatgccattgcactccagcctgggcaacaaaagtgaaactccaaaaaaaaaaaaaaagagaaaacaaagggagagagagagaaagaaaggaaaggagaaaggaaggaaggaaagaactggagtgcttcattcatcctaactgaaggagaatgataacttgtgtcaggctttaatgttaaatatgcagcaggaccatttgcctattctttgctgagtatgctaaatatcatcatgataaatactcctacattaattttatttttaggaaccatattccagaaatttagacaataacttttattattaagactttactgcttactattttatttctatgagtatgaacttcatacccagtattttattatggccaatgccttcatttcctatcaaagactttactaccacttaacttagccctacgtatgtcacatttcaatcttcattgtatcatgaactattccactacaaacatgaaaatgagttttaagctagttttaagctaatggtagttggacaagattttacacttgagctgatgctgtaatgggttgaggcttttggaatgttgggataaggcaaacacattttggtgggggagggccatcttcaaggatcagtaggaagactataatatgctggataatgaccttgaaagatatcaagttctaatctatagaacctgtaaatgatatctttttttggaagagtcttagcagaggtgatgatgttaagaatcaacatggggagattatgctggattatcaaggtgagcactaaatgtagaaggagatacgacacacacagggaaggccatgcaaagatggagcagggagagatttgaagatgctgaccttgaagattggagggatgcagccataacccacggaatgctggcagccagcagtggctggaggaggcagggaatggattctcccctagagctctgcagggaacacagccccactgacactgtgatttaagccaaactagtgattttggacttcaggtctccagaacagtgacagaataaatttctgctgttttttttcttctttcattttgtctctctctttctttttttttctctctctctctctctttctctctctctctctccttcttcttcttttttttttttttttttttttaagacagggtcttctttaagttgctgaggctagtctcaaacttctgggctcaaacaatccttccatttccactgttagagtagctgggactacaggctcatgccattgcaactggctctgtcattttaaatcaccacatttgtgttaatttgtgacagaagccctaggattttggtagtagaggtgaggtgtgctgtaataaatactcacaaatgtagaattggctttggaattgaagaatacatagagattggaagatttttgaaatgcatgataggaaaagcatagactgccttaaacacagtattagtagatatatggacattaaaatgcttctcatgagggctcagagggaagtgagaagcatggatgaaaaagcttatattgatttatagaataattagatattctataaatggatattattatatattatatcttattagataattagatattagatataattagatttcacagctccagatttttagagagattttatccaaggatgccttatacccagagcctcacatatacctacactagatgacttagaaaataaaattgatacttttgagctcatgatatttagatgagattttggtcatgagttgatgctataaagaagtgaggcttttgggttgttgggaagggatgagtatatttgcatgtggtctggatgtgagtctttgggaaacagaaggcagactgtggaagcctgagtagtgatccccaaagatgtcaggttctaactcctgaaacttttctatgttatctttttaaaaaaaatgatcgtggaggatgtgattatattgaggattttgagattgggagattaatctggattatcaaggtgagccctgaatgaaatcatttgcatccccttataagagggaggcagaggaagacttgacatacatgtgggtgaaggccatatggagacagagcagagagacatttgaagatgttgactttgaagaaagagtgatgtggccacaaagcaaggaatgccagcagccaccaggagccataagtggaaggaaatgaatttgccttggagattccagagagagcgtggccctgcttttacctgcttttggttagtaattctgatttcagattctggccgccagaactatgagataataaatttctattgtttttagccaccaggtttctggtaattcattacaatagcctaaggaaactaaaataggtaggataacaatcactgctgttaatatctcataattcttcacttatctattcatttatttattcaaaatgaaatattttcaatgtcacagttcagttgctcaaggcagaaaaataaatttttacgctaaaaccttataaactatgcactgaaggaataaatggtgggcttgggccacccagcaaagaagaaaatgaacaaacaatggggtctttaaggatgaagagaagtttaacagttggcaaatactagtaaaaggaaatagcactggcaaatccatgaagatcatatgcgaaagagtagaaatgggacaagttcatactggaataatcactacttgtagttttttcatggttatttacccaaggtcatagccaagggcaccaattcagaaactaaaccaaaatatttatgagggagattccatggaagtcagctctccaaggggtcccatttcctactgctcccgaatccatctaaacttttactcccaacaccctcctcctttgccccacctcatgacaggtgattcattacagaacacagagggtcagcgttcttttcttcaggcctgaaatactgggctactatctaagccaaagggtagggacatgtaaccacttaacactacattccccccaaccttcaccagttctctggttacattccaccacccatctctgcctccccagtccccaaccagggacttttgaaccttgactctttcccgccttgagtcagcacctgtatttcacgcatagtatgaagaacagtagtgagaagagcttagaagtcagacagtttggttttaaattctagttgtgagttttgctttccctccctgagaccccaatttcttctttagagttgggtgtgtaatgtggtaatagccaacatttagtgagaacttactgtattctgtccaccaggcaaaaactttacatggtttctttcacaacaaccctacaaaagggattcttaaaaaatgtgcctacagtgggtgagaaaacctaaggcataaagagggtagctaactgtctaggatcccccagttggtaagagctgtggctgggattgtaacccagacagtcaggctccagagactttgctgttaatcattcatgtaaaggaggtaatgattaggttgagcctccagtccagatggcagcccctaaactttcgagggggcatttcgtgtttgctgtgttttattccgtgtttccaaacaacaggagatgtgtcagattatgaactgcacatattggcatacatggaagtctcactatccagggcagctcttgtgagaaagtgaatggcaaactgtgggactaggagtagcacagtcattgaagataatgaacattatggagaatgtttaatgatatgaataaagtgtataagaaagtataaaggagaatataaaactatgtaaaagtataactcttagaaaagtgtacttgtgattgtcaagatttattaaaacatatttttcccattcatttgctacttagacatctccagcaaagactcctggaaggtggtatctcagctgctatgtcctttgcttcccatggcatgaagcagaggactgtgccagttgatgatgcccaataaatacccactgattggatcaatgagtgagagtgggaatgagtcagactttggagtggttacatcatcattttgaagagactcagttcagttttgggtgccacattgtaaaaagcaaatccatgttttgttgctggatgtttcctggttcagggtttaggccaagaaaggcagaggaggagcagtctattcccatggtggcagcttgaagcagttactcctgtgggtagatcagtccaggcacttctttcctgggctttgataaagttgagtttaatgttgatgcaattttacatatcttatttacctttactcttctactaaaactgaatagcccatatagatcacttttgttaaaaaaaaaaacaggctttcataaaatataatttgcacaccagaaaatctaacacttaaaattcagtgatcttagtgttatgttactttttaaaaattagcatagcatacggaacctacaattggacactctaacccattttaattgtacagttcaatggcattaattacattcacaatttccctccttttattttagctcatttgaattttgagaacttagtttagagaggtacatagaaaatataaacccaaggagagagggatcaattctagttgggttctaactatagaaatatctaaaaatatttgatgaatttttgtagaatctcttttctttttctttctttcttttcttttactttaagttctgggatacatgtgttgaatgtgcaagtttgctacataggtacacatgtgccatagtggtttgctgcacctatcaaccagtcgtctaggttccaagcccagcatgcattaggtatttgtcctaatgctctccctccccttttcccccacaccatgacagtccctgatgtgtgatgttcccttccctgtgtccatgtgttctcattgttcaactcccacttataagtgagaacatgcagtgtttggttttctgttcctgtgttagtttgctgaggatgatggtttccagtttcatccatgtccctgcaaaggacatgaactcatcatcttttatggctgcatagtattccatggtgtatatgtgccacattttctttatccagtctatcattgatgggcatttgggttggttccaagtctttgctattgtgaatagtgctgcaataaacatatgtgtgcttgtgtcttaatagtagaatgatttataatcctttggatatatacccagtaatgggattgctgggtccaatggtatttctggttctagatcattgaggaatcaccacactgtttttcacaatggttgaactaatttacactcccaccaacagtgtaagagcattcctatttctccacatcctctctagcatctgttgtttcctgactttttagtgatcgccattctaattgccttgagatggtatctcattgtggttttgatttgcatttctctaatgaccagtgagagtgagcttttttccctatgtttgttggctgcataaatgtcttcttttgagaagtgtctgttcatatccttcgccaactttttgatggggttgtttttttcttgtgaatttaagttcctcatagattctggatattagacctttgtcagatggatagattgcaaaaattttctcccattctgtaggttgcctgttcattctgacgatagtttcttttgctgagcagaagctctttagtttaattagatcccatttatcaattttggcttttgttgaaattgctttttgtgttttagtcatgaagtctttgcccatgcctatgtctggaatgatattgcctgtgttttcttctagagtttttatagttttaggttttatatttaagtctttaatccatcttgagttaatttttgtatacagtgtaaggaaggggtccagtttcagttttctgcatatgtctagccagttttcctaacaccatttattaaatagggaatcctcgctccattgcttgtttttgtcaagtttgtcgaaaatcagatggttgtagatgtgtggtgttatttttgaggtctctgttctgttccattggtctatatctctgttttggtaccagtaccatggtgttttggttactgtacccttgtagtatagcttgcagtaagatagggtgatgtctccagctttgttctttttgcttaggattgtcttggctatactgggccttttttgttccacatgaaatttaaagtagctttttctaattctgtgaagaaagtcaatggtagcttgatgggaagaacattgaatttatcaattactttgggcagtatggccatttttactatattgattcttcttatccatgagcatggaattttgagcagggaatttttttccatttgtttgtgtcctcttttattttgtggagcagtggtttgtagttctccttgaagaggtccttcatgtccctcgtaaattatattcctaggtattttattttctttgtagcaataatgaatgggagttcatttatgttttgtctctgcttgtttattattggtgtatgggaatacttgtgatttttgcacattgattttgtatcctgagactttgctgaagttgtttatcagcttaaggagtttttgggctgggacgatggggttttctaaatgtacaaggatgtcatctgcaaacagagacaatttgacttcctctcttcctaattgaatacgctttatttctttctcttgcctgattgccctggccagaatttccaatactatgtggaataggagtggtgagagagggcatctttgtcttgtgccagttttctttttttaaaaaatatttcattaattaatttaattttatttaattattattttgttattattattattattattattattattatactttaagttttagggtacatgtgcacaatgtgccggttacatatgtatacatgtgccatgctggtgtgctgtacccattaactcgtcatttagcattagctatatcttctaatgctatccctcccccctcccccaaccccacaacagtccccagagtgtgatgttccccttcctgtgtccatgtgttctcattgttcaattcacatctatgagtgagaacatgcagtgtttggttttttgtccttgagatagtttactgagaatgatgatttccaatttcatccatgtccctacaaaggacatgaactcatcattttttatggctgcatagtattccatgatgtatatgtgccacattttcttaatccagtctatcattgttggacatttgggttggttccaagtctttgctattgtgaatagtgctgcaataaacatacttgtgcatgtgtctttatagcagcatgatttatagtcctttgtgtatatacccagtaatgggatggctgggtcaaatggtatttctagttctagatccctgaggaatcaccacactgacttccacaatggttgaactagtttacagacccaccaacagtgtaaaagtgttcctatttctccacatcttctccaacacctgttgtttcctgactttttaatgattgccattctaactggtgtgagatggtatctcattgtggttttgatttgcatttctctgatggccagtgatgatgagcattttttcatgtgtctgttggctgcataaatgtcttcttttgagaagtgtctgttcatatccttcgcccactttttgatggggttgtttgtttttttcttttaaatttgtttgggttcattgtagattctggatattagccctttgtcagatgagtagcttgcgaaaattttctaccattttgtaggttgcctgttcactctgatggtagtcttgtgccagttttcaaagggaatgcttccagcttttgcccattcagtatgatattggctatgggtttgtcataaatagctcatattaaattgagatatgttccatcaatgcctagtttattgagatgttttagcatgaaggggtgttgaattttatcaaaggccttttctgcatctattgagataatcatatagtttttgtcattggttctgtttatgtgatggattacatttattgatttgcatatgttgaacccacctttcatcccaggaatgaagccaacttgattgtggtggataagctttttgatgtactgctggattcagtttgtcagtattttattgaggatttttacataaatgttcatcaggaataattgttctgaaatttttttgttattgttgtatctctgccaggttttggaatcaggatgatgctggcctcataaaatgagttaagggtgagtccctgtttttctgttgtttggaatgctttcataaggagtggtagcagctctgctttgtacctctggtagaatttggctgtgaatccatctggtcctgggctatttttaatctggctagtggtctatttagttaatcttttcaaaaaccagctcctggattcattgattttttgaagggttttttaatgtctctatccccttcaggtctgctctgatcttagttatttgttgtcttctgctagcttttgaatttgtttgctcttgcttctgtagctcttttaattgtgatgttaaggtgtcgattttagatctttcttgctttatttagtgggcatttagtgctatacacttccctctagacattgctttagctgtgtcccagagattctggtacattgtctctttgttcttattggttttaaagaacttagttacttctgccttaattttgttatttacccagtagtcattcaggagcaggttgttcactttccatatagttgtgtggttttgagtgagtttcttaatcctgagttctaatttgattgtactctggtctgagaggctgttttttattatttccactcttctgcatttgctgaggtgtgttttatttccaattatgtggtcagttttaaaataagtgttatgtggtgctgagcagaatgtatattctgttgatttggggtggagagttctgtagatatctattaggtccacttggtacagagctgagttcaagtcttgaatatccttgttaattttctgtctcattgatatgtctaatattgacagtggggtgttaaaatctctcactattattgtgcgggagtctaagtctctttgtgggtctctaagaacttgttttatgaatctcggtgctcctgtattgggtgcatgtatatttaggatagttagctcttttcgttgcattgatccctttgccattatgtaatgtccttctttgtctttttttttttgtaatctttgttggcttaaagcctgttttatcagagactaggattgcaaccctgctttttttttctttttgctttccatttgcttggtaaatattcctccatccctttattttgagcctttatatgtctttgaacgtaagatgggtctatttaatacagcacactgatgggtcttgactcgttatccaatttgccagtctgtgtcttttaattggggcatttagcccattttcatttaaggttaatattattacatgtgaatttgatcctgtcatcatgatactagctggttattttgcactttaattgatgcgttatcttcatagtgtcattggtctttatattttggtgtgtttttgcagtggctggtacttgtttttttccttccataattttgcttccttcaggagctcttgtaagccaggcctggtggtgacaaaatccctcagcatttgcttgtctggaaaggattttatttctccttcaattatgaagcttagtttggctggatataaaattctgggttgaaaattctcttctttaagaatgttgagtattggtccccactctcttctggcttgtaggatttctgtagagagatccattgttagtctgatgggcttccctttgtaggtaacctggcttttatctctggctgcccttaacattttttccttcgtttcaaccttggaaatctgattattatgtgttttggggtggctcttcactaggagtatctttgtggtgttctccgtatttcctgaatttgaatgttggcctgtcttgctaggttggggaagttctcctggataatatcctgaagtgtgtgtttcagcttggctctatgctccccatcagtttcagagaccctaatcaacctagatttggtcttttcacatagtctcatatttcttggaggctttgttccttttccatattttttctctaatcttgtcttcatgctttatttcattaagttgatctccaatctctgatttcttttgcttgattcatttggctactgatacttgaatatgcttcacaaagtgcttgtggtgtgtttttcagctccatcggtcatttatgttcttctcttaactggttattctacttagcagttcctgtaaccctttttcaaggttcttggcttccttgcattgggttagaacatgctctgttagttcagaggagtttgttattacccaccttctgaaggctccttctgtcaatctatcagttttgtgttcttgctggagaggagttgtgatcatttggaggagaagaggcattctggttctatgaattttcggcatttttgcactggtttttcctcatcttcatggatttatctgcctttgatctttgagtctgatgatctttggatggggtttctctgtgaaggttgtttttgttgatgttgatgttattgctttctgtttgttcatttttcttctaacagtcaggccccttttctgtaggtctgctgcagtttgttggcagtccactctggaccctatttgcctgagtatcatcagtggagggtgcagaacagcaaagattgctgcctgctccttcctctggaagcttcatcccagaggatgaagctggcatccgccagatgccagtcggagctctcctgtatgaggtgtcagtcaacccctgttgggaggtctctggcagtcaggaggcatggggatcagggacccacttgaggaggcagtcccttagcagagctcaagcactgtgttggtagaaccctgcttgtcaggatccactgctgtcttcagagctggcaggcaggaacgtttaagtctgctgaagctatgcccacagtgagatgggaattttatctataagctcctggctggagttgctgcctttctttcagagatgtcctgcccagtgaagaggactctacagaggcagactggccacagccgctttgtctcactgtgttgagttttgcccagtccgaactctcaggccattttagcactgtcaggggaaaactgcctactcaagcctcagtaatggcagacgcccctcccccaaccaagctcaatcgtcccaggttgacttcagactgctgcgctatcagtgaaaatttcaagccagtggttcttagcttgctgggccttgtgggaatggaacccactgagcgagaccactttgttccctggcttcagccccctttccaggggagtgaacaattctgtctcattggggttccaggtaccactagggtatgaagaaaaacctcctgcagctagcatagtgtctgcctgaacagctacacagttttgtgcttgaaacccagaggcctggtggtgtaggcacatgagggaatctcctggtctgcagattgcaaaaccgtgggaaaaatgtagtatttgggctggatagcgcagtccctcatggcttcccttggttgggaaagggaggcccccagtccttgcatttccccggtgaggctgtgccccaccctgcttctgctcaccctctgtggcctgcactgactgcctaaccagtcccaaactgatgaacaggttacctcaattggaaatgcagaaatcacccaccttctgcgttggtctttctgggagctgcagactggagctgctcctatttggccatcttggcagcagatcctacagcgttttacaaccatcatcactacctatttccaaaaggttttcatcactctaaagaaactctgtaatcatttaatgataactctgccttctccaagtccttgttattctctactactttgtctaatctatgaatttgccacttatgagtagaatcatatgatatttttccttttatgtctgtcaaattttacttagcatactgttatcactgtcattcctgctgtagtgtgtatcagaacttcattctttttatgactgaataatactccattatctgtataccacattttgtgaacccattcatctgttgatggacacttgggctcttcaacctgatgactactgtgaatagtgttgctgtgaactttggtttacaaggatctgttcaaatccttgctttcaaatccattgggtatacatccaaaagtggaattactgggtcccatggaaattgtgattttatttttctgaggaaccacaaattggttttgcaaataggctatgccaatttacattcaccagcaattcataagagtttcaatttctccatattctgtccaacatttcatattttccattaaaaaataattatagcctttctaaaggatatgaagtggtatctcactgtggttttgatttgcatttccccaatgactaatgaagttgagcatctttccaggtgcgcttatggatcacttgcatatcttctttgcagtagtttctgttgaagtcctttgaatttttgaatgggattgtagtattttgttgttttgtgttggagtcctttacatgttctcatttgatttgtgaatatattctgccattctgtgggctatctttcaacccttctatccattttttttttactttgtatatcgtgtatgtaaaagttcaacatcattcttttacatagagatattcagattccccctccttgtgcatcttccctatctcattgatcactctgaggtctccacctctccaattgcaatgagactttcacttacttgattcgcttcctcttcctcttttcaaccaggtattaggggtagtaatgggagtgagtgcccactgtcctgtggtctttgagcatggccaacatgagcccttgtaaatcccctgatgccaggggactggctggccatcctgtccatgatgttcccaggtcactctcctctccgagtttttccatctccctccactcctggctgaccaccgactgtccagccctcccctttcctgcccattctcagagcaggactgaattaatccaatgaccggggaactcaggggacttggagggaggtcctagttgcaggcaaaaactagaagagaagccctttcagagtaacagaatgagctttcagacctcaggcagaggaaattctctctatggcatccaaggtcctgggctaggagtgggcaattggtgggaggaacatttgggttcagatttaggaagagaagcaaggtctgcattaagagaggctgggacaatcagtgacactatcccaggggtagtacatggggcccgggtgctggaacagggcccagggtcagcagtaccagcacccaggcagtcaccaagtgtggacagggttgaggatgcccctgccccatcagggtggccagccagagaggcagaggacaaccaagaagttggttcccaagaagtgctgttgggaaggagctgcttggggtctaacagcctcttccaccagccagacccatttgcctacctgggctcctcccacccctgactggacagctgcccactccatgagcttcctgagaagcctgcaggttccatatatgaaggaagttgacaggtacctggtgacgttgctaggctggggtctctttctgcacctcactgggactgtggagagctgagtttacaaggtcctcatgacagaccaggcctttgaggctttcctgctcagctcagtgcagcctcactatagctgggatgtgggatgttcccaaccaaactcctgaagccttgatccccaacacagtagtgttgggaggtgggtcctagtgggagatatttagatcgtggagacagatcctttatgaagagattagtgaccccttccacctcacaggcttgagttttagctgtatctggaatggacaggtttccaagacatcgggatcaaaacagagtcttgcttccttagtctctctcctgcttcctctgtcaccatgcaatctcagcatatgccactccctttttgctttctgccatgagtggaagctgcatgaggccttcatcggattgagctgccaaaacttaaacttttcagccaccagatcatgagacaaataaacctcttttctagatcaattacccagccttgggtattcggttacagtaacacaaaacacagcaagacaggctcttagctcagccttgctgtgattcatcttgaatctaaatcttgaatggaatggaggcctggagtcttttccctacaggtgtgagcttctccctctgatctcctagataaatatcgtttgtctaaactcagctaccatgggagccccaggagctggagagggtgtgggcaccaggggagacatggtatgaggctgtgtgcagggggatggatcaaatcaggccctgctagggttctggcaccaatgggcacacctcatctccgttttccctcttcagtagggatttatctccctgccttagtgtctcctcttctaaccctatcaccttccatgtgaagctagacaaagcatgcaagcttgtgaaccttattctagagaggagggaagatagagggattgtctggctgacaatcatgtacataggtaggtagcatacaggagagatttagatggacacatcagatgacaatcaggtaggggctgtgccaggatgaacaatggggtctccatgttgtccacatcctaattcatgaaacctgtgattgtgggactgcatatgtcacaatggacttttgagtaagtaacggatcttgaggtggtgacattatctttgattatcttaataagcttgatgtaactaaccacaagggtccttataagagggaaagagatgtgaagacagtcacagagagagagatttgaagatgccattggctttaaagaggaaggaggggacagtaccaggaatgcaaaaaaaggcagctctggagctgaaaagccaagggctctccctgaaatcttctaggggtgggggtttggccctgtccagaacttgttttcatccagtgaaacccatatctgactttgacctccagaactgtaagagaataaaaagctgttatttaaaatcactgagattgtgatagtttattacagcagcaataggaaactaatataggaacagacaagcaggcaggaagaaggagacaggtgtatgggcagacagtctggagggcaggcaggagtttgggaggtgggtggagattcagggatgttggggttatcggacccaacaccaggttgtgggggtgacaaagtccggcagagtcaaaggaatgagaaaagacagtttgagagagaaagtgggtccagggcgccaaagctaagtatggaggctgtgaaggccccgagctctggaagtgcagattatttattggtgatcaaacaaagaaacaggtggtgagaatggggggtgggtcgaaagggcatgttgcattaagcacatgatttacagctgtgacggtttagcatctgctctgttacttgagataatggagagcaggttcttttaactcaagatacaattgatcctgggagagcaaggagcgaggagccagcaagtccagacacattccagagccacgagccctggattctatccaagccacgaggggttttatgccccgggcttagattatggtgcgtcagggtagccttccacccttcagcacagagcttggtgttccaaaggccacaaggggttttagaccctggatcctggacatgattcaagactcttttacattatgtcagacatgcaagctcggcctcagcttctcccaacactcagcttttctcccaacaagatatacaggtgggtaggagacaggtagacaagcaggtagggagcttggagaaaggtgagagagagaagggcaggcagactgggggacagcaggcaggtgggaagaagggaaggtgggcagacagaaagcaggacagaggcagacaggcaggagataggagtgggggtcaggaagacaggatggcaggtggaggccctcaaagctggtccttgtcttcacaagggttagggagcctcctgagacgcaggtggattccatttttggatttcaacacaagtcgtgccatggggatggggatcctggtgggatcaggcagcagctcaaagcggagcagggtcagggccctggccaccttcagctggttcatggcaaattgtttcccgatgcagttcctgggccaggcggagacaatgaattgagacgtgtcctcaggccccattctgatctgagcaggttttggcccctgaccccagccctgagctggacattcagtgcccaacctcatgtgtccagcccctgcacacttacagcccacggacacttctaccccatcctggcttcacactgtcccaaaccttggacagagccgtcttcctgggctaactcctaactcctaccttctacctctgctctcagcagcctgaaaccctctatcaagacagggccagggctctaaggcacagagtctaatcacatgaataaataaagagttaatcaatggtttgttcactcctccacaaacatttcttgttctccagtgcggaggtcagttcaggtcctgtagggtgagggtgggccacactctcaggtgcttcccacgtagtgggacacacagggacctgaatcctcatagggggtccccgatgggtgtattaagggagtcagaagggcagtgggaggcttcctggaggagaactgggtgggtgatcctcagtgttgccccacctgcctcccaccccagggtccgggctcctgtctaacctcactcctccatccaccagcccctgtagccttctaactctactccagaaacgtccatccttgtccttcctcagtcttgtcacttggactttctggatttctgcttcccctccctgcacactgaagccacagcccagctcagaccctcccacgctcttcatcacaggtgggacagcatcccaatgcctcagccggcagacaagccctccgtgggctcttgcctcacccacattttacctgtccagcccacatcctagccctgttcatgtggagatggctgagaatgtcctccctccacctctgcctgccacatcctcaaggctaaagtcacagcccagctgcctctcactccctgccagctgggcctcttcctcccaggcccccaggtagcattcgtgatttgtccatgaacactcacagtccagtgccacggacagcaccagggacagggacactcaacaagccactcagtgagtgaatgagtgaaagaatggttgatggaacgatgtgtgtctggagcacaggatatatttctgtacaacacatttttgtaccttttatctctgttttctcatcatgctgcataggacttgacccagagaggtagcttaagaaatactttaatatttgaatgatgttatttaagttttaaaatgaataaaatagaatgaaatacactgagagtaaaatattagttctgagctagaaatggagcttaggaatgctctccggttctctagtggcagcgacatgatttgcaggcaatgtttacaaggacttcctcatgctgggatagacagaccagtgctggagaaggagtttcaggaggaagctttcctgttccatgtaagtggactcaccatttgaagaagtcacataattatttctttgaacaaactttgtttctactaagaatttttatcatttttgcctgtgtgtatgtcacaggacgattcctgatgccacgatgatttccaccgcagccattctggagttttcctctccagctcaatagctatttcaagtgtgttttatatttcacataccaggaggcttcaaatgttgtgcgttatatgataattattgggcttttctctccaagacagtgtactgttcacatttttatgtttttggccaatattgtgctaagtggattacaggactatggtataaagatctcaaggcatgtacagaatttgccaaatggggaaatagatgtaaatatgtgaacactatataatgaagtaaaaatgtcattgggcaagacagaaaaatgtatgatatgacacacactgttgtaaaactttcttcaaagggctaccttaacctctcccttatatggcttgaaaggtaggacttgcaggtcatctgtattataaacagatgcaaagatttcaatgattcatctctacgacagactagtgaattaaatagggaaggtagtgtgctgcattgaggatgtgtggggagagagaaatctacagtttactattcctgacaactgagaaaagcaaacagctgaagttgaatttactggagaatatctaattttgagaattcatatccttaaagtgaggaaaatacatgaatatactgaagtttggaacatgcactgacagtgaattcaggctgcccatttgaagaagcagagggagcaaagtctccatggggtgctctgaatgccaccttccttttgtacacagagacgcccacaccaggtgcctgactttcccacaaataccaatatttaagagcacacctgaagatgccacatatgaacatcgggctcacaaagatcagagggttgaccagagacttccctcatttctctattccaattaccacacaggacgtctcaccttgatcctcctgagaagggcaggaaagcgtggctgtgttgagcagaacccggtgcaaaacgggaagggtcaaacacctgcagagagagcaccagagccaggatagttaaggatccagcacctacttgccacccatgagggtacagtactcccagaggtggaagcaggagaaggtattggtcttgagagatcaccccatttcctcctctcaaggaccacatacctctaggttgggccacacttttgggttgtggtgaaggccataaatggagaggaggaccatgatacctgtggtgcaggttggaaagagagagaagaccgatcatttgcatggggtggcctggtacttcagcctgcaggggcaaaagaaggcccaaaacacctactttctataaattgtcactttgactaggatgattctgccattatgcaggtgggttaggcttgacaaagcatgtgagttcagatgatgaatagacaaccatttatgcaggaatgagaagcaaaaaagaatcagagcattactctttagagtaagtccagtgacatttcacattcatcaaatattctccaagggtcattggagaatatacatgaactcactcaatacaacaatgctccaaggaagacattcttttgctctcagttttcaggggagatacctgagtatcagagagaccaattgtcttgtctgtgttcacacaactaggttatagcaggactgggaccagaactgggggagttgaggcttggtggccccagatctggtcattggctgctctctgccatcaacctgagggttcctcagagactggacaacagctgacccaggaaatgagattcctgataagcctcttttgcactgaccccatgaggaaagaaacacatccctctctgcccttgtctgattctctttccagccctgcacatctcaaggaataggattttacagttactgacccaaggccacattcagagattaacatttatttcttgaactttcggtgggttcaagctctcggccagacttttcaaattcatcctaaatacaaagtatgtttttgatgtttttagaacaaaagggagacccagagatgtgcagaactctgaagcacacatggatttctcaccctccacacgtccccgtggagactttgggtgagagggtggggaaacttcatacctttgggcaaggagcgcccatcagggaaggtgacgggagtgctgagctctcttccaatgcctggcaccggtgggtagagcctcagtgcctccttaatgcacatggtggtgtagggcatctggtccaggtggttcctgaaacaattccatcctgaacaccagcaaggcctgggcagaccaggggcccctgtggagaaggcagggaaccccatcttttgagccctcactcaccaggtgatggaggctccatcacccaggaggccatggatctcctcccggcacctctcctgatgcttggggtgtgtggccagagcatagaggatccaggagatcccactggctgtggtgtcgtggccctcaaacatgaacgtgtccacctcagcacggaggtccttgtctgacaagatgctcccattctccatctgggaagaccgtggtgaaagtgcagggcttgtctcttgctatgtacttctgggcaaagactcaggcctctcctacacatactcactttggccaagaggaggatgtccagaaaatccaagtgcctcttcctcttgatcttctccagctccccctccttctgtagttgagccttcctcagttggatcacttggtctgtaccagaacaatggttaccaggcagagctgagaccgtcagcagcccccaggaggcctagctgcccaactgccccagtgtgggtgcctggtagatctcagcatgaatgtgagtgtgggtgcagggtcaggggtggaagctctagtactgtgtgaggcagggcacccctcccaccagtggcacagttcatggaggctcctcttgaatgctgtttggacagggtctcattcagttatctccatgtggggacattgataaaccaaggcacagaatccggcccctcacatcttggctcccagcccctgagcaagggaattccccaggctgagtgtgttctggcttctgcaggattactagggaccttctctgcctgaggagtcagggcaggtactttcactgtgcctgggaaaggctgggagacaagaggaagagacagaacctgtgtgctgatgggccagctggcaggcgcggtgtgtccagcggccagcagaggtcaggctgtagatggtgtcattctcatgaaaggcattcctcatacagcaaaaaaccaggctgttcaggtcactaatggcctggatgtaggactgagaattcctgagggagagtatgaagaagagaccgcagtaggggtgggcccattacccggaagtagaatggggtctgagaggaggcagcctcggataatggggacaagcagccttgaggcaatgtttcttctatcttacagccctattatcctttggcctttatcagatggtatgaacatccagggtccacctgtgctaggaattaggcatctgttcctgagactttgtttggtctggacaggaattagagtttggtcagggactgactcttcctttgtgtggcggtgagccttcacgctgccccacctgcccctcaggtatgtgcactccacttgataagaacaagggccctgcagctggagggttgtcactgacctgtccacctggatgctgccctgatggctgaaggcactcttcatgatggtgtccagggtcatcaaggagacgtgctgaaagacctccagaggggaatcctggccaaggagctcttcccatttgtcctgtggtgggagggggcatggaccttcttaatctccaagaagtgctttgctaataaggcctggctttttcatgtacctgcagatatcttgttttttcctgtagcttgcagatatcttggttgggattcttcactttacagagcagatgcattgtagaaactgggactgtaaagccagtgttggtaaactgacacctaattctcacacacttttaatacaacattcaacagatcctctcacaatagcatggattaagtattgaattttgagattcagttaggacatatgcttgtgaaaattttgttgttattgttgttctgggataaataatgggggactcttcagtgttctgagagctgagctagttctgagggactagtaggacaccaactttagggcagaaagtttcagtgccaaagatagcttaaggggctagtatgggcactgtgttgtagagaaaacagggacttcaattcttttccattcatcaaaatgtgctgggcacagttgggtgagaaatcagagtcctgactggagatgatgctatctatggaaggtattgctctgagaacatagacctggtgttcatttccttcccagggtggcttaaatccatgcagaaacctggggccccaggccagagcctgggtgggtgacatcttggcctgtccatgctgccactgaagctgccattgcccaggccagccagcataggaagtcctactgtccaacaagattgcatatgcctccagtcccttgtgctgaggttccaaagtgggaggagaagggccttgtgttcaccatgaatctctattcctatggtggggaacaaagtgtggatatgacctgatgcctgggtgttctcctaccttatacaactctggggaaccctctactctcacagcaatgacctgagagtgttgttccatgtgtctatgtctatggctgcctgtgggacacagggttgagagtggagttggtgagagtgtgtgctgtgagtgggtgtggggagaggagagagacatggactcaccagcatcactcgtacagagtctgccatgagccccacgtatggcttcaggatgtcattgtggaaggctggggtcagcatccgtcgatgctggaaccatgtctgcccattcaacaggagcaagccgtaccctaaggtagacacgaatatgtgtatgtgtgtgtatcagaggctgcacggacctagggatgactggtgacaatttgggagggagaaaggtggcttcctgggggaagaactatccagaagaagccacatcatgggcaaatgcaggaaaaggaggtatatttcaggcatgtgaattttctaattgagctgctacatccatgtgattatgacagctgtgagataaaggttgaaaagggttgtgggcagatgtaaaataaatgtgaagccaaggatgtctggagagaactgagacatgaaatggaagaagctgagcctcaggaaggtttgcaccagcattaggaaggggtgagggtcttgttagaagagggaaatgaggcttgatttggggatgaggtcatgatagtggtggcctctaatctgttgttctctgtgagccaaataaataactcaaacctaactagggagtgggctgcagtcctagtttgcacacataccaatccgtggagccaggaatttgtaggatccatgggatttcgggtctgaaaagtaagaaagggctttataggaaactaggagttactaagaaggcagtctcagaggcagcatcagttcttggtgtctgtcagttggcagtttgacccatgtcacctcccacttgactcccatccacttctatttctgtcctgaaggtcaatgtgggctcaggaagacagactcagtgttccagcaggaaaacacccagagggctaggaaggtgaattggtgagatacataggctaggtcttcaatgacaatgaataatacagagccatgggtttttctacattgatgttttcctagtcacctcctgaccaggacaggcaacaattagagcttcgaaacccaagtcaatgtgggtatgaaatttgttttacagatctggggcaatttacgtttcagaaaacctcaattttcttaatagagaaatagaaaaaagaatagaaaattcagccccacatattgttttaaacattcagtattcagtaaatatttttgactacagcctgggcatggtgggcttggtggatgcgtgggagaggtttcagatattgatgtttgaacagccactctcttctggaattttacagacccaggggcatgtgtcaagagggaagagaaattgcagttgggatgggggttcgatctcacctgatctccccagaatcaccttcatatagtcagggtcatagagctggacacgaactttgcctccccatatccaataaggacaggcacttgggaatgtcttcacccgttcctgaatccgttgtagctcctggtcgtgttggaactgtcaacgagggtagacagatgaacactttcatttacttctagtctttgcagcaggagtgaagggcaggacaactacaggagccatgtagcacgggttagggatttagatctgtttctgatgacctgagctgtgatccagattctttgtatctccccaggacttgaccttaggccaagcgctatgagccctcactcaatgctgccagcagaaatttaagtcagccattgtcttcatgttgtgtaacatctctggaagtcataaatacaacaatttccttgggcaatgtgcataactcgtattacttgatgagcagatttgtaaaatcatttggtatatctagagaataaaatgaattaatgtgaacattttaaattacacaataattttatataatcatacttgttatattttcaatattgtcccagaatatatggtaaatatttgttgagataaaatagcatttgggatgtgtatggctaagcaaaaaaagattaactataaaattgtgtgcataatagtattctacatgttgaatatgtacagatttatgggatggagtctgagtatatgcatatggtgctggtgttggactataattttgagatttgggtttcttattctcattttcacttatcaatgaattatgagctccctgctgcctgcagtcatctttctaaactcttcgatgtggatcacaaagcccttggctttctggcttcaacttctcttttcttgcctccagccctgctggcaattccaccatcacccgtttgtttcagctccaacgccgatgccaccactgctgctgattcacacaccagctacacctgctcactcttctgggccctggcacttgctcttttctctaccttgaatgcccttccatctgccacagagcagccacctctcctcagctttcaagactcagctttgctttaatctcatctggaaccctcaaagacattgggtcctagtgatgttccatgtagccaactcttctttatttcaactgcttctagtaactcaaagcaactgtctaccacataagtatctaatgtctgcccacctccttctgataatcatattgtccagctctgaggcagcttgccctactgtggggtaggctccttcattcagcccatgcttactgcacacatactatgtgcccagtgtggctcaggcactgcgttaggacacagctgtggtccttatctgtgtggaattttcagtctagttggggggtaaggaagattagaggctgtgcagtaggggataatggacatgagatggaatgaaggacaagcatctggggaagctttgaagagggacctaactcagaactgaacattagaaagctcttcctcactcactgagtcatcatttactgagggactattaggttacaaacataaatcagagatggtctctcccagaagaatcccacacttatgacactgcagaacagtaactaagtcaagttaacactgctctggcctcttgaggatagcccatagaaaaaagagtcggcccttcacttctgggagacccaggaggccttcttgaagaaggtagcttggtgctgggccttgaccgatagatatgagtgagaaaataattccaggtagcaagcacattgtgatcagaggcctagaggttgaaatgcagaggcaggtagtgaggtagtgagtaacatatggtaaaagaggagaatgggaaagaaggtggagtggtattgggaccagtccatatagggctagaactttgtcaggtccccacattggttctgctctgctgagaactatgttgcctcctttgctgagaaacaataggcctcagctccctgcaacccctatctctacttaagtgtgttcaattcatagcaccttggtgagtccctctccatgcagccgtttaccttgctctgttcctacccgcccctctccccatgcagggatagcagtgcacaggggatgggctgtgtccctcctcagccctcttgctgctcctttctcttcttcctctgttcctctacacctggtgtgtccaatcttttggctttcctaggccacattggaagaaaaataattatcttgggccgtgcataaaatacacgaacactaatgatagctgatgagctcaaaaaaattgcaaaataatctcataatgttttaagaaagtttacgaatttgtgtcgggccacattcaaagccatcctgagctacatgcagccccatggggcatgggttggacaagcttgctctattcacctgagctgaccatcaagctgtgccaggattttgctgattgccggggcacaggaaggggatgacatgctcacctccagggagctcacagtctgggtgcgtgggaggagagccaggaggtcaatacaccctgttcaatgtgcaactcaaacaccagtctcctcacttggaggacattgtgcaggctgcccccttcatgtgtacccacaattgtcaggttttcaggtcctaaatcacctgttgtggaaattccgtgagccttggggaaacttacttagccagttggtcccctacaccagcagatctctgcctcagatatccaccccagcagagtgagctcttttcctgcagtctgacaccttctcaaattcctgcctgtattcttcacagaccatgaactcctcatggcacagagtcctcagatgggtgtctgtgctcccaggcaaatgcagggccaggcagagacaatggcattgagtgactggacagggagcatctagaagccttgttctttgagaaaagccaaggcttatggggtaatcagtctggagacaatcaggcattgccctccatgtgcaggactgccaagacacacttgatatctgcagaaggagggcatgtgtgatagagctgaggaccagcaggatgggcttcatgggaggagtgagctcctcatgactgggacaagctgaaaccagagaggtaggctgggtgttcctatgaggcctcacgtttgttacaaaacaaggctttgctctatggattttgtgaccagggtctcagagccgcatccctccttgccctcccactcccccactgagttcctccctacctcctggatgtgcccgaagagccagtgggagggagggcacgggaactgctggagggctttgagcagccactgcctatgcaggtagagctgagctgccttgatcagcagcagaagcagaatgagcagggaggtcacttggaggatcccggagacaccacccaggcgtctgctggggctcaggacagagacactcatggtgcagcacctgctggatctctgagtgccccttcctctctctgaccacccctgtccacctgtgcttaagtcatgggaggattgtcccgcccacttgtggggagagtgaagggggagggcagaacttggacctcagagttcagaatcgattgactttggatgatccacctaggggaacagtgggagaacagcttcatcagctgtctaccacattcccctgtccatgtacctcacaaatatttaatgagcatttactgtgtgccaggcagtatgctaggggtgtgggcaccgctgcgaggaaaacagacttgaatgctgacctcaaggaatttgcattctgctttactacattgcaataatgttcattcagtagcactttttttttgttatgtgttcaaagaaaattctcaacatgatatgtatatttaaacttaacattaaccaagccctgaatcattacttttgtcttattgcaatctaattttatttaccataaaaaccacttccatctatatattgagtgaggagtgggaattatgtctttctattaactggatgatgatatggacaaacagatgctaacatggcagctgttcaagtactttattttattccattggggagactggtctcataatatccatagcatgatttttttctcaattcatatacatgacaatttaaaaaaattctacatcatgttagttatgactttttcccccattgataggtctaccttctctaccagagaaagtcctagagcaattttagtcctacttcagtctagtactatagccacagcaggagcctgtttaccaattctctttcatcctacaatagtatgtaattatacaatcagaactttgcagtctgtttaggagccctgactaaggacaatctgtactaaacagaaattaatatttaaaaaatgatttctttgtcaacctcaagtaaagtaggttaaatagtaactattgctatgaattaaccctccctggcatttttacatgcatatctgtgcatgagcattgtttttgttcctctttttataatttcaacttttattttagattcaggtacgtatgcaggttttttacactggtatattgtgtgatgctgaaggtttggatacaaatgattctgccactcaggtagtgagtatggtatatattagtcaaatttccaatggttactcatatctgtacctacccctctagtagtccccagtgtctatcattcccatatttatgtccataagtatccaacatgtagttcccacttataagtgagaacatgtggtatttggttttctgttgctgtgttaatttgcttaggattattgcctcccaattcatccatttgctgcaaagaacatgatttcattattttttttttacagctgcctagtattccactgtgtatatgtatcacattttctttatccagtccaccattgatgggcaccaaggttgatgccatgtctttgctattgcgaatagtgctgtgatgaatgtatgagtagaggtgtctttttggtagagcaacttattttcttttggatagatagctaacattgggattgctgggtcaaatagtacttctattttaagttctttgagaaatctccaaactgctttccacagtggcggaactaatttacatttccacaaacaatgtatacacatgatttttttttttctgcagcttagccagcatacgttgctttgaaactttttaataatagccattctgacttgtgtgagatgtggttttcattcacatttctgttgattagtgatgtcgagcatttttttcaatatttgttggctgctcatatgtcttctttagagaagtgtctgtgtctttaatggggttgtttgttttttgcttgtattggaagttctggacaggtaagagaaagaaataaagggtattcaaataggaaaacagaagtcaaattgtccctgtttgcagatgacatgattgtatatttagaaaaccccatcgtctcagtccaaaatctccttaagctgataagcaacttcagcaaagtctcatgatacaaaatcaacatgcaaaaattacaagcattcctacacaccaataagagacaaacagaagccaaatcatgagtgaactcccactcacaattgctacaaagaaaataaaatacctaggaataccacttacaagggatgcgaaggacctctacaaggagaactacaaaacactgctcaacaaaataaaagaggacacaaacaaatggaaaaaaattccatgctcatggataggaagaatcaatatagtaaaaatggccatactgcccaaaataatttatagattcagtgctattcccatcaaggtaccattgactttcttcacagaattagaaaaacttctttaaatttcatatggaacaaaaaagagcccgcattgccaagacaatcctaagccaaaagaacaaagctggaggcatcatgctacgtgacttcaaactatactacaagtctacagtaaccaaaacagcatggtactggtaccaaaacagatatacagaccaaagaaacagaacagaggcctcggaaataacaccacatatctacaattatctgatctttgacaaacctgacaaaaacaagcaatggggaaaggatttcctatttaatatatggtgctgggaaaactggctagccatatgcagaaaactgaaactggaaccccttccttacaccttatacaaaaattaactcaagatggattaaaaacttaagatgtaaaaccataaaaagcctggaagaaaacctcagcaataccattcagaacataagcatgggcaaggacttcatgtccaaaacatcaaaagcaatggcaacaaaagccaaaattgacaaatggaatctaattaaactaaagaacttctgcagagcaaaagaaactgtcatcagagtgagcaggcaacctacagaatgggagaaaatttttgcgatctatccatctgacaaagggctaatatcgcgaatctacaaagaaccgaaacaaaattcacaagaaaaaaacaaccccatcaaaaagtgtgcaaaggatatgaaacgacacttctcaaaagaagacatttatgtagccaaaaaacagagcaaaaaaagctcatcatcactggtcattagagaaatgcaaatcaaaaccgcaatgagataccatctcatgccagttaaaatggcaatcattaaaaagtctggaaaccacagatgctggagaggatgtggagaaataggaatgcttttatgaaggggtggcctgcccctccacacctgtgggtatttctagtcgggtgggacaagagactgagaaaagaaataagacacagaggcaaagtatagagaaacaacagtgggcccaggagaccggcactcagcacaccaaggacctgcacaagcaccagtctctgagttccctcagtttttattgattattattttcaatatttcagcaaaaaggaatgtagtaggagagcagggtgataataaggagaaggtcagcaaaaaacatgtgagcaaaacaatctatatcataattaagttcaagggaaggtactatgcttggatgtgcacgtaggccagatttatgtttctctccacccaaacatctcagcggaataaagaataataaggcagcattactgcaaacatgtctcgcctcccaccatagggcggtttttctcctatctcagaattgaacaaatgtacaatcgggttttataccaagacattcagttcccggggcaggcaggagacagtggctttcctctatctcaactgcaagaggctttcctcttttactaatccacctcagcacagactctttacgggtgttgggctgggggacagtcaggtctttctcatcccacgaggccatatttcagactgtcacatagggagaaaccttgggcaatacccagctttcaagggcagaggtccctgtggctttccgcagtgcattgtgcccctggtttgttgagactagagactggtgatgacttttaccaagtatactgcttgtaaacatttttttaacaaggcacgtcctacacagccttagatcccttaaaccttaatttcatacagcacatgtttttatgagctccaggttgggtcaaagtggctggggcaaagtggttggggcaaagctacaaattaacaacatctcagcaaagcaattgtttaaagtacaggtctttttcaaaatggagtctcttatgtctttcctttctacatagccacagtaacagtctgatctctctttcttttccctatacttttacactgttggagggagtgcaaattaattcaaccattgtggaaggcagtgtggcaattcctcaaggatctagaaccagaaataccatttgacccagcaatcccattactgggtatatacccaagggattataaatcattctactataaagacacatgcacacgtatgttcattgtggcactgttcacaatagaagagatttggagccaacccaaatgcccatcaatgatagattggaaaaagaaaatgtggcacatatacaccatggaacactatacagccataaaaaaggatgacgtcacgtcctttgcagggacatggatgaagctggaaaccatcattctcagcaaactaacacaagaacagaaaaccaaacaccacatgttctcactcataagtgggagtggaacaatgagaacacatggacacagggaggggaacatcacacatggggacctgtctgggatggtgggttaggggaaggatagcattaggagaaatacctaatgtagatgacaggttgatgggtgcagcaaaccaccatggcacatctataccaatgtaacaaacctgcacgttctgcacatgtatctcagaacttaaagtataataaaaaaatgaattgtttaatttctttagggattctggatattagacctttgtcagatgcatagtttgcgaatattttctcccattctgtaggttgtctgtttactttgtttatagtttcttttgctgtgcagaagcactttaattaagtcccacttgtgaatttttacttttttgcaattgcttttgagaacttagttataaattctttctcaaggctgatgtaaatcatcatgtttcctaggttttcatctaggattcttatagtttcaggtcttacatttaaacctttaatccatcatttttttttttttcgatcttggctcactgcaagctcagcctcctgggttcatgccattctcctgcctcaccctcctgagtagctgggactacaggcgcccaccaccatgcccagctaattttttgtatttttagtagagacggggtttcaccatattagccaggatggtctcgatctcctgacctcgctatctgtcctcctcggcttcccaaagtgctgggattgcaagcatgagccatcgtgcccagcccctttaatccatcttaagttaatttttatatggtgaaaagtcagggtccagttgcattcttttgcatatggtcacccagttttcccagtacaatttattgtatagggagtccttttcccattgcttatttttgttgactttgttgaggatcagatggctgtaggtgcatggctttatttctttttttttctctttttttaaaattttatgtgttaaaatgttgattcagagggtacatgtgcaggtttgttacatgagtatatcacatgatgctaaagtttgaccaaggtagtgaacacagtacctaataggtagcttttccatcctttccccctccctccatcccatccctttttggagtcctcagtgtctaccattcccatctttgtgtctgtgtgtatccaatgtttaggtcccagttataagtgataacatgcggtatttagttttctgttactgtgttaatcggcttagggtaatggcttccagctgtatccacgttgctgcagaggacatgatttcattcctttttttatattatatgttaagttctaggatacatgtgcacaacgtgcaggtttgttacatatgtatacatgtgccatgttggagtgctctacccattaactcctcatttacattaggtatatctcctaatgctatcccaccaccctccccccaccccacaacaggccaatgtgtgtgaccctacctttccttctgactcatacctcctgggtcctgaccatgactttcttgaaagtgtagccccaaaattctcctaacttctgaatcgacttcctctgatccctacctcctagacactaatgcttcaggctttcacttcctctcccaagtattagagcaggttgtatctccaaagggatctaaggaagctctatgctgcatcctcaggcccctaggctataaacccagggagtcttgtccctggtgtccctcccaatttaggcatacagctctccacatgggcagttatgtgggacccgttccccacaacccttaccagggtcttagaactgataacctagtattttaacaactgaaacagggtctacaacaacataatagatcaggatgaaaacaaattgagtaaataaaagggaggcgcatattcatatagtggcaaatgagggcaatgagcgaacatccttccactgtgtttccaaaatgcatctacaaagacagaaaggagaaagaaagagagaaagagaaagatagaagtagtaaagaaaaaacagtatatcctatttctttaaaagccagggtaaatttaaaacctataattgataattggaagttttctctgtgaccctataacactccaataccactttgttgtccgtgtaaacaagggcatagcccaaaagcactgaggccactgacaaccagtagccttcttatcaaaaatccttaacccaggaacctgcagatggccgaaatgcattcatcagttgcagcgactgctttgctaacagaaggaagtagaaaattagcctctagaggaaacctcattgtgagcccacctcaccagttcagaactatcctaagttaaaaaagcaaaaagggtaggttgctaactcaaaaatctcaaagtatggggctattctgttagaaaaagataatttaacattaaccattgaaaattcccttaccccagcagatttcctaacaggggatttaaatcttaattaccatacaaaggcccaaccagatctaggaggaactcccttcaggacaagacaatagatggttcctcccaggtgattgagaaaaaaacacaatgggtattcaataattgagggaaagtcctgtagaagcagagttaagaaaattgcctaataactggtctgctcaaacatgcaagctgtttgcactcagccaagccttaaagtacttacagaatcaaaaaactctgtctcaattctgactcaataggttacccacaccctctctgaaatgaatttgcataagagagaactgttgcttgtaggaatgcatcttgatggggcacctgggttaataggaagtactcgggaacccagcccagctctgggactcacctctgagcacaaacgcaatgtcgggcacactggtaaaggtccactagaatccagcagcctggacccctttctttgtggtcaagaaaggtgggaaaacaggtgcaggactgctacatccaccaactttctggtattattttttttcacaatagccatagaaaactaaaatgggggggattacaatcatttctttgaatatcttgatctcctgacctcgtgatccacccacctcggcctcccgaagtgctgcgattacaggcacttctctgaatatctcatagaattattcacttattcactcatttatttattcaaaaacaaaggtttttttaacctcaccgtttagtagctaaaggaaggaaaataaattattgtgttaaaacattatagagggtgtactgaaggaataaattgtgggcttgggccattcagagacagagaagataaataagtaaagaggtctttaaggacgaagaggagtttaccagttggtaaatactagaaaaaggaaaaagcactggcagattcatggagatcatacatgaaagagcagaaatgggaccagctcctcttcaaattaccactcctctcacttttttcataattatctccacaaggtcataccaaaggtcatcaattcagaacataaatcaatagatttccaaaagaattccatggaagtcagctctcccaggggccccatttcctcctgctccctaatccatctaaactcttatgcccaacaccttcctcctttgccccactcatggcaggtgacacattcgagaacccagagagtcagagttcttttctttctgcctcaaatcctgggctcctatccaaaccaaagagtagggacatgtaactatttacacttcattccacccaacctcccccagttctgtggctactttccaccagccatcactgcctccctaaccccgactggggactcttggaccctgactctttccctacttggatcagcacctgtttttctcccatagcatgggcaacagtagctctgaagtcagagattttggctttgaattctcactgtgctttttttttcccctccctagattctcaatttctttagagttgggctcaaaatgtggtaatggccaacatttagtgagcacttgttatgttctggccatgaagccaaaactttacatgctttctccagaaaaactctacaaaagagatttttaaaaaaatcttcatattataggtgggaaagctaaggcgcaaacagggtagttccctgtccagaatcccccagttggtaagaggtacagccaggattgtagtccaggcagtcaggctccagagactttgctgttaaccattcatttaaacaaggtcatgattaagttgagcctccagtctagatggcagcccctaaaccttccagaggtcatttcatgtttgctatgtttgattcattattttcaaattgcaggaagatgtgtcagattatgaactccccatattggcataaatgcaagtctcactatccagggcagctcctgtgagaaactgaatggcaatcatggggctaggtgtagcatagtcattgaaagcgatgtttatggagaatgtttaatgatatgagtaaagcatgtgggaaagtgataaaagtagaacatagagccatatgtagagtatgaatgtaactcttagaaaagtgtgcttgtgattttgaagacttattaaaaagtatacatctatcccacttatttatttattcatttatttattgagacagagccttgctctctcgacctggctggagtgcagtgacataatctcagctcactgaaacctcagcctcctaggttagagtgattctcctgcctcagcctcctgagtagctgggattacaggcacccaccaccatgcctggctaattcttgtatttttagtagtgacagggtttcaccattttggccaggctgttctcaaagtcctgtcctccggcaatccacccaccttggcctcccaaagtgctgggattacgggtgcgagatactgagcttggcctatcccatttatttactactcagatacctccataaaaactcctgaaaggtggtaactcagctgctatgtcctttgcttccatcgcatgatgcagatgactgtgtctgttgatgatgcccaagaaatacctactgattgaatccatgagtgacagctggataaagcaaaactttgaactggttatatcaccatcctgaagagactcagttcagttttgaatgccacattgtaaaaatgaaactgctatattggttgctggatatttcctgattcggtgtttaggcaagccaaggcagaggaaggaacaccaagatgccccttggtggcatcttgaagcagttactcctgtgggtagatcagctcagggatttgatttgtgggtttttttaaattatactttaagttttagggtacatggtcacaacgtgcaggttagttacatatgtttacatgtgccatgttggtgtgctgcccccattaactcgtcttttaacattaggtacatctcctaatgctatccctccctgctcccgccaccccacaacaggcgctggtgtgtgatgttccccttcctgtgtccatgtgttctcattgttcaattcccacctatgagtgataacatgctgtgtttggttttttgtccttgtgatagtttgctgagaatgatggttttcagcttcatctatgtacccacaaaggacatgaactcatccttttttatggctgcatagtattccatggtgtatatgtgccacattttcttaatccagtctatcattgttggacatttgggttggttctaagtctttgctattgtgaatagtgccacaataaacatatgtgtatatgtgtctttatagcagcatgttttataatcctttgtgtatatacccagtaatgggatggctgggtcaaatggtatttctagttctagattcctgaggaatcaccacactgacttccacaatggttgaactagtttacagtcccaccaacagtgtaaaagtgttcctatttctccacatcctctccagcacctgttgtttcctgactttttaatgattgccattctgactggtgtgagatggtatctcattgtggttttgatttgcatttctctaatggccagtgatgatgagcattttttcatgtgtcttttggctgcataaatgtcttcttgtgagaagtgtctgttcatatccttgcccactttttgatggggttgtttgttttttcttgtaaatttgtttgagttctttgtagattctggatattagcactttgtcagatgagtagattgcaaaaattttctcccattttgtaggttgcctgttcagtctgatggtaatttcttttgctgtacagaagctctttagtttaataagatcccatttgtcaattttggcttttgttgccattgcttttggtgttttagacatgaagtccttgcccatgcctatgtcctgaatggtattgcctaggttttcttctagggtttttatggttttaggtctatcatttaagtctttattccatcttgaattaatttttgtataaggtgtaaggaagggatccagattcagctttctacatgtggttagccagttttcccagcaccatttattaaatagggaatcctttccccatttgttgtttttgtcaggtttgtcaaacatcacatagttgtagatatgcagcattatttctgagggctgtgttctcttccattggtctatatctctgttttgttaccagtacaatgctgttttggttactgtagccttgtagtatagtttgaagtcaggtagcgtgatgcatccaggtttgttcttttggcttaggattgacttggcaatgtgggctgttttttggttccatatgaactttaaagtagttttttccaattctgtgaagaaagtcatgggtagattgatggggatgtcattgaacgtataaattaccttgggcagtatggccattttcacgatattgattcttcctacccatgagcatggaatgttcttccatttgtttgtatcctcttttatttcattgagcagtggtttgtagttctccttaaagaggtccttcacatcccttgtaagatggattcctaggtattttattctctttgaagcaattgtgaataggagttcactcatgatttggctctctgtttgtctgttattggtgtataagaatgcttgtgatttttgcacattgattttgtatcctgagactttgctgaagttgcctatcagcttaaggagattttgggctgagatgatggggttttcttggtatacaatcatgtcatctgcaaacagggacaattcgacttcctcttttcctaattgaataccctttatttctttctcctgcctgattgccctggccagaacttccaacagtatgttgaataggagtggtgagagaggcagcacaccaacatggcacgggtatacatatgtaacaaacctgcacgttgtgcacatgtaccctaaaacttccagtagaattaaaaaagaaaaaaaaaagcaaatgtgtaccagggtgttcaatacataaaaacgtaagtttaaaaccatttccgctggaatttatttgcttatttatctacatacaaataggtgggaaatgaaacttatttttcctcaagtgattagttagccaattatctcaatatcaattaataaatatcaattatttatccaaaaatatataaaattttcacatattttaagctcttccagatatcttgtttttactgctttttaatttgtttctgggcttctcaggtaacagttaaaaatttcaaccctttgaaatctgttttttttaaagatcagcatattttgatcaatgttccatgtgcatttgaaaagaatgtgtaggagtggtgagagagggaagttctggccagggcaattaggcaggagaaggaaataaagggtattcaattaggaaaagaggaagtcaaattgtgtctgtttgcagatgacatgattgtatatctagaaaaacccatcctctcagcccaaaatctccttaagctgataagcaacttcagcaaagtctcaggatacaaaatcaatgtgcaaaaatcacaagcattcttatacaccaataacagacaaacagagagccaaatcatgagtgaactcccattcacaattgcttcaaagagaataaaatacctaggaatccaacttacaagggatgtgaaggacctcttcaaggagaaatacaaaccactgctcaatgaaataaaagaggatacaaacaaatggaagaacattccatgctcatgggtaggaaaaatcaatatcgtgaaaatggccatactgcccaaggtaatttatagattcaatgccatcctcatcaagctaccaatgactttcttcacagaattggaaaaaactactttaaagttcttatggcaccaaaaaagagtgcacatcgccaagtcaatcctaagccagaagaacaaagctggaggcatcatggtacctgacttcaaactatactacaagactacagtaaccaaaacagcatggtactggtaccaaaacagagatacagatcaatggaacagaatggagccctcagaaataacgctgcatatctataactatctgatctttgacaaacctgagaaaaacaagcaatggggaaaggattccctatttaataaatggtgctgggaaaactgggtagtcatatgtagaaagcgaaactggatcccttccttacactttatacaaaaattaattcaagatggattaaagatttaaacattagacctaaaaccataaaaaccctagaagaaaacctaggcattaccattcaggacataggcatgggcaaagactttatgtctaaaacaccaaaagcaatggcaacaaaagccaaaattgaccaatggggtctaattaaactaaagagcttctgcacagcaaaagaaactaccatcagagtgaacaggcaacctacaaaatgggagaaaatttttgcaacctactcatctgacaaagggctaacctccagaatctacaatgaactcaaacaaatttgcaagaaaaaaacaaacaactccatcaaaaagtgggcgcaggacatgaacagacacttctcaaaagaagacatttatgcagccaaaaaacacatgaaaaaatgcttaccagcactggctatcagagaaatgtaaatcaaaaccacaatgagataccatctcacaccagttagaatggtgatcattaaaaagtcaggaaacaaaggtgctggaaaggatgtggagaaacaggaacacttttacactgttggtgggtctgtaaactagttcaaccattgtggaagtcagtgtggcgattcctcagggatctagaactagaaataccatttgacccagccatcccattactgggtatatacccaaaggactataaatcatgctgctataaagacacatgcacacgtatatttattgcggcactattcacaatagcaaagacttggaaccaacccaaatgtccaacaatgatagactggattaagaaaatgtggctcatatacaccatggaatactatgcagccataaaaaaatgatgagttcatgtcctttgtagggacatggatgaaattggaaatcatcattctcagtaaactattgcaagaacaaaaaaccaaaccctgcatgttctcactcataagtgggaattaaacaatgagaacacatggacacaggaaggggaacatcacacaccagggcctgttgtggggtgggtggaggggggagggatagctttaggagatatacctaatgctaaatgacaagttaatgggtgcagcacacccacatagcacttgtatacatatgtaactaacctgcacattgtgcacatttaccctaaaacttaaagcataataataaaataaaataaaaaaataaaaaaataaaagaatttgtattctacagttgtgtttaatgttctataaacgtcaattagactaaggtgattggtagtgttattcagatattcagtattcttactatatttttgttagttgtatatcgatttctaaagacttgctaaattctccatctgtgagtttgaatttgtgtatttatttccttatttctgaaagttttgctgcatgtaatttgaagctctgttatgaagcacataatctacctgatgcattgatcctctgttatcatgaagtgttcctccttgtctctgataatattctttatcggtagttaattttgtctgataatagtatagctactccatatttcttttgcgcactgtttgcataacatagctttctctattgtttttattttaaagctatttttgtctttctatttgaagttcatctcttcagtataacacacaggctgtcagtccctgctttttaaaaaatccagttcatcagtctctttctttgattggagtggttagtctagtaatctttaatgtaattattgatgtggttgaattcaagtctgccattttgctatttttttctgttcgtctcatctggttattatatatttccctatttatcctttcatgccattatttgtattaatcaagtattattcaatatttcattttaatgtgtcagctgatttattagttctctctctttggattactttttagtggttgctttagggattacaatatgcagtttaactggttttaaaccttctttaagtttatgttaaattatttcaggtaaaatatagcaaccttgcaaaagtatatttccatttcccctttttcatatccttactattattggtgatattttatatataatataatatattatattatatataaatatactattatattatatataaaatatcacaatataatatatcatattatatataaatatacataatatattatataaatatacataatatattatatataaatatacataatatatttatataatatataagtattacatattatattatatataaacatatataataagcccaacaatacagtttgattttttctttaaagtcatatattgtttaatgaaattaagaaaataagatttaaaagatattctatgtatatgtatatatacatacacacgtttatatgcgtgtatgtatgcatctgatggtctttatttcttcctgtgggtccacttttatttggtgtcaaattaaagagggttgtaggtgtatgcatttatttctgggctctctattttgttccattggtctacgtgtctacttttgtaccagtaccatgctgttttggctactgtagccttgtagtgtagtacatgtttgttacttgggcatattgtgtgatgctcaggtttgtggtatgatagaacctgtcacccacgtagtgaacatagtagccaataggtagtttttcagcccttgtgtcactctctctctatcccttctaatagtccccagtgtctatttctcatttttatgtccatgtgtccatatgtctaatatttagctcccacttataagtaagaacatgtcatatttggttttctgtttatgtgttacttagcttagaataatggcctccagctagatccatgttgctgcaaaggacatgattttgttcttttttatggctgcatagtattccattgggtatatgtgccacattttctttgtccaatccaccattgatgggcatctgcattgatgccatgcttttgctattgtgaatagcatgatgatgaacattgggtgcatgtgtccttttggtagaacgatttattttcctttgggtatatacccagtaatgggatagctgggtccaatggtagttcagctcttagttctttgagaaatctccaaactgctctccacagtggctgaactaatttacattcctaccaacagtgtagaagtgtccctttttctccacagcctcaccaacatctgttattttttgactttttaacaaaagccattctgactggtgtgagatggtatcttactgtggttttgatttgcatttctctgatgatcagtgtattgagctttttttttatatgcttgttggccacatgtgtgtcttctttcttctttagaaaaaaagacatgcatgtccactttttcatggagttctttgctttttgcttcttgatttgtttaaactccttatagattctggatattagacctctgtcggatgcatggtttgcaaatattttctctcattctgcaggttgtctgtttactctcttggtagtttctcttgctgtgcagaagctctttctttagtttgcttaggtcctacttatcaatttttgtttttgtcacaattgcttttggggacttagccataaattctttgccagggctgaaatggagaaggttatttcctaggttttcttctagaattgttatagtttgaggtcttacatttaagtctttaatccctcttgagttaatttttgtataaagggaccagtttcattcttcagcatatagatggggtccagtttcattcttcagcatatagatagccagttatcccagcacaatttaatggatacagagtctttttccccattgcttattttgtcaagcttgttgaagatcagaaggttgcaggtgtatggctttatttctgggctctctattctgttccattggtatatgtgtttattttgtaccagtaccatgctattttggctactgtagccttgtagtgtagtttgaagtgggtaatgtgatgcctctggctttgttctttttgcttaggattgctttgattattcaggctcttttttttcctagttctgtgaaaaaggacattgctggcttgataggaatagcattgaatctgtagattgctttgggaagtatggtcattttaacaattttgatgctaccaattcatgagcatgaaatattttcccacttgtttgtgttatctctgatttctttcagcagcattttgtagttcgccttgtagagacctttcagctaattggttagatatattcctaggtattttattctttttgtagctatggtatagggactgtgttcttgatttcgatctcagcttggatgtattggtatatagcaatgctactgatttttggccattgatttggtatcccaaaactttactgaagtcatttatcagttccaagggccttttggcagagtctttagggtttttaaggtatagaatcatatcatccatgaagagagatagtttgacctcttttcctgttttgatgccttttatttttttctgttgcctgattgttctggctaggacttccagtgctatgttgaataagagtggtgatagtgggcatcttgtcttgttccagttctcaaggggaatgcttctcacttttgcccattcagtatgatgttggctgtgggtttgtcatagatggctcttattaattcgaggtacatttcttcaatgtctagtttgttgagggtttttttatcatgaagagatgttagattttatcaaaagcgttttctgcgtctactgagatgattatatggtttttgtttttaattctgtttatatagtgaatcacacatagtgactatcactgataatgttttgtttttatttcatctattttatctaatactaatatagttactctgattccattagtatttttctggcatatatttaccacctttttactttcagtaatttcatagtcttacgttttagtaatgtctggaatttaaaaagtccaatctgacaacctctgcgtcctaacttgtgagttcttctatccattgattatcttctactcattaattattgatgtatttgcatatgtttctactattttactttgtggttccttttctatgcttcttttcccccttctttttgggagtatgttttggccttttttttttttttggctctttatatcctattttttcttattctgtattttcctctacagatttcaaatttatacattttacttctattctttagttactatgtttgagaattttatttttcatgcttgataaagtctaaagttatttggtattttaaccactcccccactgcccaccctacaacctcaaaagatgcatggactttagcacagtttaatttcagtcactcactcctggattaatgattcctcttggctctcttgtgatgcttcttggctctcttaatgattctgtgttttccactgcagatatatgggaatttctgtatctctattatagcacacaccagcatgggggattaggttgttctatctggaccccgtctctgctgaaacattccatagtcatgttactccatgttgagcaagagttccgtactgcatggtatcctctaaatattccaaatgggaattcatatatcagacttttctgtattcggaattcctctaaatattccaaatgggaattcatatatcagacttttctgtatttggaattcctcttaagtgtctaggctttctaatacattgtcatcaatttatccattccctacagggtataatgagagactatgggactcagaaggtggcagatattttttattatggggaaagataactgagaataaagctatcatgcagatatttgcagagataaaagtaatgcagatactgagtggagttttgatcaaactatgcttgaaagccactctaccactagttacacaaaccaataatttcccttcgcagtggaagtcagcttgagttttttcaggtgtttttgtgggtttcaccagatacagcaaagaaattaaaattactgttaatggatgtcaaaaccagtcagaagtatcctaagttatataatttgtcaaacaaccatatacatatattttgtattatatttatccttttgttcttcctttggtaggaaaattgtctcattaattcttatacgaaaggacttaaaattagcaaactttttttgcaaacacatggattccattcttggacttgaggacaacttgacgaacaggctggggaggccttgagtggtctggagccagcttgaagcggagcagagttaatgccactgccactttacactcaattatggcaaaatgctgcccaatgcagttcctggggataccaagaaagaaaacatggcatctaatgaatttatatattattaacaacatacgccaatctttttatatatgacgacttttgtagggaaacaagatccatttttttttctgtcatcctgctggattacaggtgctcaccatgatgcccagctaatatttttgtatttttggtagagacagggttttaccatgttggccaggctggtctcaaattcctgatctcaagtaatccgcctaccttggcctccgaaagtgctgggattacaggtaagagccaccgcacccagccaagatccatgttttaaacaaattccaatgtggcagaatccagcaaatgttttattttaagttaagtaagccccgatcagaaagtccattaatgtcaagacctgcaaactgtggctctattattttggggcccatcttacaaataagtggtagtgagttctatcaacatttgattctgcaaggtccacgtaacttgaaaaccttccttatatcatgataaggaaaagctacttcttactattatttagaggctgtgcagttgaagccttaggcataagaacaataacctggcatactcagtggattgtgttgtcatttggtaaatcgggtgtctctcataccaaaccaaagggaaacttggactttagaacaacattgctctctgtaggaacaagagctgggaggtgccaatgttgccttgttcctataacaagatggcattcccaatgcttgtccattgcaagtttaagtgtagtctttgggcctgtcatgaggatggccttcatcaattcacacccatatgccaaggaccagagttgttctttgtaacattaaccggtccctttgggggctcaaaagggtaccaactaaatgcactggtcacaagagaagacaagccaggtaaaataatggggagcaacagcagtgtcagctaactgagggcctgaagggaagaagcacttgtcaggtaagcactattacacatttccatcaagttcaccagcttgagtctttaccttaatccagctgagaatggtatgaaggcatagggatgtattttttcagaattttccctggagaatctcaaggggttaaagacctgtaatgagagtgaagatcccagtcctaatccctccagcccacccccacaaaaaacaaaaacaaaaacaaaaacgaaatccatagatattgttaacagaattccaaagctaattttaggaacttacaatgtctggagactacaagtcctgcttgatgttccccaaaagcctaccactgaaaatatatcccaagaaagcagaggctatataacctagtgatagattaaacaggccccgatagtaagaagcagcagcaaatcatccagacaatctgacttgagcaaatagtgacttcattattttcccttcacagtaaacccgtgcctctgtcatataaaaatgggcaaagcatcaaattattatcttttctatttgtcttggtttccaaatggactgagccagtgacttgggcaaagaaaaaaggggtggcaattcacaagctgaagtcacaagctgaagttgttcagcttctgcccgaaagtctctgtgagaggctgccgattagtatctcctgggctgtggggttggtctgagcgctggtttgcagcccaggagtgtgcttgttctctcccaggccccctctccctttcactctcaggttagcactgagtgtgaaggagagtgatattcctagagactaacttcaaatatgctcaaatcttaaaaaaagcaaagagtccataatcttgctactttaattatgaccagtaacaagagatttgcaatacacttcacaagtctgtgactagattgactacagacatgaatgaaagcagagagcaaggtggttaaacagtgcagtgtcagttgactaatcacacccctctacttcccaggggatgatatgcttctgttgataaggcatcatcatggaactctggtgatgattataaatgcaaatgtagttttctcttaaaagcatagggtttttgttctgttttgttcttttctaaatgacagatcgttatcctaactgctctctcaactgtgaagatgcttctcttccctcttggtgctatcttagatgccactgggtgcagttgggacaatcatacctgagggtcttcccagaaataggggttgtggtgaagagcccaaatattgataaacacagttattcctgagtaaacagaagaaaaagcaggtaagtgcatgagcgaagattctgtctttttttttttctcttttactttttttttaaaattatactttaagttttagggtacatatgcacaacatgaaggtttgttacatatgtatacatgtgccatgttggtgtgctgcacccattaactcgtcatttaacattaggtatatctcctaatgctatccatcccccctccctccaccccacaacaggctctggtgtgtgatgttccccttcctgtgtcaatgtgttctcactgctcaattcccacctatgagtgagaacatgcggcgtttggttttttgtccttgcgatagtttgctgagaatgatggtttccagcttcatccgtgtccctacaaaggacatgaactcatcattttttatggctgcatagtattccatagtgtatatgagccacattttcttaatccagtctatcattgttggacatttgggttggttccaagtctttgctattgtgaatagtgccacaataaacatacgtgtgcatgtgtctttatagcggcacgatttataatcctttgggtatatacctagtaatgggatggctgggtcaaatggtatttctagttctagatccctgagaaatcgccacactgacttccacaatggttgaactagtttacagtcccaccaacagtgtaaaagtgtccctatttctccacatcctctccagcacctgttgtttcctgactttttaatgatcgcctttctaactggtgtgagatggtatctcattgtggttttgatttgcatttctctgatggccagtgatgatgagcattttttcatgtgtctgttggctgcataaatgtcttcttttgagaagtgtctgttcatatccttcaccttcttgttgatggggttgtttgtttttttcttgtaaatttgtttgagttcattgtagattctggatgttagccctttgtcagatgaggagattgcaaaaattttctcccattctgtaggttgcctgttcactctgatggtaatttcttttgctgtgcagaagctctttagtttaataagatcccatttgtcaattttggcttttgttgccattgcttttggtgttttagacatgaagtccttgcccatgcctatgtcctgaatggtattgcctaggttttcttctagggtttttatggttttaggtctaacatttaagtctttaatccatcttgaattaatttttgtataaggtgtaaggaagggatccagtttcagctttctgcatatggctagccagctttcctagcaccatttattaaaaagggaatcgtttccccatttcttgtttttgtcaggttgtcaaagatcagatagttgtagatatgcggcattatttctgagggctctgttctgttccattgatctatatctctgttttggtaccagtaccatgctgttttggttactgtagccttgtagtatagtttgaagtcaggtagcatgatgcctccagctttgttcttttggcttaggattgacttggcgatgcggactcttttttggtgccatatgaactttaaagtagttttttccaattctgtgaagaaagtcattggtagcttgatagggatggcattgaaactataaattaccttgggcagtatggccattttcacgatattgattcttcctacccaggagcatggaatgttcttccatttgtttgtatcctcttttatttcattgagcagcggtttgtagttctccttgaagaggtccttcacatcccttgtaagttggattcctagatattttattctccttgaagcaattgtgaatgggagttcgctcatgatttggctctctgtttgcctgttattggtgtataagaatgcttgtgatcctcaataaaatacgagcaaagattctttcacatctattcatagatttcataaccaaggaaagaattctacaatcataatttcgttaaccatttaagaagcgtctgttatgatgacacttaaatgggtgctgtgaagatcagtgagatctactctagccttcaaggagctcacagtccattggaagagacaggcaattgcaacacatggtaataagtcagaaggaagcctaggatgcttggggaattgagaggggaacctcatgtatagagcctttggatgtatgcaagagaaaaggcccaggcgaggcatgctgagctgagtataatgaaatcggtaggggaaaaccaggtaaagagaagaatgttcagaaaggaatttgaggcagataaaaaagcatgaagccaagctttaatacttgagaaagcatgagaaatttgggtgactgggaggttgtataacaggattcagggagcaaagtgtccatagatcagcctgtggaggttggctgggcttgtaccttaaaatgggaaagaggtcatgctaaggattttaggttgaaaccattatggatcactgagaagtttaagcagagagtgagagtattgtcttttttttttttcctttcctagtcagctacttgggagattgtattatactttggagccatagaaccatatgggatatagtgccaatatggcactgaagtaatattttatcatgttatggaatatccattgatcagggtggagatgatatgggtttctcctgaaacctataaatgtaataaattatattaatggattcctaatattgaacaatcttttcagttttggaatatgacctacttacttggccatgatgcactgttttattttattttatctttttgtagagatggggtcttgtgttgcccagactcaagcgatcctcccaccttgacctcacaaagtgttcggattacaggcatgagccacctgcccagccaatacatttatttcaatgagctattggattatgtgtactaatattttatttaaaatttttgtacttatatacataagtgatttttatctaaatatatttttgttcaatttttagtaggtttgttatcaatgtgatacttccttaaataactttctaagtttttatttttctatgctctggacaactttaagtattactgggattatatggtctttacaggtttgaaaaaatttgtgaaaaactgcataggtctggttccttttcaggggctctacaatttttctctagtcctgtgaaaattggcatgcttagactatttatctctaccagcatcagttttagtaaattatgtattatacaattatctagtttttttcctggtttttcaagtctctgtgcatacacttgtgtaatattagttcgtggtgtgtctctttgttgaccagcccctcccccactggctattgtgttttttgactagttttgcaaccgttctgctttccataccattaccttttgctttcgcctttgttaattcacctgtttccttttagtttactcttttattctttccccaactgatttatttccagttgttttcgacgtcaatgtttaatttaattcttttattaataaaaatatttcgcatttactattatagcttctcttctgaatgaatgctgctttagtggcaaaccattaattctcatatgtagagttttcagggtcatgatttgattttgtaattttgctttagcccaagagtttttaatggattaaacaaaaaactccagatgaatgaaactttttgaaaaatttttgttgctaatttccatttttattgtcttcatttaaagaacactattttgtaatgtttctcttttagtaattaagtttttttattgtggtctagtatacagtcaactttaagcaatgttgctggtgtacttaaaaggaaagtctgtcctctattagtggggaaaaagtttaatattgtacgcataaagtctatcttattaattacattgtttagatcgtctgtatactttatttgtttggtttgcgtaggtctttgaaaggcagttaaaatctgttagtagggtgcctttgactgttttccttttcatttcctatagtttgctttaaaaaattgcagggctgggcacagtggctcacccctgtagtcccagcactttgaaaggcccaggcgggtggatcacaaggtcaggagactgagaccatcgtggctaacacggtgaaaccccgtctccactaaaaatacaaaaaattagccaggcgtggtgacatgcgcctgtagttccagctacttgggaggtggaggcaggagaattgcttgaatctgggaggcagagtttgcagggagcagagattgcaccattgcactccagcctgggcaacagagcaagactccatcaaaaaaaaaaaattgcagatgtgtaacttgatacataggtaggtatcaatagctgtcttatgttcatgatgaattgtggcttttaacattatgaagactaatttttgaacttcaccaatcctgacatggccagctagcttactgactgaggtaaagacctaatttgggttagaatggcaactggaacaccataacagtgctgcatccacacagcaaagatcactttcaaaaaacaaatggccaggtcaccgttaacgaattcttcctaagtgattaatccacatattgctagctaatcaaggacattcaagaaatttgctttcttaacatgggtcagagattttgaagtttagagcttcaaaaacccaatgttatttaactctcccaagcctcaatcatagggtctaacctctatggttggattaggtttatatcctggcagtacacattctttcatttttcaatttttggttccagaagccttgttctcttttaaatggtttctggaagtctcaccaagatcatcagaacagactgcccattgaagttcagtagtagctaatacctaagaagtatgattcacaggctcatcaattattagctcctttgggtgagtctcaaatcatggtcaatgaaaaaatttttttgagacaaggtctcactatgttgcccaggctggagggaagtggtgtgattatagtttgctgcagcctcaaactcccaggctaaagtgatcctcccacctcagcctcctgagtagctgggattacaggcacatgccagtgtcctcagatgagatatttttgatttcctaagtctgttattgtctttcttaggagtttctgcttgctctagcttacagccagtgtctagttgattgccatggatctctcccatgagtggcacaaaacccattgtgttttgttctatttagtgattgtgaattatttaggggatttcatggaacacccatttttttgggccatgtccctctccactgaggcttactggaccatcagattcatggcacatactaggccattgataggtctgttattggctattgagggaatctgttgtttttgtttttctggcatgggttttattaatccagagaatcacactgacaccttatgagcatattcattataataaaaaagcatgcacattatctaacaaaattacatatttaaaccaagaatacgtcagaaaaagacataatttgaaaatttcctactttattgaggtcttaaatctccatggagccttagggcaaaaaggaaatagaattcataacttttggtggtttgtcatctttttttttttttttggccatgtagaaaatctgaaaacacctcaatgactctaactcaatgtcagtgaagattccctggaaaaaaacttatgaaaagcagattaatgactgcctgcaactgatctgattttatcttcatcctctctctaaatctgtcttcctaactccaatttctttgttccacaaatctaggtaattctgagcaaggctcaaaatatctcttaataagattagtgaaaagggatctgcattgtccagaaaaaatgactgctctcccaggaatctgtgtatcatttgagtcacaatctgtcagcagagtggacatccccttttctctgccagaataaagagtctttaattgtaccctaggctctaaattaaaagttaacttttaaaagataaaatataatttttaggattgactatttcttttaggtgattaatatacacttttcctaaagtagctcagccttactaagcttattaagaccacaatttctaaaccttttctatgggattaaaaagtagagccaccctctactctctgcaagtctttctgcagccaccctctcattgccttttaaaactgggaatttctcttcttgtttaatttggcagcccaatcctaccttcttttttaatttcataaattcattaaaatctctctctctctttttgtttgttaaataccttccttccattcttttcacttttatgggattatttctttttgcatttcagtgtatgtgtataagtaggatcttaggagggacaagtggcaacagaatcacccaagtggctttcttgagttggaacttagaatttacctagacttatgatttatcttttataagtagattggtttgtagatacctaagtatggaaatataaaacttaggggactctggcatttgaagattgacaaaggcaataactgagaccatggaagcaaggttgttgagaaggaaatagctgatattctaggacttggatactgtctgggtaaggaagatggtggaggtgtgaggatgacttctatctttctcacttaaaattactcacagacagtggtgccattcattaatgtagcaatccaggaggaggaataggtttaggggaaggaggtagatgacatgctttcttttggacattttgcacatcatagtatgctcagaacaaagcaaagtgcctagagcaaatgtttaatatgcacttgttgggccagcaaatgaagagaagggcacacataatgtagtaggtcttttgccaagagtgaatgggaccatggcacaggcacaggtagagagtgatgacaatgtgtaagtgatactgtgaggtgtgggagagaaagcaggcatcataaacatgtttctttttagaaataaacaggatttctgggtaatacaggggaagaggtgggtctggcggatatgaggcatccatttgcacatgctttgttgtgctatagctgcattcaagggcccattagcagggcagagaaagcgtatagaggaatttaatgctggttgaattactgatgagtgacagtagagaaagggaaaatattcaaggaagttgacggcattgccaaaggggaagttggagtgatgaatccaggcatccaagcctggggtgaagaaagtgaagttgtggagtgcctgtgtgtatgagaggggcaggaaggaaagcagggtaacaggaaatgagacagatgagcacgtgaggtgcagtgaaggcctgaaagctctggagggcaagaaggtgtggcggaaaggaatgtaaagtgaggtgaaggcaactctgcgtgtgcacttcctgtcccttcattgtagcttgagggagattaaggtgcagcccttgaaggcacttggaggaaagggcagagactgcaggagaccagagatgacgtataagtagcctaaaactgagtcagccgggtggagccagctcttccaccaacatccatgcggatctcaacagcattgtctgaagcccagaaagttacccgcagcagctgcaaaagccacaagatcaggaaagtgaaaggaacatgaaacagaaaggacctgaatgggaaaaattagaaggcatgctgattctcacattttcaacatgtagcttttgtatgggtcgggggattttaagattctgtggattacagggcttaggtgatctagaatggaagtagagaaaataattttcttgtgttggaaggcagcaataaatcatcattttattgatgttgaaaaaaaccagagcttattgacaggatttaggtattattgaaatgcaagattaagggaaaaggtagtaaaagttgactctgagctgttttgttggagcaactaggtgggcggaatattatgtgtatggatgcaatattatgtaggtaataaatattacaataaataccatgtgaaaaataacactgaattaaaaagaggaaacttctttagatactagatgattgcaaagatccccatgatagcaaagatctttctctggagagatcccagagaaagcttaagttgttgctttagtgtagtagttacgagcgcagactctagagtcccactacttgggttcaagtcctagttccaccatttaccagagatgaagttttacctttttgttcctgtttgtctaaaatgtgcataacactagtatttccacagcagaactggggggcaggaggatgggtggataaaatgagttaacacatgcaaaacatatggaacaatgcttagtccctagtaagtactaaatagtttttgtttttgttattacaatagtaaagttgattttgtaggaaacaaatatttaattgctattgggcaactatggtagcacagtagcaattaaatattgctacatttaattagattgcccaatcaaatccaatatttgaaagacggttaaattggaggaagttgtagaaacacatctcgacataggtcaaagataaattctggctcattcctttatgtctctaatgttgcctttcaatccatcttgcattccaccaatgtattaatctttctaaaaaataactataatcatgccacccagcttagacgtcttaaatctgtctgctgcttgattgagaaagactgaacacaaaggttggccttcagaaaactctatgatctggctacatcatggctccaggtatagtcccacaatttccctctgtgaatcctggagtctgtggattacagcaattgctccagtgacatgccctgccggtgtgcgtgagggaagggagaaggcaggctgcctgctgctttgtgtctgctcttctctctgcccacagtactgcctctctcatctttgctgatataaatctagtcctttaagtttcagcattaaagccgtgatgcttcacgaaggccccctcacccaaccctcagtccatatggcaggattctgtacctttgcaccttgataatcctgtgcctgtttggatagtcctgagagctctatcctctttctccctctctgggaaataagaatggccctaggttccacagagtctaaggataaataactgttaaagacatgagtatgttaagacatttcaatccagcacagctgcattgttaaaaaaaaaaaaaaaagttttaagacctgcaggtaaggagcgtccatctggaaaggtgatgggtttgtcgagtaaccgggatatgtttactaccggtgcgtagaggcggaggcattccttgatgcacatcgtggtgtaaggcatctggctcaggtgttccctgggtagaagcacaggaggaaaggaaaaggaggagtagtcacttaggcattgcactgaaagcccagcttttctccatttttgtaactgagaatgattttgttctttacccaaaggaggacttcagatgtatcaagtatgtcttaggaaaagctaaatgttaacacttaccacttttcacatgtaactgtaagtgattctcccccccccgcagatatagggctcttatcctgagacatacttattccagggctcctgtgaccagtatcacacatctgtgaaaatttggtagagacatggactgtatttatatccagagtgcctcttctatgaatgaataagtatttctgcctctttagaattgtaaaaaaatataaaatagggatgtggctctaagatggctgactagcggcatctggtactcgcctcttccacagacaggaaccaacatagcaagtagataattacacttcaaatagatcatctaagggagaacgctggaattcaacagagaagtgatggaaagcaccaaaagcaaggaaggagagggaagtgaggcagcctgtttggcggggatcaactgggagtctggagaagctctttaatttgggaaaagaataagtgagagccctccagtgatccacgttcccaccacggactcctacaatactagctatggaagagcccactaacctttgcaggccctgagactaacataaggagccggctggagattgcatgaagacattactccagagagagagctcacactgggtcccacaaacccctgagtcctcagcagctgcagtgtggcatcatctggagagctcagcctccatcagactgtgtcttgccttggggttcaacagcctctacatctccacatccctgaagccccagtgacattccccaccacagctgctgtggctgctgctgctggtgccaaggtgggagccactgccagtgaccctatcacccccagcagaggggtgggcacacattttcatgcaccctgaggacaaattccactgcctgtaactgtagctgcaagggccaaggtgctagcaaatcatgagtcaccctcatcccacaaaagccttttgcttatggctgctccaaatgaaagcagcgcctcccttgtggtgagcctagatcgtgccattgcactccagcctgggcaacaagagcaaaactccgcctcaaaaaaaaaagcagccccagcccctccctctccagtagcagggccatagctcagctgctgccattctcatctgagcattcttgtagcagcctggggatcaccctgtccctgcctaccatagccagcacctgcatacactactagggggtctgagggcagatctgctcaggctggctccactcctcccagtacctgagcatgctgtctagggccctagagactgccctgcccagtctatcattggcacctgagcacttctcctggggtctgaggttgggctcactcaatctgctgctaccaccacagctggtatccacccacatgtgtcaactgcgggctggggactggcctgctcagcccatcaccgccaccaccaataccagcgtggactgcttagtatcaagcaggttgtccgacatgcctgatgcctaggtgcgcaagagctcacccacctacctgacccaccactgccatttccagaacccaggcaagccacctggaaagagttggtctgcctggagtagctaacactggtgctagtatacatcaccttggtgcccaagaacgggcatgctcagcctactgtagccactgctgggacccgaagactggcccatgtatcccattccccaacaaaacttcaccacagcttccactaacaaccacatgctaagccactgagtaaatcacagacaaaaatgatgctgtttatagttgaagaaatcatacagcgattacactactgcacatgcccagaatcaaagccaaagcatcctacccaatgaacactatgcatacattttcaggaaaagtcctcccctatgaaagcaaattcaaaaaattggaaaaagcaactgttacacaagatgcacaaataccaatgtaagaacacaggaaacatgaaaagcaaggaactatgacacctccaaaacaacacaataattttccagcaacatatcccaatcaaaaagaaatttacaaaatcctgggaaaagaattcaaaatattgacactaaagaagcaaaatattgaggctgggtgtggtgcctcatgtctgtaatcccagcactttgggaggcagaggcaggaggataacctgaggtcaagagtttgaggccagcctggccaacatggtgaaaccctatctctactaaaaataaaaaaacttagctggttgtggtggcatgtgcctgtaatcccagctactcaaatgtctgaggcaggagaattgcttgaacccgggaggtggagaatgcagtgagccaagatcgtgccattgcactccagcatgggcaacaagagcaaaactctgtctaaaaaaaaaaaaaaaaagaaaaaaaagaaaaaaaaaagaagaaggtgagatacaagagaatgcagaaaaacactaaaaagaagtcagacaagaaattcaggatatgagtgagaaatccaccaaagagatagatatcatagaaaaagatggctcacacctgtaacctcagcactttgagaggctgaggcagtaagatggcttgaggccaggagttcaagaccagcttggacaacattgtgagatcctatctctattaaaaaaaaaaattagccaggcatggtggcacatgcctgtaatcccagctacttggaaggctgaaacaggaagactgcttgagcccaggagtttgaggctgcagtgagctatgatcatgccactacactccagcctgggtaacagagtgagactctctctcttaaaaaaaaaaggaactgaacagagattctggagctgaaaaatttattgaatgaaatacaaaatacatttgaaagcttcaacaattagagtagatcaagcagaagaaagaatctcagaccttgatgacaggtcttttgaaataacccagttatacaatttttttaaaaaaagaataaaaaagaatgagcagagcctatgtgacatataagacaccatcaaatgatcaaatattcaaatttttggtgtcccagaaggtgaagaggaaacaaaagggttagaaaacccatttaataaaataatagacaacaacttcataagtctaataagagatttacacgtccacatactggaggcttaaaaatccccaaatagatacaattcaaaaggtcttctctacagcgtattacagtcaaactgtcaaaagtcaaagatgaagagaaaatgctaaaaacaacaagagaacagtgtctagtcactagtcacttataaagaaacctccattaggctaacagtagatttctcagcagaagcctttcaggccaggagagaatgggatgatacatttgaagtgctgaaagaaaacaatggttagtcaaggatactattcccagcaaagttatctttcataaatgaaggagaaacaagcagaagctgagggaattcatcaccactggccttaacctatgagaaatgctcaagggagtcctatacccagaagtaacagaatgataactgccataatgaaaatacttgaagatataaaaaccactggtagaactaacacacaaacaagacagagaaaaagctcaaatggtaccactacagaatacaacctaaccacaatgctaaatgatgggagaaagaaaagaacaaagtatatacaaaacaaccagaaatcaattaataaaatgacaggaatatgccatcacatatcagtaataaccttgaatgtaatggaattaaaatttccacttaaaaggtatacattggctgaatggattgaaaaacatgacccaactatatgctgtatacaagaagctcatctcacctgtaaagacacatatagactgaaagtaaagcaatggaaaaagatagtccatgcaaacagaaaccaaaaatgagtaggaggagctatgtttatatcagagaaaaagtaaaaagtagtaaaaaagacatagaaagttattatataatgataaagggatcagtttagcaagaggctataacagtctaaacatgtatgcatccaacattggaggacccagatatataaagcaaatattgttagatctaaagagatacactttcataccataatcgttggagacgtcagccccctactctcagctttattcgagtcatctagacaaatttctttataaatttattaatttataaagaaacattggatttaaattgcacgttggactaaatgtacctcccagacatttacagaatattttgtccaataggtgaagaatacatatttttcttatcagcacatggaatattttccagtatagactgtatgttaggacacaaaagtctcaacacatttttaaaaaattaaaatcatatgaattgtcttcttagaccacaaaggactaaaattagaaatcaataataagaggaactctagaaactgtacaaatacatggaaattcaacaacattctcctgaacaacaattgggtcaagaaagaaattaaagaggaaataaaaaaatttcttgaaacaaatgaaagttgaaacacaacataccaaaacctatgacatacagtaaaagcagtgctaagatggaaattatagtaataagtgcctacagcaaaaacctagaaagatttcaaataagcaatctaatgaggcacctctaggaagtagaaaaacaggaacaagccaaaccccaaattagtagaaggaaagaaataacaaagatcagagcagaactaaatgaaacagaggttaaaagaacaatgcaaggatcaataaaatgaaagttggtttttgaaagataagtaaaatcaataaaccactgttagactaatgaagagaaaaagagagaagatccaaataaaaccagaaatgaaaaagaagacattcaactgataccacagaagtacaaaaggtcactagagactattatgaacaactgcacactaacaaactagaaaacctagaagaaatggataaattcctggaaacgttcaacctacccagactgaactgggaagaaatagaaaacctgaacagaccagtatgagtagtgagattgaatcgctaacaaaaagtcttccaaaaaagaaaattccaggactggatggttgttcttaaaagcattatttatacagtagtccccacttatctgtgagggatacgttccaaaacccccagtggatgcctgaaaccatggatagtactgaactttgtatatactgttttttcatatacataaattcttatgataaagtttaatgtataaattaggcacagtaagagattaataacaataactaataataaaatagaacagtttataacactacaccagcatagatgctttttgtgctttgaggccgttattaagtaaaataagagttacttgaacacaagcactgtgataccatgacaactgatttgataaccaacaccaaccgtgaccaactggcaggtagcatatacagtgtggatatgctggacaaagaaatgcttcacatcctggatgggacagagggagatggcaggagatttcatcatgctactcagaatggcatcaatttaaaacttataaattgttgtttatggcatttttcatttaatatttttggactgctgttgactgtggatagtgaaatcatggaaagtgaaatcacagacaagagggcgctattgtaatagcaaaaccaaaacaaaacctgagaatagcctaaatgttcatcaacactagaatggatataggattcatgatttatacataacggaattccatagaggaatgaaaatgaccgaaaagaagctcctctaaaaaatgagtgaatcctgtgcaaaagaagccaaacaaaagaatgtatgattttattcatatgtacttcaaacagaagataaactagactctagtatttaaagttgcaagcttaggcaacaaactataaacaaaaacaaagaatgaatgttattaaagtcaggaaaacatttacatcttggagaaatagaaggggtttgtgatgggaaggcaggcacgaggtttttagcagtgctggtaatgagcaatttttcttttaaaccagggttgcaactatatggctgtttgttagacaacattttaagctatacatctgttccctgtactttttgaatgtgttctatgtttcaccattttaaagtttttaaaacatgatcagtttggttttattaacaccatgaaatacccagcagctcaaggttaatcatcattgtggggtggcagtgtttaaggttcagagatggtgataaggaagaggggtgtgaattctctttcatgtcaagtgattgaacatcttacttgggcaatctaaggtggtaaaagctggagtcctaagaagtccatttacatcttggagaaagaggggtttgttatattcctgccttccgtgacataaaaaaggtaggcagactattctttccgcagttgtactattgcctgaagtgaggaaagtaataaaatagggtgtactgaatactgtctgattgacacagtgtttttctatataaaaactagtgataatctttaaataacgtaggactctagcctacacccttacctttccaaatgcatacagactatctcaatgcacaataacttactgataccggaagagagaaataatcaaatgtataaggggaaaattcaggatgaaataggaatacaggtcttaccaggtaatagaagacccatcccctaggagttccctgatttcatctcggcatctctgctgatgctcagggtactttgccaagcagtaaaggatccaggagatagcactggatgtggtgtcatgtcctgcaaacatgaacgttttcacttcagcctggagatctgcttcagagaaatctttggtgttttcgctctaaaaaatacagtgatgatctttatccaaagctggctatggattgttatctttttcaattgtagcaatgataatacaaaaagattaatgttgtaaaattcaaaattaatacaactaatttggcatatatttttctattttacttttttcaaaccttaacagaacaccaggcaatgtagaaagaaatgactcaacagaattcaactgggcagaataaattgagagtcctatggacgttcatattttatgatttattaattttacttaagggaataaactctaagaaaatgtttattatgtacaagaatgtttaataccatagtcaaaagaaggaaagaccgcaagtggccaaaaatagggaaaggtaaaataaattatggaccatccataaaatgggacactatgtagtaactaaaattatgtctttgaataacttcttaatgataaagggaaagctcatgatttattattaggtgaaaagagcagtattagaaatgtattacatatgaatatgtgagttaatagtaattttaaaatatacaagttgaatagacaaaatattgaaggaaaatagtagtattaccaaatgggattgcaggcagttttagttttctttagtgtctatttaattttgtttaacaattaatatgtactatttttccaccaacaacaggtaatccaagagccaaatcatgaatgaactaccattcacaactgccacaaaagaataaaatatgtaggaatacatctaacaggggaagtgaaggaccttttcgagaagaactacaaaccactgctcagagaaatctgggatgacacaaacaagtgggaaagcattccatgctcatggataggaagaatcaatatcatgaaaatggccatattgcccaaagcgatttatagattcaatgctgttcccattaaactactattgagattcttcatagaattagaaaaaacttttaaaattcatatggggctgggtgcagcggctcacgcttgtaatcccagcactttggaaggccgagttgggaggatcacttgagttcaggggttcaagaccagcctggccaacatggtgaaacccccatctccactgaaaatacaaaaattagctgggcatgatggttggcatctgtaatcccagctactcgggagactgagacatgagaatcacttgaacctgggaggtggaggttgcagtgagccaggagcacaccactgcactccagcctgggtgacagagagtcagtctcaaaaaaaaaaaaaaaaatcatatggaactgaaaaagagcctgaatagccaagacaatcctaagaaaacaaacaaacaaacaaacaaacaaaccaaagctggaggcctctccaaattataccacaagactacagtaactaaaaaagcatggtactggtacaagaacagacacagagaccaatggaacagaatagggaacccagaaataaaactgcacacctacaatcatctgatcttcagccaagtcaacaataacaagcaatggaaaaaggattccctatttaataaaccatgctgggagaactggctagtcatatggaaaaaatggaaacttctttacattatgtgcaaaaatcacctcaagatggattaaagacttaaatgtaaaacccaaaactataaaaaccccagacaaaaatctaggcaataccattcaggacataggcatgggcaaagacttcatgacaaagatgtcaaaagcaatagcatttgacccaacgatgccattactgggtatatacccaaaggaatacaaatcattctattataaagatacatgcacatgtatgttcactgcagcactattcacaatagcaaagacatggaatcaacttaaatgcccgtcaataatagatgggataaagaaaatgtggtacatatacaccatggaatactatgcagacataaaaaggaatgagatcatgtcgtttgcagggacatggatggagctagaagccattatcctcagaaaactaacacaggaacagaaaaccaaataccacatgttctcacttataagtgggagctgaatgatgagaacacatggacacgtggtgcgggaacaatacacctggggcctgttggagggtgggggctgggaggagggagagcatcaagaatagctaatgaggccaggcacagtggctcacgcctgtaatcctagcattttgggaggctgaggcgggcagatcatttgaggtcaggagtttgagaccagcctggccaatatggtgaaaccccgtctctattaaaaatacaaaaatattagccaggcatggtggcaatgcccgtagtccctgcaacttgggaggctgaggcaggagaatcgtttgaacctgggaggtggagtttgcagtgagccaagatcgcgccactgcactccagcctgggcgacagagtgaggctccattaaaaaaaaaaaaaaaaaaagaagagcaaatgaatgctgggcataatatctagatgatgggatgatctgtgcagcaaaccactatggcacatgtttacctatgtaacaaacctgcacatcctccacatgtacccctgaacttaagagttggaaatcaaaaagaaaaaaggtattaactcaaaataaaaacagtgtgtactatttttctaatcagcaaatgttattttattttttactattatttttagagtcgatatcttgctctgtcacacagtctggagtgcagtggcatgattagctttgaattcctgttcaagtgatcctcccacctcagtctccagagtagctagggctacaggcagtgctgccacacctggataatttttaaattttttatagagttggggtcttgctatgttgcccaggcttgtctcagactcctggccttaagtgatcctcctgcctctgtcttctgagtcgctggattacaggtatgagccaccatgctcagcagaaaattaaatttttttttaacaagtcattagttcctgggaattctatttcacttccaaatccacctcattttgcagtgccctgttcttagtagtcctggtttaggaagagtcgtgtttcacatgatcaaggtagccaacacaatgaaagttgagttcacagagtatttatttattttggtccctcacagagtatctatttatttttggtccctcacagagtatttgtttatttttgttccctcaaataattcagcacaattaaattcagcaaatatttattgaacacttggagatgatgatggaaaattatgttcacatggtgccatttggtacaacggaaatggcatgagatttggaccaaaccagaattgtcttaaatcctggctttgttagttttaggtatgtcatcttgagcagttcacttcactttttgagccacaatttctcttccttacataaagatatttataaataccccacaggttgttataataaaggttgaagatgcttggcacataagcaaaaattatgaataaatatgtattaaaatataaaataactacaaaataaaataaaaatattgtttttctcaccacatgtcagtatctttacacatataatctaattttatccttacaggattgctagcctggtgtgcaacaatagttgtcatatattgagtgactgttgattgccaagtccttcacttttctcatgaacatcacgtggacacctcatgagacagtcaccaagcactgtgctaatcactagggaaacaggaataaaatatgatcctagtcttctaggatggggtttttcaaactttaattgcaaatgaaacaccgagggatatgttgaaatgaagattctaacccactaggtctgaggtagggcctaagattctgcatttctaacaagctcccaggttttaccaatgctgctggtctatagaccacatgtcgaggaagaaggtttcagcagcttgtgggcttggaaaaagacagacaagtgcccagataattaaaatgtgacactggaggcatgagggaaagccctgggaggacaagcaggaaaatcttcacaagggaagttcaatatgtatcagttatcatataagtaagtttttctaatttatttatttgttattttaattttacttatttatttattttttgagacagagtcatgctctaccacctcctgggttcaaacgactctcccacctcagcctcccaagtagctgggactacaagcatgcaccaccatgcccagctaatttttgtgttttttgtagagaccaggtttcactatgttggccaggcttgtctcaaactcctgacctcaagtgatctgcccgccttggcctcccaaaatgctggattacaggtgctagtcactgtgcccggcctatttctttattatttaattattgagtcgaatgtgttcagaagtttagaagacttactttggcactcaaaagtatgtccagaaaatcccagcgccttttctgagtagtatcttgttttagcttatccttaagagactccttccggtcctggattactttctctagatggaaaaattatgatctttgttattatcaaggttactggaaagtcaatcaaagccaaatgtagttctgagaagctggtgctttatcggtagcccctggctgccccccacccaatgttcctgagttggtaagggacagtaccactagctgtctttttaaaaaaatcgtcccatcccaccttttagccacaatttctcttccttcaaataaggatgtttaaatgtatcacacagggttgttgtaaaggttggaggtgtttgacatatatgcttagaggtgcttggtacataaatttaattcaaaggttgtaaaatttgtttgtgatgtagggtactgttaccaatcgctgagcttaatttgtacaacctaggctttggttttaaagaaaaagatgagatgtcatatctcatggtagagactggtgctcaaattgagtggcagaggaatactgaaaatattccccttgagaactggaacaagacaaggaagcctactctcaccactcctatttaacatagtactgggaatgctagccacagcaatcaggcaagagaaagaaataaaaagcatccaaataggaaaataagaaatcaaactttctctctttgtagatgacaaagttctatgcctggaaaaccctgaagactctgccaaaaggctcctggaactgataaatgactagtggaaacagaaattctctccataacacacattgttggttctctgcagtacgttgtggctttccaacgtttcctttttgtgccttttctactggaaactaggctctaagctacttctgtgaacaggaaagttctgcctttagcagttaggagtaaaatgtcttccatagccaaattttagtctccatattgtcccatcagcatgaaaatagcccctcagttcctatgttcttttaagacatccaatctgtttcctactaaaatggtacttagtaaggggattctaagtttggaagttaaccggaaccatttttctaaggtaaatgctttagcatgggccataatagcaggcaatttggcacattgcctccattaaaggaggcttgcccaaaaatgacacagtctctcatattttggggagccgggcagattacacaggtttaggaagtgaaaagaggaatgacacaaggtggataagctaaggttgtgtgggtaaagcatcacttagttcatctggttccatagcttggaggaccacgccttcgaccataggtggcatatttaacagggtgctgggacccaagaaccagggagagaaaacagccagaaggatgctcccctgtcttgtccttcaccctgggtcatatggaaaggaaggagactaaaagaactctcacatctttttctagatgggtaacagattatcttcagcttgcacccctctggagtgcactctgaaacactggaacttctttaacctcaggacttcaaaaagaaaagcaactcattttcttttgcacaagtgcatggcatttttactaaacccttgcaaacatcgtaagatcaacccaactcttttaacaatcatatcaggcaggcccaaaaaagaatagttcccccaaattagagaagtaacctccagggaaaccatctgaggattccccttatttggggccccttcaagttcccttctcattataggaccttaggcaaataaatggagacttaggccagttttctaatgaccctgataggtatttagaggctttccaaaatttaactcaggtatttcacctgccatggagggatgttatgctgttcctaaaccagaccctcacagcagctaaaaatcaggcagctctgcaagcaacagaaaatgttggagatgagcaatatatctcctataatacaccaaaagggaagaaagcagatagggaaagtgaagaaatagcaaaaacaccattcccaattgggagagaggcaattctggtaaagacccctaattgcaaccccaataactcagaagataaatggaaaaggaagcactttttaatatgcattttagaaggcctatggaaaaccaggaccaaccctctcaattactctaaactgtctgtaagagaccagaagccagataagaattccgtagcctttacagaaaggctgagagaggctgtactagaaccccaatattagaaggaaagtacagaagcaagctataggaccagatagcaccttagagaacctcctgaatgtggccactttggtcttttataatagggaccagggggaggcccaaaagaagagaaaaagctcaggagaaggagagagacggtagcaacaactttgcaggcttgcaaagtccaggatccccaagttgcatccgctagtttctatcggtgtggcattttaagaaggagtgcccaggcagcaagacaaagccagcgtgaccctgtccagcctgtggcacagatcactggagatggaagtgcccccagaggtggaggtcactgggttcaggaccactctcacagatggtccagcaggactgatgggtcctgagactcaaatgccgactccagtggctcaaactgctattacagcacgggagccctgggtgattctggaaattaaaggaaggaaagcggacctccttctgaacattagagccagtctcctttctcccctttaactccaggcctcccctcttcccacagcaggaccggaaggggcatatcaggaaaaactctgatccaatatttttctcaaccttagttgcagttagaacttattgtttacacgtgtttccaaaccatcgtcataacagctctactagcaaaaaaaagcctccaggttaaccctaggaaataatttaactgtttacactccacatgatgtggcattatcactgtcctgtagggggagctcttagttaacaaacagccagtaaagcaagaagtacataaggcaggataagcagtagtcactctaaataatgtctctccccaggcacaagcacttaattgacggagctaatagctcttacaagagcacttgaattaagcaaggaaaggtagctaacatttatacctactccaagtatgctctcttagctctccatgctcatgctgccatttaaaaggaaaaccgccaatggacctcctataaaatatcaccacaaaattagcaggttattatcctcagtttttcttccatgagcaataggagggatgcattgtaggggacatcaaaagggaacaaataagatagccgaagaaaataggttagctgatcaggcagctaaatcaaaggcaaggaagcctcagggcatcaacatgcttcaagccccttctaatttaggaaggcgtcataagagaaattaaatcccagtattcccctgcagaaataaaataggccacttctcaagggcatacttttcagttctcaggatggttacagtcaggatggcaaactctatttgccagcctccagccaatggaaagtccttaaaatcctttgccaagcttttcacttggaaaaggacaaaaacttatcaatgtgctcagagattgtttcaggcaggaaacctctaaattggttaagcatgtaaactctctagctcacttccaatagacgataacacaactaacaagaacccaatcccaagaaatagaaacacctttatttaacccaggaaatttggtattggtgaaaactctcagctctttctccttccctaagtcaagctggaaaaggccctacactgttcttctttcaaccccctcagcagtaaaagttacaggaatcaactcctggatacatcacactcaagtcaaagcctgaagagctgagggagcaacccctgacagctcagaggaatgtctccatatcaatgtgaagaaacagaggatcttaagctgaaaatcatgaaagataagtaactgagtgacggctacttatcttactcagtccctctcctacctcaccagatacttttcactatttctaacctttcctctcaaagatcatcaccagatactaaaacctctttttaacgcatatttgcagggagattttaattattcgtagaatcgcatttgtaactttgtaaatccccaaagggaaatgttatgtaaacttttcaaaggaaattatttactatgccactcttgtgggaattgttatagtcatgctactatttgcaaaagaagtatacactgtagcacccacaatgtggaactctggttataaaattctaattgctgtaatatcttgcctaattattatccttataacaggattaataattgcaggaaagatttagtcaaggttgttttgcttatggcaggagtaatagttatggataagaaacaagtatgaaaattttactatcattaagtttaataggactttttactgaaggttcataatataatccactttaagctatgaagagaaggttataaagaagaagattttataaaagaaaggattttgtatggtaaatacttgtcctaaaaaagatgactggttgtttaaaggaagaatgtttaggacatgtcagaaattttaagtatgttgtaagagggtctatgaaagtcagaaaaaattaataattaaaggaaaggaattgtgagattaacactaaagttgttttagcatccaatatcatatttctcccaatcatattgcaagttataaaaatggcctaagcctgaacttattctctaagcaaacctaactgctgtgaaggggcattggacgacaattctttcttgctactgcctgctgaaaaggggcgttgtgtgggagaaaggcagttgggcctcctcctgaggttgatctaagggttctcaaaaaaatagcttgttcatgtgtggttctgcctgcagcactgtttggagtttgattgcttctaggtgaaaagagataaattttacaagaaggtttaaaatatagggttagaatatgagtattaagagtatcactgttaatggggataactataggccataacagagtttgatacctgttacaccaatggattgcaatattggtttgcgtccattaggtgtcgctgtgcattaccagaaacattaacataaaagtaacatttttcttaagaaaagcatacatttcccccttgacttgtcattagagaataacttccacaatgtggaattctggttgtaaaattctaattgctgtaatattttgcctaattattatccgtatcctgcacatcctgcacatatacctcggaacttaaaaaaaaattattaaaaaaacccatcacaacaatatttaaaaatatgagaagtagtaaatagaggttcaaatggtgtaagatccttgcattttcagggaagtatttaatgtaattacatatgttagattctaataaataaagactacatgttgtaatttctagcatacccatgaaaactaaacttatgatctaaaacagaaaaaataataatataaaatgatccagcaattaataaaagaagggataaaaatcggttaaatagaaaacaaatagttacacggcatgttgaaatccaaatattctagtgattacattaaatataagtggtttaaatgctctaaccaaagcacaaatattttcagactacataagcaaaatctaaataaatgctgcatatgagaaataaaccttggctgagcacagtggctcacgcctgtaatcctagcactttgggaggctgacgcaggcaaattgcttgagctcaggagttcgaaaccagcctgcacaaaatggtgaaaccctgcctctagtaaaaaaaaaatacaatatttagccgggtgtggtggcacacacctgtagtcccagctgcttggggggctgaggcaggaggatcacttgaacccaggaggttgaatctgcagtgagctgagatagtgccaccacactgcagcctgggtgataaggtgagaccctgtctcaaaacaaaacaaaaacaaaaaacaaaaaaaaattggagaatcaaatagacacatttgaagaatcaaatagacgaaaaaaaaatgataaagggatgtcaccaccaatcccacagaaatacaaactactatcagagaatactataaacgcctctaagcaaataaactagtaaatctagaagaaatggataaattactggacgcatacaccctcccaagactaaaccaggaagaagttgaatctctgaatagaccaataacaggctctgaaattgaggcaataattaatagcctaccaaccaaaaaaagtacaggaccagatggattcacagccaaattctaccagagggacaaggaggagctggtaccattccttctgaaactattccaatcgatagaaaaagagggaatcctccctaactcattttatgaggccagcatcatcctgataccaaagcctggcagagacacaacaaaaaaagagaattttagaccaatatccctgatgaacattgatgcaaaaatccttaataaaatactggcaaacggaatccagcagcacatcaaaaagcttatccaccatgatcaagtgggcttcatccctgggatgcaaggctggttcaacatacgcaaatcaatcaacgtaatccagcatataaagagaaccaaagacaaaaaccacatgattttcccaatagatgcagaaaaggcctttgacaaaattcaacagcccttcatgctaaaatctctcaataaattaggtattgatgggatgtatctcaaaataataagagctatttatgacaaacccacagctaatatcatactgaatgggcaaaacctggaagcattacatttgaaaactggcacaagacagggatgccctctctcaccactcctattcaatgtagtgttggaagttctggccagggcaatcaggcaagagaaagaaataaagggcattcaattagggaaagaggatgtcacattgtccctgtttgcagatgacgttattgtatatttagaaaaccccattgtgtcagcccaaaatctccttaagctgataagcaacttcagcaaagtctcaggatacaaaatcaatgtgcaaaaatcacaagcattcttatacaccaataacagacaaacagagagcaaatcatgagtgaactcccatttacaattgcttcaaagagaataaaatacctaggaatccaacttacaagggatgtgaaggacctcttcaaggagaactataaactactgctcaatgaaataaaagaggatacaaacaaatggaagaacattccatgctcatgggtaggaagaatcaatatcgtgaaaatggccatactgcccaaggtaatttatacattcaatgccatccccatcaagctaccaatgactttcttcacagaattggaaaaaaactactttaaagttcatatggaaccaaaaaagagccctcattgccaagtcaattgtaagccaaaagaacaaacctggaagcatcacactacctgacttcaaactatactacaaggctacagtaaccaaaacagcatgatactggtaccaaaacagagatatagaccaatggaacagaacagagccctcagaaataataccacacatgtacacccatctgatatttgacaaacctgacaaaaacatgaaatgaggaaaggattccctatttaataaatggtgctgggaaaactggctagccatatgtagaaagctgaaactggatcccttccttacaccttatacaaaaattaattcaagatggattaaagatttaaatgttagacataaaaccataaaaaccctagaagaaaacctaggcaataccattcaggacataggcatgggcaaggacttcatgtctaaaacaccaaaagcaatggcaacagaaaccaaaattgacaaatgggatcttattaaactaaagagcttctgcacagcaaaagaaactaccatcagagtgaacagacagcctacagatgggagaaaatttttgcaatctcctcatctgacaaagggctaatatccagaatctacaaagaactcaaacaaatttacaagaaaaaaacaaacaaccccatcaaaaagtgggcaaaggatatgaacagacacttctcaaaagaagacatttgtgcagccaacagacacatgaaaaaatgctcatcatcactggccatcagagaaatgcaaatcaaaaccacaatgagataccatctcacaccagttagaaaggcgatcattaaaaagtcaggaaacaacaggtgctggagaggatgtggagaaataggaacacttttacactgttggtgggactgtaaactagttcatccattgtggaagacagtgtggcgattcctcaaggatctagaagtagaaataccatttgacccagccatcccattactgggtatatacccaaaggattataaatcatgctgctataaagacacatgcacacgtgtgtttactgtggcacttttcacaatagcaaagacttggaaccaagccaaatgtccaacaatgatagactggattaagaaaatgtggcacatatacaccatggaatactatgcagccataaaaaaggatgagttcatgtcctttgtagggacatggatgaagctggaagccatcattctcagcaaactatcacaaggacaaaaaaccagacaccgcatgttctcactcataggtgggaattgaacaatgagaacacttggacacaggaaggggaacatcacacactggggcctgttgtggggtggggggaggggtgtgggatagcattaggagatatacctaaggtaaatgacaagttaatgggtgcaacacatcaatatggcacatgtatacatatgtaacaaacctgcacgttgtgcacatgtatcctagaacttaaagtataataataaaaaaaaggaaaagaaaaagaaaaaaagacataaaccgcaaatataagggcacagaaatggaaaaaaaagagtatggaataatatactatcaaaatactaaccaaaggaaagcagaggttatcatactagtagcagatagagtagatcttaagactagaagcattattagagaaaaagaggccaattttatcaagataaaatgataaatcagaaatatattccaattgtaaatggctattgtcataggtagatttatggtccctcaaagttatctatgtcctaagtccccaaaaacccatgcaaaaggaatactcagtggtgtgctgtgttgtttgatgaactgtgcatagtaggcagtacccactcatgttcagtacttgctcagatgtcctgctctgtcttcctacagaaatgtacttcctttcacttttacttttcttcacatctgaagctgctccataagaaatgaagcaaaatagacagatgttttgcttattgtattagttctaacaccaaacattaaaatacagctatatatagtcaataatataataccctctacatagcatttatgtagcacattcatttaagaggtacaaattagcatttctgaatgatgaccatgccatatgtccatagtagaagcagccataaccagagtcaatgtctcagacaatgagatgtctcatagtggactctggccatgtaaatcccaggactaacctgtgaactgatgaagttcttggttaaatttagaaaagatttggccttgagagctgaatttgaaaaccaggtcgttgtgatgtagaaaattgttcatgcgctggttggagattttgctaaggttgaacactgctttcaggtatgagtccagggtactggaatagggaagatggaacaacatgttagtgggtgacacagttattggcaaacaattaccttccttttgtcactgacctgtccaactggatgctgccctggtggctgaaggcacacttcatgatgctgtccagggtcatcagggagacatgttgaaagagctccagacgtgagttttgggcaatgtgttcctcccatttgttctggggcaggggatgaatatcatgatc

SEQ ID NO: 627 - DNA, 483 bp, Homo Sapiens
tcggctgactacccacgcgactgatcggttacggcagtaaccctcctcacccccactggccgggcaaggaaagcattgcgctgtcgttcgtactcaactacgaagaaggcggcgagcgcaacattttgcacggtgacaaagagtccgaagccttcctctcggaaatggtctcggcgcaaccgctgcaaggcgagcgcaacatgagcatggagtcgctgtacgagtacggcagccgtgccggtgtgtggcgcatcctcaagttgttcaaagaattcgacatcccgctgaccatcttcgccgtggccatggccgcccagcggcatccggatgtgatccgcgccatggtcgccgccggccacgagatttgcagccacggctaccgctggatcgactaccagtacatggacgaggctcaggagcgcgagcacatgctcgaagccattcgcatcctcaccgaactcaccggtggactcaggtggtgtg

SEQ ID NO: 628 - DNA, 671 bp, Homo Sapiens
ggtcgtctgggtcgggatgtggttgatgccgcaaccgctcagcacgctgctgatcagtaacagcgccgcagccttgaagccccagcgataagtgtgtgctgcttgcatagtgtttctcctgcccgatctgatggaatgtgacgactaaccctataaaccacgcgcttggggcataatccgccaccactggaatgcttcgagccaatcagctacaaagatgcccagcgcgaaaaagagttcagagtgtgctgcatttatctgaacaacacccgaacaacaatagacgttccccacatttgggccgacagcatctctctgaatgctgcgcagtcgccgaaaaaggatattcatgaaaaagctgtgcttgctcggccttgttgccactctggccagccaccccgtatgggcagaaacaaagcctgctgcgcttaacgacaaggacgccttcgtcagcgacctgctcaagcaaatgaccctggatgagaagatcggccaattgcgcctgatcagcatcggcccggaaatgccccgcgagctgatccgcaaggaaatcgccgccggccgcatcggtggcacgttcaactccatcacccgcccggaaaaccgtccgatgcaggacgcggccatgcgcagccgcttgaagatcccgatgttcttcgcctatgacgtga

SEQ ID NO: 629 - DNA, 173308 bp, Homo Sapiens
gatcatatctgtgtatttagttagtcaagaagagaaaaattcagacagcatatatgtaatgggaaggagcagtcctcaagcaataaaggtgggaggcgggagataaatacctcagcttccccacccttgtcagcaggagtgagccccagatgcccatggtggtaacatacagtagtccccttatccacagttttgctttctgtggtttcacttacccagtcaaccaagagctgaaagtaggtgagtacagtacaataaaattctttgagggattacagtctcatgacttttgtggtatattgttataattgttctattttattattggttattgttgttaatctcttactgtgcctaattcataaaccaaactttatcataggtataacgtgtatagaaggaaacggtgtatatagggttcagtaccatccacggtttcaggcgtccataggggagacttgaaatgtatccatcagggataaggaggaagtactgtatttaccaacatgtcctgtattggtttcctttcttttctgtttaatttccttacttccccaggaatgcttcctgggtttaccttacaaatagacttcccaaacttgcaatattatatctcaagttctgcttctgggagaaccccattcaagacagagtcacatggtccttataacggtctacacagagattattagggcctcatctaaaacagtgaccatgaaaaaagtggaaggcaaaattctaagatattgccccaaatccacatcccctgatgtccacacatcttctccaagctattcaatcaagcattaatctcagtgcttctgtgaagggatattgcagaaataattgaggtcacgaatcaattgactttaagcaagggaattatcacgaatgtgtctgaactaatcccatgaatcctcaaaagtgataggcatcttcctgatgagacagattcaaggcataagagggatttgatgggagggagattctccattgtagctttgaagatggaggtgccatgtggcatggatggtgggtctctaggagttcagtgtagcccacagctgattccagcaaggaaatgggatctcagttacacagcagcactggatccttcaatggcctgaaagagcacacaagcagaaactccttcagagccttcaatgagtatgactctgagcagaggactcagccaaaccatgcccaggcttcttaccaagggaaatggtgagctaacaaattatcttaagctgctatttttttttggttatttgctatgcaaccatggaaacttaatacccccaaaaatggtgttaggtttaggatagaggtagaagtcaagccttacaattgctagaatttggtggctgattgtgtcaaatgattgaaaagaaaagaggaataatcttaaggttctagtctgagttcataattatgccattaatgaaatagaaaatgtgtaaagagatttttttttcaggtaagaagtgttttgttgttgctgttttagtttgttacttttgagatgaagctgtctagtaagcaactaaaaatacaatccaaagctcaggaacaattctgggtctgaagaacaaacatttggaagtcattggcatatgtttaatgttgaaatcatggaggatcgccatacaatgtggcacatatacaccatggaatactatacagccataaaaaaggatgagttcatgtcttttgcagggacatggatgaagctggaaaccattattctcagcaaactaacacaagaacagaagccaaatatcgtgcgttctcactcataagtgggagttgaacaatgagaacacatggacacagggaggggaacatcacacactggggcctgttggggggtggggggctagaggaaggatagcattaggagaaataacgtagatgatgggttgatgggtgcagcaaaccaccatggcacgtgtatacctatgtaacaaacctccatattctgcacatgtaccccagaacttaaagtataataataataataataataataaaccatgggggagggtatctgagtattttgtgtagatgtgttcttcactgcttagtccttctaaattttggtaatagggctttcttgactgaggagaaatacagagtacttataaaaatgggaatttattagataatgtgttatcttaagattgtattccatctaatttacaataaagtaatttttaatgttctggcttgtgaagtagggtatggatagcaaatacatggcactaaagccaccattccccaattctgagcctatggcattactaatcaattcagtaattttcccttcagaaccagtattctttccaaccatgctctgggcagcaacgaattgattatagttcacactcatttgcaatcatgggttagtttcaaaaccatatccatttaataacagatacgttgagttgctacttgagggtggagggtgagaggaggatgaggatcaaaaatgattgcttattgtctgtgtaatggaataaactgtacaccaaacccctgcaacgtgcaatttacctatgtaacacacctgaaactaaaagttaaaaaaaatctaaaatacattttattttgatttttctttaaaaatgatgttttcttatcttttacatattgttgaatgatattagatagcctcctgaggaatttgttaagatggcaagaagtggttcctacaggtggtttggatatgaaacattgcaaagctaagttgaaatagcatgaaaaaagtataaataggaatttcctttgatccttctaataaggctgaatggtgttgtgtccacagttattaagttcaaatattataatttttgattcctatactggaagataggggcagttcttgcagttccaagaatgacgtttttataactcagctttatgctgagagccaacgtaatgcacagggattgatctctttccaaccaaaaatgggtaagatttgcacaaagtcatgcatatcaatcatccaattgttgtctcatcctgccatcatcttgagagacactgaaaactctagaaccactgcctgagacacaatttgtatgacccaacctaagaaaaaaaaagcttaggcagctccatttctggatcacagggtgttaacatattagtcaacccataaaagctcccactgatttatatggagttgtagcgttgcgtcacaggtggaggggcctaaattgtttttggagaaatatagggctctgtcttcaggatcatgacccgtgagtcacacccagggctcccaaagccgaggccagtggggacgtggaagaacttggcttagccacagggatgtgactcactaaaaaagatgaactggttttgaaaagtaacaagaaccaccttctattctctacatacctgctttcattccataacttaaaaaaaaaagcaaactaggagttttataagtttttatcagatatgtaaacatattattatttacttttagaatcttggtcaattttgctgttatagaagtggtggccatagctatcttttgaataacaggttgacaaaatgataattgcattacttgaagataatcacttgccaaatttatacaataagttgacaaagttgtgacaaattcataggatgcgatatccagattcaactttctagtcatttaagggactctaattagtaatttatgaaggctcattagcaggaagttcaaggtaattgttaacttactgctgtccatgcagtgacaggtgatctgaaagcggagtgacatgacaaatgtggacagtgtcacatcatatccttatgtggcagggaaagctttcatttcccgaataggtgaggcatatgtgttttgggctaaaactatgattccaggccaccagaattcttatttcatcattttcaaaaattaagttgggtcaggtgtgatggctcatgcctgtaatcccaacactttgtgaggccaagatgggaggatcacttaagactaggagtttgagaccagcctggacaacatagcaagacctcatctctactaaaaataaaaaatctgagctgggcatggtggtgtgcgcctgtagtcccagcagtttcagaggctgaggcaggagagtcacttgagtccaggagtttgactctgtggtgagctacagtcctgccactgctctccagcccaggcaacagagtgagacactatctcaaaaaaattaagttgaaaacaattttaacattttaatatgtgagcatccctttctatgactgctgaattttattctaagaatagataaaaagttaatttcaagtatcgaaaacttgccactttcttttttcatgtttggattacaggcctagaaacttcaaaatgtggaaaacataagaaaaaaaaaaaactagactactgggaaaatgagaatgaatggagatgtatctgacgttttgggagcaggctagattcagatcttctctccctgtagctaaattgggtgggcagctggcctcaagaacagtccacccacaacctccaactcctggcacgaacctgcttgagcttggaagacattgtcggccctagatcccaccctgactcctgcatgttctggacacctccatcaccactgagcagggaagcatgttcttcctttctcattcatttgcttccaaaagaggagctctgattttcttctctcttgcagtgctttttcctctatatagctcttaacctcctctcattctcttcattcccacctgaaaggtgctagttcatgtgtcaccaccatcttgcctgaatgcctgttccggtgatcttcttgcttctaccatttgccactataagtcgttctactcccagaagccagtagcatagtttcagaaggctaacataatagtgtcttttccttgtgggaaaccatcagtggtttttcactcccttaagcacagccaacaacgccttcaatgacctgctccttcagccacactggccttcagacatgtccccaaaagcactcagttagttctcaccctggggcctttgcacatgccactttctgtccaagcttgcagaccaatatatgctttggcaccagctctcacagagcctgcagcacttatggcaaggtgcatatgttgtttcctgtctgccttcccagttagacttgaggagtgctgtgaggatgggtatagaagaaacatctgttttcccagggcccagtccagagcccaccccatagtggatgctcaataagtacttgccaagtgcttcctagaaatatgttaactgtttctttctgattattagattttcttatttgatcttttctggcaaagtggttgcttctgtattttcttagaattccatttgtgtcataagtgatctcttccctacttcatagcctttatacgtgctggatctctcaggaccaacaatgctgtagctcttcaggctaagcagtgaagatgagtttcagggattgtgagtgttttcccagaccttctacagacatttgcatatgcataggcaagtgccttttgggccctcaataaatatttgttgagggaaggacaggtggattgataaatggatgggtggacggatgaatggttgggtggatgaatggttggatggatggatggatggatggatggatggatggatggaagacaaatatactgatggatggtgtgctgaagatgttgacaacttctttagtctgtttatctctaaactcctttcccctctgtgaataacttgtcagatcccttttttgctagagacactgtcaaggaaagcatttcctaatgcttgtaacactgctaaagcaagaagaatattggcagaaacttctattttcaatgcagtttttaggaaggttaattactttgtgtttctgaagatgtaaatgttcctcaaggaagaaatctctgaataaaactcaatgacaagatctttataatggacttctggttattgctatgtgcaatgccctacctataactcgcattttaattgatgtatcctgagcaagatttgaaacagatctctttccctctcttctaattttaatgagtcttctctagcaagcacctatatcaccagagagatgcagagaacctcagcatactctggatgggcctccctctgcaatttatgatgaagtctgacttcagagtgagttcgcagcctccttcctgcctctcctctggtttccagggtagcagactcttgtctcccttcagacctgggctctcccagctcagtcccacttggcatttctaactgaggttatggatacacattgagcccagaactcattgcttttttggaaaaggcaaaataagagaggggattttccatattcacatttttccacagaaatgtattcataagctttaaacttgcccaagctctgttaatgtatgtggttggctcctgtgccaattttcattgtgaataagatgctaaataaaagggttcttgtctttcccctttctcctcccctcccataatttcaacttcataaacctattttgtaagtgaattaggtcttaggagagaatcagaaacgatgttgttcttttagccgcttacagtgtttgctttaaacccttgataggaacgtgggcttgtgacagcagcggcagaggtaaacagatgactttatatataatgctttttacaaggtggttcagttcgtttctaaccttggtctcggcgtcatggaatgagccagggaaattcctccccttaaccctaccctgcacgtcctcccttcaagggcaagaaaatgtccattttgcctttggtttcacagctctttctccacagtagagcttgcataatgctataccccccaatcccagggaaccccggtagtgtcaccaggtatttttattattatcattattattttcatcaggtgactgtgaatgttcacaataaaagttgcaatttttatgagccatgagctggcgtgtcctggcatgtcctggttgtcaagtttctgtgcattttggttcaaatgttccctgcctgtgtttattcctggtcagaccacacctcctgggactgtctttgtggcttttgctcagctgctgactcaagttgcagaagacatggggaatagtagagcaaggtctgcaagattctggcctgaaggaaaaggctccatagctctgcttttgagccatggaagctgcctgcccctcccttttcctggaaggtcccatgactagtttcctaataccaactagtcaagaatatgtagggctaaagggacattaatattaacataagtgatacagtgaggaccagaagccttggatgtaagggagaacacgtgagctttccgtcagagaagactaggttcaaataccagtcctccaaggaaagccagctccttgctggggaccttgggctagtgcttagtatctgatttcttcatctggaaaatagctataataatggaacccatcttagagggttggttaacattatatgaaaaaatgaaagttcaatgcacagtctgtgatctgatataggtcaggatgcaatattgttaatactattagctactataaatattattggtaagtaataatttcctataattaatataataaacaatattgtatcaaaattatctaaatcattaatactgataagcaataattatttactggtaattatagatattaatattacacattgattgatcttgcagaacctctttttcttcatctagaaagcagagattaacatggacattgaaaaaaacctctgactctctagggattttgtgaagatgaataaatgactttgaacagtgcctggccctttgcacagtgcctagcccttcagcctgtaacaagtgttgctgtttttaacgagaggttagttgtccttctcaggccctctgtaaaagaatgtattactttgcttttcagccagtgtgactgtctcattccagcacttctattgctgtctataaaagatgactgtggccaggcacggtggctcatgcctgtaatcccagcactttgggagtccaaggcaggaggatcactgaggtcagaagttcaaaaccagactggccaacatggtgaaaccccatctgtactaaaaatacagaaaaattagccaggtgtggtggtaggcaccagtaatcccagctactggggaggctgagacaggagaatcactgaaaccccagaggcggaggttgcagcgaactgagattttgccactgtactccagcctgggtggcattgtgagactccatctcaaaagaaagaaagaaagaaagagagagagagggagggagggagggagggagggagggaggaaggaaggaaggaaggaaggaaggaaggaaggaaggaagtaaagaaaaaaagatgactgcaaagtgactttagaggcaggtcatgggcctggtgacacccagccatgaggctggatggggggcccagtctcctggagaagatgatccctcggccttgtatatctcaatccaggcccaaggtcatggattcttcctggcaggctaggctgatggacttggtttatgagctgcagtctgtgcctaaagacacctaggaggaagagcttagctgctgaatgtacctgggggaccttccccacctatgttgtctgcctcagttgcctcttccttgggaagaggtgcagacagaaggtggcagactctgggatagatccagtagagctgtaaaaaacaggctggcttgtgtcacagcttgcctgtccctttaagccagggcttctggcagacggacctttgacagtctggtgaagcctatggattccttcctgaggatagttttaaatccataagataaaatatgtggggtttcaagggaaaccaactacataccaatttttttttttttttggaattatactacagtaatggatgtatttctctaatagtcaattagaatgatatgaggtaggtgctaaaaatataataattttgaagtagtaatgagtgaaaatggtaccatagggcatccctaggatatacaaatatttgatttcttttaggggcaaagtcatgcagcctgctaatgcttctgtgatttgtggtctgtgtacatattgaaaagaagtgaaacatttcagttgaaggttagaacaaataaggtggaattttctctcctgtccaggttcacagaccacataataaggagtccccactttgctcagctggtctcctaagtctctgtgccatgagaggtcgtggccccaacttctctttgtcttgtcatctcatttgcgtcacagcctcttgcgtgctctttgacctttatgcagtacccctgcacccatgatccaggtcgcatcaggcctgtttgtgcactctcagagtttaacggaagaacccatctttcatacttcattatttaaagaaggctagactgattttaaaagcacaatgtacatgaaaatcacctgaagtatttgataaaatccatatttctataccaacaccctcaatttgagttgatgggtctgaggagaggccctggtttctatattttaaagaactccctaaatgcttctgaggaaggtgctgcttgaacaagaaggtgcccttctgctaagagacaagccttttccagcttgaaaactattattttaccattctatattctgagcaggaaatgaatggacagactgtatgtagcgatgtgatatacaaacagggatggcagctacaagaatgtggaagtgtggaaggaagaaagaaaggaaaaaaggaaggagggggagagaagcagaaaggaagagaaaaataagggaggaagaaagaaaaggaaggaaagaaaggaagaaaaaagaagggaggaaggaagaagaagagaagcatggagatagggaagaaagaaggaagaaaggcaaaaagaaagggaaaagatgttctaagggctattaaacctatgggaaaggaaatttttatcagcagaatccagagataatataaatcagcaagaagaaggatagattgattttgaaattcaacaaatatttatcatgtgcttgctacattctagggcaggggttgaaatctcaaacacacagaggagccaggcaagatggtgctgatataaaagattcagggttctctcggtcctctatttttgcaatttgaggtaaacagtttggctgcataagaaaaacaacaggctgaatgtaagagttcatgctgtcaaactttggttcacagcatccggcatggctacctagggccttgctttgtgtacacatgaaatctatcttccatattctccaatttttcaagacaatttgacattttatagaaatctctttatgaatagatattggaagctattttagtactatttctgcaaaacaaatttacttaaaatgtatccactttaaaacaatcattttatttttcccatggattatgttggttggaattcaggcaaagtggagctgtttttttttttttttttttttttttacttcaccacgtctgaagcctcagatggtcagactcaaaggctgggggaagtgagggtagcaactaaacatctaagggctaggatcacctagaggctcacttacatgtctagtgcttaggctgggaagactcaatgatcaggactattaactggagcaacttaatgtggctttcccatgtggcttgacatcatggcgggctcaaggtagtgggactcattccactgtggctcagagcatcaagcacaagtgttcctgcaaagaaggagggagctgcatggccttttatgatccagtcttagaagtcatacaacatcacttcagtcatactatattggtcaaaaccgttccaagcccaaccagattcaaagacaggaaagatagtctctacttcttgatggggaagtgacaagtttacattctagaagagcgtgagagcgagagatattattgcaggcatctttgaaaaatagaatttgctgtcataactaattcaaaactttgttttatcctgtaatcccagaacttcaggaggctgaggcgggtgtatcacttgatgtcaggagttcatgacaagcctggccaacatgatgaaaccctgtctgtactaaaaatacaaaggttagccaggcgtgatggtgcgcgcctgtaatcccagctactaggaaggctgaggcaggagaatcgcttgaacccaggaggtggaggttgcagtgagcccagattgtgccactgcactccagcctgggcgacagagcagcaagacttcatctcaaaaaacaagcaaacagcaacaaaaaaaacccttattttaaaaataagttaaacacagtgtgtacagcataatgcatgtttgtaggctagcataacagagggttgcactagttttttacctctgttacagggtataaaaattcggagatgattaagatttggctcctcttcagagaacgcagtcttatattttggaattttggaatctctatgaattacatatttatactttttgtacccttgctggagttgaggagagttggatgaaagtagggagggtactgagactaggaggcagctatttattagaataacctggaaaatggaccaatcccccccattcccagccccaagaagtttacctctatccagaagaggagcatttgcatttttaatattttgagaaggttcagaaacccgagcttcctactgcttcctattgagaagcactgttctaaacagacttctacattgcaattggtactcacatatttagacatcagtcttaccgcttaaattcttcatttgcttgtaaaagccatgtagctctaaactcagaataatccattgtctactgcccttcatccctcatgatcaagtttttctaaatatgtttggaaattgacatgtgatttaaaaataacttaaagtatgtctgatagcccagataaggacatgtactttgtagtgccattcatggaaatagtgaccttgaaaaaaaattctggagggccttcctctcatcttcctttctccagttcctatggatatggaaggatagggctaagaattgctgtctgccttctgacttaataaggagacttttgctcaaataaacactgagttcttttttttttttttttccaagccattcaccaactcatataatgtatctttgtgaggtctgttccttccataggataattcagaaagttatacctaggctgggcacagaggctcacactgatgatcccagcaccttcagtggctgaggtggttaggattgcttgaggccaggagttcaagaccagcgtgggctacacaacgagcctccatctctatgaaaaaatttgaaaacataattttttaaaaggaaagttatacctgggccagggattctgtaccgttcatgatcttgtattccagggtgtgtaatattaggaaggtttaggtttattgtctaaatgttaattgtgtaaataaggtggtaaccatggcaacccaatcccacccccctcagcattggcaggtggccagggaggtgtgatcacaacttctatctgagctcacctttgcaggtaatggggcaggtatgtggcattaaagagcaggaaggccagcaagggttggtaattgtttaactcttccagtggcactcctctgagtacatggaccacacctgcaaacctggcaggacgtgccgtgcatgactggacggaggcactgatacactcggagccaaggaatgggtttaggcaggagctcagggctgaaatagggagcccagcctgccgggctgcttgaaatctcaggactcataatgcttgtgctttagggagacaactgctcattagctggatgaaattaaccagtcatgtcaccttttgacacctcaatttcctcattactgaatagtgagggatttgaacatattatccctaagctaccttttagctctaacatagactgagtatagtctatgtcaagactctgactagagtgtaggtgttttcagattggaagaattatcagaatcacttggagaactcaacaaaacacaaaccactgagctccacccccacccagattactgattctaaagatctgaggtggggcctgagaatctgcatttctaacaagtacccaaatgttgctaagctgctgatttggggcccatagtttgagaaccactgttctggtctgttattgcttggttatgttctggggattttcctgggccacctcatgtagctgcaacattctataaagagggctcctttgctcaaggagtgaggttttatttcctgaattttcccagccctttgttgttaatttttccaccagactgggcatctttggaacatcagagtttgaaaagagaaaacaaaatgaggcatagctcattcgattaggccaaggggccatatttttaccagctttatgtcttatgacttgcctagtactgtttcttaggaggaggagggagagtaattaaacattttctggacttaatattcaacttgcattgccttagttaatactatttataatctgatttgaaatatattcagcacagacagtgtgatatatacttgggattcatttttatctatactctaggagctcattgtatgctgcttctaaaatagctcttaatgatttccacctcctagtattcacacccttgtgtaatccactccctctccatgtgggttaaccctggtgacttgtttccaaactaatagaatgtgacaaaggtgatgggatgtcacttttgagattagaatataaaacactgtgacttccatctttcactctttctgctgctggccatttcctctctggcttttcctgaatgcttgctgtgatgatgaattcagagaggcctgcatggcaaggaagggtgagtgacttcctgctaacttccaacaggaactgcagtccacacccttaagactgggcttggaagtcgatccctccccagtcaagctttccaatgagaccacagaaaagaccaaccccttgatcacagtcttcaaggagaccctgaggcagaggacctagttaagtcctgtcaagatttctgaagcacaaacactgagtcaatgaatgtgtgttgttacaagctgccaggttaaagataatttttaatgcaacgtgagataattaacacaaatctattgacaaaggatgtttcttagggactaggtagtcaacatttggaaaactcaaatcataagaccacacttaatggtaatgcagagccagattgaactggtttgtgaggggtgcttgtacacaactctttctaactccgtatacagagatggcatgttaatatagtagcttgaagtaagcatgatgggaatacttatgcaatgaaaaccagcaagcaatacaattttgagatgccttttactagcatagcactgtactttaaaaaccctactctaagccctagctctcactgtatctttggtgaataacagaatcctggtatatttgcataatggtgtgcagagagtggtgttgcattcatgaagccagggttgttaaaatcatgtggattgtgggataatattacacagggctgctcccttgtgtgaacagggtgggtgaccccaagagtctgcaaacttctgaatagcatctttagcctaggaatatgaaataatcccaactctgtttatagcaggtcatcaatacctgaattgggtgaaattttggcatggaaatatatatatttttaatctgtctcaagtgtaccttctgggaaaggctctgtggaagcatctagctagacagagaattaagtaaggaattcctggcacttggtacctccttgcaaataaatatttgtatttggggaaatttatctctgacaattacttttattgctacatattacctgatgggaaggttggggagaagagacttagcttacctctatttgttgagagctaccaatatcaatagaaaaggaactagtaattgcaaatgatcaaatccactgaggtcagtttgtgggataaatcattacagtaaccataaaatacagatatgctacaagtcttcattttacacttgaagaatttggagtacaggcatggtggtcatctaactgagtttaagaagcttgtacatgacaaacaaagttaaagggctccaaatcagctctgaccccaaaatcatgtttctaatctctctgctagaggtcactcctcccccttttcactgttatagcctgaaaaccttagaggggaaattccagggaaggaaacttcacaggctcaagtttcacagtcttccctgacaggaaatcctagctaaccttgaacttcagggtcatctgttgtggtttaacaccattttttcatttctagttaaaagggcagctctgctcactgtcccttgcatgtcatgccctgaaaacatctcaactccctcttgttactgcctgaaaaatggattccccgaaataataagtcctccaaattcagacatcagctttcctcagttaatttctgcatcgtcatttataatattggaaggttcttacttttaagaaaatttggaccaatgccccaaatggtcttcccatctcagagcaaccaaaaaatgtgactgtggctgctgccaggacccctacatgcaaatgaccagactgtagagagttaagtcttgggacccacacatttctcccaggggaagtcattatttcagggcttttcactgtgttcatgaatttcttctgtgatctaggccttggggagaaagaacattcacctaatttcctataaaaggcactgtagcatagaagtaaagacaatcagtgttcacatcatagttttgtcttttatggcccgtataatcttgggaaaattacttaacgtctccgtgctaatgttttcttatctgtgaaatggaggtgtgagtactgcccatctcatgagtcatgaaaaggattaaatacattaagctctatgaagcgcctggagcagtgcccagcatgccaaaatactcagttaatgttacttcttacacatggtgggcctgtttatcactgctacttcctggaagtccccgtgcgtaatggaaaggatagctttgtgctgtcctgcttgtagccaaccagtttcttagttcattcagcttgctttttgtactccaggagtgtatcagttagctcttgctatgtaacaaatttctccaaatttagcagcttacaacaacaaacatttattatctccagtttttgcaggtcagaaatttctgagtagcttagctgggaggttctggctatgggtctttcatgaggttgcagtcaagtggttggcttggttcagtcaatttcaggctcaactggaggatgatccatttccaagctcacccacaaggatgctgtcaggcctcagttcctcaccatgtgggcctctacacagactgtctaaatgtcctcatgacataacagatggcttgctccagggactagagagaaagagagagatagagagagaaaaaaaatgtaagcaaaagacaaaatcttttatactctaatctataacttatgccatattctatttgttagaagcatgtcactaagtccaacccatactgaaggggtagggaattaggctccacctcttgtgggaacaaatatcaaaaacaaatgtgacatatttttaaaaccacaagtgtcttttacaacccatatatcttagaaattttaaagtttaagtgcactttggagatcaactagcacagctgcctcagttaagagatgagaagaataactcaagagacttgcacaaggtcacacaactaactggccccagggactggattcagctctcttactgttgttatgtgcagctgtacctcattttcaagtcatgtcgatggagtcacttcactgatatgctgtggcacatcctgaagccctaggctactgagagattgaaacttgtatatgatatctttagacttgcactgtctagtatggtagtcaatagctacatgtgttgtgagttacatgtggtgtcaaatatacatcagatttccaagagttagtattgaaaatgtaaattatcttattatttcatattgattacatgttgaagtagtattattttggatatattgagttaaataaaatatattgttaaaattcattttctctattttttttttttttttgcttatttgtatttctgctgttgctctagattaaccaaactgatctccacattctccatgtctttggtctatcagagtcttgcttttacttccatttctgtttccagccacggtgactgagtcacagcaacacaggctgctccaaggcctctgttctctgctgactctgcagagtgggtgcctgtgattttacaggtctgctccttcagacctttctgaacaacactaataactaagggtgtcctgtacaactgcaacaatggtttccaatggtgtgtgctctggtgagctcaaaacattccctgaggactgaacttccactcaaaagctgggtcccaacactctacttcctctttttaaagaccctaccagactaagtaaccctaactagatccattacatactgtttatttccttccttccttccttccttccttccttccttccttccttccttccttctttcctcctccctccctccgtccctccatctcttcttcccttcctgcctctcttcctcccttcctcccttcattttttcctctctctctctctctgtctgtctctctttctttctaaattctgagtcaacacagaaaaattcaagcccagatttggtcttgaagactattgtaaataaagtgatcaattgaatctccctggactgaacatttggactgaacatttggaagagtgattagtgagaggagttaaaagacaatcaattcagggtcttgccatttattgaacagattttcagccccttcactgtagggtattgttttcagaagatctgcctgcccgggattcttggttataattcctctcatgactggggaagataaatatctttcacagtaatttaaagtggttagtctgcactctctctaaacagcttccttccattgatcaacgggtgggccatgaagcctcttgcaggcctctgcccctaatcacccttcttgttgacattccaaactgctaagctcacaaatgtactgggaggacagtagctagaggacacttattccctaagagagaatccttgactttcacggtatgtgactttgttattttcccatccttgtaagggcttgacattgtttcagaaaatagtgttgaattggggaatgtcgttttcagtttctttctcactgacccatgccattcaatgtcttcatcctcctcaaaaccttttttggaataaggcaggaaataaataaataaataaatgaaactgtctctaatgtaaaatgagttgggtagtttgaagatgtttcctctgaaacacttgaaggaagataaagactgaaaagagagaaactgctatattttagatgtaaacaagaacaagggccattggataaatatggtaaattatacagggctagcattttgataacttgtgatctggagaaagtataagttggcacttccactttttttttttttttggttttgtttttgataattgtatgcagcatagaaatcccatagctcccaaatcttctactccaactgccatttgaaattctaccacagtcctatgtatcatcaatgacctccccaatttggccacaaaggatactgagattctaagtagagctagaatcaaacaggaaaccatgtgagtatgagcaaaagggtaagagaagtaagaaagctggtttagatcagaaaagacatctcctccccccagaattttctggaagatgacattttgtaacaataagtttatatccagtttgtaaatcttttggttacataaaacaggaccatgtctatgtcaagtaatggaggttactgttgagttactatgacgatggcacaggcagaagctagtgcctcccttagactagggcagtagttctcaacagtgggtgggagcaggtagagattttgcctctggaggacatttgacaatgtctggggacatttttgattgtcatagttacagaggagaatgctggcatctaatgggtagagcccagggacactactaaacatcctccaaatgcacaggacagctcttgacaacaaagaattatccagctcaaaatgtcgatagtgctgaggatgaaaaaccctgaacaaggacaagaggtgaccccctactccctgtgtggccctgtgacctggaggactttgtaaactaaacatcaaaaaacaaggacaataaatattgtttttggttttcacattcataataaaattctttacttgattgagtataaagttttaagacaagagaagctgacaagcaatagacaaccacgttgcccatcataaaacctttatttatattcagagaacagacattgagtttcagttaagtttcccttggaaataatcatgcaaaggctgtatcattaagcattgtaacaggtagatgaggataagtcttcctcatccctaaaattcttctgaagtagaatagacacccacctgcctggagtggttaaggtaagaaggaaggacaggtaatcctggagagaggtactgcccctccacttcgctagtatttgcaggtctagattctatctttctaaatattacagaatgactcaatagcacattctactaaaaaatggtaatgtatcatttaaaaactcttcaaaaaatggttatgaaactgcacttactgttgcttattatactatcttgatcataattttgtaatgtttgagagaggtactctctcctcacctccccctcacctctcagatccatcagccatccttctctgccttgttctgtgtccctggggatggacccttactgattacagcatgtgaattctcttgttctttagcttctacctggctgagctaatgcgaggtgctggcaggggaacagagagaaagagtagaaaggactcagaatacttattctcctgcccttacccagccttggcacctcttgcctggtagtggctaccggtgtccatgattacagcttctgcttggtggaaacttctttgcggttccagttttttctggctctgtcaaccctatttttatttttttgtctttcaggtcaattggaaaaggcctctagctgttgctggactcagagttcctcaacatcttttatcagttccattaaaactatggggagggataacattaggagaaatacctaatgtaggtgactggttgatgggtgcagcaaaccaccagggcacgtgtatatcttgtcacaaaactgcacgttctgcacacataacccagaagttaaggtttaataaataaaatacaataaataaaaaaactatcaatatctcataaagcaacaggaaccctcattcattgctggtggagatgcaaaatggtacagccactttggaagtcagtgtggcaatttcttacaaagctaaacttcattttactatacaatctagcaattgtgctccttggtattaactcaaatgagataaaatcttatatctgcacaaaaactccacccagatatttatagcagctttattcataattaccccaaactggaagcaaccaagatgtccttcagtagatgaatggataaacaagctgtggtcattcaacaatgggatattagtcagagataaaaataaatgagctgtcaagccatgagaagacatggaaggaccttaaatgcatagtgataagtgaaagaagccagtccagaaaggctgaatactctatgattccaactatatgacatagttgaaaggcaaaactacagagacaggaaaaagatgagtggttgccagagatgtgaggagagaggaaaggcagaataggtggagcacagaagaaccttatagagcagtaaactattctgtatgatactgcaatggtggatacaaggcactctgcatccttccaaacccatagaatgtacaacacaaaggctgaaccctaatggaaaccctggacattcattaataataatgtattgatactagttcatcaatcgtaagaaaggtaccacaccaaagcaagatattaataataggggcaactgtgaaaggcatgggaggcatatgggaactctatactttcagcttaacatctctatagacctagaactactttaaaaatgaagttcattaattaaatatatcagtgaaccatgtatatatatgaggaaaagtcctaccctcttctctctgcatagcctcattattatttatcttcttttattatttatcttcttcttctattatttatcttctctttccagggaaattctatttcctgcccagggcctgactattatatgttgtatcaaaaagacattgtgaaaataaagaaaaccgcaaaaatgaaaatattatcaaaacctttttattcatgaaatgcatgttagacaccaaaatattggtggcttttcatatcaccaatgctaaaaaattaattaaggggtatatatcttttttattccttggcattacctaagatttagagaataaagaatgtccaaacaccctggttttcctggggcaatcctgatttagggctgttttcctgaatgcagtcgttaacggaaccccgttttcctctcaaacttgtcctagtttggataataagttatattattattgtgcctctaatactttctttgcaaaaggagttacaaagcaccatgggcagagtctagtcatactcaccccagcttgtctgtttgggcactgtctggaacagatagactaggctgggaacgaaggtgtgtctgccaggaccaaacgttccaaaaacaaattttttatcagatgaaactataacctagatcttataatgattaaatgcaatttctgtagtgaaaatcaccttaagtagtataaggatttgctgaagatgaacatcaggccccatgagttcctcaacagctcgaaccatggagagttcgtgcaggcagggtcatttgtctaccacctacactgtggatcaggtacagagtacagagggcttgctctatacatatatagctactaaccagctccagaagccaatattttacctaccaggaccaggaccttgaggtttccctttattattatccattcattcaataaatacccattcaattcaggcaccgcattgaaaatacagtggtgcataacacaagtaaaaaatatccattctagtgggaagaggcaaccaataagcaagtaatcaagtcagtgaaacaattcatataatggtgaatactaggaagggtatagatgcaaaatcattgcacaggagagagggagggcttctttctagagatgatagttgaactaattctgaagaggaaagggagccagccaagggaaatcttggatgttcatcccacagtccctctggaattaatgaaactaatgaataaactgtgtgccaagaagaaatattataaatgttaagtggtttttcttgataagcaaaaagaaaactagtattctaggtattacatgtgggcactgtaaattttaaaaagaattgttctcttgttagcagtcatttgttattgattggtaattgccatcatcaaaatgccaaatcatgttgacccatctcttctgcttcaagactttcccagcctgttccagttactatggctgcataacaaattacccagaaccttagtggcttaaaacaatgacaacacttgttttgtttatgattttataattgggaagactccatggaaatggcttatctatgttccactcagcattaactagcaaagtgcagcgagggggtccttgaaccatctaaagtcttcctcattacctgtctggcagttggtactagccattagcagatcccagctaatgcttttggccagaaaattacacgtaacctttccaggtggcctgggcttcctcacaacatggaggctgtgagcatcctgacagagagagcaagggccaactgagtgctgtgttgcttcctatgacctagcttcagaaaacacgtaacattacttcagtgatagtcaattagtcacagtggcaaaaaaggctgtccagattccaggaagggaacatagatccatctctcattgcaggtcacagtggaagaagaacatgtgggatggcatctattggtgcagccatctttgaaacacatagtgttccatgaagctcaatcctttgagtttcttgtaagacacttctatttttccagtccatatgcctaaaagaacacataaggcaactgcaaagataggagaagtgaaataaactgagtgggaaactcaaaaatcctcatgggcaagcagacagacaaggaaagcctagagactcactcattattcatctctgtcctgtgtatttatgataggtatcaagcttgaacgagtcattaaaaatatgtttagaaaactttggtttgaacaaagtaaaatgtttttctatatttcttatcttcttagaaaatttagtaactatgtgtatgtcctccaagagggacacatagtatgaaatttatctccatcttctttgacgtggaatcctttttgcatacaatcgtgaaatagctcacgggaccacttaggaaattctattaagccaatttgttctaagaggggttataatagacccacagagtgggatgtttcatgggttttgtgaggggatggaaaaattctcttccagcttgaagctgtgaaaggaatgcaatgtctgcttttcaactctggttagcagaatgttgtgccctatggtacctgaatgaaatagctaacctgagtgtgctcaaggaatatgttgtttctggtatgccagaattcaaaaccagagcccattagcatgagtacttcaaggactgccgctgatgtaacctttcaggggaaaggctggtccatctacaaatgactcaagatgtgatgaacagtaggaagccaagccagtgagtaagggacaacatatgctgctgatggagctcaacttcaccctgcctcattggaccaagttcattacctgagagtgatgaaatgaggcgaaagagaatgtacaacacgaagactgcagaaacttacaaaaggagtgtaggctagaaatctagaccagcctcaagatgccaagattccacttagagaaaagggaaatacatctgtggaaattaatgagaaacacagatattccatgggagttcagaacctggaaattagtgaggccaagaaaaagagggatatgacagagggcaaatttcataggagtttgcaacatgatatttgggtggaaaggagcttggtttgcttttagcagcaggaggaaaatctccatttcacatttaacaacaaaaaagggaacctggtgaggactaatttggaataccatcttcgaatttggtgccttgttacagtaggggagtagttgacctggccaaaattccaagagccagttgaatgctgttgggtttgagtacactgattaaataagtcaaatcctcttggccttctgagcatcttaactcccagcaataaccttagaaaacattcaggaagactatgaaagtcctggaaaattccaagggaagtatttctacctaaaagtatatgaagattgaaacagccaaggaaggaaggagattattgctgttggagagcgtggaatttcaaccagagtccagagaagacactccatcctcaagatgcattaaattttatacgaggtcttttgtggactgttcggacacatcctgcctctgggcacttcagattagcttcggtactagagtgtttgatgatttttcaaaaaccatgaatcctctctgacactggcaaagaagcttggaaaagatgagataacatacgttatttactagctcaatgattgctaagtggtatttttcttcttttgattagattaaaaaatgtatttaaagaatgaaatgtattaaacagaagctatttacacttaggcaaaagtcctgtttcagagttgggcaagtgttcgctgcaatcaggatcataaccacacctgtacgatttctagcattcattagaagacctacccagacactgaaataataagattgtcaacttttgccctctctgggatcagtgccaaatgactgattttcaatgtcctggctccatgttgctctcattgtgatctctcttctgattctttacttcttacttgcttgttattttcctccttatcattctctgcccccaacttccttcttcttctgtctggacttctgtcttagttataagaaataccatagataggggcttgcgaacaacagaaacatatttctcagagttctggagctggaagtctgagatcacagtgcttatgtggtcaggttctggtgagggacctctttcaagttgaagactgtcttctctttttatcctcacatggtagaaagggagcaagggatctctttggggtctcttttataaagacactaatcccattcatgagggctctatctttatgacttaatgtcctctgaaaggcctcacctcccaataccatcatattgagttaggatttcaacatatgaatttggagggcacatgtacattccatctattgcagcttgtcactccccttctctcttcactcccttcttccactgtggactccatcctgctttttattcacttcttttgcctctggttataaagacatccccttttctcatacccttagttaaaaaccaccctatatttgtaaaaaatttcttcttcagaggaactttctaggaattgtcttcccattctcaaaagatcttgtgtgcaagaagaaattaccttctgagtacaggtaccatctccatgaatttttgatgttcagctcaaatttggaaggaaaaattgatatctattaatttatctaaaaaatgactggttgtaaggtaggtgctaggaaagaatataaagatttgcctccttttcttgaagacgtgccaactggcagacttcctaaaacccaagtgagaaaatgatgacaggccttctggacaggatttgaagtaagcctcatagcatagagagaatttggatgtccagagttagaaggagacaataatgtggtattgtggacaaaggatgcattatcataagggacctgtttagagattattgggcaggaaggaaaggagtgatgaatggtgttggaaagggtggcaaggccagtggtagagggcttttaagtgtagcaggagatacctagaaatacaaagaaatgacaacacacgctttggaattacatggaactgagtttgaatccaggcttctccacacactcacactgcttggctcacctggttgagcctccgtttctgatctttaaaataatattaataccactcacatttcagtgttgtaaaagcaaatatttccaaattgtaaacattaagttcgatggtgaatgaaaaaattctttgcatggtgtttggtttttggtaaaagctctaacacatgatggctattatcaatattattattaggctgaaagccagtacgtttgttactggaaaagaaggggggacttttaaattgtcattagtctaaagatttttttctggaaagaaatgaagtgaaacctgtgtacttaaatataaatgtaaataaataaatatatatatatatatatgataaactgcattgttggtatcaattctctacccctttctgtatccatgtttttcaccatgcaaagtgtcttcctattgtggggtgtaagtgattctacacccttgagctctgacactgccatgggattggtagcagttatgatgtaagcagggccttgaaaagtgctttcaggataggatctgtttgctctttcccctctgccactttcatgaggaaaaacatgcccaggacagcacacaggtcacaggaggaggaaaaaaagtcacctggagcagtgacctctgtaacctagtggaggtcagaactgctcagccaggtgccatcaagatcagcagactctctgtcagcctgtagacgtgttttaatccatgaattccagtgtgatttgctatgtagaattattgtgaccatagatagttgatacaatatatatgtatgtgtgtacatatatagtatatatatatatatatatatgtttatgtgtatataggaaagcctgaaaaactttaattataatatttcatttccttctataagtaattgctacatgatattatgaatatttttaaaaatccaaaaatatattttcccaagataataacctctatgtgtacagaatccaacctgacagctaaacattcatacctcaatgatctttgaagaggtatttattttccttagaaagctgggatgacttgcacagtcttctacttggtctaggtcattgtgttgtattcagtgaatataatggtatggatcaatgtgtgcaataccaaattatcgttgcaacacattttctgttgtgaatctttagtttctttctaaattccagtagaacagaactacctgaattcttttcaatgagacatcatcttgattgccatttatagaagaaaccctaggtatccaaccgttactgcaaatgtgtctccatagtcagcaaaatagttgccaaatttttctcatcagaattcactcaaaggtgcttaaatattggcagtgtcccatcagcaaatggtgcaggtagtagtaaggaaaaggaaaaatatggagaacagtttaaagcatcagaaagcagagtgtgtaagagagcagacaaagtgttttgttaatctctgggcagttttgtgggaaagcaagggggacactggatgaagctttataaacacgcagccattaaatgagtccggatgtgcaaagagcttagaattgtgcctggcataaaataactgctcaaaagatgttgaaacattttgtttcaagcctttggaagaaaacaaaacaaaaataaattccccttaaagtttacctttgaaaataagtcaagaattttcttcttgtatttggacatttgaaataaacaattattatattcatatgcttttaagcacaagaaacattgttgataaaacacaattgtacgtcagcatcttttagtcaagtgactcatagatacatgagaagaacacacaacaatattcttattattttctttctctgtttaacatttttttttttttaatggagtctcactctgttgccaggctggagtgcagtggagaaatcttggctcactgcagcctccgcttcctgggttcaagcgattctcgtgcctcagcctcccaagtagatgggattacaggcgcccgccaccacacccagctaatttttgtatttttagtagagccggggtttcaccatgttggccaggatggtctggatttcctgacctcgtgatccgcctgcctcggcctccctctgtttagcagtttttgacaattactatttgtggatactctgccaaggccatgaacactagaaagctgttccctgatttcatagagcactggctggttgaagcaatgtgatgcaggtacataaagagtgctaacaaaaacaggcaagaatgccataagggagaaaaaaataacagtacaattcattctaaaggaagagaaattgtaagaaattggaggggtgttttaagtcatgcttctcatatatgattaaaaactgatgtcagaggcatggagaaaatacaatcaggttgagaattagtaacttcctttctaattaagaatgtagtagattgaagaagcattgttctcagccctctctacagggactctatgttttacttaagtaattgatctgaggtagctcagaggcaccttggattttgtgaagattacattcagcttttgccacttggacacccaggactatatttgtggccaaatttagccaccgtttcgatcctattttattttctgttctctctctcatagtatatctgtaaattaccttaagtccttttgtaagatatagaacgaataagtaagtaatgaagactgtaagaaagtcattcatcgtccccacctctcaattttgtcaattataaaatgaaagactaggattaagttaaactgagtttatttttttctagctctaatattttatgattacatgaatgaatgcaggattgttcataaatgaagaatagcttaatttagccaatacttagaagtagtagacatgaagactttctctgtaagaatataaataacttgacttaaaaccattggttgaagtcaatataccagagtttcaattgtaaacgcctcctctcatttattcccttctaagagtggtttgagcatataaatgcataaataaataaatggctttgtgtgtccaaaatctactggcacacatcaggtcctatgagacatcacattatcaatgatacatttcaattgcttttaaaaaataaccagcaacttttcaggttttagagatcatatcaaacatatattcttagaggaaaaaaaaaaacatgtattcaatccttaactaaaaataaacaatgaaatctctaaaggatattccagtcttatatcatcagctatcaatacctgttaaccaacaggggaagcttcaaaaaatgaagcatttggtttttcttggtggtggattcttttggaagatgaaaactatggaggggagaaactttacctaatgctttaataacagtaagagtagatattgttatgtagtactgggaactgcagagctggtaagtttctgagctcttctcataacaaccttattatagattatgtatgaatcacatttttgttctttataattcaattttgattatatttagtttgatgatctagtatctctgaatatgagacaaaaataaaaaagaatattggagtaaaaatgcaaacttgctaaaaaatagagagatataaattaaaatattagaagtcacagaagaaaacagaagtcttgcttttctaccttgacgttacttagaaatgattttgataatcacgttcttagcacaaaatcaaatttacaattcctatcatcacagttgaaattttttaatcaactaaggaagcttgcttctgagcaatgagtatggaatttattcctctaagaactgactaattttaatcattaagataagaatgtcaggtgctatgatgttgataagtatttcacagctccaaatacatcacttccatggaacagaaaaatgataacatgttggagacaggaaaaaaaaaaacaacaactctatgattactttgggtataggccctgacctgagatcttagtagggggaaaaaatcatctttctaaagagaaaaacatcactgagaagacaatcttaactggatcaacattcatgttgaaaaaatgaatgtgctttaaaaattgaatagatgtttccagagctttggttcctgggaagaaataaaaacaactgttaagccaggtcaatgaggagaggagcagtgaagttattctatatctctagtcatctttgactgtcaaatttattgcatttttttcaataaaaattgtcttttgtttaatcgaatgcttaaacttgtttgcaagcctcaatgagcaggggatggtgggtttccagaattaggctgagagactaagacagacagcttggtattgctaggtagggtgctcataggtggtaactaaatgtgccagatgtctgctactgagttctgtattggaagtaaccaacataggtggaagggtatgtactttaagattgaaattttggttgatccacattttatcttcagtgataccgccattttaatagatcctcaagttaggaattatttgcttcctctgaatggccaaaggtctgtgataaaaaatccagggaaataaaatgaacccacttttttgtcagtgattcccatctcctggcaatccctgtgaaattcacactcctgggcagttggagattctactgacataaatcatgtgaaccaagtgtgggacaatgctagagaccaccaggatgaaatatctctgtttcaaactaactcttgttcccaagtagggcctcttatacctgtttcccagagcctataacgtgaagagttcatgtgaatgactccttcctactgagaaatcaggaaaggtcgggagggggtcacacctattctgacactcttctagcaggctgaaaacaggccaggtctgaatcacagtggaccacacagggccacagggaagggaaactgctttacttgaacaaagtcactatttcctggaggctgaagggggaatttcatctaaaattccctcactaggctcccaacaaaagcaataaaagttactagtagtgcctggctcctttattctatccctttgtttacttctgattaacattttacattcttttatttattttggattgatttttttttaaaaaatagagccactcagcttccaacctggaggctgactaaaggaagtagcaatggatatttttgagtggatacatcttcattcagggatgggcaaaccagtgcatttttagaaagtatttaggatgatatggtatctttccagataaagacaggcctccttctcctttgacaaagtgaattggaggcaatgtagatgttacttgtgtttgcaccctttgatgtgtagtatagacattgggcttcacctagaagggctcttcaggctgctgggctgacttctctttcccttgctgccctgctccaataacacttaccatacaatattccttttggcttgacacttctctgcttcaggttcctacccatccacccaacaggtccccgctgcagttggaataaaatctgcacctgacattgacctccaagattccatgtgacttgactcttgtttacatctccaaactcatgttatacccatccctccagctcaaacccacctcactgccttgggcttgcagttccttctccttggaatattctttccctgttcttttaaagccacagctccaatgtcatgtctttggagacactctctcatctccatctctcctatctaaaccattcacagcacaccatcttgttttatgccctttgcagtgtctgtcacatctgtcatttcttctttactaattgtttcttgacaagcagaatatgaactccaagatgacaggagcatctcatatagatggctatatccctagtacttgaaacacttttaggcacaaagttgatactcaataaagatctggcgcatgaagtaatagatgaactgttactatcacatgattagcccactgcaaccagagggaatgggctcaaatagcttcttttaatccctacttctaataaattctgttctcattgcatatattatttctccatcctttgctatgcccacacataagtgtcctttgtttagcttacacttcaaatctctgtttacttgtcatctgtaggaaatcattcttggctgtcccaaaccggattgggtgcttcctctacacttccttcagttagagcactactcacactgcataatggctccacagagtagaagcaattctctttctcttagcgtctagggtgtccagcacaggatctgcctgtgtcagagccttaacacctgtttgttgaatccatgaatgtgaatttagaatgtttttaagcatatccactttattacctttctatattgtacacagaacactcatgatacctatttgttgagtacatgaatgcatagttagaatcatagattgtttttgaacatgtcaatgtgattacctttctacatttgtacataaaacacccatggtgttccacaggaaaggcataagtcatcagcctggtgctttttttatctcctgtttaacctcgtaattaacacctttagagctcttatgttttgccaggctgcagctgaggcttttgcttgggtaatttcccccacgtcagctctaggaagtaggaagtgttggaactactaccatccagttgacaaaattgaagctgacttgcccagcgtcacacagccggtaagtgctgcgggcagaattggaacccaggcagtcatagatagtaaagtcgtcactgtgaaacacagagaaatggcacaacctcacggcaaatttgatatcaatgccaccagtaatttctgtgcttgctgatttagtgtggttacaaatatcatactttaaaactctgattagggtattctgcttttcaaacacctctctaacctcatgaagacctaaagaacaaattctcagctctccatgatagcaattaagacctgttacctctgctcccagtctgcctcagcatacttctcccaccattactcaacgtgagcacaaccttttgctggtctctaaatgagccttgatcctttctctctttgcttattcattttctcctttggcttctactcatcgttccagagcaatctcataattcttttttttctggtttccttcaaaacaaatttactttccatgtatttcaaacttactcattgtttaattctgaagcttgataggctgcttttatttgagctggaggatttctctccctccatgccttctgtataactgtaggaaaaatatgtcaaagagtagatgagatggtaaacaaataatctgctgcaaaatgcatgaagaataaactgggggagtaagcaaagctttaagtaacatgttcttaaatatgcaaaacaagaaattgtgttattagctcacattatgagaaatttacactaagttaggaagcttcacataaaataaaaataaatctattcagtttatatattctttgtcacctctttggagaaatgcttccttgttgcttccactgaatttcatatttacctttgttatatgtctcaccactgtggattgtatgcattgttgtatttctctgtctctcatcaaatttctaagatcaggatctggctctttgtgcctaggacatgctttggaacatgatatatctctaaaacaaacaaaaaccttgctacaaataaaataatacacacacctgaatggctaagatgtaaaagtgaaaaacgccaagtgtacaagctctttgccagcctatttggctgtgtctcctgaagttaaacatgccaaaaaacccaataattctactactgagcatatatagtcactaaaaacatgggggttgatggtcatcaaaagacttgttcaagatttacagtatcactatttgttatagtcagaaactggaaattactcaaatacccagaaatagaagaatgcgtaaacgaattgtagcatattgtggtatatgtgtacaaaggaatactatacagcaatgagaatgcacaaactaaaacaacaaaaagctagacacaaaaagtacatctgtatgatttcatttatacagtttaaaaagtggccaaatgaatttaggaaattagagttcagaagagcagttacccttggtggaagaagtagggactgcaaggtagcccaaggcagcttcctggtgctggtaatcttttgttcttaacctaagatctggttatacaactgtggtcacttggtaaaaatgaagctgagaatcttttctgtgtccatcttgtactttaacaaaaagtagagatagatagtaaaagaggaacaagggaggaaggaataagtgaaggaaagagaaagagaacatttttgaataaagttatttttttttaaagtcctttgtctttacaaaatcccaagccccacaatttacttcaattgtttattcagaactacaagagctgcatctgaattagcacaaaatcttacttagttggctgggaagcttgaatgggccttttttttttaatatggaaaattacatctgtttgaattataaccactgaattctcaatgtttgcgaagcaaaagatggtacctctaagaatggatgcatccttctaagcatccacatggctaccagtgagtgaacaaggaattctagctcattcagctgaaaacatagtttttgttagcttgccaggggaggcctgattgtcaattgtgcctgaaggaagtgagtgctgttaagcatagacatttctcctttgtgtacagtggaaatgatgggcacacacacctcctgctcacttgcagtgactggattctattcacaagccagtgctgccatctgacaatacttgcattggaatggccacattcataccatttctttagtaagctgcgaggttatatttcttcctcctgtcacagaagcagaatttgatctgtgtttgttggcgcgggtagatgtgtgaagatcaaacgcaagctttgtcaaacagacggtagtcttctactgaggaaaattactttttccccccattttcctaaggcaagtaagtgagaatgttaggagttatgatagtgttgaatttcagatcaggtaaactgacaacgagccctgctgtgaattggagtgttttcttttgaatgttttggcagctctttgaaagcagacagtaagcctcagactgtcagccgttatgtttgatattccttgatgtcgatactggatatgaaagaacattgtgcatttggtttaaaaactgtgtgtgtgtgtgtgtgtggtcagtaccttagaaataacttgagggcaaggtaccactaagagaatcccaggttatatagtcagtgagtaaaactatttgaatgacatcgtgagctacaaaccttttctagaaagggacacacctttactttttatagacagttaaaagcaattgtgtctgtcctacatgcttataagttttataattgtctttggtgtgcatgtcacattttgtgttcatatataaattcaattgccagagccccatctatgtgatgaaaacacatgaagcaatgttttattagaagaacgctcaacaatcaacttgactcttttcctttaatgctttgactaaaattttcccctaaggtatccagaattacttggattccttgtagatacaaaacctatgttttctactttgtgcttcaatattgtttcaagtcaaaacgtccctgggacatatatgcccttagttattatgtaagtaattaacagttattagctaaatattaatgtgcataaatttaagattcatttgattcattccagtagatttaacagcaagagggtagcactgagagatctgtggaagaagtaaatagcaaggacagagggagaagagatttccaaaggagtaaaagaatgtcttagcagtgttcttaatcattgtaagggagttacagactccttttagaattcgagaaagtctgtgatgtcctcagaaaaaaatgtgcacatatatgaaaatgcaaaatgtggatgactgtcttagtttagattccccagaaccagacccaaggcaaaggtttgagagcaggtagtttatttgaacagtaccaggagcttgggtgggtgaagggaggaattgatgtggggagaaaaagcaggcaagaaatggtgtattattaaggcgctttccataaaagtgacaaaagtccggggagaaactctacaaaacaatgcaaaacagacacctcaatattatctcagccagaagacccaatgcccagtcattggctagggctgccctggtaggatgtgaattcacagacacagccattggcaatgcacagggcaatatgggttctgagcctagggaatgtctcatgacaaagatgaaggtgttatccccaaagtggtgtgtgctaaaaaaagaaaacaagcaaacaaaagaaaaaacagggaagaaaaaaaaaaatgcaggttatggacatgggaaatcaggctggcatgcccagcagtggtaagaaaaatcaagaacctgtaggtatgcagtgtctgctgtagatatgccttgggatcccctattcatcctttaaaggtcagcctggaccagtttattaaagaattctgctgtgtggaaagggccgcctgaaagtaagatgcccattttggagatgagttcagctattaacatctttgagaagggccaagggccaagttatatgcccaaccatgttttcagcttgtaaaattattctagaaggaagggatttagtgagtcagtggacaccttcagaaagagtgttgggagtcttgagaactctttaaactcttctgactcactgtgtctcacagggtcaggcatgtgatctctctttatgagagagtctccatctagggaatgggataataatggtctttctcattcttgagaaaaaggtgtccaggcccatgatgccgtgagactgccagcatcaacgcccctgtgtgacactcttcctatttgtaatctcttttccccaagcaatgagttgagtcaacagagcaatcctatctcagacttcaggaaacgaaatctcggagcatcgggttggtataccagagtcatccagtgagtcactgtcacagtaggaatcaggtattagaacatctaaactccaggccattcttaaactcctcaggctttaccgtctcctcctaaaaatggagaaatgggtgctaataataggcctggttctcccgtgagccagaatgacttattcacaacctgggaacagagtcatctaggggaggtgagttaaccttttttggtgataatttcctgacaaaggatgcctaaaaaccctggaaaatggtaatagttcatctactgttcctgcagccgctggactgggatcttaagcagtctgacccattttatactcatatccttaatacgttgcttcacacaatgctttttggcattaatggacatgatcaggaagcctgctgaagtcttttgaaactgttagatgaacgaagaaatggcagattgcctttggaaacacttgttactttcttataatgttaaatgtgcacttatcaatatggcccagcaatttcactcctgaggattcacccaagaaaaatgaaaaattttcacaaaatttcacacaaaaaactatatacagttgtttatagaagctttattcataatcagtaaaatctagaaacaatcaactattgaataaatagctggtatacagataacatcctgcagtgcatccagtcaatgaaataatactcagaataaaaatcataataataaagtactgattgatgcaacagcaggcatgcctccccagcatactctgtgatgtgaaagaagccagaaatgaaagatgacatactgtataattccatttgtaagatagtctaaaacctgtataagaacagagaactgatcagtggttgccagggcctggggtttggggaagtggttaactacaaaggggtagacagggatgttcacggctgaggaaactgttctgcatcttaattgctgtgtcagttacaggactaggtgcatttgtcaaaataaggtaaataaattacatctcaataaactcgactcacacccaccaaaaaaataataagaaagaaaaaatggtagagccatgttaggtcaccaaggtagaggtgacatgggaaaagagattagaaagacagaagtgtcataagggactctgtcataaagaactcagacaataatgtaatagtatgttgtggtatttctttcagagccaatactctggccagcaggaacccaggagcccagaagccccaggcctgacccattctggcaattattataatattattcttaaaagccaagtccgtctctctctctctctctctctctctctctctctctctctctctctctctctcaagtccctctctctctctctttctctctctctcccccatcactctatctttctcacacacactcacatgctcacatgatcacacacacacagagaataacaagctttgcaaagtgcaaacatttccattgctgccaaaggtcaggctgaggatgaggctcgaaacctcgaatttgtccagctgtcatctcccagtctcagtcaatactgtgaatgtccagttctatcctgaacatatctacaaatacatctacttggaaaatactggcacataaatttagagaggtttaaagtgggaatgaatacctcaacctacggggtggaaaaaacctgtgccctgctctttgtgggcaacccaacctgtttgaactgctaaaaacactcagggcaaaacaaggagagcagaaaaaaataagcttttaagaaaacagttctctcaatatccctaagtttaatggctcaatatttagcatgcgtttcataactccagctttttttgggtggaggtaggtagggaaaatgggaatatagtaaagagttttcaaaacacttgctatttgtaaggcttctttttttatgtaccataacgcacacagccctctcaggcatggggtcaggctgtttccttggagtggaattgaacacgaatgaggaatagtgagaaactgggttaggctaccatggaaaatatgagagccctggaaagcgtcattacaaggtctgacaatgattccagggttactggagaaacttttttttttctcttttccctctttcctccaagtacccagatccctccaacaggatcccagaagtgtgacactaacaatgaattttcaatgcatcctgcacccaagggatttgcaacttagtgggacacacatgttaatagacaactaaaccagtggtcacaacaaagtgagacaagggctaccgcagagaggcagagaggctggaaagccaattgtcatggatatagatggtcatcgtttctgtctttggctctaccatatgctagctctgtggctttgagcaagctacctaacttctctaagcctcaaaattttaacctgtgaagtagagataataatagcactaccccaacatgtgattgagggttaaatgagaaatccattcaaagcacatgaatagtgcctggctcatagtaagtggtcataagtggtagccatgacagtaatttcatgggaagagagatcacctcaggaaagcttcaaagcatcagggatgtttaagctgagtcttcaaggaaaagtaagtacaagctacatagacccagtgtacccgcttgtggaactgggaggacatttcaagcagagggagaaggatatgaaaagggttgtaggtggaaaatatcctgataagttcacattaagaccagattaagatctctggggaatctaaagaataatggaaccatggtacaaaacccctctcaaatgtattctaatatcagtgttaaatctgaaagtaactgggaggcacatttctgatttgaccttcaacaactaggttgaatgctttgtttcttcaagagatttttgcttttgtgagtacctaggaatgttgaatctccttgtagggtcatccagggacctcagagttacctatgaatggagtgggcaaggattttggccaagactgaaatatgagcagaaaccaaactgtgaagggtcgttgttgggggctttctgaggagttgtgcagggaaagtttggtgaaaaatttcaggctggttgcgtgacatgcaaaggtaactctggtggccttacaaggaatggatttcagtggcagttctcagtgggaaggaggggacttgttgggagatgaaaacaatctgagaagccttttagcaatgcataataacccttggcttttaggggcacagtgttgggaatgcgtagggggagccaatgaggagatggaatgagaaaaatcctaagaaaaattattaggaggctgttgaaatattatctccctccctagccttcttctttctgcccgcatttctgtcggcttaatttcaccctgtcattcatatatatatatacatatatatatatatatatatatatatatatatatatatatgacacacacacatatgatttttatttttatacattatttatacatttgtatatacattatatatactaatgcgaatagtatatacatatgcacataggtatatataatgtaatacattgccaaatgtgtacaaacattctaaatgactctttcgcacttacatcaacccgtagttaccttcccgaatctaaaaccagaagcaaatcttatttttatttatttatttattcgtttatttatttagagagggaatctcgctgtgtcgcccaggctggagtgcggtggcacaatcttggctcactgcaagctccacctcccgggttcacaccattctcctgcctcagcctcctgagtagctgggactacaggcacctgccaccacgcctggccaattttttgtatttttagtagagacggggtttcacggcaaatcttatttttacttttattttttgtagtccagaattacagcaccatagagacgaaatatacaggtgagggcgggagcttctccactcagtctgtgcatgtgggagggtgggcaacttcctgccagccttctggtctcatatgcatttggtgaggatgttgcaatctcagttagtttggggccatgtttgtacactaattcagatgtgagcatgtgtgctcacatacacacaaactcacacacacacacaaaattagagtgaaatcagacttaatggagtgtggccacctaaagacttcagagctagcagaagcgatcagcaatctactagatgagtgatttggtgggggtgtcgttactattctttcatgccatggaacaatacatagtattgtcatgtcaggtttaatgattcagcaatttaatatccttgacttttttgtggagttattatttagttgggaatatttttcaggacccagaagcattatgtttttgatatgtttggaacttgatctaagatgtacttcagacaccagacagtgttttatgttccatgacgactctgaaattcatgcagcttttgttgtctgaactttcatttgatctgtgttaattttttgtattaatagcttgcctcttcattttcattattactgacaaatatttacttagtatctactacatataaaatatcaggtaagtattctgtgtatgttcaacttgaaaaactttctaatttggcaaaacatagagactaatttaacaaatacccatgtagtaggatttcagaattaacaaatgccaacatttaatcatattttctcgagataaacaatgtatgtgtgagtaaaagaaataaacatcactggcaaaattcaattatttttacttcctaagtttttatacaaaatggctaacaatttaagtttttgaatagaaggattcaatatttacactacttaatcacactgttcctggtatctatgcttggtacatagtagttgctcaataaacatgtgttgagatgttttgtccaattcttacatagccaggattgactcctatgcccactcttctatactttttatacattttatttgagagaatacatttacttgcacgacttctaaaaacatctataggccgggtgcggtggctcatgcctgtaatcccagcactttgggaggctgaggtgggcagatcacgaggtcaggagatggagaccatctggctaatacggtaaaaccccatctctactaaaaatacaaaaaattagccgggtgtggtggcgggcgcctgtagtcccagctactcaggaggctgaggcaggagaatggcatgaacccagtaggcggagcttgcagtgagccgagatcacgccactgcactccagcctgggcgacagcgagactctgtctcaaaaaaaaaaaaaaaaaaaaaactataaacatctgaaacatctatagatatagctagatgacctttcaggcaagttaatctttccagacctcagtttctacatctgcaaaatggaaataaaaattacacccaactcataggtttattgcggggcttagttgaactaatgcatgtgcttactgtttagtaagtgctaagtaaatgttagttagtgttactccttttattgttttttaaccaacacctttcttcatgggttcacagtccactgcagaagcaaacagaaatatttacaacttcaaagtgctgtgatagacgttagtgcaaagaaatgtagataagggagtgaacagggaagtgaggaaggcttcacaatggagaggtgaactttgattcattttctggagaagaaatctagtttcactaagtgaggaaagaggtcgttgcaggcagagggagtagtatatgcaaaagatgactgcacggaaatggggaaatgggcttatggtaatgtctcttaggaggtgagagatgggttgagggtacagagggtaccatgcaaaaaaaaaagaatagtagaccaaagagtgtacaactccatgtgtttgtgcgcatcggggcctgcttctttattgaaacttacattcaaacgttaaatattattacactatgtaagaaaagacgtatgagtaatgctcttccaccctcctccccctcacgttcccattcctgcagcactagaaacccactgatatgtcttcaagggaaaaaccataaatgtagtgaggatgctatgatatgagttgtcgtgatgccactaacgttgatgaccaggaccatggagacattggcaaggaatttacagcttctcaagttccaataatcttattatagtctagtgtatgcaatacgccttcttacacatctgtcatctagctggacccagtgggaaggttcatggtctttggactcagagagagcaatgctacaaccctggctttgttttgctgattattctccatgtggtccctggaccccttctctcttttcttctgccctgctgttgcaccaagaggttgacctcagggactacattccctggctcctttatcctttggctttgattgtgtataggcaatgagagggtctagcaggatgcaggatggcagtaagagggagaggctgggatatttcttcctcttgcttccgccttgcttgtctgtggttctaatggtggctgtgctcctccatgctccagctccagacaggtgtcccatctcctttgcttctgccttgctccagtgacatccacttcattcccatatctccttgggctcccttgcttttgacagttccagtgcctggccattccctgttggttgttttagctctgcccacagatccataaggagcccctatattaagttattctcaattaaatcctttcaatatgtcatctctttcctgctgagacccttaccaaatcaactacttactacatgactttgtccaagggccataatcttttatggcctcaggttctccacatgcaaaatcaggataataatgttctctacctcatgaggttatttaaaggaaacggtgagatcatgtgttttgatagaatatattttaaagcctctatcatggttcttgacacataggaggtgctcaggaaatattaggtactattgtcattgcaacaattaggaaaacttctgccactatttatatgtgatagaattgagggatattagatctggaaagtagctgggccattgccttggatgacctgctcattttatgtttgaggaaactgaggcccagcatgcttgtccaagttcacacagttaattagtggtggagctaagaatagtatgagtctacattgaaaggaggccagctgtgtttacatcaattctatttaacttctttaattaagctgttgattccttcagtgacgtcacccacttgttttagaaatgagttacataagcgcgtctccctccactatttatttgctccctctgagaagagtatcgggctgtcccaaaataagcaaagattcgagagaatacccctgtttcattgcttctgctccctgctgctgactcatttactcctgggcctctgagctcgctcacatcaatcacccatcctcagaagaacacactgcgtccggcctcacaggccccgtgcagctggagctctgcaatgccacccctgggaggcttcattgcaatgcaaggaaaggccactgtcaggtcctcccctctgcacagagcatggtacccagctaatgatcatgtccagctaaaaacccttttggtttttaaaattcaagtcaggcaatcccaagaggaacggcatccaaacagatgtgtcttttaaccacacagttttaaaacaactggataaaaagaacatttgttccatcttcctactaccaggcattcaaactcagttttaaataggtatacaaatagctgggcatttcaggttgatgatatccactctcagggcaagtggctaatttccttcctaagctcgaataataaatgcctaatcatctttttatttttcctaaacagtaatgtgctctgcatccagtctgtgtctgtctgccggtgcagagctgacattacctgatcctatttcacagagaccctgtgtttgctagatgtccaaataagtggttgattcagggcaaaaatattagtcaagccatttgtttcactcagttaaagaatcagtgcaggtaaagtaggcgagtcagtagcccagcgtaggcaaagctgcgtgtcctcgaatgatctttccagccgtcattcctgggagggctgggcttttggggcactcctaaaggaactgccttgggctcaaggcaacattctctctcagcagcttctccttccccatttccagtggttatctcaactacttcaacaggcaaccttaaagccagccagaagcaattttagtttatcaagcttgaatgtgaaaaggagcaagcaaagacctgagctttctcttgtttcttttcttatgagtaacatgtgatcttttaaaaattattgtagtaagaacacctaacatgaaatctaccctcttaacaaatttttaagtgtacatgagcctttaaaacaaaacaacctgactttttaatgatcgccattctaactggcgtgagatggtatgtcattgtggttttgatttgcatttctctaatcaccagtgatgatgagctttttttcatatgtttgttggccgcacaaatgtcttcttttgagaagggtctgttcatatccttctcccagtttttaatggggttgtttttttcttgtaaatttgtttaagttccttgtagattctgtatattagccctttgtcagatggatagattgcaaaaattttctcccattctgtaggttgcctgtttacaatggatgccagagaggatgtggagaaataggaacacttttacactgttggtgggagtgtaaatgagttcaaccattgtggaagacagtatggtgattcctcaaggatctagaaccagaaataccatttgacccagcaatcccattactgagtatatatccaagggattataaagcattctactatacagacacatgcacacatatgtttattgcagcactattcacaatagcaaagacttggaaccaacccaaatgcccaccaatgatagactggataaagaaaatgtggcacatatacaccatggaatactaagcagctataaaaaaggatgagttcatgtcctttgcagggacatggatgaagctggaaaccatcattctcagcaaactaacaaaggaacggaaaaccaaacaccgcatgttctcactcataaataggagttgaacaaatgagaacacatggacacagggaggggaacatcgcacaccggggcccgttgggggttaggggactagaggagggatagcatgaggagaaatacctaatgtagatgacgggttgatgagtgcagcaaaccaccatggcatgcgtatacctatgtaacaaagcagcacgttctgcacgtgtatcccgaaacttaaagtataattaaaaaaaaaaaccctccctcccccacaaaaatgtggggcacttatagcatcgaaaaggcagagataaagaaaaaggaaaaagctaaaaagtaatttaaaagattgagaaaaccagtgtgaacatttcaaacgtagaggaaggaaactgctatgcatggcacacctactgtgtgtcatgcatttctgcatgcactaacttatttaatttttacattaaagaagtgaggtctgtgataccagagtgcctgtgtgcattggtgtaagttgttcactgcacaaggggcacagtgaggacagaggggcattggaacccagcctgtgctctgcccaacatgctgcaaactggcctggaggaaggggcatcgttttctaatttgcacaaagatattatcttagtctgggttcccccaaagcaagtgtgaggcaagaatttggatgcaggcagttttttgagaggtaattctggggagaacagtgggggaagtaaggggagaaagggaaggaaggaaggccacatgaatggatgagtggttacccttatgagcaactgaggcttaatcccaccatggaccctctaagacagtggtcatcagcttttttggcatcagggaccagtttcatggaagacagtttttccacggactggggtggtgggggatggtttggaggtgattcaagtgcattatgtttattgtacacgttatttatattatgattacattgtaatatataatgaaataattatacaactcaccataatgtagaatcagtgggagccctgagcttgttttcctgcagctagaccatctcatctgggggtgatgggagacagtgacagatcatcagggattagattctcataaggagcacacagtctagatccctcctatgagcacttcacagtagggtttgcactcctatgagagtctaatgccctggctgatctgacaggaggcagaacttaggcagtaatgggatcgatggggaatggcttaaatacagatgcagcttcactcactcaccttctactgtgcagcctggttcctaacagaccatagactggtatcagtctgtggcccaggggttggggagcccagttctaagagactgtgtggaacatgctcagagctgtcccagtgaggggcaaagaacttgcggtattcctgccatgttaatttccatacctcagaagttacgtgttgctcctagggcaccaatgccttggcacatgggtcaagcacagtcctgtggccagagagcaacctcaggcagagagacacaggagaccatctgtgtgttgagaactactgcagatgacctcaggtgacccaaaagggtatgatgggccctgctagctggaatactcagagatgtgggtagataacccacatacggacatgtgtttgttcactggacattcgtttttcaactgttccttttatagtacaatgattgtaaaaatgtcagctgtcttgcctttgaaaggagagttaaatagcaaaagaataatccagaaggctgggtgtccaaccgcattccaggcccagaatcattattttgtgtcgtttacataaattctcagttatgaatgattccattttaggacatgaataggctgaacttctactgcatatacaagtttttccagccttttccatctccctgaattagttcattgtgaaataggttgcctgatggctgaaaaagacaaaaaacttcaagagttttggcactcctcaagtcttccatgccgcctctgtttgttgtatagtattagtgaatcgcaatgtggcacacaccgatcatcctaaaaatatgtccagaaaagttgcatagattgtgtgtggccctgtgtgtgtgtgtgtgtgtgtgtgtgtgtgtgcatatgtatgtgtatgtttatacatctagcttcttcccccattctcccaccaacactgtttgggtagccagccccccatcctctctaaagcccccatgccctgcagtaaacactgaggccagggctgtgtggcaggactcccagccaagcaatagtaactcctgctgctgccttgagtaaccaggaattctccatgtctcatgagtcctgctcattgggctgacaaatggtgactgagaaatactcgccttttgtggtgtcctttgttgtttcatgtgtaatatgccctaagcattttatgtccaaagagagaaaagaagagaagagggaaattaattccaatttcagcaaggtgtgaggcaaagagtatcatctgggggagaatgaagaactatgactattcaagtggcaatgtcttatggttaattaagtctggtgttccgttttagaggtgaaaactgagaccaagggaactgaagtggcttggtcaaagccacgtggactcttgggctctggaccctgtctcctggctctctcttttgcaacaggacgcttgtgttccctctctggtcttgccagcagacactccctctgctagcctagagaagttatttcacatgctggtcgttctccatgtgtccccccagatgcatcctctgcccttctttgtcctgctctgtgcccaggaggctgacccttgggacccacttcctgtgcctcctagcttccgtgatgtgagagagaagttggagtgtttgtctccacattccttcgggtcagttctggtgttgacagtgatcacaccttcgctaatggccatgaccccagtcagtggcctccctcccgtggccgcagctctttctgggttctgctggcattgacccttcccctctgctctaagcctggggatggtacaggctcccgctgttgctagcccctggtggcttagccccctgttgcttcgcttcatcctgtccacacctctgcatgcagtcacttctctagagtcttttccgttcagcatctgagtggactgggaacttcctgccaggccagaaggatatgctgaagggtttcttcctttgacaaatggggataacaacagtctactcgtggttttagtgaggatcaaatagggtcatgtgtgcaaatgtgctgtgtctgtctggcccagatgaaggtttgtcttcaccagggatcatataaggattttcggccaatcatagcttatgccttaactagtttctacgttggcatattgcaggggcaccccaaccacccctcgctatttctcaggtcagccaaattgataccatgtagcagagccttgcagttttcactttgaaggctgtgaaattgtggactcatcccttgatctggaagcaaaactgggagacgtcacacattccagcttcatacctcaggcagctgccagcattgatctgcgaggagggccctgcctcttctgtctccacctgttacttgaaagccagagaagagtgactcatcagcggcctaatgcagcaaagaagacaaataagtctcagcaggtagggtgtccccaaccatgctccactcagagttctgagcagcagggtcagcctagggaaaaaggcaagtgggaaaagtctactccaagggcctcgtgccccaccccgctctgccagtctctgcactccgacatgtagctccccccatccgcactctcacctgccccatctccagaatactaatcctcaatcctctaaggacttaaccaaagaacatcccacatccttttaatgacagcctattaaacttggtaaaattctgataacatgtgtgagtgcctaaaacatgctggtactatctcagatgcaggaaagacaaaaatgatcgagacatgttgtcatttcatctctgccaacaaataccattgtgattatctgtgaaattaactgattacttaaaataagcattccaaacaacctgctgatcagagggggccctggtagttggctctagctgtgctttgttagtggttgagagtatggaatttggagccagtcttctctgcatttaaacttcagctctaccaggtacatgctccatgacaggaaggaagtaacaactgctctgtctggagagttgtgctggagccaactcaaaaaagctgattttgcacatctctcccaactctgtgttcaccagcatcacattggtagtttaaaatctatgacgggccgggcacggtggctcatgcctggaattctagcactctgggaagccaaggcaggcagatcacttgaggtcaggagttccagaccaacttgaccaacatggcaaaaccctgtctctacgaaaaatacaaaaaggaaaaattagtgggcatggtggcaggcacctgtagtcccaactacacagaaggctgaggcaggagaattgcttgaacccaggaggcggaggttgcagtgagccgagaccgcaccactgggctccatcaggaagacagaataagtgagactccgtctcaaaaacaaaacaaaacgaaaaaatttctatgatgtagtgaagatttacccccttcagaaactggctggcaaatgttacacattggatgggtttctttccttttcttttttcttttctttttctttctttctttctttctttctctctctctttctttctttctttctttctttctttctttctttctttctttctttctctccctcccttccttccttccctcactccctccctccttccttccttcctctttctttctttctctttctttctctctctctctttcttttttcttttcttttctttccatcttccttcctctctcccctctctctctctttctctttctctctctctctttctttctttttggcctgtggagtgagctgtgagatttaccagcacatcactgactttttacttcattcctcatctctagaatggcaaataataacagtacctgcttcattggattgctgtgagaattaaatgatacagaagatgttcatgtcacaatgtgtttggtaaatatatataatctgctcttttaattattttaatagtcaatggagtatctgggtttcttttggttaatgatgcagcaatcagctgtcctagaaattgcagactgtgctgacctggagggaggaagacccttccaaacccctatccagactcctataagactcagatttttaaaacaaagcaaaacacaaaagcaactctttgcttgcggatgactcaacttcctttttggtaggctcaactctgcttcccaggaatcagcagtgattagtgatagaaagagtagccctcatgaccccaggtgaccatcaggacgctagggcaggaaggagcctgttgattgagtgctgacctgcaaaattaccagcacaggtgtccaacaatttcattcttgagaagccagagttgagtttctggggttgctttggagggttcaggacatgctgcagggtaataggaaggacatggggtgagaaaaaggttcctgccaagttgctgaaagacacatgatagctcaacagggaaccaagagtcaggtttaatattgtttctgcaccacacttaataattgaggtcaatggtttatcaagtcctcactgagggccacagagaggacaggcttctaagtgcagagaggcagcagtaaaggctgaggctgcgggaaacataatcagagtttaaaacactaacacttacctgctggtatggttgagaggcattccaataacccttggcccctgacttttcactgtgccaaaatctaaactattacactaggtcttgaataacttttgaaaatgtgtgctttcccacctagttaaggcaaagttgcctcaaagacaaatatcacattagcacagatgctcttataagagcaattaccatcaatggtcactgcctggaagttggacctggaaatgacatgctggatggtcatagtcttgttagatgaggtgtgcgtgtgatgataagtgggaaacagcttgatttaagggacactttagtccatggccagcacagtaatgatcttgggaagcctgaagctatgtcttctgttgagcaataaggtacagggcgcagaaggggcaaaataagtcagggagtccagttaacatgtgagatggaaacttaaggatagggacagagcacgcacaaagcccagggacacagctttttgctggacattttgcctgtactaactggtaaattagactgcacaacaggaaagaagcttgtgatagcaaaaggggtcgaaaacgggaaggacactcagagggcaggaactatgacggggctctgcggccttgtgggcagcagggagagtgtatttttggcctgcgggtctcgtgagctggaagaaatcaggaaagggaagctgagcatttaatcctacatagatcacaggctaatcgtgcccatttagtgtttgaaagtgagaagttgtcaaggctttgtgacagccttgaaaccgcaggcattagaggatagaaatcctgagcccagagggaggcaggcactcccatctgcccaatttggtcttcaacagcttccaactcttcaatattcccaagcagaatcagattaagcagaagtgctcataatagttctccaatttagcctgtatcttctctctctttcttttgtcctgggggccatgtgccattaggagcagaggttgtgaatgttccagaaatccctttgggatgcaggccttcctcccatgcagaaaatgcctactgaacacactaaatgccaggcacatgccttgtactggggtgcaatggtgaggggtgacacccagagggagtgtccccctcttctgtattactttttgcctgaccttttcagtagacttcagagttggtcatcatgacttcctgaactcatctccttccatctttctctcctgagctctgagaagcaaagtcaattcaaatccaaagtgctgggcataggagtttgtttcgtaagaattcaaactttattgttttacctctaaatctggcctgcttctatagtgcttgagacttagcaatctctcactactcttagctgtttttgttgttgtggctgtcaatattatttaaaactgataaaaactgcacagggaagttgacacagtcagatattaagttgatatgcctatcattgaatgtctggagcaaggtaacctcacctcagacttgattcctaacaaacttcagtgaatattcaatttttgttttatcacaaatgtattattacacctgcctatatgggaaggtgaagatgggccagttgtttgctttgaaaggaggaaagagtgagaatgtacaactgaatgaaaaaaaatattttggccacagacactttttctcttggctttacaataataaaatatgtagtgggatttttattttgctttagaatttttagttgttttttcctttttgaagtgctccttcagaggaaacaaatctttctattgacattgaaaatgagtcataagagaagtgttgctactttccttttgagggattttttttatttagttttgtttccattaagttttagcaacaggaaaatatggactttcagcatccacagggatatgatcaaatggaaacatatgctccctgtttgtccattattacaaaccatgagaaaactcacaaatcactcatagactttctagaaaggttgatttgacaaaatatttgacaaaatagcctactgcttccttgatatttctgaaaccaaatgagtatttgtgttttgaaaaagcaaagttgattaaaaaaaaaaaagcagctgatgaaaggcccaaaatgcatatgggtcaactatgtttattgcagaaacactagagagtggatgagagatgggtcagtgggcacagaagcccacctgcaactgcactcacaccttggcctacattgccaaagagaccaatatatcagcaattgattggaaataccacaaagatgaatcacagatcaggaaagcaaatgccaatcaatgattgagcctaggcaataatatatgagctaaaggcatttatcaaacctgtggaaaattagaagacttgcctaacatggctgagaatgctacatatgaaccaacttttagaataattcagtcttttttttcagtcccctagaataaaaagggcatatctaaactcttgaatttattttgattaaatcaagaattccctcctgtatcctcaggatctggtattgagtagggacacgataaaacacttgtcaactggaaggactctatcagcagcacctgggctccatttgattttttaacctgcttagtatttccaaccgtaatgaccaaaatgtctgccttcagttacagtatttgtaccctgaggaaatgaaataatttagccccctggccctccaccccactccgttttctcagctgcaaacaaagggattggactttatctggttgctttcagttccgtaaaagagaggtcaaatccactttatgttgtcaaggattctttttctgttttgtgagatacctggtttttagattcctctccctttttaatttttctccagttcttcctgctttctgcatcctcttcctgactttccattgttttctctttaacaatcacacactagaaaatatgtagaagtgagtgaaaaatacatctcatgctctgtttagtgtatcctcaaaaagacttcatggtaaaagggtggttaggatgctgtgttctctgtgggtttctacttttattgtattataatttatattttcatgcttactacaactctggctgtgatttatttttctatcccagatatggtgaaaaataatactaatatgtgtgttttttgtttttagctgggtattagcaaaaatcattccattttccctgagacatcttgctccaaccaccttgcagtgcagctattttgattacttcatgtcactattaatcatgtgcttaaaggaaatagataaactttgaaacagaattcagctcagcaaaggtttattcattatctcctgggtgcctggctctggtgctaggtgtttagagggaacaaaggtgagtatatcagggcctatggtggagacagcaggagaagctgagtgagaatttacatactctcatgtgtgacttatgtatcaaaagaaaggcccaaagtgcttggagtattaaggcaaaggagaaatgatgtatgtgtatggaagtgatttgtttgggtgaagtccttggggtctgtgagagcgaagcctttccatatcctggagtgcttgggtgtggaattcaaatcttcctcagttggcaaaggggtaccaaatggaaggcttttacccaggaaaccatgatgccactggtgctttgggaagatgaatctggcaggagtatgcggggtagtccagggccgggggagggaggcctggaaagagcctctccgtgtcctgatcctggttgcactgcttctttgccaatccctactccatgtggttgcagcagctcacagctataaaaatgtgttgacccaagaggtttaatattaaccaaagttatagtcaaagtcaatttggaggattcaagaaaaaatctgatgctaatagagaaatagaagtcaatatttgtaatgtgagtcacaggctcaaaatagaaaagtaaaacacatcactgctacagttcccagagggctgtgggttacacagcgcagcagatctgtgaaccaggcctcaccaccctctaggtctattttaaaatttcctctggccccttcctctaattcctaaattccagagcatgatattctagtggaactcaccagatatccagccctggtgaagtcatagcttgttttgagtgggtcaatggaaaaaaaagatttttttccctagttgtgtataaccttcctctctagtgacgtggcatggaacgaacttatcatgattttattttgtagtccatacttcattctacagtggctatcactgtttaaaacttcatctcttatgtgttgcctattttgaagaaggcagaggagaagagaggaaagcagaaatattcagaatgacatatattttttgttttatcacaaaatttatatattaatagcagagaggagggtgttgtccactggaggggctatgacatgttgaggagcttctagaattttctttaacaggatggcttttgtgagcgttcatggcgtagctttatcctgactcagatgttaatcctgcacagaggcttgaatgtgttttcctgagtgtgatcagaaaatgaaaagattcatgaagataaaggaaaaaaaagagcaaaccatagcatgtatacccaatgatcagcagttactttcttaacagtgcttcacctagtttatgttgtgggatgtacaacacacaaggctaaaattagctgctcttcacccaatgtgttggaatgctatagggccagatagtatcttatcacaagtgaccacaggaaggacaatgcattccaaactgagtcttcaagggccaaggcgggtttgatagagtctgagatttataacccaggctgctgtacatgaatcctctggagggcctgagaaacgtgtgatacttagttctcccttgatttctttttattgctttgcaagaagcccagcttataaagttcagtttgaacactatctgcttcaaagaggggcctggtgatgagaccagagatgatcagataagaaggaaaaaggaagtggtgaggatgggtgcagccagaacagagtggactggcagctgatgaaccaacctgggcaaggaagtagcttgaaggctgtgtctcggggttggccatttttcctcctttctcatccggaccttgtcaagatcctgtggtttatcataagttaccaatgcccaaccagtatctgcttcctcatcagcacgatggtcatagccccatctccctcgcagcatgttttcagaagtaattaatgcttgtgagatgttttgagatcactgataaaagacattctacctgcccagggtgttattacattatcttattttcctcttcatagtcaggatcaaacccacgataacttagaaatgagacaaattagtaaaacgtggtatgtgaaggctgccttaacaattggatatgtattgaactgggcattgtacttgaattgtatacacaaaatgtggtgctgggctacatcttaagaaatcttaattactttcagattctgtcaggttacatttcatgactctacttagatctccttagaaatggtaaatcattaagagcaaggcatccactgacgttgcccatcaaaatggacttagtacctggccccagaaatgcccaaactacacatgaccttttgcgcatttatttctgtctccttagaggactgtgtatctctttgaagaataggagaatagacaggatatatagcaactggtaatttcagtttatgatgctcatgtgaaaattggattgtcaccaaaacccttcagggtacgatcctcctcttacaaaactcagcactgtacttcatgtgaggcatagattaagaaagctttttccttctccaaggaaggggcactgccttgaaagcttacgtggttattaagagtacttccatcagatctttcgaaagaaaggtggagatgaccaaagggcagaaggtcacctacgtaataagatccacatgagacaataattaaaatggaatgcttaaggaggatgcacgtgtcctgaccatataattctcgataaaattactctaaattgatctccatttaaatgagattttccaaaaggccacctcccatttcatctaaaattctttataagaaattcacggatgaaactcaggggataggaaatgtcctgaaatgaatgcgaaatgttatccacttgtgcatttttctgggaaaatagtttatccccctttccttatatttctaacaaacatggtccatgacgcttaagaaccacagtgccatgtgaaatagtatagattaagcgtgtgaaattgatacgcagtgtaggtttgtttccaaatgcagattaggcattttattttcagacaatatttagttgtgttttccttgatgccatgctgatttttattttcctgtaatcctcatccaatcacaatgttccaccaaagcctgaaggtgcatataaaatatgtgatgtgaccttttacccatttggagatatagaaaagcatcctaggaggtgtgtcaattacagcccttctcaatagagaacaaagatcatctcttggaatatggcctaaggttatggggagggggacggggacaaaggatcagtgtcaaggtggggctgaacccatgcattctaatcagttgccatttcccattctccatcccatgcaacatgcaatgctggcattttaaccaagagatagatgttagggaaaggacaggtagtgcaggctgacaccatagatcttggaacagggcagggacatacagctcagtgtttaagggcacttaaactctgagttgggagagtaagtttgggtaagacccaatgagccatgtccataagaatgtttgacctagactgaagatcaggctggagataaggagagggagtagaaattactccccagcacagttctcttaggaagtggcctggatgtctttgaaaggcataagctttaagctccccttccatcacatgaatggtgactggtgtcatgagtgtgtataccagggaatgtcccaggccacgtcttgagtgagcaagggttagctaagccatatcacgtagttcgtctggtgaggagagaaactgagattgagaaaagcaagaattcaaaggttacattgcatatcagcatggctgcagagaacagcagctatcagtggtccgaactacagggtctgtggtagattatctacagagataacaggccacaacttctcttaagtctgcatattcgtgccgcttctcccatcaacagggggagtctatttccgtacctcttgaatctgggttgatcttgagccttacactaagccagcttttgaatgatgcagaagggatgttctgggatttccacactcaggccttaagagatctggtagcttctactttaactcttactattctgagacaccacatgaaaaagcccaggctattcagctggagagagaggctaggtggagaggaaggccccggagcataagagaccacatggagatctctcaaggagaggccacaaggagaaccaaggtactccagcagccagccagcaccagggccatattagatcctccagctcagcccagcccagcccagcccagcccagctcagccgacagctgagtgcagctgcattagtccagccaatcccatgtgaagtagagacaagctgttccactcagccctgcccaaattcctgacccagaggatcatgagcaatgaaatgattgttgttttaagccactgtgttctgaggtgatttggcacacaaagccatagataactggaacaatgtctgaatggtcctggggaactcaggcagaattcaagattgtaacctcttggatatgctaagtgaggtttggaagagggaagtttagacagaaaagtgccagccttgtggtctttctggtttaaaatgaaaccccagaatctccccaaagtacagctttttggggagaagactggcaaaaataagagtgtaaaggcttttgtacggactggatatgcatatgggagacaacccattcatcttccctcttgctggtgaggagacttctaatggtctctgtcttggtcagaactggtgtaggtagccctgcaggctggatgctggcatggcaagcggtgttatttcaagcagctagtgctgttcatacaaccagctcatgtgccctctgcccagcagaagacagaggagaagcccagcccaccaaccagacactaagggaggttttgtgccagacacttggcagtcaccttaaagagacaaaaagataaataagacatagtttctatttgtgaaaagtacacgatcttgggtttcactttttttatatgtcttcctttcagagttgcccttggtgtcaaattgcatcaaatctcacctagccaaagcatggcagggattcagaaatctcttgggagagctgtcctaggccctgctggcgtctgggacaagaatgcaagcctgagtgcatatgctacagctctgtctgctggcatgagagtgtacaggtcttcgaggttttgcaggtaattccgatacctacacattttatttatttatttatgagtcagagtctcactctgtcacccaggctggagtgcagtgactgggtctcagctcactgcaacctccgcctcctgggttcaagtgattctcatgcctcagcctcccatgtagctaggattacaggcatgtgccacacacccagctaatttttgtaattttagtagagacggggtttcactatgttggccaggctggtctcaaactcctgacctcagatgatccatctgccttggactacacattttaaaataagcagatgatttatcctcagtgactcaatgaataagtaaatacttaaatattcagcaagaatttacagaatctctattttatatgagccccaagctgaaccaattgcggaaggatagaaaagtcttcttgacaagttttcctgggcactgtggtgtttcttaatttgctgctgttgtttctgctatttctaattggttttgttatctccattctttgtgttgtatttccctgaggtgtggagaagttaaggccagagttaacgtttatagcattaattcaaaccccagaagacaagagattgataagagaagaaaggaaaggtagaaaaaagattatctacaagccagtccctcctgctactctttaactgaaaccatgaagaatgaacccaagcttaatacatttgtatgccctgtgttgtgtatttgtgtgcatgatgttgtgggttattgtatgcatcactgttcctttgagaacttagtggaattccattaggttccaatttatcccatcaaacaatgtcataaatcaggaacaatttaccttcctgatctaactgggaaggactttactcagattaaaaagagttaaagttccaagggaatcactaactctcctttgttgggaaaagtgctcctaatttgacgtttcctcacattccagccatacctcatggtggaggaactaggagatttccgggtccatggtgtatgatttaatgatttgtgaaaggcaagaatgttaacttagttgattactcaaaactgactgataaggtatcagacaggttaatttgctacttttctaacctctcccagagaacttgaaccaaagcctccttctccctaggtcatctttattgccctccgcatggaaggctaagaatttttgaaggaaacaagcattttattcctgtgctttcatttgctccatcattttattccaaagagacagcctttatttgtgataacctcattatttcctcaacaaccagtggtgatgtcacagttgaaatattttgatctcagatggaaaaagaaccctggcagatagggcctgtttacactgagaaacagagcttagtgctgagggtaaagagcaaggcattctccttttaattcaaacactaacagttatcagagtgttatctgggagacaagctcctggggattctgtgatctaaaagagtggcttttgactcgtaccttgttccttacagccattgcctccatggaatcctacaaccccatttctagaagggacccaaagagcatcagtcttttcctttgcctgcagaggtttaggagatctctgtttaccttggtctgggaagcttgttttatatgtattcttgagaaggtgcttattctctgaaatgagccaataaagaaattgttgttttatatgcatttattacaggaaataaggctaaagtcaaaagttttaaaagtgaattataggccgggcacagtagctcatgcctgtagtcccagcactttgggaggccaaggcgggtgaatcacctgaggtcaggagtttgacaccaacctggccaacacggtaaaaccctgtctctactaaaaatacaaaaagttagccaggcatggttgtgggagcctgtaatcccagctacttgggaggctgaggcaggagaatcgcttgaacctggcaggcagaggttgcagtgagccgagatcgcaccactgcactccagcctgggcaataagagagaaactctgtctcaaaaaaaaaaaaaaaaaaaaagtgaatgataaattgaaatggtctcaattgcatccttgagtacttggcatttaacaaaccaaaggatattttttaatgataaaataaccctgtgagaggacataaaaattccacgatatgattctatcatgtattagagacttaaaaaaaacactactaacaataacatataagattacatttacagaattgtatacagaagatatactaataatatagacccccaatatatgtctaaacaattcaagatgatctaaacttcttttctgttcagattttattattttaagaaacacatgcatatgcatgtttagactgttagttatgcatatattttttgaatttaattgggtgagatatttgtgacaagtgaatgcaggcttcaaatgtgggttgagtgggaaataaaattcagatttaaggatgatcatctaaagctattatgtcattaacattatagcaggcacagcaatacgttaacatcatagacctgggaaagctggacagagttgggagattgtgatggtcctaaaaaaggccctgataatcatttagcatgaaattatatagccttcagtaaaaactttattataattctgtgcattaaacaaatatccaattaactgacaataagaaaaatgagaatcgtcaggtaaacccttgatcaaatctttttcacctgattttctactaaatccagagtctcaaagcagtctatgtagagagcaccctctgtgaatgtatggataaaatgcatcctcccctggtcgccaggtaaaggagctactaattctccttgcctcagggtcacacatgctaggcctcaaatccccttggctttctaatcagccttggttctggattttcattcgttccttgttgaaggtgaacatgcagaatttattctacacaatgtcgctagtgacaaacgaagaaaagaaagggccagctagaacttaacagttccaactatctcaaccttcattctactgaaaaccacagaatgcctcacttctgtagagtcctctttatctaaggcaaacagtgctaagtagcacttcattacttaacgattattaagaaatgaattctctcaacccttaggcttctttgaaataactattatgtgtcgtagactcaatggacaaatatagaaccaaatgccacccttttaacagtgctctgagactggccggggaagagggtgcttatgttgaagaagcccaggaaaagctctgcatgtgaccaggaaggagagaggccagggactaggaaagagcaggcaggggccaaaagggaagtcaaatgtggtgcactgggcatgcatctttcagccagcctggcgaaggttcaaaatgagctctgtaacctcctgggtatgtgacctgtggtgtgtacttaacctttctgatcctcggctcctcgcctctaaaattatgataataagattgccttcacagtgctgtcgtaaggattcaatggcatcatgtacgtgaatcatttagcacggtgccttagataaactcagtaaacagatagtgttatgtcaaaaattgtattacctatgttgttattattgttattaaagtatgcttcaaaagttggccctgtgataaaatacaaatagaccccaaaagaggtctgtgaaataaagccatttggaactaaggtggcatgtaagataatatatttaagagtgatttctatttattaattcattcatttcaccaatatttatttctcaaccacattattccagccactgttccaatcttttttttttttttttttggagacagggtctcactctgtcacctatactggagtgcagtggcacgatcttggctcaccacaacctccacctcccaggctcaaacaattctcctgcctcagcctcctgagtagctgggattacaggcataaaccactaccactcagctaatttttgtattcttaatagagacggaggtttcaccatgttggccaggctggtctcgaactcctgacgtcaaatgatccacctgtctctgcttcccaaagtgctgggattacaggcgtcagccaccatgcccagccagttccagtcatttcagagggaaaaacaaataagccaatagtctttgccttcaaaaagcacctagtccacaagggagacagacacatagatatataatacgataaaatataggaaataaattaagcgtactatggtaaccttaagacatggatggtaacctggaagcaagcagactagaactgtgggagacacggaagcctgcttgggggaggcatcaaatttgactttcgtaagatgaatagacatttgccagactgtacagcaaagacagaatgtttcatttagagacggcctcagcaaaattatcaaggcatgaaacagcatcatgtgtgaacagcacagaaaccacgtgaatgtgtgaggcaggttgattgtgggagatgaggctggagaattacggaggagaagaattacatatagcatgttgcaggtgtgggaaaagggggtcagaggaaaacggaggctagagatgaagaagctgttggaactagttgaactgagcctggaagaaatgggatgagatgagaggtgatcaggagcaggtgattaggtctggtcttagcaaaaggaagggcacctcatcatctgagaaggtagagaaagaggcgagtaaagacgggtgtagatgaagacaaggttatagatagcagaagacagaaggttcacctaggaagcctctaatttttgtgtacttagaagcatggttatttactgagatgaggggcgtagcatggactgatttggaggtttgaggagagggtgaaagttcagaagagtagctcaaggatctgagcatctatgaatgaatacgtcgtagagttgtacacgggcccagcggaggttaagacaacacattcgtggtggcacaactgggtaatttttctctagccatgttcagtttcccaggtgtaggaaaaataagggcaggtgacggggttgctccagatgcagtgagaataaaaaagaaagaaagaaagaaagagaaagaaagaaagagagagagagaggaaaagaaagaaagaaactaactcaagaaaattgagtgtgcttctaagaaaagagttgagatggccatatagaagacccagagaagacacaaaggcaagaggtcaagagacagtggtgacatcaaggatgacggcattgaaagaacaagcacgccatagggagggaggaagagacttgaaaggacaggaggtcacggagtaggatatcagtgttgaagttctctgatacacagcagttctggctggtggccaagtctggggtgtggctcttgaagtggtaactgcagtggaatgaaggtaaagttcatttttattttaaaaaataaaaaattgtgagggcaggtgttgaagaggcaggctgtagagttgctgtggactgatcacaagaggtggatgggggatgatggttatgattcaagtgccagcctccaccgaatgactcagatggacaaaatcacaatgccagtgacaaaggcagagaggtggtgccataggctttaacttcgaagaggaatgagcttttttgcccaagggtgaaaaagtagttctggagccatgaaactgctcttcatcatggtgacatagcacagagaatctcaggcaatgggacataagattggcgagtttagatagagaagggagagaagaggaggaccggccagagaggacagtagacagtgtggagaaggtaacagatgggggtgcggagagttctctaacacctggccacagtaggtgtggtcccaatactagaagcataggcatggcatggcggcttgttagaatgtagcacccacccagacctactgactcaaaagcagcattttagcaagatcccctggtaatgtgtgtgccaatttaaattctagaaacactcctctaaaaataggtagggtgattacggatgggtaagggaagagtaaatacaaattctttccattgatcccagctctctctgaccatgctcatatgagaaactcagcttctccaaggaataatagaagggtactctatttctctcaggatgtcaaagcaccttagaaacatccgttttaattctttgcaggcttaatgaactgttttctgtctcacattcatttatgccaggtgagagggtgtcagcaatcaaaaccttgacttcagagagaggcagaaaaggacagagagagagagagagagagagagaatgagaacaacaaaaagaaactgcctaagggcacattgcttttacacaaggagttggtggaagagccaggagacagagccagggcccaaccttctgcaccactatgtgttctgagcatgggaccacacttcctcttcagccggtccctcatggccaaaaagctgagaggaaacgatgccagggaaccggtaattgtatagcttttccagcatactgctccagttccacataacggggcatgtcaaaacctactctcccatctgaacactcagcagtgaccaaatgggctggaggaagtgagagaaataccatgaaaatcctgggctgcacctcagagactaataaataattactaatgggaaagaaaacagaggaaagagaaagagcaaaggagcaggcaggacaggcggaatggattctggcccatgagaggggaacagatgcaaacaaaaaaatttaacacaccaggagcagtgacccaaagacagcaaaagaaagagagtcaagctggctggggagactcgctgttctcacatttgatacgtctgctcacaacatgtttcagtgacttattgaagctcagaattgggctgttaaatcattcagcatatgagatttgtcctgagttaaatggattacttccctttgtaggtttttggatagtggcttattttaaaggggagaactagagggtctctgctgaaatattgatgtgagggagattttaacccaggcatcagaaatgaccgaatggagacacaggggcaggtggcatattgtaatttgtctgcctcttaaattatgtagtgtatgtatcacaatatattgaatttaaaacctgaagtatgacattcagtaaataatttacaccggctctttcattaagtgtgagctgaggcttaggctaatgaaacctgattttagttagtgcctcatttaaatacagatgcagaaaaggaaatttctttagtgccactaagacaaggcatgcttgctgtgtagaaaacttgaactgaatctttctctctctccctctctgtctcacacacacacacacacacacacacacacacacacacacaccttccccaggagtagcccaggataaaaatgaataatacattaatttttaaaacatgaagttcattcaggcttctcctgcctaacaatttctttaaaatatataactaaaaagaggattgtttcacttggtatataccattttttttctcacagaagattctgatcctgagaaatatgcctgggattttggggatgactgtgacccattcagtaaacatctataaagcaactcctctaagttgttctctaggttctacagggaacccacagggagataagtttctgttcgtgatctagctgagggagactattcatgcaggtttgcaaattgaaataaccatgcaaagcaaccatgcctacaatgttacaaccaatgtacatcttggcttgcagaaactggtcccaccaagatatgttccatgttttgcagaaaggatgaaacttgggactgatatggccaccaatatctgagcttgaaaacttcggtggaagttaatgtctctttgcactccttcatgtgtttgttatcacagtgctacttttaatatctttctttgtgagctaagtagccatcacgttagcatactgcttttaaaatgttgtaaaacctttagagaatatattcaaaaggaatgattcctccctctccctcattctttccatatcatgtctgagataataaagacataaacaaagtcaactggaacaccttccaaaaaggttgaatgggaaaaagatggctacttgtctgtaaagccccaaggtaagctatttttaagttggtgcacccaaaaccatgatttttcaccttgatcttgactaatgtaattaatttaatatgcatttgtaatagaaagaatataaaatatgtacagagttctttagtcttaaaatgagacatgaatctcttaggtcagtagccactgggcatgagcctgtgccaggtgaggtgtcaactgtatacaacggtaggggttgagagacaggaaagaccccttctggctggagtaattaaggaaagtttatggaggaaaaggtatcttgtatgagtcttgaaataagggtaggattctgttagtcaggcattgagagtggaaggcaacatacacaaaaatataaaaccgtgaaaagacaagcgataactgggaacataaagctagaagatgttgcatagggcactgcaggaagaacaagactagaaaagtaggtggaaactgattttctgagacctgaagccagactgaggaggtgaagggtgagtagtggagtccttgggaaagtgtgaagtagagaaggacataattaaaatgtcactttcaggagattgcttcaatgtggagtgcagaatttgttggagtagggagggacagtgattaggggagtctgttaggaggcttctgccatgcagttcaggtatctcttagataaaagtacatgaattaatgtggtaataacggaggcttgccatttccagcttctcgcctctaagtcaattctcaacctactgttatttgacttcctctgctgaacacattctggacagaacttattatttccctctcaaatctgctccttctcttatattccatatctcactcatgacaccaccaatgtcagccgaaccaaataatttcaagtcaatcctggctcctttctctgctgaacccttcttcatccaaatgacctctagtcttccttatctaaccatatacacatttcttaaatcagcccctcgtgacaaaccatgctatctctatttagctcatcctaccattgtacaatcacattatcctagtgtgatcacagtgatcagatctctctcatccagccatggtaaaatagcgtagtggttcaacatttgaatttcaacccaaacttcctgggttcaaagccatatactcacacctttagctctatggccacggacagatttagctctttttgcttccatttctttatctgtaagatggtaaatcagagtaggctgttaggagttacatgagctaatatttgcctagcacttagaatgacatctggcatgtcataggtgctatataatgttttctattttaattaaaatagaaaataatccacccttccactaatgcatgatgttaaccatgcctctcttccttaactctgtaggctggaatctaagctgggtaacaaaacgtagaaacttttccatggtctgacccctgcttcatcctcccatctcatctcctaccctcgcctcacagtttgtgtttagataatattgtgtcacatgaagttctccaagtccaccacactcaaccatgccttcctggttctcctccgaagagtctgcctgcttgccttgtccccatccccctctcctcagtactgcttactcattcctgaaatgccagctcaggcatcaggcatcatttccccccaggcagccttccgtgaacgtgcaggccgggttaagtgcctcctctctccacctacaagataattttatcacggcacgaatagtatagtgctgaaatcatctttatgatcctgctcccagatctgactgaaaacttcttgagggcaggagctgtgtcatattcacctctaaaccccacagagacaagagccatgctagacatatagtaggttttcataagcatttattgaagtaaagaaaataattcaacagggttggcaattaactaaatgtggaagtagcaagacagagggagattggaagctgattccaaagtttgaagtccaagttaactcaaagatcaaggtcatatttatagaaacagggaagtcagaaggaggaacttttttgaaaggaaaggaaaaaaaaaaccctaatgagttaatttttaaacaaactgagttggagatgccaacaaaatatgcagttagaaaatagaccctgtggtactagaaaaaggccgtggtaggtttgagggtcattgaatttgtcatagtttagtagattatgctgcctaacaaacagcccccaaatctcagtgggttataattgcaaaagcctattgctgctcacacagcatgtctcctgtgagtcagttgcagctctgcctggggctttgttaactctgttcaggtttacgtgtgcatctggtgcgtactgttctcatagtgaaaggtcagaataagaagggacacggagccaaccacacaagcacatttaaagtcttgctcagaagtgacatacataatttccactcatatcccattggccaaagcaagtcccatagccaagcctgaagtcagtggagtgaggaggcatggtaacgacaagggaataaaatattatgaacaaatatcgcactcagcacagtgaggacggagggaattgtgtgtgtagaccagatcatacacttaatttcccattgcgggggaaagagaaaccaaagaaggaagaaagaaaatagcataaaggtaatcagagaggtaaagaagagaactaaaactataagttataatgcaagttttaaaagacaggaatccgagagaagagaaggtaggttcattgtccaacactgccaatgtcaatgaaaacaagaacagcatgtgactatgaggaggaaaatggagccacttaagagaaaggattcattagctatcctgagcccatttctgcacagatttctggtctttcagatacttggctaatgtcgatttaaaataactttcgctggagattgtttagaataggttttcacagcaattcctacagcagctgagttgtgtggattagaaggtaagctaagagcacacaatacagaacttctaactctcatcaaatatcaggagaattgtcacaaggggcaagagacccctccaggctctgggcttgtctagagaggaagattactgacagtagctgcatgatcctagccaacagacttgctaagaggagaatcttttacaactgagaaagtaaaaaaatggagtggtagccttcatcaaaaatggagttgtcgccctcatgaaacaatcatctcaatgccgttggagttttcaagcagaatctagtccaccatacaacaaacatgcggaaaagtgcatgcactggacaaaaagaccaacagatatatctatacatctatctatctatctatctatctatctatctatctatctatctatctatctatctatctatcatcagacacacaagggaagaatgccatgtgatgacagaggcagagactgaggtgctgcagctgcaagccaagaaatgccaaaaattgccagcaaaggggcggcacaagaagctaggaaggggaggaagaaggtttttccctgatagatttcagagggagcaaagcccttccaacaccttgattacggacttctagctccaaaactataaaagaataaatttctgggccgggtgcggtggctcacgcctgtaatcccagcactttgggaggccgaggcgggcggatcacgaggtcaggagatcgagaccatcccggctaaaacggtgaaaccccgtctctactaaaaatacaaaaaattagccgggcgtggtggcgggcgcctgtagtcccagctacttgggaggctgaggcaggagaatggcgtgaacccgggaggcggagcttgcagtgagccgagatcccgccactgcactccagcctgggcgacagagcgagactccgtctcaaaaaaaaaaaaaaaaaaaagaaaaaagaataaatttctgatattttaagccacccagtttgtggttccttcttacagtggtcctaggaaactaatacacttaaatacattttgaaaagcaataaagtagcctttgaaatgtttgctgatgactattgtgagcaattttaattagtagtattctttttgttgaagttaaaaatctgtatcagtatgagagattgatcgaattccattctttatgaagatacaggaaaatgtgtgttcagttatggccacatttacctgccaatgacttgttgggaattaagaaacattcctctaagaatgctctttgtgaaacctacttttaagagttgctagtcttgtttgccttgtaaatcatatttgtattaacagtttaaaatgtagtttgtggtatatatttttggaaactcgaaggaaactcccctgagatgtttaggaattgtaactgctttaaggagagagagaatataaagattctcatttgattaaataaactacttccgcttattgtttgaaattcagcctcagtggaaactttatattccattatttgctttttcctgagaagttcttggcacattgtgaactggagggtacaacgcaaaggacattaggctttcagtctgggaatgctttagagacaggtgaccagtgcttcagaatgtctgcttggaagctatggtggaatgtttgtacaggtatataagagggcacagacaagcacaccaggatacagagagacatctggatgtgggagcaactcttatggccatttaatgcccaccatctttattttataggaaaataccagggatgtgcccaaggccactcatgccaagtatggactaggctaaattctactaaactcatcgagtgcttgctaagcacccactgtgtgcatctgttggccacagtcatttggaaattatgatatatccagagcatgtggttatataaatattgttcttacaaatctctaggtgagacaaccaagtacaaggcaggtactgctactcccccagtgtcacatagcacgtaaatggcagaagggagtccggaatccaagtctcctcctatcaacccagtaacttacacttatgttacaactggaaaaactgtgagcaccacagttcattttcacgtacggttacatacaagacacaacaatttgccctaattgtatcccctcactttcagaggagtaatcctcaacccaaactccagtctgctgaagatattctcatcaacagctttgttttattttaaaccaaggctttctttccactctgaaatgccaccagcaattataggaccagaaggaatatccatttcagttcaactgttgtcataaaatattaatcatctcggcaagtagccatttccaaactgcctgtattctgcatcgatattttctttagaaacataccaatacctgtgtatccatagagaatacaagagtttgcaaatattttgagagtttagaggctaatcactgctgagtcataaaaaaattctcttctttgttttgatgccaacagttgtgccattaaaataaaaaaactcattgctgctctatccttggtagcatggagactcatggatttcctttgaatttttcagctctactcaggagcccagttcaagggccaataagcccacctagttgaagtccctcatgagggtgccctgaagggagaatttggctggaaaaaggccaaggttagatagaaaaccttagaattaactaactaagacgtaatcaacaataataaaaataaaagttactggttttggacacgtaatatatgccaggaactttcaatacattattactctcacaaaccagggatgcttacaaattatggatgcttctcaacattttccagaaatcgatgctgtgagttttatgttactcaagtttgtccaagtagaaagtggcagacctgaagctgagagacaggagtgtacaacttaaagattccattctttctttctatgccatgttgttgctctcaaaatactacctctcacttatcgattactaatagaatagaaacttatctgcactatccttacagcactattctcatagccttcctgcttataaataggcatcatcatccttttgcaaacacagaagctgaagctgaagaagttccatttatgatagtaaaagagggtgctaacccacagagccaggtctctgggccacaaacccttccagccaggctgcctctcaatggatcaatggaagggaagctccatgcacttaggacagaaatgtcagtagctggagttcagctagtgacctaaaacgctgatcttctctttacaacccccagattccctctagaaatgcccactttccaccctcatttccttgagccccacgatggtgttgacacccccaagttggctctgttatcaaacaaattccctaaaagatcatggagaccaaggtcctgagaaatcattgcatcctgaatagcccattagttaattttaataaagtgctaagaattgttcttggcacatgaagacttgttataattattcatcatcagggtacagtggctcacgcctgtaatcccaacactttgggaggctgaggtgggcagatcacttgagttcaggagttcatgaccagcctggccaacatggtgaaaccccatctctactaaaatacaataactagccagacgtgacggtgcgtgcctgtaatcccagctaaattataaaaaattttaaaaaagaaaaattagtcatcatactatttataacaacatttctgcatagaattgcctactgccacatcaagtccacatgtttctttttctcctacctctttctttagaaatgctacctggtaagtgatcaaagatcaaagctaacactagcaataagagttattgtcataatatatcctctgatgcgctgccttgaggagaatctagcatcacttttttggtgtttctgtcaaaaattcataacttcagtctaatcatgagtaaaaaatatcagataaatccaaacagacattcttcgaaataactgagcagtactcgtcacaagtgaaaatatcatgaaagaaaaggaaagattaaaaaaactgtcacggattgggaaaaaaggtgacataacaactaaatgggatgtgggatcctagactagatcctgtaacataaagaggatgttcctggaaaaattagtacaattcacaaaaacatatgtagtttagttaacattgtactgtgaaattcaactaaagttgacctgaggatgccttcatactttgaggccttagcaaattgcaacctaacttggtacataaactaactgaaagcctaacttagttattattttgtaataaatagctttgtctcagccaatcacaggcttccagtgattattagtccatgttcaaataaggcaagcacagaacgggagtcaatcaaagctgtctctgtacctcacttctgttttctgttcataaagtctgcctccccatgttgtgaggagagctctctgaatgttttctggttctgagggctgcccaattcgagagttgttctctgctcaattaagttctgttaaacttaatttttctagtttttcttttaacaataccaatgttaatggccctgttttgatcactgtattatggtcatataaggagttaatatcagaggaagtggggtaaagggcatccaggaattcttgtactatttttgcaacttttctgtaaatctaaaattatttcaaagtaaaagactttttttttttttttttttttttttgtttgtttgtttgttggttcgttttgttttgttttttaagttttggttggtaagttgggagaaagcttgaaatcagactgaggaggtaaaaccagtcttgttgggttggaatcccagttcaaccactttgacctgtgtggcctcaaagaagttccccaaacctatctaagcttgggtttctcaattgtcaaatgtgaacaataatcgctatctcacaggtttgtcacaagtgtagacagtaacacacgtaaagtgtgtagcatagtgtttgacatacagtaagtgtgcaaactagaagctattgtcatctttaaccaatatatgtcatttttcctctgagatggttatatttttaaaaatcctcaatagggcattgactggtaacagttcattgtattgcctttctaggaatatttgcattttaataaaattagtttgatgccatgagagaattcagtagcagattgtattttctaaaggtgacatcaacaatatctcccatcgtacaatcttttcagaaactttccattcctccatcaaaggtagaatctatgtaccctcctctggtatatgcaagattttgtaaatgccttggccaatagagcatggtagaagtggtggcatgtgatttccaaggataggtctttaaaatgacatacattttagcctgttctcttgtgttgctcattcttgggacatagccaccatgctgtaataaaatctaagcggctctttaataaaaataaatagacaggcatggtggcacgcacctgtaatttcaactacttgagaggctgaaacaggaagatcacttgaattcaggagtttgaggctatgtgatcaaagtcactgatcatgcctctgcattgcagcagctcatggagaggtccatgtggcctctgaccatatccctagctgagctcccaggtgatagccagcacccactggccaaccatttgaatgaactgtcttgatagcaagcacatcatccagctcccagtcaagccactcaggtaacaccacacagagaagatacggccagccccactgcacccttctccacttacaaatttgtaagcaaaatatattattgttattttcacccattaagcttttgggtggtttattagacacatctttgtaacatatgatgacagaaaattctcatagagaagggagcaggaatagaaatgggatttttaaaaatgtggacagatttgagaattggagctaggaatgggcttgggtagacttgagaaatatttggtgggcttgaagtcggttcatcctttccacaatgcaagagaagtaaaaagtagttttgtccagcaggctagaaatgggaacaaagtgagaatatctagatggggccaatagagtagggcagggtcctggtgtggattctcagggaagatggtgtctagagtcaatatcaaagttagtccccagggctggcctaccgtagtagatgaagattggggtttgaggtgccaattgatcatgctactttttccatcttggtttaaatcagttgagaacagacccaacgagaattcaagtccagtatcagtgttttgacctccaaatgacggatttcctgtattttgcctttgagaaagacagggcttgcgtttaagggcaaaggggagctgcccactccttcacatcctcatctagaactcgcccgcaggaagacctgggtttgtggagcagacactgggcagaccatgggggtcactccctggctcacaccccaggaaggagcccccaaagttttaggcctatctctaagaggccagccccacctgacctgcaccaggagtgagaataaacacctgggagcagggacctgccagagacagggccaaaaacaaagagcccagtccacgtggagaactgactctgccccatctcaccatcaactattaatatgtcattcttcatcctgcagaggaggaattaggaaagagacaagagagaaaggagaagcttcctccccatactttctgagggggtgaagtgtcctaggtagagtctgagtcaaggctttgggtgacaagagcagtttcctaattaagtgcaggcatgtgtctatgcagcatagtggccctcaaagttcagtgagcatcagaaacaccagtgaggcttgctaaaataggttgctggactgcaccccatgagttgccaattcagtagatccaggtttagcctgataatttttttttttttaagtctgggtctccctctgtcacccaggctggaatgcagtggcatgatcatagcttactgtagcctcaaactgctgggcacaagcaatcctcccacctcagcctcacgagtagctgggaatacaggcatgaaccgttatgcacagccaattttatttgttattttttttgtaaagaagagggtctcactatgttgcctaggctagtctcgaacttctagtctcaaatgatcttcccttgtcggcctcccaaagtgctgggattacaggcgtgagccactgtgcctggttgaaaaattgcatttctaacaagtcctaggtgatgatgacactgctggtccagagccattgtacattttataattcagaagacatacacacagcttatcttgtttaattctcacatcattcgtcattgacaaatgagggaactgtggctgatgaggaatgagggtcttatctaagctcatacaacactaagcaaaagacctaggcttcaaatatgtcttatgatggcgacatgaagattcttttcactgaactatagctgtttcctggagtaaatgcaaaacatagagagaaacccaggcatcttatgggcatttaagaaacagaggtggttattttgtatgctcatcattaaaaaaattggattattgttaattttgcaattccttttgaaaaattccaaaatttcttgtaaatatcaagaaaaaaagaacaagaaaagcttgcatgtttgtttgttttatgtcaacgtagagcagcagaggtagaaagggttgagtgccctttaggaacaaccatggttgtactagcagccaccctattgcctagagactgggcgaaatctggcatcattagactaaggagttgctggctattgctgataattctttttcaaaaaatcattcatttctttagagatgaaaagccttagccaaaacaagtatatctacaacagtactatttcaaaaagtattagggaagatactttgaggatgatgagagctttatattacccttcctattgattcatttgacttgcacctgtgatgccaaactctccattagtttttcctaaccacttaattaactttttgaaaaaccaggaccaaagaccaaccattgagaaggactcgtgtaggtcatgatctgatgagggcaatttgctatgcctccttttttatgttgccaaaacgaggaccagaactcttgtggacatttccaaagattcacaccaatattatgatgtatccttatgtagttaccacaagtatttatatttccaagtagatcttgatgccttacttagcacaactgaacctattatcacaactgtttgtgacttcttggtgacctggactgtgaggcagctgctccggcctcatgaccccattttatgaaccaaagttagtagcatgcctagccagcaattcctcagttcttgtgatgtgtgtgtgcatttacgtgtgtatgtgtgtgtaaatgaaggtagaggattgaaaatacaaaagaaattttttaaaacaattgatactcttcactgaataataacatgcttataaaaagtgcacagattatttttattattattatttttttgagatggagttttgctcttgttgcccaggctggagtacaatggcacaatctcagctcaccacaacctccgcctcctgggttcaagcgattctcctgcctcagcctcccgaatagctgggattacaggtgtgcaccatcacgcccggctaattttgtatttttagtagagatggggtttcaccacattggccaggctagtttcgaacccctgacctcaggtgatctgcccgcctcggcctcccaaagtgctgggattatggacatgagccaccacacccagacaaaaagtgcacaaattattaaatgcagatgtagatgaattttcacaaactgaacacacttgagtaactagataaataaacagaacattaccagctccatggaagttcctattgtattcctttcttgtcactaccctgaccaagaataacccctatttctgacttctgacactatatatgaattttagacacatatacaaatgtatcatatagtatactcttttgtatctggcttcttttgctcaccataatgtttatgaaatatccatagtgttacgtgtatttgtataatgttgactctcactgctgtctagtgatctataagtttaccacaatttgttgattcattctactatcaatgattactcaagtaattttcagtttggagatataaatagcactgctataaatcttttagtacaggttcactgatgctcatatgtatgtgttcctattgcatataaacctgggagtgaaattgccaggtcacaggtttgcatatgttatgtttagtgcgtactgtcagttttgaaaaatagcgggctcaatttacattaccctacacacagcataagaattttctttgccctacgtccttccaacactaggtattgccagaggtttttatgtcagccattctggtgagggtatttggtaacttgttttggttttaattcacagatgttagatatttggatattgtctttgttgaagtgccagtgtaatccttttgcccatatttccatatctttcttagcttaaaatctccttctgtcttctctattttctttactccttggaggactattaactgctttccattaaaaaccccaaatatccaacagcatgtagacaaatacactgtggcatattcatacactagcacactatgcaacaataaaaaataaatgatctctgggtacccacagcatacataaaactcaaaaccatcatgacaagccaagtaggccaaatacaaaagaatacatgtaatattctacttgtatgacattctaaaacaggcagaaccaatgtagagtgacaacagatcagtggtttccgtgagtcaggaggcagagttgactgcaaaaaggcgcgagggaacattttaatgtgatggaaatgtcctgtcttgatttcagtagtggttacatgggtctatccatttattacaactccttgaactatatacttaaaatggataatttaattgtattaaattatacctcaataaagtttattttaaaagaaaccctttgggaggctgaggcggacagatcacctgaggtcgggagttcgagaccagcctgaccaacatggaaaaaccccgtctctactaaaaatacaaaattagctgggcgtggtggtgcatgcctgtaatcctagctactcgggaggctgaggcaggagaatcacttgaacccgggaggcagaagttgcagtgagccgaggtcgtgccattgcactctagcctgggcaacaagactgacactctgtctcaaaaaacacaaaaaacaaaacacaaaaccctttactgagccctaccatgtgtaacccataagatatggtgaaattagggcttttcataggccacagtgatcagtcaagatgcccgtagacccatgtgtactccacccaagaatcctatctttctagaaggaaaggccgagttgccaacacccgttgaaataactgtttttattgaagacatcacaaaaggctggttctggctaccttggccacctcataccccacaaatggttttgtttccgctcacttacggctgcctgccagtcacccagtaagcaagccagcacacttaacaagctggcccatcaccacatttaaaatatacaacgcaaacgcaggcatttccaaaccctgtgctggggaaagaaacctccccagtgagttttcccaacattttaccttttagaagccaaactgcagtcatttttccctttgactctcaagggaaatctgacagggaccacgtttcagaaaacttgtctcccatagagcaccagagctgcggtattttaatagcctctctcagcccctcccctgggaacatattattatgtgatcattagtgatgggcaaacctcactgggtttccaggtttgagtctgtgccaaaagttcagagttcttcttttcttgacaactcaaaatctcccctatttttcccttttatttattcatttgtttgtttatgtgtgctttgcttggtttcttcctatcttaccacactctccagccttttctccactttacacacagaagaaaggaaggagatggggcagaaagcatgagtttcttgctggtttctctccattgaggtgcactggatgaaacagaattgtaatcaggccccaattactggcacaaccagaaaagagtgactagacacctgctatacgcccaggaccacaattccgggggtgcccagtgagtttgtaggtgagtaaaggataaaggcttttcttagaagggttcccattccaactgggatgctgggacaaacaggccaatagatgtgttgacgaaggcatgcagacattgctccaccaatatactttaaggactaagcagtcaagtttacaggaagactgaatgcggtgcattaagaagttgtaaaacaaacgtgaacattcttcatttgtggcgacaattgctgtttctggaatacaagaataaggcattgaattcattatattgaaattcaaacactccaactgaagattcctgtctatattttcccctctagaaaatgggagcactaatatttattccatgagctatattgttggttatggagctaagtggagtactgaatttataagttagggattacattcaattcaaatccattgagccttggccacaaggctgacactcaggcctgtgtttgtaaactggacccactagccagggattcatagggtcatggggacagtggggacacatagtctcaagcccttcccatcttccattagaggaatcccagaatacaacgtgtcccatgaccttgtagaaggctgggaatgtccaggtcagaggcaacagctggcctaggagggctgccagaatttccgggacactgatgcattcagaataggagaaaagggaacattggagggggtgcctggcaggggggaaagggagaggaaagcagagggagctcagaactgataaattcagatttgtgtgtttcactcagcctgaaaacaccagtgaatcacttatgctaattcgtcttttctctttaacacattttctccagtttgtctgaaactatactgtgtctactatgaataatttcacacagttacaacacaaaatttgtttttctgcccaaaaagcagtcacttgttcttggaccagattctcccaatgtgtcctaaatcagggagatcatttctgccacggttaaggccttcccactgttttctgtgaggctgcacttcttaacatacctgttccttacagaaatttgctaacagactaagcagatttgtgtcctaatcatttttttgttttctttacagaacattttgattctcccttaacctttatcatattgattgctgttggtagacagtcttggggcagaaaaaaaaatgtgttcagaatactgtaatttatgagtattgtcattttatgattgcattgatttttattttaaaagtggtttgcaaactgaaaattgacagaaggtagaaatgcatagaatcgataatgatatcagaaatgcacaaaatatctaaaacaaggaaggtaactagatttcatctcaggtgccaaccccatcaattagtagtgactgctggcaatgttgttctaagacggaacctgaggccacttccagccttagcaggaaaaagggccaggagttgattagtaatgtctgccattgcggtgcctttatggtgagtggggaaggggatgggcaatggggtgtcagcacagacatgtatattctatttctggtcttggcaaatgttcattcaaacaactaatatgtcaaggaaattatgtgggaactgaccaaactgaatagagacctgagcgtttccttttgagtatgtggctggatcaaaacacatctcgaggtactgttaacccgacgattcctcatctatgtaatcatatttttatcctgacacataagtaaatgacttggagattggtcctagtttaagacgtaagcaataaaaacacacttaaaatttgcactggaaattgaaaatccctttcatgtatacacatgcaacatgctattcaccccctgctgccttctgcatctttctggtgccatattctttgtgcctcctagacagaagctgtggaactgatgctagaagaaagagagaaatttaaatgaagaaatgatgctgtcattatttttaatggttgatttgtttttcttgtttacctagaaaacaggtggagaatagaacaaagagatttttggcctgagccaggactgagaaaccaagtctagttagtgagtcaaaaaaagaaatgatatcccctctcttattatgcaaaatctcataaatgcatcacctgtatgaaaactccttggacaagtcttaaatcttttctttacttaaatgctaataaatttggttgctaaaatagagggtgtaggttacctttcaggctaaagcagggattatttgtttacataggatcaaaaataataatatggcatatataaatatttatagtaggtcctggaaaagtacagatgtatacaattgtgccaaagagaaaaacattttctttacagcattatattcatcagcccttgccacaataaagctgcataacaaatcaccccaaatcttaggggcttacaacaacaagcctttatgtttctcactcatgggtctgaagggcagctgggattattctgcttcagatggggagttgactagggttggctctaggcttgaggttgggttcaaatctgttccatgatcacatttcagggctcaaactgatgaggttcttgctacctgtgttatactcttcgtattgtgatcacaagagtggaaggggtgagtgaaacagccttttctgggactgtcccacagtcatttctacccacatttcactaattaaagttagtcacatggccaaccccaccatcaatgggtagaaaaattgagtttgcttctaggaaaacaaactgcaaagttacatggcaaaaggttcacaccttttgtgaaaataggaagtgccaaggaattgagaaaataaaccaacttaccaaaaatattaagaggctctatttaaaacattgaatagggaagtggtatcatgaggtaaataataataataatagtagttagtattaaaaatcaggctttggagccagggtaatctgactttgaatattggcatcattcctttctgaccatgtggcttcaacaacaggcagaccttgcaaatgctagaactggaaaagcattcatcagcaagactttgtggatatctatccctgtgctcttccacgaacaggaatcagttactctttgcttgtatgtttctccacttgggcagttcaggtttcttaaagatattatctaatcaacccagctaacgttgtgccagttggggcatataattttgcaacaggatgccactgtccagtctgtgaccaaggcatgtgcgtacttcaggttcaatcagctgtggtggtaagggccgagggggagtcatacgtaataagatttccttgacagacatggctggttgtctaccaaagcattatgctcttagaggaaagctgctgttaggctggggtgtcctttcctacatttcccggagcctcttgaaactaggttggatcatgtgactaagtttccccaatagaatggaagcagagattatatgtaccacttccaaacaaaggcatcaagaagctgatgccttttctactctctactttcccattcagtacttacatggtgagaactccaagaccccagaggagggcagagccacaacagggaaagaggttgggtaactgattgatcatgtggaaggcttcctatgaatgagacacaaacatttgaactcaacttttttttttaatatcagtcaataaagactgtccatttcacagggttggaacagagcaattgcccttaaaaagggctgatggcatagtagtcattgggattagggtgtggaatgaagcaaaacataaaaggctaatcagcagagcaaagacttcagctgcagaggtctgaacatgccccgctgggagggcctccctgatgccacactcagctgagaaggttgaattcaataggaagtcaactgtaactgccaaggagtgtggccttcataagggatgagctccaaatccacacggttgtccacatttccactgtcactcatcagggagagctttcacttaacacaaggatgtgaggatttcctttgtaaatcggttgttcctctggatatggtttctgaaatatctgtcttaaggtctaagctgctctctctttccatgagaagctctgctcacccaactcaaccagttttaaccaaattttaaaagccattgactctctagggaaggctgatttctctcttggcctccatctatagccagcactggcaccagctatacttacttaagctcactgatgaggaggaggagcagggagctgttctctcattaataaccataccttgaccccagtttcaagctcagggctttggggggtgatggtagcctgggccagaggacacggctaaaggaagtccatctttgtctgcagggtattccaaggccaaatagaagggaggaagaagaaagctcaatctctctttctctccctccctctgtctgtctctctcactcccttcctcctctctctcattttcctgacacaaatccagttatccaattgctgccttcctccagctggcgcgctacccaggcagttgaatttactccatgctccaacactttctctatgagctgtgctacaactgtttctgcttctctggttaaagacggttctgtcttcccttgcctggatctaagctgcttgcctctcattaacagagtccaacctcagcctgtgtgttgccaccacccactttcctagttccttccctttcctctgacagacacacctttatactgtagggctgacttccttttggaccccaagaatctgctagctagttgctcccagccatgggaataaaagcagagctcccttttggaactccatggtcatcgtcataaacaagaacctcccagacatcagtggtggaatgggggcctgttcagctcttggaaacaaaggctttattctgaatcttttcccgactgataaccagtctgtcattctaagtgggaagggtgggggtggcagggcattgaagagaggggaggagagtacagagcagaaagcttattaacctttccaagaggcttgtgattcaagcttgtggagcttaacattttttttctctcccaattattttaatgatgctgcagaaagtcctaacttctgtgctgagactgtgttgctgctacggtctgggctgatcacatggtaacattccgacccaggcttggtcaccccgtaagaaaaatcagcttgggaaaaccactcctccttctgcatgcatctcagtctctctctctcttaaggaaaaaaaaaagtctcctttttaagagctttgaagcttaagtcttagatgtgagctttgcttcagagtttattagttattattttatccccattcaccactccccttgaaaaagcttatgttcacccagaatggcaattatttgactgtaattcaaaccattttgtgtcatgtagatccaggcgcattgcttgatttcaataattaagggaaggtaccaaatatttttgtcgctaaaggaactttagtcacataagccagtttatcaatcatttttttctttattaatcttaatgtatccctcccttatctcattttgagcaagaaaattaagccaataacataaacttaaaagctaactactgtagtctgtactttgaacccagatacaaaagtaaacattccttcctattaggtttaagatcaagacgtattaatttaggaggttaactaatacttagcaggaggctgattgggggatggagatgtgggaggaagaaggcaggaggaaacagaggagaaagtgatttttcacttctgtgcatgcttgtgcaatcttatctgaaggcactgatacatttttagtaacccaccatgaacagcatcagagttgggataactggaaagatggagaaatctttctgcaaccccagcccccctttccatttaacaagagcaactagaccctgatgagattggagagaaatccattcttgcctggattgtcacctacacatatcttaaagttttaaccattcgtgtacatatcatctaccgatgggtaattgcacttattgtaagtacagcttggtgaattgtcagaaattgaacacccctgtgtaacaagcacagggaacatcaattgcatccctcgaaacccctctcatgcccacttctagtcattacctccccaagggtaattactgtactacacctgatattataaattaatctgcttttgaatatatcatctgttttaatgtggttttggccatataaatggaatcatagcatatatacttttgtgtctggcttctttcactcagtgtttgagaaagtcaccattgtttttgtgtgtagttgtaggtagttcattctctttgctattaatattccattatacaccaaaaaattgtatatccattctgctgttggtggacattagggcaacttccagttggactactatgaatagtgctgttatgaacattttggtacatatcttttggtaaacacgtgtacacatctttgctgggcttaattctaggaaagaaattgctggatttatggtatgcatgtgaattattttagtaaaacttgccagataattttccaaagtggccataaccaatgtatactcctgcaagcaatgtctgagagttccagttgctccacatccttgccagtacttcatattttcagtgtctatttttgctcttctggagggcacgtggtgacaattgcattgtaattttactttgcacacctcacacacattagttttcatttctctgctttagttaatttccaatcatcccctgacctaacaggagccaatctgaccatcaagtcatccctttacaaagactctatctttactgagattctcgtaacacctcctccacctacctacatggacttttcgttttgttgagctcttgttgagcttagatatggagccactccatttatactcaattagctgctgggtagtgtccatgggctacacgtttttcctgtgttgttctgtcttcccaactggagataggtttccttggctctgcagagtccagctctgcaggccctgttcacatacacaaacccactgggctaaattcagatgggcataggctatgcccctattggactggactttgtatttttcacccaatcattctgatgcccgatatctttagcctagatgcttgatattgattaaaaccactcaagaagttaagtagtgtgggaagtcaagtaatgcggaaaaaaataaaagcacagttcttacagttggagctggggttgaatttcatacttaccagtttggttctttctgatcttaagaagttactttttgatcctgagcttcaatttctacatatacagaaagaaaatagggttgtaatgaggattcgagaagataacagcaaagtgtctggcacattgtaggtgctgcaaaatttatttctttatgcccttcttctttgcagaggtcttagcctctcaggtttataagaggataaaactcaaaatgatttgtagatctttagtttggtttggcaatcaacaattcttccttgtcagcctctctgaaatcaagcagtacactaaatgaggtggtgacttttgaaataaatttaataacttcttcaaatatttttttgaaataaaattaaggagaatatcacttctgaagtttaattagggcccttaatggcaaaactttcttcaaggcaaagctagttaacagcttttatatcatttccatcttgctatctgcttggcccactatgacaaggagataccttaagtcctgctcatgcaagtggcatccttctctgctcttaagtatgcgattaagattcagacatctctgcttttaggagggtgtttggagaagtaaatgaggggagagatttgcataagaaatttcctgctcttccctggaggatgttggcagcctttttcaatgggcaggcaagctctggagtcacatactgactgccccttaaaatgacttaaggcttggaagggtggcctctatttttcttctttttaaacattgctgtgctgagccaatgtgggttggtgtatccaaaaccaatttggcaggtcattagtttgtttcctctgatagtgctacactgcaggcaggattacaaaacacattccagctggctggactttctgatatctcgaaatggttccatggcctttagttagatttagtggtcaagattctggtagatttccctttctctttccttttaatttacagccaatttcagtggaaccacaccataatacagatcaatgtattatatttatattttaaataccataggtcaaaccttgaagtagaaatcttggatattaattcttcatgcatattttttataaagtaattttcatatagatgcttgttctttgccctagtagaagaagaatgaatggaaatgtgagagtgagagacatgggaaatacatttaataacttttccaaggctctgtcatttaattttgtactaagagaaaggtgttattatcttcattttaagaaatgaaaaaaaaggctaaaagggatttcatatattattcaaggtgacatagctctgtgaagttggaattagattcttaggtttgtctagatctcttccttttctcctcttctcttccacatagaatccatgcaacagttctactctccccctccacctagaattcatgtaacctcaatacaaattattctgtattagagttagacattacctaaatggtctcaggtcctaccaagcacaggaattccctctatgaggtccatgacagctcatcaaacctctggttacctacaataatgattaactcattccttcacaggatgaccgatagccattttgcatgtcttttcctgttagacaaaattcgcttttttggtatttccatccaggggtgcacaagagcagattcacacctactgttaccaactctcaagccgattgtgcacaactcttcccaactccacacttagggatgccaatttggtggcttgaaatcagctatggtgggtgtgtttacatcacaggaattactaaaagctatagattagggcttctccctccacaagtactacccactctgttatactgagaaccacttgttaaacatttatcagcacatcattgctcccaccctttgggagtgattctgccctttggccttccacagaagaaatccaaatcttcttccgcagcagcccctcagaaatttcagaacagctctttgcccactctgtccttctatgatagcttcaaaaaaacccaagtttgagtttcaggttggtctcttagttgctgtcgaactgtgaacaaacaatttaatctctctaaactttaatttctctctatataaaatagagatggtaaaaacaatatattacctctggtgtggatgtgaaccttcaatgagacagtgggcataaaatatactgtctaacctacagaaagctctcaattaactttattattagaatgattattgctattgatcataacactgaaacacttagagttatccaggacttccagcaaacgcattatacttgtcagggtcttggcaggagcagagacttggttacaagggagttgtaacacaagggacttggttacagagagtttaatgcccagatcatgtgcaaaagagtgagaatagttgaatagttaaggaaactggtgaggtatgttgagacacccaggaactaccaacagcaagaaactgtgacctccccaaggtctaaaggcacaaggaaaaggagcaataatgccaagaatgacagccccatgggagttggagcatagataagggatcataatgactctcacacatgagacccagcaggaagagaagagggggagccatactgtgacctctctatctctttctacctgccctcaaatctcttggcagtacccctagcagccagaagccagaagccagaggctacaaggtccgggatagcatcgttccatctgtagatatcgcctcatgggacacaaaacaggatagtgcaaagagagaggactggggagaaggaagtacgaatggagaacaatcaacatttgaattttcaatctttcattcaatccattgaatccacttttggcatctttttcttgtagaagctccagactaagaaaccacgcaaaaatttaacttgaatttaaattccaggaaatgggtttggtccttgagattaattattctttagattttctatgatgtatttacaaaatcctagacctgggatttgcagagcgcctattatcctgcactttgaggatcgcccataccccaggaagaaaggtcctgtgttaccgactgattcatgttgttccattcatcattcttatcaagtgcttgccttcattttatttcctttctctttgaaaccgtgcctcttagtaaatgtcattgctgttgtccattcatatgtgtgtttcatattttaagggtctttaattgtttgattctaacagcattcccctcccttttaagctactttggaagactatttaaaaaaatctacaggatctgaaatatattaaagacttcagagttttttttcagagaatacaatgttttcatcttttttttttaagaggcattttatagctcagggaaagtcacttaaaaaatctcattctactgagataccacatgccccatttgttcagaagtcttaactgacaggaactgctttaccactcacctgtgtctgtctaaacctcccagattctaagaggtcattgactcttttcataactcactgtttatgcaaagttctgtgtcattcacacagttaataaaggtggtgtcatttagcctttaaaagctatttccaaggatcatttcttacaataatgaaagagtcaaataaattccaatgacttgagcagatagattcttgagccagtcgaacttctatatttttgatgtccatattgacatggctgtctacagaacaaggacagaagtaatgacatcccccacaagtgctcatgtttataccacagattgatttctgtccaacccattttcattcacttttctattataaattagtctaactccggtaatgtacatgagttaagtaaaacaggtataagaaagcatactttggcacacatagatgctgtaggcctatatatgtttcttacatttaatagacatgttggtgcaagacatattttactgttctcttattctatattaagaaaaaaaatattgtgagtgtgacgacaaatggcaacagaggccggtatttgggggcatgggaaaccgggcagcacatatgccatctagagggatgcctgactgctttggtccagtgcactgatgctacatgggaaggaaggcctggctggtgttgtcaaatcttctcaccctcaaaaaacaaaacaaaacaaaaaaacaaaaacaaaaacaaaaaaaacaggaatattggcttttttatataaaaatttccaaattttagattttggcaacaattttgcaaaagttaaaaagcactttttaggccaaatctgatactttttaaagctgggtattactgactggccaagagttaggagctgctaaactcagtgagacccaaaggcaaggcatctgggcagtttgacatggagtaaggagagggaatgtttgctctgattgatttccttctacaataataaaaatacagaaattgtggaatgttctagaagccaccaagaaagtactcaactgctttcagggcagtcctgggtcctgatcaccttcttccctactcctcagagtcacctcttccccatgcacagacactcttacatacacatacaaaaacacacacacacacactggttacctaaggatgcctttccttgacgtccagtctgtgtttagacaacttagcttcctgcttgggcattatgctattagaacttgaaaatatttccataacgacattcctgtttcactaaatcctaatttatccatgactcaaagtcatttaaagtcatttagccatgtgaaacctctggctcctgggatctgtatgtatacccaggtgcctctttgctagttgtataaagttgattgctgatttgtaagcactcacctggatctcactgagaacaacatcacgtctcttaaacactagggaaaatcttagggttgtgcaattcctaggattggcctggtaagaaaatccatctaaatgattgtttatcattgtgtggataaaggctcctcaaacaagggatcagcatagagaattaagtatgccagaacagcggttcccaatctttttggcaccagggactggtttcatggaagacaatttctccgtggacttggggcagggggatggttttgagatgaaactgttccacctcagatcaccaggcattagcttctcataaggagcacgcaaactagatcccttgcacgcacagttcacaataggattctagctcctatgagaatctaatactgttgctgatctgacagaggcggagctcagggggtgaagctcccttgcccactgctcaccttctgctgtgtggcccagttcctaacagaccgcagaccagtaccagtggcattaggtacaggactgtggtgggtgttggggaccagtgtgacagaagatatccttcagtactttaaggcatttcagagcagcctagtggctcctgctcctaaaagggatacttcacagtgttgtggtatctgaacgccttaaggaaacaagacaattctgaagttaggcccagagcaagggaagagggagcccttccagaggcaatcctgaggttagctccctctagcccagccaacctctagcttatgacctcatcaccatcctctacttcctctttctttgcctctgcactgtttgactggggttgccataattctgacatggcctgctggctggattaagatcttctggctttctgagatggtctgcatcctgtttgctacatctgtatccctaagctcctcatgtcaatgtttccaaccaaaatgtattaactttgaacccttggctcctgcactctactttgctaaaaggatgctggccttccttgactttgcatggagccaatttccctccccctccaagagcatctacctcatggaaggatatacaagttccttcctctgacaacaacccctcttgccaggtgctgtgccttggaaacacagtcatatttaagaatggacattgccccatcatttgcactaacttaagctgactgactacttgtgcacaggacataccagagtcagagcactggaattattattttatgtcttttcttctagcttaaaaaagatatttttaaaaactggtttcataatggacagaaagtattacgttattgacctgaaaattaaaaaaagcaaatgcttattaaggcatgttggtcactatgtgttagaggacaggaattcctggtgatgcaatcggcttcatccagcaactgagtacagaaaaccttttcatatgtgctaagctgcaatgaagcctccgtgcaaacagtcagctctgactgtggatcccagcttctctgctgaggttcagatccctcaggacagcatttcctgatggagtcagtcactcaattctgtatccaggcactcacattgatgacacgcaagcaaataaaatggtttatgaggaaagattgctaccgagtcttggtagtcctgagggtcaataaaaatgttacttgaggaaaagaatcatcagcgtaaagattaattatctgttaaatcatggtggtgagagtagctttttctattgggtgatgaatttttatgcgtgttctgacatgcatgagtttgacatattacacaattggtacgacaaaaacagagaatgcacagtgaggagcccatatgaggtgactgtaagaggatctgactgcatctgagaggcaatgcactctcttgagcaactcaactccgatgtccactaaatggaattactcctaagtgtatcacaaccatggcccagttatttaataagaaaatcatacttaatatgaatgtttaacatcttcaatataggcaaatgttttgtttataaaagtcaggtcaataaaacaacactactcctttctattttttatcataaataataaagaattgcttgtggagtatctaaggtacagtcaggaaaactgaaattactctaggtgtatcaaacagaaggaatttaatagagggacttgacagaaatatggaggagcaaggaacccatagaagggatggtgaggcaacccacatgttaatgacagcaattaacctctaaggttagcaggagtaaatggtgttaccagggccagaatttggaagctacggccatggtgaggtcttctcagtggaagtttaaatcatagaggggacaatcattgccagggatgtaatctgaagcacagacagagggggagaattaccctggcttcttccatctcccccctccagccttccaacagagcctctgtttgcctaaatctacaagaaacccagggagaaaagcagcctgagaaatgcagtttccagagcaggatatgggaattattactaactggcaaatgactaggacactggtgtctcagaagacaagtatatttgtacatttgccctagataattaacctatctcttaagtgtactttgatgagtgaattttagctccatttttattattctgatttaaaatgaatgaaggagaatcacaatcaggctgtgatgtgtttgccaataatttgccctatgagatatctagttaggtctctctgtacccatatatcttcaattttccttaaatgttctttgctgtccacctccttccattttttattttagccttgggattatccactaaacaggaacgatgatttcattcatttttataacctaatccctcagagggtgagacaagctggaagatgagggagtacctgttggtaactattttagacaggtaaatttaaattttataagttcaaatatcttactcagtactaggacgtgagtagggaaatgtctggttcaatgatataaacacagcaaacattagcccagaatgtagtaggagaaatgcaaggaaaagaagtatttcagaagcatcctgctttttaaatgctagaattttctttggtctgaattgctgacgtccatcacagttttagcaacctttttacttgctgccatggggatctgttctctgcaatccaaaacgcagaatgacttgattctgaaacatattgagtgcaatctgcttctaaacctgcaaggcatatctaaaataatgtgcatgttttattgaactgatactgccacagtgtctattatttgcctacattattctaaggacttgataaatattatcacattttactttttcaagcaatggaaggtacagatatgaggacaggtcatgtgcactggtctatcatgtctcgtcattttgcaaatgaggaaactggaacacagagacattaagtaatagccctgcagttaaaaagttagcagttggtagagccaggatttgaacccaggggttctacttctagagtctgtgttcttaaccactatgctatgctattgtcttcgatatggcaacctcaggttagtcagacctattgcatgaaggctcacagctctactagtgagcattctagcaagcaaggtggaagctgcctggtcttgcatgatttggcctcagaagtcacctagtgtaacttgcactttaatctcttggtcaaagcagtgatgagcccactcaaaactaggagtgtgggaagagtgtcaaagcgtcaaagaatttgcagccatgcttgaatccatcacactgggcaaaataccagaaacaataaccacaatatacgatacccagaatggtgtgttggtttttatttgctgaaatgaccttatggtttcctatatttggtcctcatttatctacagcaggaaatggaaggaaatagagtctttcctttaggcagttctctgttccaactggtattcttctaacgcctcccttaactctgacaaccttctaaatggcatcagacaagacttccacggactcaagtttcattgatgtagttgtacccaaacagaaaatgttctgttgcctatattcaaaacacattgctaagccaattttctctaaattctcctgaatttcctcccctgggaggattttacaactgccaagtttgaatattaaacctttaggtacttttgagtaatactcagcagagagaaaagaaaaaaaaatattttaataaggtgacgttggagagagagagagagaaagtgtgtgtgtgtgtgtgtgtgtgtgtgtgtgattctcagagaaaaatgtaggtatttctgttttaacttaactgtaaactactgaactaatttagcttaatcttttgaatacaagttcaatttatgaggccagtgactatcaaaaaatttaagctgaaaaataatgggaaaaccactcaactcaccaaaattctgtttttcattaaaatctgagtttgtgacaaatgtggctttgtaaaaaatagctctggtgaatgctactattaatgtacttgatgacatttctttatgatgttttcccaagggagcaatttgattggtatagagaaaaatttcaaaagaaggtttccttctgtgtcatgatctaagacacgaatttcacgtgcagacaaacaaatattggagtgatcaggctggttggtctgtcgggtctttatagccaaggttaattctaattacatgactggctgcaaatttgccctttcctctcccaccaatgcagaagcagacaaaagatggctattggaacacaacagttcacagtaacattctctgccataacctctaaatgtgcagacaaaaatgttaaaggggctagcaattaaattatttttattaattaaggatgggccagcatgaaatcaaatcacccaattagttcagcaagaacttgaataaacccagtcatcaggaatatcctacatggaatatctgaatgatggacggagttgaaggagttgacttaattagaaagctttttcagccttcctagggcaacgaaacttcttttaaagtctacatgtgcaataaagtaagcttaatgtagcttggacttaagcttagacagcataagaaaagggttccaaccaccacttctgggaccggaccaccaagatgtgattcccatttctactccttggagctggatggctttggataaattctgtaacccccctgttccttttatctttcttctataaaataggaataataaacatgtctactttacagtattgtgaagaggaccaaatgaattaatttttgcttagagtaatcagcacagtatgtgcttaataaacgtggttatcatgtatgctataatcggctttggctattcttaacaattcatcaacataatttctctagctaccacacgtgagcagtcctacccccagtataatcatctggtggccttggggaagtcacttattgccagtgaactttgtgggattaaaaggctattctcgcatggtgacctctgcttttaaatcaaagtagctaaagcacatggaatgctgcctggtaaataaatagtagagacgcacagtctgaagcagaatggtggaataaaacatactaataaagtttttaaaataaaaatataagaaaaaagggagagagagaaaaaaataccactagggttcaaataaaggaaagggcccactactcaaatcaacatctttaaaaagaggcaaggttggagacattagaggctctggcgtcttccccaccacctcctaaatgcaccccttgcctctattctacccctgtaacggagattagagattgtgagtgaatgcctatcttctacgggaagaaatgtgcacttggagggtatgagggcaatctggtgactatatgaagtatcttcattataaatcctaacaaacggaagagagaagattcgaatatataatacaagaaaatgttacctgaatgaaagcaatttgaactagccaatttattgaatgtgttatataatgtgttctagaacaaatgaatacatgacagaaaacacagatatatcttacaaaaattgcaacttcaaagatcaagataattttcttaggaatacaagtagaaaaagaaaactgagtatgaggatgaaaattaaaactggccatggacttagctacggtaacatctatcaccagtggtaatatagcaatgtcttcaagttatttgggatggtggtgggtaggtaaggtaggggttcatgtaaaaattctaaactaagtcaagagagcacacttacttgatgccaactgaattatatgcaaacattcaaaagttatagcttttatgattaaattgcttaatatttttaaatcactttgtggcatatagaaagtgttatgtaactgttagttaattcattaaataagaaaaaaatgaatctcatgaagtccataagctcttcttaataaaatctaccttaacaagggaagccctgataagactataaatgtgtgtgctaaacctatttacatacagaattaaaattaaatcaatgtggggccaggcacagtggctcacacctgtaatcccagcactttgggaggctgatgcaggggatgcttgagcccaggagtttgagaccatcctgggcaacatggtgaaaccccgtctttacaaaaaatttaaaaaactagccaggcatggtgatgcatgcctgtagtcatagctacccaggaggctgaggagggaggatcacttgagcccaaggggttgaggctgcagtgagccgtaactctgccactgcattccagcctgaggacagagtgagaccttgtgtcaaaaataaaataaaatggtaaaataaactaaaaaataatcattgtaagaaatatgatttcagaatgtatacattctaatttgcaaaaatgcaaaaataataatagagcaacaggatatcaggaagtaagggggcagagctgggaagatgtgtcagtgtactcatttccccacttttgtatggagaatgagtagattatatctaaagtagacaaatcatgaaatagagcttcctcttatccatgtgttcaactagtgtttttgaagaccactatgtgccaggcactgttttaagtggtatggatgtaactatggtaattcttcatttaatatcattggtaggttcttagaaatggtgactttaagccaaatgaggtacagcaggttctgtaataacatggttccattcaaagtcattttattataattttatgagaaaaaaatgtttttcttatacctctcttcacttacggttgcagtttccaagaacctattgacatggtaagtaaggaaggactttctgtacaaacaagacatgcaagatccctgctccttcacactttatcctctagtagaaagagactagccaatgcaactagttaagataaaaagaaatggatggacaggtcaatgaaagactctcaaacataagtgggatactatatgacaaatgtcatttcaaactagtaataatagataattcaataaatgtgatgggaagctggcaaatgaaaataaatttcagatgagtcacggatttaaagatcagtgattaatccattaaaatagtgtgagaaagcattggtaaatgtataatcttggagaatgaaaataccttttaatttaaggcagacagcacagaaatcgcaaagctaaagatgagtacatttaattacatcaacatttgaattttctgtacaaaaaatatataataagatcataatacagtcaatagatggaaaaatatttataacacatttctgagacaggacacatttctttaatagataaaattcctgtaaaaataattttaaaaagtaggtgtgataatagtaatacaattttttttttgcttgctttttaagttaatgaggaaaaggcgaacaagccagaaaagtgggcaaagaatctggtaaaagcaaaccgaaatataatagctagtaagtagaaggtaagattttcagccccattcataataaaaagaaatgcaagttaaaataaggcagaattggccaggcacggaggctcactcctgtaatcccagcactttgggaggccgaggtgggtggatcacaaggtcaggagatcgagaccatcttggctaacacggtgaaaccccgtctctactaaaaattcaaaaaaattagccgaatgtggtggcgggcgcctgtagtcccagctgctcgggaggctgaggcaggagaatggcgtgaacccgggaggcggagcttgcagtgagccgagactgcgtcactgcactccagcctggcgacaaaaggagactccgtctcaaaaaaaaaaagaaaaaaaagaaggcagaattgttaccttaccgttttactaacatttgatggtgtccaaagctgatgtgaattccattgaggatagagtaaatcagcacatacttttgtgaaatgcgattcatgtacaatctttaaatttttttttaatgcacattttctgacccagaaaatctattgttagaaatgtcccctctgggtatattagtaaaattgtttataaatgtattaattaaaacattcttataagagcagaaagaaaaaaaaaactggaaatagctgaatgtccatcaggaggagaaattaaattatggcaataatactgcccttaaaaacaatgaagtggatctgtatgaatagatctccaagatttatttatttatttatttatttaagacagagtctctctctgtcacccaggctggagtgcagtggcacaatctcagctcactgcaacctccacctcctgggttcaagtgattccccagcctgagcctcccgagaaggtgagactacaggcacgtgccaccacacccggctaagtttttgtattttagtagagacggggtttcaccatgttggctaggatggtctcaatctcctgacctcgtgatccgcttgcctcggcctcccaaagtgctgggattacaggcatgagctaccacgcctggccaagatatatttatttaaaaaaaatcaaaaccctaggaagatgtggatattactgactgcgatgtcagacctttgtgcaaaggtttatacacaaatatacacacatgtacatctgtgcatttgccttgattctcctgtttaaatatgcatgttagccctgtttacctttagaaacaaagtcttttattagtatttattattttattttaattttatatattttggcattttaaaaaatttttgacatgtgtatatcattattttttaagttaacagaggtcatctgggtaagagaactatgagtcattatatttttctttctttacttttctcaattaaaaatactttggctaactatggttactcacgcctgtaatcccagcaatttgggaagctgaggcaggaggattgcttgagcccaggagttcaaggcttcagtcagctaggatcatgccactgcactccagcctgggcaaccaagtgagaccctgtcttaaaaaaaaaactttaaaatattatttaaaataaaatatgatgtcattattgtttaatttttaatagtttataaacttctcacgttaaaatgagagagaattccctaaaatattcagctcttttgtaaactaggagcaacatatttggtttactatgtgagacatgtcttgggggctaaagaagactagcatttgccatttgtcttgggggtggggtccagttgcattctcctcctttgctgatggcagcctggcccacatagtaagacagtggccttcttctcctagatctccttctccaactctgaacctgcttcttccaaagcaaggcctttcaaatttattaaaaacagaaatgtcagcaagtattttctcccattatataggttgccttttcattttgttgatcctttttcttctgagcagaagcttagtggtttgatgtagtcctacttgtttatttttgcttttgttgcctatgctatcaaaaaaattattgccaagaccaatgtcaatgagctttcccccctgtgttttcctctaggagtttcatggtttcagaccttacatttaagtcctaatcttatggtatatggtataagacaaggatccagttttattcttttgcctgtgtatgtttggtttcccaacaccatttattgatgataatttcctttccccattgtttattcttggtgcctttgtcaaagatcagttaactatatgtgtgtggatttatttctgtgctctttattctgtttcattggtctctgtgtctgtttttatgtcagtaccatattgttttgattaccatagctttgcaatatagtttgaagtaagagactgtgctgctcccagctgtgttcttttttctcaaaattgctttggctatccaggtcttctgttgttccatacaaatgtcaagattttttttctatttctttgaaaaatgacattggaattttgatagattacattgaatatgtacatggctttaggtagtatacactttttaacaatattaattcttctagtccataaacacaggatagctttacatttaatgttttcttcaatttatttcatcaatgttttatagtttaaagtgtacatatctttcacctccttggttaaatttcttgcagcatttttcacagcagccaagatatggaaacaaactaaacacccatccagggataagtgggtaaagaaattatggtacatataaacaatgaactattactcagcctttaaaaagaagaagatcaggtcatttgtgacaacatggatgaaactggaggatgttatgctaagtgaaataagctagacacataaagacatatactgtatgatctcacttatattgtggaacccaaaaaaattaaactcataaaaccagagagtagaatgatggttgccagggattgaggggttgaagaaggtaatgggaagatgttggtcaaagggtacaaactttaaaatacaagatgaacaagttttggggatctcatgcacagcaggaatggtgatgggtatgttaatatgacagtggtaatcactgtaaaatgtatatgtatatcaggtcatcatggtgtacaccttaaatatatttaaactttgtcaattaaatactaaatatataaaatataagtaaatattttttaaaacaagaaaaatcccagatatgcctggaggctttcctattagggtagacttggtggggagaccatagtgctcagaaaacagtgtggagcacagcaaggaaagtaactcagaatacaattctgaaagtgttcattaaagcacactcaatgtagaattaattaggtgttcattttatggttaatccacctcactcaagttatttcaaaaagagatagaaagacaactggagaaaagctgttcacattcagttccttttgtggcttaattgaagctagaagccaaatcatcaaaacaggggaatcgcccagttttgatttttaactactgattgatatggtttgactctgtgtccggacccaaattgtaaaccccacatgttgagggggagagctggtgggaggtgattggatcatggggacagtttcacccatgctgttcttgtgatagtgagtgagttctcacgatatctggttctttgataaatgtgtggcgcttccccccacaacctctcctgctgccttgtgaagaatgtgcttgcttctcctttgcgctccaccacgaccgtaagtttcctgaggcctccccatccatgcagaactgtgagtcaattaaacctcctttataaattacccagtctcaggtagttcttgaaagcagtgtgagaacagactaatacactgatgtaggacatgaaacaagagtcaattgatctaaaagttgcttcctatctaaaagtgcttcatttgtttattgctgaaaatgaaagaggacatgtaggaatgcaattcagacatctcctggtagctccataatgaaaatcacttaaaatatatgaccgaggtaaattttggcaaatacatctatacttaaaatagccaaatagttctagttctgtctgattctatgtttggcactttgggacactgtatttgctctctaactaaagtgaggtaaatccaaatttactctgaactagataagaacactcaaatgatcagagatcttttctccctataatgctttcatgagaaatgaacaaacaagtagatttgatttctctttttctctccctccctcactccctccttccctccctgtcttactccttccttccttgatttcttccttccttccttctttgcaacaaccactccatagtgtctcaaatggtagaacaaatataatacaatttctatatttttcctgattaacagctggtacaaagataatacttggccataaacatgtctctgaggttttcattatagaaagctaaccaaacttaaaattttcaaaaataaactaaattgtattcagggatattttattataattgtgtatgaggtacatataagtaaatcataaaatttaatttgcatttcacctttaagttgttgtgtatttcatcagcattcattcctcactatattaaagtaactaacttccctggagctccatcttttctgcctacttagtagtttacttgtgtaataagacattgaaacagtaagctgctgaatcaataccaagtaagcaaaaatcagctgcaagaaatgcagatctattgctaacattaatttttaaggcatttaatgaaattatagctgttttccctaatggtcttataacttattctactctggatcacaccaaatactgcctgttagccactttatacatgcaaattggtcttttattaatgaattgtttaaaccaaaaaaatggctccctaataacctaaaaatgattagcctcactttgtaaaaatacagcttacctatttgatatacacctactggcatgaatgatcttaagagactaattttcaggatataataataattgacaattgtgggaattgacaatttggattctggaaactaaatgagtatttttttttcaagaattttctcaatctctatgcatttataagtagaacatgttcctgcttctgtattttctatgctatcatttcaactcctttttcattccttatagaccattaagttccaccagatcttaccatttcaatctcttaacagccttctccttcaccccatgcttccgctgagtgcaagtactctctatctcttgcttaaacaattataacagccttttaatttatccttctgcctgtgatctggctgtattccaagccatcatgctcacttctactgaagagatttttctcaaaagcaaagtagagcctacaaggaaaagtccaaattcctttgcccagcaaaatattggcacccctttctcctcttctgtgctgtcatactgagctgctgatcatttctttaatgcatcttgatgtttcatgcttttctgcctttacccctgctgttccttctgcctggaattccctccccccaccttgtctatctgcccaacacctgctcagttttcatgatccaactcaagtgctatgtcctcccaggaaaccttttctgaccttcagctgtaggtggtaactctattcttggttcaatttctgtaccttgtataaacttctgtttggttgatttttatacatcgccatattcatctttgtagctccggaaacttagcagtgcttggaaaagtgaaagtcattgaatgaataaataaagcaagggcaggaggaaacaggtctccaaagccaacagttttatttcatttgtggcaaagtgccattcgatttaaattcaaagccattttgataggcactatctcagttcaacagaaactccagtgttcattttgggttcctccagaagctcactggatggcaagagttcaagtacaagtaagatagagggaggtgaaaacacaattaggggaatgggaagctgaggtagggaaggcaaggcagcctgtgaaggatgcattcttaagccagttatcattgtggctcactgagtcagttcagatcatgcacctcagaattacccctcctagaggcagatggggtattcatacgctaactcccattggtcattgattgagggttgctcctgggacatattaattctctagggcatctggccagcagcatgtgggcagaataaactgcaccaaatgggaaaagcccttagttggcaatcaggtatgcactgggatggtcagggctgagggggctgtggtagaccttgacatggcagctacatctggtctttgatgccattgagtggtcattgtaaatataacaggataaaatgtgatatttctcataatctctcagcttacatatacctcagactatttgctcagttcaatattaattagggaaaggagcagaacattttgttcctcattacattaagacaatttgtgaaatatgtccagggtgagaatatccactaaaaaacactgtcaaagtgattctcttgggttgctattgttcaatctgagtatgttgtaatcataattctaaagtcattatgctcaaaccctttttgcctttgccaaattatctcacctgaattaacaggtaaccaagatgaaaataatttacaatttacaattggtcccattaaggacctatagagagacgcacatgactgacagctcaaatataactatgccaggctgctaggctttgtgtggcccaacaagctgtgaaaggcacagaaatatgcaaatcagtagatgacgaatccctaggtattaattagaacttacaaatatattattctcctggaagattttgtcttgtaaagaggaaatgaccacacagaaattctccagcaaagccaatatataaactcttcgttgattttgttgaagttctctagagaacttcaactatttaaagaactatttagagacacttttcacctactgataatgccttctttttactttcttttttgacttgcatcacctcctctgctcttgaatgtattgcttacttattggagataaatataaatctggggaaatcactcataaagaagtaactccaacagttgtatcaataactgaagtttcatttgtcaactggttatttttttttctgtgatacaatcagatcttttctgaatcctgcacttaaaacattttaaaaacttgagggcactttgaattaaaccaccaattagttttacttttttaataaacatttctgatctcaagcagcttacaatcaaggaaaggacctaactattttatatgtacttagcctcctagtaactcctaattattcaaataaatgtttttgagaataaaaaagataaaatatttcaatgtaccagtaagttaaatcaaacttaaaagcatttataaaagtttactgagatgtatcactctgatagctactaccaattcatacaaagaaagtttaagaaattaagacaattacaaataaatgtgtcaggggaaaggaagctcaagaccactatgagatagataacaaatagtgttaaaagttgcatagacaaagtatggaatgggatttcagagaagagaaagagctgagatctggaaatgtcagggagggctttatggagtgaccacaggtcctgtgtgcctgggacagttcttgttgacccctgttattccagtgtattcacatcttcacatttcactcttaaaaaaacctatctgtttgtatgacagattattgggtctcttcattcacaaagcgaaatggaaagaaacaataggattgggactgctatggaaaatggtagtgaccccgagggtaataaagggcatgagtagaagtcaccagggtggatatgaacgtcatgtgcaggagacacaaagagcctgtacttgctgtattagaattcctcttgggagataaatgagatgaagatagctgggtatggaggagcaacattgtggggggggtattcctgaagatccagctcagacagaaacaagatcttattttcctattttcaagtcactagaaatgcacttgcccattcatgttattttctattagctttccattcaaagtcctacacatatacgataactggtgtcctggattggaagagaaaagaattttccaggtatctgtcatctccacagaaatgctttgtctttgcagtgcttaggttgccactcctgtcctctttgagagtgaactctgaagaagctgtgttcgggaaggggaacatcacacaccggggcctgtcgtggggtgggggcagcggggagggatagcattaggagatatacctaatgtaaatgatgagttaatgggtgcagcacaccaacatggcacatgtagacatatgtgacaaacctgcacgttgtgcacatgtaccctagaacttaaagtataataaaaaaaaaaaaaaaaaagaagaagttgtgttctgggttggaagtgatgaccttccaacagatcactgttaagttcaaatgaagaggaaccctccagcaaatggttacagataagactttaagtccgcctcattggcgaagagtcacctctgcatagctagctctgtcccaggatggagggccagaaaccaggaaagagaaaggctgggaggctcaggtgatttgctgggatgaaagttatcttgagaataagttaatatataggaaaagtctcaggcgtttccacatttgagcaaacatcttctaggcaataactgggcttctaccacaagggctgatttcaaagatctatttgaggatgaagactccttgctatcatattgaagaaattgagaacatttgccagatgagcccaaagggccatatagtgaggagttgatcaaatttattgttcaggtggaaacttgagttcttctaagtcaactcgttcctacaagtgtcagtcatgttcgttcaattttttaaagtctctcttttgaccctagcttccctcattatttgaatttttttaaacagccaaattacatataccccaaagttattccccactctgactcagcttcctttccttccactcccacatcaaccccactagccttgctccacttcattcttcttctatatctgcaatctagaaacctcaccaaggagctgcaaacttttcatctatttgttccacactcctcaccatcatttaagactgcagatgagcttcttcttctgagaactcctctcttatgaattctaagacaaatcaccattgtctgctttttatttttcggaacactttttctgtgacatcttccatgcacttccttggcaattttttcctcttcaaatggttaagccttagctcagaaatctacaactcaattccctaatccttctcctgatctccaggccagtgcctaattatcactccagaagaactctatgaggatatttaaccagaattttctaggtacttccagaaagaatcatccctgagtctcttgtcaggcttttgctcatactcccccatgttaagggctccactagtttttgtttttgtttttgtttttttcacctgggctccaaaccctacagatactgttggttctttccctctgcaaaactctcctacccatccacaaggcacaacctgcacatcccatctccattatagctttcactttggcttatttttcatatggacattagacccccgttaccacttctgtgcatagttacaaaagctaggaactggttctactacctacagtctctcactgtactttctacagtgcgctattactctctaccaaatgtgagatctgtttttgtaacttgcatctccaacatgccattcctttagtaaaaacatttcactttggagtaggaggcaagagtcctaagatcctgtagtctgccacttttcaaatcttatgaggttggatattgtttttgtacccagagatccacaacataaggagatctactctttttcttcctccgtgcctgagaggccgacttctataggctgcagagaccgagagtctgagcatttggtgtgcaagctctgaatactcccctcctcttgagtatgagaagtatctatgaatattatgaaatgttacccctcttattgggttatgttataaggtaacagtgaaggaatttttgcagatgtaattaagattcctaatcagttgacttcgagttaatcaaaagacaggttatcctgggtaggcttaatataattatgtgactttttaaaagtagtgtctagtagtcagaaagacagtctcctgctggctttgatgaaaagagcaaccaggaatgagttctacagctgcaaggaagtgaattctgccaacaaccaccagagcatggaagagaaccctgaggcttatatgaaactgcagcccctgtcaaaactgattacagacttagaagaccctgagaagagaactaagttctttctgcattcctgacccacaaaactccaaggtaataaaatgggcttcaagccacaaagtttatggtcatttattacacagcaataggtaactaatacacttgctcttctggtcaaattaggccaatgagagatgtccacagatgttcagagagtaagagaaaagaaaggttgagatatttatttgccccgccagctccccagcttctgtcaatggcttgccttcagctgtggctttctctgggctctagcaactatcccttctgcgttcctggtttgcctacccaatgtagggccacaatacatcatgatcccttaccactttctctcaattctgcccacagttttgtacaatgttcctttgttcaactcttttcaactgcccctttagaatatgccatcatttccctactggggctcagtctaaagaatagtcttaatttctagtatagtcttatccctatccaaccccacctccaaatttgaactacctctttgtactcctcaaaacaacatcctacatttttttcacatgatgtcttggctttgagttgttaccactgtatagaattgagagaccataagcatagtggggaaaaaagccccaaactcccaaaacatgagtctagtgtaagctatgccatttgctagccatgtggctttggaaaaatgacttaacctttccaagcacagtttcttcacctgtaaaataagggtagtgacattcactgagcaaggtttttgttccacatttcagaagtgagttgctcttcattaaacctgaagcaattgtttctcaactcccttaaagttcttatctcatatgccatatattttatatgtatttacccgtaaacatgttgcatttcttccattgaattctaagtaaattatgtgcagagattatgtacttttgtattaactggagcccaataacatagtgccgtgggctttgtagttgctcaataaatatttgtagactgtatgtaaaaggaaatactatagttgactcttcacagtctatttaacagaaagtcaaaacattttaatatcattgacaaggtatgcaaatgtattagtatatgataattaaataatatgtagtggatatttaaaacaatcgtacttggccaatttggcctggcttaggctttgcatataaattaccccactccactcatccttcctattatgtctaatcaaatgcaaaataggtaaacatttgaatgactaaatgctgctcttttgctgtggctcccggggttcccatgaaagaatttcatggaggtaaagtaatcagaaccggtattgggtgttgcactagtaacaaagtgttactcatgctaaaaagccaacaggcttctcaggggagtcttattttgaagactataatcattttccagaagcatgtgctcattcaacccatatttttgaaatctaccaagtgcaaaagaaaatcacataagataaactcacatctttcgagaaccagaaccgatggccttaatttgcatgtatatagtaatacaaatttgcaaccttttgttgtcttcacacatatcttctcatttattcttcacaacctccatgagaagtcaactgttagtctctatagagtattcatgagggagccgaggctatgagaatttgttactgccatagatcagaggtccccaacccccgggccatgaatagtacttgtccatggcctgttaggaacccccaggggcaggtgagggagcattactgcctgagctctgcctcctgtcagatcagcagcagcattagattctcataggagctcaaaccctactgtgaactgcatgtatgagggatctaggttgcatgctccttatgagaacctaactaatgcctgacgatctgacgtggaaccgtttcatcctgaaaccatcacccccaacctggtctgtagaaaaattttcctccacaaaactggtccctggtgccaaaatggttggggacctctgctttagattgactgacccaactggtggcctttctgatgaaatatccactgtttggcaatataataaaagctgggagaagagaaggagaaggaggagaaagaggaggagaagaaaggcatccaaagtcctatttcttaaaaccaggccatattgcagacagaaggccaaagaatacatttgaagatacatagagtgagtagcaatcagaaactaagttcacacatgttatccatttgaccttcatcatgtcagtctgaagcaagcaaacatatatttatttaccccaattaacagatgaaatgaccattttaaagtcagtcatccatgacagaaccaggaattagaacccaggtcacccaactacatcttagagtgttatcaacatagtttacagacataacttaaggtgtacatcttaaactgtgtgacagtctaatcaatgcacaaaattcattctttttaatttttaagaagatgtagttggtacttgctgaaagcagtgatcctgatttggccaacttggcctagtttctgatataaatcactccacctctcccatcctttctaccatgtctaatcaaacaccaaaaaggaaaacatttgattgactaaatgcttctcttttgccttggctccaagttcctgtaaaaaaaacttcatccaggtaaagtaagtagggatggttatgggtgtcacccttgtaacaaagcgatatgtatgctaaaaagcaaagagggtttctcagggcagttgccacaggtttccatggaatgacaattacaaggtagatggatcacgtaatgcctgctgtgaactttacaatacatggggatcactattttaatgttgatttgcataatgtttggcctagcaagaacaatactgaatgctaatagctacagaatgcaataaaatggaatatcatgtgagctgaagtgctaaaattgctaaagtatgactgtaagcagttaatttcatcccgagtcttgtccacacacaatcaaatgcaaatttccactatctcctgagaaactgccaagagatgactgaaatggaatagcaacaacctcctttatgtggaatcattatctggtcatctttgcttttttacataacttgtctgtaccctctgatgcatttgaatttgcaacttctactatccctatcttaaacaactccccactcccacctctgccccttccacatttgctggcagatgcactaagtctgataaactcagcaagactgaatctcaccctctgaactgaaaaactttgaatggacctttgaaaacggtagaattgacaatggttagctgcaagtgatattttcaaggcaaacagacactctcccaaagtattaaataacccagcattctaagttgcaggtggaaggtagccattagtgaagagagagaaaaaaaaaagaaatagctcgtctgtatttagatttatcatttctgactattgctcttccctggaaaacgggtaggtacagtcatcctgtacttcgatcccaaatcagtctctggagactacttatttatttatttatttatttatggacttctttctttcaagcgttcgaactcatttccaccacaagagggcagccatctctaaaaaaaaaaaaatagggccaaaatttatgtaagttgtgcttggaacaagcattcagtagttcctcagaaatcatacaccctacataaaagagattctgcaatgggcagcactaacatgaaacagtgttcagaagtacccattttccctcagattctaaactgacaaggtttccacttaccaggttatgaagttctaaagctgcaagacatccttgaggtcatcacaggatatttatttattttttcttcgggtgcatccaatagttatcaacttttcctcctctttaaaagctacttaaatctcattgaagttttgttttgttttgtttttgaaatctaagtaatgagagaaacaattgttaacttctcaattaaacttgataggaaaggaaataatttcagaagccctgtgtccatgagtaggatatgttttattgcctccttgtttgcggtgcaatgactctgagtgacaatcaacttctatagcaccttttttttttttttcaggaaataaagtagcatgttcctgaataattcccccacccccttttattttcctggtagtcaggcttcctccaaaataccttatttgacctttatacctttagaaacagcaagtgcctaattcgcctctgtgggttgctaatccgatttacgtgagcggaacctagtattattttagctcccctaccgaaaaaataatacacatggataatagttctattaccagctcctgcttctgacttttttctctctgtttcgcaggcccgatagctctgggaaagcagaacttggccttttccaaaaattttctgcccttggttttggggatcatttgggcaagcccgaggtgctgtgcatgggggctcctggaatcctgggaagggcagaaagccttggccccagactcatcgtgcagcagctctgagcagtatttcggctgaggagtgacttcagtgaatattcagctgaggagtgacttggccacgtgtcacagccctacttcttgggggcctggtggaagagggtggcgtagaaggttccaaggtcccaaactggaattgtcctgtatgcttggttcacacagtgcgttattttaccttcctctgagctgctaatcgcctgcctctgagctgggtgagataaatatcacaaggcacaaagtgattgtacaataaaaaaatcaaatccctcccatccatccttcagtctgccacacacgcagtctacgttacacacatgtcacgtaaagcaggatgacatccatgtcacatacatagacatattaaccgaaatgtggcccttcggttgcatatattctcatacatgaatatatttatagaaatatatgcacatatttttgtatattggatatatttatgtaactataaatttacatgcgtatggatatgaaaataaatgcatacacatttatgtaaaaaaatttgtacacatgcatttacatatgtaaatacatacatctctatgtattaatgtttaaaaacactcaatttccagcctgctgttttcttttaattttcctcctattccggggaaacagaagcgtggatcccacgtctatgctatgccaaaatacgctgtaattgaggtgttttgttttgttttgttttttgaaatcgtatattaccgaaaaacttcaaactgaaagttgaataacgggcccagcggggaaataagaggccagaccctgaccctgcatttgtcctggatttcgcctccagagtccccgcgagggtccggcgcgccagctgatctctcctttgagagcagggagtggaggcgcgagcgccccccttggcggccgcgcgcccccgccctccgccccaccccgccgcggctgcccgggcgcgccgtccacacccctgcgcgcagctcccgcccgctcggggatccccggcgagccgcgccgcgaagggggaggtgttcggccgcggccgggagggagccggcaggcggcgtcccctttaaaagccgcgagcgccgcgccacggcgccgccgccgccgtcgccgccgccggagtcctcgccccgccgcgctgcgcccggctcgcgctgcgctagtcgctccgcttcccacaccccgccggggactggcagccgccgccgcacatctgccgccacagcctccgccggctacccgaacgttctcggggccagcgccgagtggatcaccggggaccgcgaggcacccgcgcgccgcagaccccgcgcgggctggagcacccggcagagcgcgccacagcgccgtggcctctgctgcccgggctgcgccagagccgcggacgggcgcgcagagcgccggggactccggagccgatccctagcgccgcgatgcggagcacctactgcaggagatcgggggcctgggacgcgctggccgaggtgtgatcggaccccaggctagccacaaagggcacttggccccagggctaggagagcgaggggagagcacagccacccgcctcggcggcccgggactcggctcgactcgccggagaatgcgcccgaggacgacggggcgccagagccgcggtgctttcaactggcgagcgcgaatgggggtgcactggagtaaggcagagtgatgcgggggggcaactcgcctggcaccgagatcgccgccgtgcccttccctggacccggcgtcgcccaggatggctgccccgagccatgggccgcggcggagctagcgcggagcgcccgaccctcgacccccgagtcccggagccggccccgcgcggggccacgcgtccctcgggcgctggttcctaaggaggacgacagcaccagcttctcctttctcccttcccttccctgccccgcactcctccccctgctcgctgttgttgtgtgtcagcacttggctggggacttcttgaacttgcagggagaataacttgcgcaccccactttgcgccggtgcctttgccccagcggagcctgcttcgccatctccgagccccaccgcccctccactcctcggccttgcccgacactgagacgctgttcccagcgtgaaaagagagactgcgcggccggcacccgggagaaggaggaggcaaagaaaaggaacggacattcggtccttgcgccaggtcctttgaccagagtttttccatgtggacgctctttcaatggacgtgtccccgcgtgcttcttagacggactgcggtctcctaaaggtagaggacgcgggccagggcccggggtgggtggtgggtgggagggggatttgggcagccactgcggtagagcccttccttacgtccaggccagaagtaaacagacccctctccagtccacgtgcaacggagccctgcaggggctcccacttccagctgccccgggcgaccgtaagcctcaccctcccggcccgcactcttccacccctctttcttcccctctccctggaatacttttggagctgttaacacttagatgaggtgttttatttatttatttatttatttttaatttttttaaaaacttttttgggtcaaagaaatccctttgagagggtagcccctgggtttcacccgttagctgagaacctgtccgctctgccatggtgatctccattcttcaagtgtttccgggagacttggtttctttgctcagagccgtgtcccatttaggaaagtactaggagtttggggttctccctacttgtttccagaaatgcgaggggtcagtactgaaggatcacttggtactgtgtttttaacagctgacacgtgcattaatagatattcaccatttacgtaatcccgggaagatacatgtgtatcttgactgcactgtggggatgcgggatggagctgcctttcgagacacccctgagggtaggggcctgggacacaagtcataagtggcttcagaagttgtggccttgagcttacagggtctggaagctataagggtgtgtgtgtgtgtgtgtgtgtgtgtgtgtgtgtgtcaggaagttctatacagtgcctctaaggaagtcacatgcaccatttatgtgtgtttatatgccagacagcgctcagcactccgcatttgggtttgtataggggacgcagggtgtcagatcaagcggtggttttcccaggttcccggcattggctgtcagcgctgtgtcacacacaaaaaagtgacagtcattggcgctggtttggttgggggggagggcaaatcccaaatctgatgtcagacgagctaagcgttggatgggagcgataaatcatctggttcaggaacttgggacccttcattatcccaaacgtttgagcttcggtcggtcttacctagactcgtgagtgtgccaagccaggagggcatcctggaggaggcacgccagccaaatgggagaccgggccgcgggggcgcgaggggggaggactgggcggggaactcgggtgactcacgtcggtcctgtccgcaggtcgaccatggtggccgggacccgctgtcttctagcgttgctgcttccccaggtcctcctgggcggcgcggctggcctcgttccggagctgggccgcaggaagttcgcggcggcgtcgtcgggccgcccctcatcccagccctctgacgaggtcctgagcgagttcgagttgcggctgctcagcatgttcggcctgaaacagagacccacccccagcagggacgccgtggtgcccccctacatgctagacctgtatcgcaggcactcaggtcagccgggctcacccgccccagaccaccggttggagagggcagccagccgagccaacactgtgcgcagcttccaccatgaaggtgaggcatggagcagggcgtgggggcggggagtcaccctgcaaagccctccaccgtgggcagactgcagccgtccctgtagaggcagcttggccggggcaccagcggacgtttccactcttgcttctgtactatcgtttctgaatctgattttaactcactgcttgtgtggtgggggagccagggattcccctttagtaactccgcaccctcttcctggcttgcagccagaagagctactcctcctggaagaattggagagaaatcaagtgatggggaagatgagggcaaaaggcatgcctctagtcagctaaacgtgcaagaattccacagagggaaaaggagaaaaagggaggcagattgagatttctttaagtctgtttggaagcttttgctctataaatctgccgcttaagccagggttttagggtagacagagccaagggcagagttttcagagatagtattgaaaaatcaaagcccagggccccaaagtctttctaatttatagttgatctgggcctggtttggaagattttgaatcccaatctaatccccgtgggagatcaatactacaatcaatcttattgtttccacaatgactttcttgtcctgtgcttaaatctgagataggctctgagtagagacaaggcaagccttcagataaaagcgtttgtagcagctgcctgtttttttttcatgtgcaccgaaatgtggatttttttttcttttatgatactacatgtggtttttctaaggtgggatatttctgcttgtttcatcagaagggcatttagtggactggaaatgtcttacagcagctattgaggtctgctgtacctaagttcttagagcaattagtcaaaaatatgttccacttcaattctttttctacacttttaaatgcttctttggcttaatacatttaaaatagagcatgggtttcttcaattcctagaaaagagtacaaaagtgtatatcacagagcaaccacttggcagatatttggggagttgggagtgaagttctctttcttgcctttccctgcttaggtggtaaatttcaagtgggaaatttacactgataatagactaatgggaaatggcacttccagatgttttctcccagtgtgaagggtgacttatacttgtgagagtatttgttggtaatgggaataagtcccaaaggcaagccacatagcagaagatacgttctcattgaggcagctacacattacgacggggacactgaattgatcatcagttcatttacaagcacatttctaagtgaggtgctctctgctagcagaaatcagatttgaaaggcagtaagatctcactccactctttcagaattcatccaatgaaagcagaaatcacctgttgtcatatgtaaaatttgtgtgtatgtgtacattctgccatcttaaccctgaaatgattatagatccagctaatcattcccaggtaatgctgattagaatacttttttttttgtataggaatgtaataagaacaactgttttagacacctcttctggaaatttagcatggaagctctcaactttatttttaaggcctggaagatgctgtgtctctgttacaacttaaaaggaagatcatttaagttagttaacacctaaaacattccattgtgtgaggattttatcagtgatgtctgcatattctcatcattcatctagaagtggtttgatcagaactaaacaggctacacgttattcaactgtgttattttaacttaaaaagcatgcttgagtttataaaatcagaatttatatctttgtgagtgtaaatgttacctgagaaacagtacagaagtgaccaacttgattaaaatcaacttgtaataacttcaggtcttaatgcagttagataatggagaaaagctatgtaattttgccccaaatttcaactaatccatttcttgtctcattatgactaatatatcatccttaatctggatggatatagcacttttttcaagactaatcattgttgtatacacccaggatttgcttttgataaacatccttgtgccatgcatgccacgaaaaaagtttttggtaaaccatgtgatgaaggttgctggctcaagaacagaatttagtttctacagcattaatgagcatttatttgaaaaaagaccataaagacccaatcataagaattacctgttgggttttctttgtaggtgtgatcgaatggtttggtggaattactcgacgagatatcatgatagcattctttcaaccaatatgagtataatgcgaccatatcataggggatctgagacagaattatcagttgtatttttcctattgaattttgtctagtcctttctccagtggcttttatttgggagaatatcagctttgctaaaatgttattgttttcaagatcattaaaaagtgcttcagctacatagacctttggaaactgccattgaacatagaaaagtcagttctgcaagtggaaagagtgttttgtgtattgctgtagttggaaacacattgaaactggttgacttcactggccctccaaaaagtctttatgcttttttgtcagatgggagagagaaagaccaggtgcttcttgttctcctcactctgaaggacacagtcttctttctacatgaaataactggattatttgcctctgtgactgaagctttcaaatagagattaaccctctttccacaaatataattattatgaaaatatccatataatagaaaagttcaagaaataactattgccctgcattagagactttgtggcacaaattcccccgtgcaaacaacagatttggacacatagatccaccaaaaccaatacttacctggtatggttccctagtggccccaggtatttcattgtcattacagaggccacattaagtaggaaaattactctatttggaaatggttgttgagattgaggctttggtgtccagtgatacttccttggcactgacattttccgttccacctgttttttagtggttcccctaaatttctcttaatccctttgcagtgaactattttgcgttcttagacttgctctttgtgtattttcactgagacaataagagaatatttcatcattccgaaggtgttggtgttaagggtgggcagaggccaaatcagggttgttgatgacaaccatgctctctattcctttatttgccattcccttgttgtattttttttaaaatggaatgtttttaaccttttgtatttgatattttttttctccttgatcagttgtctgttattttattatctggaaaatcttatattatactcagcctctttcattttgtgttagggcagtgacttccagccttactgattgccagcatatccccaggttttgttgttgttgttgttgttttactggagattttttagcccaaagtgtgttttaaaatcctcgaagcataacggtaacttacttttttgataaaacttaccatactttatttagaacaaaagggcagccacaaaatagcagtggctccttataaaatagacacattccagtgggccccgtcacttttctgctcatttctgtctgttctgtccatcatacctaagtcatatatttctgttcatttagttgggacagaactcacccaatgttatcattgtactaaatataaatgtgcccctaatggttttgacttttgcttaagtttttgagtcctcatgtatgttaggtagtgccatctagtagccagaaatttgggaactggctgggcatgatggctaatacctgtaatcccagcactttgggaggcttaggtgggtggatcacttgaggtcaggagttccagaccagcctggccaacatggtgaaaccacatctctactaaaatataaaaaaatagccaggtatgatggcccatgcctgtaatccgagctaattgggaggctgagatgggaggactgcttgaacctgggaggtggaggctgctgtgagccaagattgtgccactgcactccagcctgggcaacagagtgagaccctgtgtcacaaaaacaagaaacaaaacaaaacaaaagacaagaaacctgagaagcgcagtagattcaattatatatatctacttttaatttgctagctctgtgaccttaggaaagttacataacctctctgaactgcaactgtttcatttacaaaatggagataatgatagtttttctctaattggtttgttgtgagataattcatataaagctgatggtgccagattacactcaaaaaaagcattcagctgtcattatcattatgacttcttttgttaatgttatagcctttccttctctagggaaaaggaggccagagtggacctaggctgactgagagaattcagctcagtcttttgaattattttgaggtagaggaatgattgatatagtatagattattaaattaggacttcacttttggagaaaagttcagatatcattgttgtcttatttttcttcactttcccacatttttgcagccatagctccatccatttggttaagaacttagaagctcacaaactcgggtcaaagacaggtcgaaatcctcaaatcccttaagaacttcagcttattcaggaagggatatttacagaaaactagcaattgtataagtctccaaaaaagcatacattacttgaggatccatatatttttggcatcctcagggttgctgtgatgatttatagaaggtttgtttatttaatttactttatttcaaataggttttaatttttgtacccttaagaaaagattcgtactcttccctggcagattaaagaaaatgagcgtatattccctaaccttggccagttactttcctgggtttgagggtttctgtgaacgtctaacttacctctgtgacctgtttctgcaaccaggggtgttgcaatggatgcttttgtcttgaggatgggacctttcaagaaacagattcactgaggtgcagtgggaaggtcagagaaagatcttcgtatcgcctattattatttgctcgtctattttttctcctttcttaaggccactaactgattctcctttgctaaggctgcctacttccactgagaccttgaaccacatgaaattgttgttgtctgtgtttctggtcaaatagtggcaattttgtatgattcaatcttgtcatttaattttttgggaggttattattctatttcataccttttttatacccatcttctttacttcatttacctgtccctcatacttgacttgtagcttgtcccttcactgtcatcgtctggccatgtgggtgtgtacgtgtgtgcgagagagagaatgtgtgagaatgtatgtttctttatgcattgggatttagggtttttcttgcaattgtgatttctctgggcacttttgttaatatagctagtcagcgagtgctctagataattttccttgcctccccctctttgaaagaaaagagggtgttcttagatgtattcttatcagataagccagtagctcaggtgctggtctggctttggtgtcattggggtctgaggttgctgacttttaccttctctgctgaaaaattaccttcagcagaaacgtctgaattgcaaggagaaggagaaaaaaacaggccaaacacagtccttggtactccttgggagccactgagaagagtccaggttcaaatggtcagaaggttattttaatgattgtgtctggcctaaagtaccattagcttccagtggagtttagaatgtggatggatcctgaaaggtattccccagaggtttggattaataggcacaagggaaccctaaaggactctattggcctgatactccccatatccacgtagaagagctttagaagaaccttctgttctgagaccctggctgggcccacccagagctggcccattcaactcttactcctttgccaccactaatggttcttctactagtttttatattatttaacaaaaaggcactttaaaaatgcactcctggcaatctatactggaatatgaaaaacatgctgcaaaaccttgacactccaagtgtggtcttacagttcccagaatcccctccttgaggagctgctagaaatgctgaatctcaagcatctccccagacctactgaatcagagcctgcatctgaagctttacggtgtacaagctgttttatgtgaaggctgaagtttgaaaagcactgcattaaagcgttagtttggtataaactgccctgactgaacttggtgtgtccacttagcttgcatgatgactgttgctttgatgatgaaggcttacacgggtagatcctttgagtgagtgatctgacatgattctcctttgctaaggcatctagattcagtgcacaacttacagctgtttgtctttaggggaaatacaactgtaaaattaataaaaacatagtctcttcttatgataacatggaacgatggcaaaatagattttgttagcacttgggtaggaattctgaatgaagcaggcaaattctgttggcagtgaaatgataggatgtggtaaagttagaataaaataaacttaaatgtctcaaactctcatggtatatactaccagtttaataataatgttgtacctttgatgatttgcagactacaagcattcaaggtgctgtgttatatattacttgcttggagaataatacttcttaaaaattgaaattcagaaattttaaatcagacaaagcttttgtgcatggcccacttaaatggctattttgaaataatgatagtggatatagaaggattattctgtaataggatgagactgttccttttgtcatggagatcataatcatatttttgtaaatttttattatttttttggttttgtgtccatcctgcacactattactgggtaggtacatggttttttaacatggtttatctttcaaaactataaaggcattgcaaacagaagacaggtcatttatttttcttccaaaagcatctaaaatgagattttgatatttgaggtcataaagaggtgagagaacagacaacagttgggaaagctatttctcttgaaattgtttggccttaattactacagtgtcctagtaccacccatacgtttccaaagaagtagatccctgtaaatgcctttgtctctggacttttgagtaaaatagtagggtgtgctttgcaaaatgtcatcgttgatgttgagtttcagagtctttaattaggaagctgaaatctgtatatcgagatttgtaaatcatctaaattgcagagtaatgttttagaatactgcttaagggattggcattaaagccttttttaaaaaagaaatgcaataatttcctcaaatcctcactcattagacctctactaactatagtgctgacttttttttttttttaccctaaagtctggaattccaaagaaatgcttcaccatttcccccattattatagccacctggaagcagtattcatgtattagatcaaaaacacaacaaagaattatgaaaggttgtttcctggtatgcaatgcatgatgacatgaacttacagaacagagagaagggaggctccatgtttatttaaagaggaaatttttattttctggttacctacttttacatgggttacatcaaatcccacgatgaggtttaaaaattctcatagataatcaaacgtcattacttggcttactgaaattcagacttttcttttttcttccctgtttttctctatcaaattagaatctttggaagaactaccagaaacgagtgggaaaacaacccggagattcttctttaatttaagttctatccccacggaggagtttatcacctcagcagagcttcaggttttccgagaacagatgcaagatgctttaggaaacaatagcagtttccatcaccgaattaatatttatgaaatcataaaacctgcaacagccaactcgaaattccccgtgaccagacttttggacaccaggttggtgaatcagaatgcaagcaggtgggaaagttttgatgtcacccccgctgtgatgcggtggactgcacagggacacgccaaccatggattcgtggtggaagtggcccacttggaggagaaacaaggtgtctccaagagacatgttaggataagcaggtctttgcaccaagatgaacacagctggtcacagataaggccattgctagtaacttttggccatgatggaaaagggcatcctctccacaaaagagaaaaacgtcaagccaaacacaaacagcggaaacgccttaagtccagctgtaagagacaccctttgtacgtggacttcagtgacgtggggtggaatgactggattgtggctcccccggggtatcacgccttttactgccacggagaatgcccttttcctctggctgatcatctgaactccactaatcatgccattgttcagacgttggtcaactctgttaactctaagattcctaaggcatgctgtgtcccgacagaactcagtgctatctcgatgctgtaccttgacgagaatgaaaaggttgtattaaagaactatcaggacatggttgtggagggttgtgggtgtcgctagtacagcaaaattaaatacataaatatatatatatatatatattttagaaaaaagaaaaaaacaaacaaacaaaaaaaccccaccccagttgacactttaatatttcccaatgaagactttatttatggaatggaatggaaaaaaaaacagctattttgaaaatatatttatatctacgaaaagaagttgggaaaacaaatattttaatcagagaattattccttaaagatttaaaatgtatttagttgtacattttatatgggttcaaccccagcacatgaagtataatggtcagatttattttgtatttatttactattataaccactttttaggaaaaaaatagctaatttgtatttatatgtaatcaaaagaagtatcgggtttgtacataattttccaaaaattgtagttgttttcagttgtgtgtatttaagatgaaaagtctacatggaaggttactctggcaaagtgcttagcacgtttgcttttttgcagtgctactgttgagttcacaagttcaagtccagaaaaaaaaagtggataatccactctgctgactttcaagattattatattattcaattctcaggaatgttgcagagtgattgtccaatccatgagaatttacatccttattaggtggaatatttggataagaaccagacattgctgatctattatagaaactctcctcctgccccttaatttacagaaagaataaagcaggatccatagaaataattaggaaaacgatgaacctgcaggaaagtgaatgatggtttgttgttcttctttcctaaattagtgatcccttcaaaggggctgatctggccaaagtattcaataaaacgtaagatttcttcattattgatattgtggtcatatatatttaaaattgatatctcgtggccctcatcaagggttggaaatttatttgtgttttacctttacctcatctgagagctctttattctccaaagaacccagttttctaactttttgcccaacacgcagcaaaattatgcacatcgtgttttctgcccaccctctgttctctgacctatcagcttgcttttctttccaaggttgtgtgtttgaacacatttctccaaatgttaaacctatttcagataataaatatcaaatctctggcatttcattctataaagtccaacctgtaagagaaaatggtgcatttgtatagcgcttacaatgatgaccttgtgtttgcatttttgtttctgaagttatatattttagagggggtgggggaaaggtaatgaatggctggaaaattgcaggcaagttatttgataagtcatatttgcactaaaggtgttaccagtgatttagtatttttcaaatgaacttctttggggcagaaagatttaagggaaaactaaagcctacaaaacaagcaaaacctggataacccgagataaagtttcagagataatagcccatgcaacagaggcaacggtgccagaaaattagaaagggaaagtgtcggagatcagcttctataagaacatctgccagttggactgacgcccaaacagaatgaagtcaaattaggctgctcagattgaacacttaccagagtgtcagggcttctgtaccctgggttagaatcagaccaaggaagggttcagcagatgttcataagagcagggcacccacaactacccactattttactggcagtattttaggtcagtttccaggactttgcatcccctctgatcctgccatgcatgattggtgaaacctacctctaatctccttggaattggctaaaaaacagtgtgtttataatggaacagactgttataatcaaattcttcctaggaattaacttttgatgactatgagcttagttacagttcggaggttatgaggttatgtaaaccttatctttaaatgtgcatgacagttatcttttactaatgctggttaacttttaaaatcttgcagctcctttttatctctagttctattgttcttgattaggtgagaaccattagatcatacccaactgaggggattggggtcttgtttgttctccagctgttcttcaccctctattgccatggacatgaaggacagactgcacggtcttaacatgttaaaacgaatgacccatgttttctcatattcacattctctagatgagagcatgagagtatagcacaagaatttcatcctttggcagttccatccacccttttgatttctctgcttcattggttctaatattcttggttaaaactgttttcaatggtgtcgactaaaatgtgttatcttgcatatgcgtatttaatatataaaacataaaatacataaatatacatctaaagatgtatgtaatatgtagtacatatgtatagatgctggcattttcagtttagtttcagagattttataatcagacactctgaccctcttggaagctcacatgagaaacaatatttttacaaacatcctacattgttacagacattttagctcacagtcttcattccgaggaataaagagtcaaaatgaacataacactgaatgtctttaattgcactcactattctataggatccttggaatcatttcagagttggctttaaaaagtccacacatagtcatttctgaattttcaggggcccgcctttcaaaatcggttaaactgatcatctgtttttgtgcttgtctcgactgcatgtgcccctctggcatggttttaacctgtatggcacgtccgggttaccatgttcattatttgccttcaaaaattaggaaaagagagtgtgggcagcttacagatctatctgtgcttccatcttttcataatttctacttaaatcgcagctttaaattgtaccttaagaggtcaagaatggagagatgatctgtaaacctgatctatataacaagctgtataatcactacattacctaagcaatccatattttttccctcaatttattactggagagggaaaatcatgtgcacaattcaaagggctttcaaaaatagcatatttctatgctactggcatattaatgttaagattcaccgaatgtttacgtgccacagcctccttatctgttctaaggcaaaaggaacatagccttgcagtcaagagcaattaaagcctatagtaattgtggcatagattcataatccaagaaaagttaagaatgtcctggcgccatttctcttctgttttatatttatttatttatttatttatttatttttgtgcagggaacgggtagggtgaaatgggggataagatgcaggtctgctcagcttgggtaaattgcttttcctctttcctccaccctgctgacataaattacagccttttggtattctccagggcagaattttctgaccatttccctggcttgcaaacttcaaagtaaacttctacctaacttaggggaccaatgctctaaataaaactttaattttaatgtgcatccgaattaccaggaattctgtaaggagaataaaactttaacgtgtatacagacccccgggaatcatgttctattagagattctgtttcagtgagtctgggtggggcctgagatcctgcatttctaacaagctccgaggtgaagcccttacaggccaaaggaccacagattgagtaccaaggctataatgaatagcttcgccgtcactgcagaagttggaccaagtttaggcccctctctaagcagcagtacttaaaggaaaaaaaaaaaaaaacagaaaccaaacccgtatacaggatggcatcttaatacttttcaccgtatctgaaatgatgccctacatttttttttttttcaaaggcattttccccccacaagatgactggcaattttgtgttctagccaccctcagacatgaaaacacttggttgcttatcttgtaaaatctgctctgcttgcttgcttgggcatgtatgtagtcagtttagtcaaatacgtgtcagtacatctatgtggatggggagcaggtgcaagcccttaaaaacgtactttaaaaaactttaacacttaagtcagtccactgagctgatcctgtgtgatcttagtgccaagcgtctgagtttaaagttttccctttgaaggcagcaaatagatgtcatacatttgaagcatttgtttatactaaatatgatgcttgatttttttttaagttctaagacagttcactgttcaacaccattgagcctgcagggtggtataaagcttccaaagctggtatttgaggtttgatttaatggatattggaattttcaatgctgcagttggcttcaaataaggtgtttaacatgggctcaggctagaaaaaacagcgggaattgatttccttctgagaaagggagtcagcaaagaaataactttctgcctttgcttggtgacagcacctctttgtaaagtaaaatgtcctgtgaggctcttctgtgtagcagccttattttattttaagaagcacttggaagatttctcacaagtaattcagatttgaatatttgttgaagacatgctgggatgaatggattcctaatctcaaatacaccccttgttgtgtgtacatacgtacatatatgcatatatgtgtgtgtatgtgtctgtgaatgtatatgtacatatgtaatgatttgttcctatctggagtccaaatgccaagcatagggcaccttcttctgttttactgagtttctcattttgcgtaggtctctgaatttcgcattgagtccctctgaggtgcttaagcagtactaagcaagacactgactttaacaccacttaaaagcttgcgtttgccccatgtcctgggccccactccaaggcattgccagaagtacattattgttgcagtccattctgatgaggaggtctctaagcaaaccaccgatctgcttaaagcctccctcataaggagcaggatctcatctggactgcatttacactggaaccgcttggccacaacactatgagagaataattattgaactattttactgtacaactatttccaaattgttgattttttattgatttcaggaggcaagctaattgccccatggcaacttgatgttaacatttaatgaagatcaggaaacacagtttatgaaaagcttttgtatagtaactgcaaagtttcaagaactgttttatacttcctgacagtgctgggcctagcttaatggtttgtttttattgcttaagagtgtaaaccttgctttagcccggtgtgtggaaactataccctcatcctgcattacacattttctcattgctttttactcactcctgacttcctttcctgatatctacaattgagactttttctgttttaattgtctcaaaatgagttgctatctttgcatgttgagaatctaacacacacacacacacacacacacacgtgcacgcatacatactcatgaagttaagtgtctgtattgtttcactttgttttgggtggagtctcttttcggcacttggttgctagacgaccaagcagacaaaagttaaagattgaaaaggcatttttaaagatgccaaatcttggcggctgaattattttatctgtgtctttctatggagggcttagtattcctaccaggttaccattgcttttgtcggctagatggctggtagaagatttttttgaagtctagctcttaaggcattatctgtttgagaactttgttaagtgttgttcccatttgagggagcacgcttcccacctggattgacaaaaaaaaaaaaaaaaaaaaaaaggccagccagtttccaagggtgtgttttaaatcactaataaagtggagctccagctcccagctgcttcaattgtttcaaggcaaggaggaagagaaaaggttgcttttggaggcaccattcagatatacaggctttagtgtgtggaggctttagtgtgtggagaatactgtttccaggaagctaccgttgcttttttggtagatagtactggaaaagtttttttttttttaattctttaaagcctaattttaaatcaaagtcatttgttcatttcggtaagatgtttcaggagcatgttataaatacacaatctttatagatatgccaagttagacatgtgttcacaagttcatcttgcatgtgtacacagtttgtagctgacatgcgttcctcactgagggcttccattctttctcattcattctgtgagatgctgaatctttggctctccgctttgtggggtctgctgtgctggaattaagtcacatctatggcaaacctcagctactttcctggttcatttccaggcagggtttcctggcatggggatcaattagggagccctgaggtgtgctcatcacagactctcttgaaaattaggatcttctgaaacctgtctggcctatatatgtaaatttgacaaaatattcctctggaaggaaatcttactaactgacttagaaattgttcaatcactcggtttaactggtaaacctacagtcctccaggacatatcagtattgtcaatattataatattacaaaccatgaaaataattatgcttaaacactgaggccctgaagtgaaccagactacaaacttaataatagtcaatcgataagctaaatagaaataggaaaacagattcaggagaatatttcaatacttcctaatctcataggatgtggagcgtgtttgctgccacaagatagctcagctgaatactagaaaatggggagaaatggagaagttaggggtggtttttggttaaaaatatgcatatacatatatacaaatatatatacatacacatacaaacacatacagacacgtatgtatatataaaagtgaggtcaatgctgctttcaatagcagaacagtgattgtttcttttttgagacggagtctcgctctgtcctccaggctggagtgcagtggcacaatctcagctcactgcaagctccgcctcctgggttcatgccattctcctgcctcagcctcccaagtagctgtagctgggactacaggcgcccgccaccacgcctggctaattttttatatttttagtagagacggggtttcaccgtgttagccaggatggtctcgatctcctgaccttgtgatctgcccacctcggcctcccaaagtgctaggattacaggcatgagccacagcacccagcccagaacagtgatttttaatacaattaaacaacacaatcatccctttcttggtgatggtatgaagcattttacctgcatagagcagggcccagaagctccttttgaaggcttcctctttattgaactttggagaaagaacacttctcagctgaaagagaactgaagactaagaattctagaatcctctcaccaacaggtgcccaaaggaaaatctttctgcctgacacacaagtatcagattttgtatgaatattatgttttgtggaaatttatctttgggaggttgtcatattagacatctacatgtaagctccaactcttctctctctttcgtgagtaccctgatgcctgagaagcccttttgatggcacaggcaggtggaggccaggttgttgtaaggacactgcttttgtgcctttgttcagcctcacccttggtgtgctttcgagtgcactaaggtactattgaggatttggtacaaggagcagagagagggctgcttgaaattcctaaaagacaatcaggtgcattcttgtacatggcaggcaatgttgcaaagcactctcattcccagaaccaagagggaaaggacactgaaactgtgacactgccatgaatcatgggaagattagttaaggaacttttatgagggaggggacaagtttgtgttttatgtactatttctggaaaattcaaggagtggcaatgtttcagtccccgtgatgtgaaaataagaaccttcgtccaatggcagctggtgctgaaatgcaactttctggaagtctcctgtttaatgggtctgtgaggttttgacctctgggtcccaacggatcccaggacccacagtgctgttctgtgataaggtaagttacctggtggtccttttttcgcaggagtagaaattggtatcattaatcttgtccccatcacttacgtaatcctcaaacagtgtgactagacttatcctatacttttcattttacattcagttccctttcattttttttttttttttttttttttgagacggagtcccgctctattgcccaggctggagtgcagtggcgcgatctcggctcactgcaaactccacctcctggcttcacgccgttctcctgcctcagcctcccaagtagctgtagctgggactacaggcatgtgccaccgcacccggctaattttttttgtatttttagtagagacggggtttcaccgtgttagccaggatggtctcgatctcctgacctcgtgatccgcccgcctcggcctcccacagtgctgggattacaggcgtgagccaccgcgcccggcccagttccctttctgtttctctctccttttctccgggtgtcaggaacttttgtggagataaggaaatgtgctaggggaagaggagctgaaaaagtcaaccttatttgctacaaagtgagagcaatgtggtcctgtgtcatcgcaaacctgagcgtttgttaaacctgactgaagctgtgcctaagatctcctgtgagcggccagtttggacacagaacaggatcctattgtgtttgtccttttccatggtaatgcgactcggcttgggaggaagagtcatttcacaggcttccctcgtggaaaatgctggtggtgagggagaaatggctctcctcccatccctggaacaccagttctgggatgctgagaagggctgctccagctgggggtggggtagtgggggcggggagggagctggaaatccactggcttcagcggggtgtaagcacggaccaaagcgcctctcctctgcagccagaaacagtgattcatttgattttaatttttaacattagcatttttctcatgactcactgataatttaatatggaatttaaaaggttgaaacagttatttactttttaggaaattaaaacattccctaggtggatatatattttccctctgaaacagaagatgtactcgtggttgattaaaaaaaaaagaaagaaagaaagggaggagtgggcatttctctcacccttcccttcccagctcccaactgcacccgtacaccagttgatctcgctaatgttgaccgactatcagccagtctgtttcttcttattctttctcttatattgaattgctcagaaaactgggtgaaaatgtcaccccagcaaatacttccctactatcatttacctccttggtcttcgttgtagcagtattaagtgagggcagtctttctcataggtattttatgaatcttgtgagctaagatcctgcccaagatcatagatctttctgaatagttttactgagggtattgtaggacttctgctgaatggatgaggaaaaacctgggctggcacaaggatcttgtcataacttaaaaatacacacatacagttattctcgctaactttctgatattaaatgcagttgtaactgggaaatttgctatataataatgggttgtaataaaaaatgtgattcatccaacagctcccacttcataattttttgcatatctgcagaacaacaccaatgaactgatgctcagaaacttactttaatgaataggtaataattattctaaatcgggatagcaaggatatttttgtgccattgcacaatgccaagaacattctcaggagtctaggcatttccactggaaacttgcatattcattctgatgactataataaagaggatatggtagatctctgcacagaggatcctttccccatcatccttcctgtcttccagttctgttctccaggagaatgtattaggaagggaaaaagcaaacggaaagtagggtgctccagttctcagtatttgcctgcatgctcaagttagttgtgagatgtggctctcagcattttatactaaaatgaagtatcatattttatgcatgatatccttagaacagaactgtgcaaaacagtagccactagccacttgaggcaattaaacacttgaaatgtgactagtccaaattgagatgtgctgtaattgttgaatacgcacctgatttcagagttagtatgaaaaaaaaaagatggaagatgacacattaagaattgctacattgatttcacaatgaaagggtaatattttggatatagtaggttaaataaaatgtatttttaaaatttattttatcatttccttttattttttaatgtagctactagaaaattttaaattacacgtatggctagtattatgtttctgttggacagtggttagttagagcaataaattagagtggactcgcatcacttgcgttcatttccagactgatggagtttctcaggtgacagtgaaaatgatgaaggtagagccaacacttacatagaaattcgcgaatagctataggaccccgacaaaggttaatgatgttcatctactgtgtcttagcagagaaaaagctgggagccatcgacatggtagaaagagaactggcttcacgttttggaagtctgtgttgcactccagctttgcaggttgctaaatgcatgtccttcgggaggtggtttaacctatcagagcctcaatctctttgcctttaaaacagattattctagtgctttctatttcataggatattttttagaacggatgagacaatgcttgtaaatgtatcattgttcaaagtaaatatggtttataaagtgaaaattgagtaagtggaccctgtattaggtgtctattactgcaaaacaagttacctcaaactgtgtggtttaaaacaagcttttatcaactcacgtattttcgaagggttaggaattcaggagtatcttagctgggtggcactactacctcagaatctctcaggacatggcagccaaggtgtcaaccagagctaaagtcatttgaagacttgagctaggcctggaagatttgctcctaagatggttcattcaacatggttgttgccaagaggcccctgttccgtcccccatgggcctctctatatggatgcttgagtgtcctcatgacacggtggctaatctccctgcagtattaaacaataagagagaataaagaggaagccacaaagcctgtttgcctcagtctcagaagtcaaacactgtcactttgaccttattctattaggagccactaaatccagtcaagtctcaagggaagtgggaaggggtattgactgaaccccaccttttgaagagactgtcaaaaaatttgtgacatatatttcacctccacagacctttaccatctaaaagtcgatgacacaatttggattattctcatcatatctaactaaatcagcatcgaggaaccaggggaaaaaagcacttggggcacatagcacccaattcaagaattatcctcaaacccagctactgaaaggggctgctgtaaccttaacaccagttttacctcacggctgttgaagtgacccactatgactctaagagtaattttacctaaagccatcactcactaatcagagcttgccagctcccagaaacttgctaatattaatgagcattttttttcaacacaatacagaacgtttctctttttaataaaactcccaaccttctctttgttctttggacacaacagagaccaccatggtctatgtgtatgccccaaattgcaattctatgattcccaaataaaatattgagtttagagatttgtctctatattttatttgatgttgacaaccacatttgaaaacaggaaaaaaaaactgtttctataagggattgagctcatggcctagttgtcttcagagtagaacaaacttttggttctgttggagtctctgaataacaaaatctccaattgaacttcacattcattagaactaacaatttgaatactttgcccatcattaaccataattcattttttgagatacagcagaatagcctcctggagttctaactcctctctcttcccaagcaaaggagctcctgcagaatccatggattcagtaataagcatgagaagaaagacgtaattgtgccgcagaagtcaggaggccataggagcaggttgggaatgactgtggttcttgagcctttcgcctaccactgccccttcttcatacccttgagcagcctttctttttttaatcaatggagattttaagaagaggagactgctttcctagatttcagaatacatgtggaagcattttatatttccctgctctactgtcttagtgtatagggaattttactggtatctggattaaattaagtccttggtcttccttatcccctctttgtcctaaagctgtctccctagctagagaacatttattttgggaaagcctttatgatattaaaactcatcctatagtacctgtcttatttgcagatggacaaaacatttcccttggccctttgtggaaggttgactattggatgtctgtttctttcctagaaattgtggtttttttctccttttttgagttttgatacttcccagaggaaaagaaactcataatataataactaccactcagaattctccctattctagaaaaatacaaagtaagatggacctttctccctatatttcagggacatttaaatgaataacaccaacaacttgatagaaacttctttcacttgagaggaaacacaagaaaaatataaatcagcagaatactgatatgcatgttaaaattttggagtcaaaaagaaaaataattgtaggctgggtttatatttttgaaatatttaggttcaagatttaccatgtcagcaggtgtggtgccaatctaaactaccttttgaagtgagcttaaataccaactaattaattgcaaaactaatattcttgagaatctacaaaaaaaaaaaaccagtctttaccaataaataagtaaacatactgatcagtgaataattactaaacacaatatgctgtaaaggaatcagggcactgagctagaaaataccaggtacctatttaggatgatccctccgaggaagtcagcaagctggaagttcatggaagagaaagagacctgctaagccaagtgtttggatatgcgaaggtaggcagaagggagcattccaagcctctgtgtgcccccaaaatgttatggagtgaaatagtttgatgtcagtgaggaagagggagaaggccatggtaggaggagcatcttgatcatgaagagaggaataaaataagaccagaaggtaaacagagctcatatcatatcactctgctattctaaatctgctggaaagttatttaaggcatatgaaacaagggtgaaatgagatgtaatgaatttttttaaaaggtaccatgactgctcgtggagaatagattgaataggaaaggagaaatggagaatgattaggaagctgcagtaggaataattttgagctggccctcaagatttctgctctctgatgtatgcactctgcagaacccttgcctttgagagcagctgacctgtaaatacgatgggaggcaatcagttgactctgagttaatcagaaggagattatcctgtgtagcctcacctcaccaggtgagatatttaaaagaaagtgaacaggcagagagagtactcctactggcctgggagaaagcaaagagccacacggtgaactacccatgtgggccatgtggcaaggaaccgtgagtagcctctgggaactgagactggtccctagcaaggagctaccaaaggaagcagggccctcagccacaaggaaataaatgttaacaaggaagaggaccttggtcctcagataaagctgagagccctggtcaacaccttcatttcagcctgtgagaccctgagcagaagtaccagctgccacacctagacttctgtccatggaaactgtgagataacaaatttatgttattttggcgaggtgcagtgggtcatgactataatcccagcactttgggaggccgaggtgggtggatcacttgaggtcaggagctcgagaccagcctggccaacatggcaaaaatgcgtctccactaaaaatacaaaaaaaaattagctgggcgtggtgatgcacacctatagtcccagctactcgggagactgatgcagaagaattgcttgaacctgggaggcagaggttgcagcgagccaagattgctccactgcactccagcttgggtgacagagtgaaactccatctcaaaaaaaaaaaaaaaattatgttattatattttaagtcactacacttgtggtaaattgttacttaagaaataactaatgcataagctatttgcggcattccagcttcaaaaagatggtgcttgtattagatttgtggtaaggaagatggagagaaatgagtggatttgagatcttcttcagaggtatatttgacattactggctgatggactagacatgtcaaggaaagaaaaggaagaactaaacgtaatttttaagattttttaaatttgagctacttagtgactagtgatcacaatgaatgttatcacagtttcagctatcataatttcaggaggggaagcatggaggaagaacgtgatgctagggaaacatcatgagttcagcttggacatgttgaacttgagatgtttgtgaaatatgcaaacggtattgtcaagtaagcagtgggtatgtgagatgaactcagaggagactcttaggttggaaatggaaatttggaagttatcagcatatcagtaccaaagccatggaaatggaataggaaagaaaaaggaaaaggggcttcgaccaaacactgaggaattttgacatttagaggtcaatagaggaagtagaagtgaaaaaaggctgaaaagaggtggcctgaagagcacagggaaacctagagagtgtggtaccatgaaaaccacgggaggacattgttcataaaggaggacagagtcacaatattgagtgctactgacatctccaggaagaacaggggtttgtgaccttgatttaagtgagccattagagctttgagcaggagccaggctataaaaggtgaagagtgaaaatattgagacagtgaacatggacaattctttgaagatgtttgtctgcaaatatagcaaagtgataaggcagcattttgagggaagtttgtgtataagtgcatgtttgtttaatgtgagctattaattcataactatatcctaaaaaagggaaaggttgataataacaggggaagaaaaatatttcaaatagatccaagtatctgagaaggttagaggagatggattcagaatacttggaggaaagactggcttttctcagttgaaactagaaaaaagaaggtggaagtacaagtaggcaatttttctttttaatttttaatcttgaagtcagtagagattcatgtgtacctttcatacaatttcccccaatggttatatcttgtatcattatagtacaatagcaaacactagaatttgacagtggtacaattgtgcctatttccatggcattaatcacgtgtttagatctgtataagcatcactgcaatcaaggtattccattatcacagagatctattttatgcttttgtgctgctccctaataaccattcccactcccttcttcttcaacttccctaaccctctgcaaccactaatcttttccccaggtctataattttgtcatttagaaaatattatataaatgaaatcatacagtatatgaccttttcagatgggctttttttttttttcactcagcgtaacgcccttgaaatgtatccgggttgttgcacgtatcagtagttcattccttttattctatgatatggatgtatcatagtttattcagtcattcaccttgtgaagagcatctatctgatctgattccagtttttggctattatgaataaagctactgtgagcaaacatggttctaaagctgctatgaacaatcaggttttggtgtagatgtaagttttcatttctctgaaataaatgttcacgtgtgcaattgcttggtcataaggtaatatcatttttggttttgttaagaaaacatcatacactttcccacaataccattttactatcaccagcaatgtgtgagactcggtttctctgtatccttgtgagcatttggtgttgtaactatttattttaactatgccaaaagttgtgtagcttgtgttcttaatatccattttcctaatgcctgatgatattgaacatatttccttgtgcttttttgccacttccttcaataaaaaatctcctcattttttttgtcatgttctaattggattgcttatttttaacgagttttaagacttctttatataatctagatatgaatctattctcagatatgtgatttgcaaatattttctctctcagtctgtagcttgtcttttttcatcttaataggatcttttacaaatctttttcattttttttatttttgatgagatcaaattatcaatttttcatttatggattctgcttttggtgtcatgtctaacaactctttgccaggttctaggtcttgaaggcttttttctatgtttttcctaaaaattttattaatttacatttaaatctatgatcctgatccattttgagttaatatctatataacatgtaaggtttaggggtctttttgcctatggatatccaattactccagcaccattggttggaaaaaacaggttcttccttcattgaattttaccatcgtcaaaaatcagtttttcatatcgaagtggggctgttttggggttctttattctcttctattgatctatatgtcaatctgtttgctaatactatacattttcagccaggagcagtggctcacacctgtagccccagcatgttgggagacccaggcaggaggattgtgcaaacccaggagtttgaaaccagcctgggcaacaaagtgagaccctgtctctacaatcaatcaatcaatcgatacaatagtatcatacattttcacaattatagctatgtaagtcttgaaataaggtacagtgattcccctcactttcttcttttatagaatagttttagttattccagttcttttgcttttccatatacatttcagaataatcttacctgtatctacaaaaataccatactaggtttttgttggaattctgttaaacctgcatatcagtctggggagaactgatatttttactccattgagtgtttgaatacatgaacactttgtctctccatttatttctaatttttaaatttctttcattagcattttgtagtcttcagtatcagagtcctgtccatattttttcttagatttgcaactaagtattttatctctctcttttaatggtttttacatagtattgtattttaaatttgtttcaacgtgttaattgctaatatatagaaatacaattgatttttggatgttgaccttgtatcttgtgaccttgttgaatttatttatcaggtctagaagtgattttgtagattttatggaattttctatttacatcataatgtcatctgcaaataggacagttttatttcttcctttccaacctgtattccttttatttccttttcttgtcaattgcactggctagaaattccagtaggttgaacagcagtggtgaaagtggacatccttgcctcattcttaatcctatgtggaaatcatttagtctttcatcactatatatgatgttagccagaggtactttttaaaagatgttagatattattcattgggaactgagtataggattcttagatgattattattttctcaaagaatttcaaaaatattgtgccacttccttctggcttccatggtttctgatgagaaatacactgtgatttgaattgttttacccctctctggctgctttcaagattttctttgtccttagttttcagaagtttggccacggtgtgtcttggaatttgtttctttgctctttttttgttggtttgtttgaggttcattcatattcttgagtctataggctatttttttccaccatatttagaaaatcttttgccatttcatttttgatgctttttaagcctcatctttttttttttttctcctttccttctgggactctgatgacaagatcttttgtgatagtcccacatatacctgaaactgttcacttttttttacactctgctttctctctgatctttgaattgggtaatttatattgttttattctagttcacggattctttcctcggtcttcttcattccgttgttgagcccatcattgagttatttatgtcaattattttgatttttagttctaaaatttccatttgattcttctttagatcttctattcttttgctgacatttcctgttctttcatttatttcaagcctgggtgagactgctcatggaagcaaatttatgctgtctgctttaaaattcttctcatcttagggcagcatctgatgattgccttttatccattagtttgagttcttcctggttctgggtataaccagtgatttgttattgaaacctggacagtttggattataggattttagatcttatttaaatcttgtgttttaggaggcctgctggatgaagggggagaagtgccaccttcactctgccaggtggggataggagtccaggttttccactctgcctccactgacaggggatgaggggctctttgttactgctatgtggggatagaattttgggatctgaatctggcttgcactgactttgtgaatagggggtatcattatcccaagagagaaggtgtggagtatctattcctgccgtgaagcctgggctctcacttggcttttgctatcagaggtgtggataggactgaagtttctttctgtggtatttggctgagtagagtggttattatctaaatgcttcgtgtcttgctagactattccttacttcgtcttttggccagagtgcaggctttcctgtgggcttttttttttgtctgtgtccactggtgtttttaagatgtcacttctctattatccactctgggatgtatgaagtaaaaagaaacaccagggaacttaccacctgtgttcttcaagtcctaatgtccctagctagcctgcctttctctctctccctttcagatattcttaatttatttaatatataatgcccagggtttttagttgaacttagaggaatagggaaaagtatgtctacttcatcttcctggaaacagaagtctcagcagatagtttttatttgttcttcaaatgtccttataaatctgcagagtaaaaggtgataaatgatttcaattttccaaagggaaaaattgagacacttaaaggtaatttacctgatcaaagttacctagaaatacagtcttagcttcaagtaaaacctcacaattttaaatagctattattttgcttttctttttttctctctctgctaaaaggaaaaaaattactgattggtagagggaaaggaagaaatggttacccacaaaaagactaaaaggactatttttttggcttggaagcagtaactgtttaaaattactaaaggaggacttttcagaagtgattacataatcttctcagttactcctttatatcttatcttataaatgaatgactttaattatttatactatgtcctgaaacttaagtgtcaaggtgcacatttcataatcattgtcactctcttgattaaagactcacacaaaaacaggaaaaaggatgaaactgtttcattactatattaggccattcttgtgttgctataaatacctgaggctggataattcataaagaaaagaggtttaattagctgatgggtctgcaaacagtgcaagaaataaggtgccagcatctgctactggtgacagcctcaggaaggttacaatcatggtggaaggtgaaggaggagcagccatctcacatggtgagaggggaagcaagagagcaagggggcagtgccacactcttttaagcaaccagatctcatgtgaactcagagtgagaactcactattgcaaggacagcaccaagtctttcatgagggatctatgcccatgacccaaacacctcccaccagactccctgcaacattgtggattattttttaacatgatatttgcaggggacaaacatcctaactataccaattactttgcagggcgttcatctttcatcagaaccccttgggtcctaggatttctgtaggttgcgtagcatttcaagaaagattttagactgctcccttaaaacccattatctgaagttcttgaaatgtttccagtattgcagaggcaatgataagctcagggaattaacttccctgagcaaattttcccaattctaatatatttcctaatagagcattcataggccctctttccctattttagttttgatcatttagcaccacactttaaaatttactgagtctaaaatccaaagactggggaagatgggaaagacctttcagggacaagtgaactggcctacagttcgctcctattatggccattttgattcacctagctcatatgagtttagatgtggcatatattgcaggaataagggtggcaaatggcatgttttcttcaaaagaacatagaaaccagcagagggtggttggcagagcagagggagataaaggtgtcatcattccaatggaaggttctctttgcttccagggagagtcaagagttataactttcctggatttactgagggatgtgggcttccatcccagctacctatggctcaggaatccagtgaattgcttctgtcctgtattctgtcccctggtcttcccacacagctcagcacaagaaaaatgtttctttgaaggaagcagcctctaggacctatgacaattttcaagattttttttttttctaagttgcattctctccgctacagaagtggctcagttgatgctttggaagttgtctcagctggttcaaaaagctcctatgttaccttcattttcagggacagcaatgagcctgactctcctgcatctcctttgtctgaggcatagaccactgactgcttatggaaaagaacagataatgatatccgtctcctgcttccacccaccactcaatgtaactttctgccatgaacataaccagccacacataaactgtctgcagaaaaggaagttccatcctataagcttggcaggagggtatgtagggtcaacaaagaaatctctgctactcgtttgcagtcatttccatgaggctaattgtcacctccagaaatcagcccagaaggaataaatgcattttcccctgataaaagaaaggacctaaggaaatggggattgcagattagccctttcacaggaactgactgggcctgtaacagccatccgagtcctgctaaccagcagataaactagataagagtttacattagctttggctgctgtgaggatgcctctgctctcttggactccagaacagttggttcattaaagtaccagggtcggcaagtgccagggtcataagtctgagtatttatgttttataatcctccattcgatgttcttttttgtatgtgtctagagataacggtttctctctagatccatccttctaggtaactgtatggcattcaggaaggcatctgtacaatttctcctctcttcagaaatcaaaactactgctgactgcagcaaagagtaaggaacacttagagagatggagcaatatttcaaaaatacttcttagaaaagaattggaagtctttgcatttctaaatcctacgcttttatgttttcaaatgaatcagatgatattgtgtcaacaaaagcatatcttatttcaacacttatttctatatctcagttggaatttcgatactctttctgtcattttcattttcttctcatgccatgtaaccttgtcccgtttgagaaggcatgctaaaaagtttgcaaagaataatgcagtttacttctatgttcaaacattcagtactctttctatataatacttctaattgcaaaattttgtgcacctagaaagaggatctctctatctaaatattgatgtcttaataagttcattgtactgatgtcttactaataatctcaaggagagaatttatttgtaatgctgcaatttcaaagtgcaggtgttgtatcttttattcatgtttagctttcagaatccactgagtgttttaaatggtaatgaaaaggctcaaaggttgatagctgtgcttggagagggatagtgaattagaaagatctgctacctgactatgcattcattttccaattttttggaatatatttttcaaaattcaaaaaatatttataggatgcctattatgtagtgagtggtattataggccatgggaattcagtagtaaataaaaataaagtcatcatttgcatgaagcttacagggcttccatatctattccagatcccccctgttctcttgtactcaaagtgcagagcatccacgttgcctgggatgttataatagaattacatgatttcagattcctctccaaatctcctgaacaagaatctacaatctactaagattcctagaggattcacgtgaatataaaattctgagaagtttgccaaatgtcagtttaagaacctaggctgtagccaatcatatatggtattcctttgaccacagaaattggctcaaaagggtatgttgccaaggtgattctagttaaggaagattttttttttctctaaagaaagacccagaggatgaaataatccctttattcctctgtctggtgtgctgcccagggatgattccttaaactgctgcagtctgatgataaaggtgaggatggacagaggcaagggagacacaggaacacaaagcagaagcctgattgaactgtacttgattcccactctctctctggaccttgtcagttacagaggccaatacatccctaatcaccccaactgatgcacttgcataggctgcttcctagatacttggtggaaaggcccatatgtcaaaatacaacacacaccaaagtgggtacatgtgatcagatcaggcaacctgtcagcctagggaccatccttaccaccgcctgcaaatgaggataaatgaggtgcagttttggaaaatctctgggcttgggaccaatttgggcagcaaggtggaggagtgaaacagcatattttgctgatagagaagagatagtggtgagtcatacagatacacagatgcttggagttgttgtgaaagagagaagggataagcccttggatgactgaaatgggatttatgcaaggtggccttaggcagaatcagtactccctgcctgcctcttgccaccctcacttactctcactttgtttcttccaacaccccaagcaagtcagtagttctctgcggccttctgttcagtgcccactcttttctcatcttttctccttccctatcttttctccttcccctcccacctcatcccactgcactttcccatcagtctcacgtgatggggtttgtgaggaaataatgggtactaatatttgcttcaagaaggagttttctcctcctcctcctccttttcctactcctcctcctcttccttctcctcctcctctcctcctactcttcttcttctccgttctccttctccttctcctccttcttcttcttcttcttttttttttgtcgagactgagtctcactctgttccctaggctggggtgcaatggcgtgatctcagctcactacaacctctgcctcttgggttcaaggtattctcctgcctcagcctcccaagtagctgggactacaggcatgcgccaccacacccagctaatttttgaatttttagtggagatggggtttcaccatgttggccaggctggtctcaaactcctgacctcaagtgatctgctggcctcggcctcccaaagcgctaggattacaggcatgagccacctcgcccagccaagaaggagtttcttatgtgacttatcctagcactgacctaataaaggggaaagagatctggtgtggactcccatcttccatgcaacagctgcctccactgccatcacacaggaccatcccggagatataaaataattctaactactaccatttctggagcacttatgtatcatactctgcatactatctacttgaaatgccacatttgttttaatccttttagctgtcaagagaatacatgattttatatacattttccagttgaggagcttgaggtctagaatggttaaaaattcttgcccagccgggtgtggtggcttacgcctgtaatcccagcattttgggaggctgaggcaggtggatcacctgaggtcgggagtttgaagccagcctgaccaaagtggagaaatcccatctctactaaaaatacaaaattagccaggcattgtggtgcatgcctgtaatcccagctactcgggaggctgaggcaggagaatagcttgaaaccaggaggcggaggttgcgatgagtcaagatcgtgccactgcactccagcctgggcaacaggggcgaaacttcatctcaaaaaaaaaaaaaaaaaaaaaaaaaaattatcgcccatagtgattaagcgagaaggagagatttgaaactttgtctttaaatggacaaatgccatattatactactcatttgtagaacttagggcgtggttatctagttgtaatttatattctcaagcagacaatttgttgaaagttttgactataagagcctgtcaaagggctatgggtgcctgggtctgatgacacattgacattctctgactgtttgctgagccaagttcatgttcacctgtggcttttaccaagatggtgctctgagtgttttagtgcagcagtctcacttatacttttactgttactgtgatgcttttaaacatcacttagctatgttttgctattttaagtacaattattcatcctataaagacccttgtaaagaatttaattccagctgcttttgctgatagctgaggaatacaaccctcagctagataaaccaatatactgggatttgtggttcatgagcatcagtggcaggaccagaacaagaacccaggtatcttaattcctaggttttccaaactccaggttaactgttgatttttattttattttgtaataaagtgatattttgtagatttattcccctcaagagaccctttgctggagtttcaaatatatgcaattttattttagaggcaaattcttccagatagaaggagtgaggaacagggtaaatcctgtcaacaaaaatgattaaaattgtggaaaacaatcatttcagaattcttaaatccaccaaaggtataaaatacatatagaagcatttgttcaaaaaatcctgccaaaccttggttaagaactatgaaaatctaaggccttttagcctgggatgctcctgttcaacccatccgcatgaccatttcttcaggtagtgaagaagttctactagggcatggcaagttgagaaaaccagtaactgcactgctggaagaggatggcttgatttgaaacagagtgcataggaaaagcctcatccataaatgttgtggaaaagaatatgatctcatggcaaacaaataagaaaggctatcatgacaactagcttgaagctgtaattctgataaggcataataataataataataacagagagagacagggaatgatatggctgtagtgctctttgataagctccaagatatctctaggcttctgaaaaggtaagtgtctgtgcaaagctatgcactcaggagagactggaaaagtcaccagctatatactcattctggctgattataaggctttgcacacccagaaagtaaaagccaggaactaaatgcatttccaaatccacacacagttctactaccaaatggtggaggcattactggctcaaggtgttgagtacaacctctgaccaataactgactgatgactagagtatgctaacacaaggaaaatctctaggaagccagactcaacgagtaagagcaagaacaacaacaaaaatctaagcaaagacattagaggctatgtaccatgggggaggcagactccacagaattagttcaggtaaattattaaacaaaccaagagaagcaacaaaaataacccccctcagggggagagaatagaaatcctgaattgctacaatatattatctaaaatgtacagttttcaacaaaaccattgcaagacatacaaagaaaaaatgtaacctatgtttaaaaaaataagtcactacctaccatttttgaggaatccagttattggactcggccaataaagacttcaaagcagatattaaatgtaacatttaaggaacaaaagaatagtataagacaatgactaatcaaatagagcatcttgataaggagatagaaattatacaaaataggccgggcgtggtggctcacgcctgtaatcccaacactttgggaggtcaagacaggaggataacttgaggttgggaggagaccagcctgcccaacatggcaaaaccctgtctctactaaaaatacaaaaattatctgggcgtggtggcacacacctgtaatcccagctacttgggaggctgaggcaggagaatcgcttgaacctgggaggcagaggttgcagttagtcgagactgtgccactacactccagtgagactccatctcaaaaaaaaaaaaaaaagacagaaaagaaaagaaattgtataaaataactaagtggaaattcttcagttgaaaagtagaataactgaagtgaaaatttattataggagctgaacagtagatttggggtcacggaagaaaaatcgataaacttgaagatagataaatagaaattgttcaaattaaagaacagaaagaaaaaataaagacaaatgagaaaagcctcagaaactatctccaggatagtctgtcaatcatatggagtactatcaatcatgccaactatcaatcataccaacgtgagatactctcagtaatactaacatatgcatgttgggagtctcagaaaaagagaaagagataaaaggtcagaaaaaatatgaggaaatattgtctaaatatttccatatttgatgaaaatctaacctacagatccagtaaacttaatgactccaagtaggatagacacaaatagaaccacacctagacacatcatagtcaaactgttgaaaaacaaagttaaaaaaaatcttgaaaaaacaagagaaaagtgactcatcatatacagggaaacaacaacatgattgacagctgacttctcattcaaaacaaaggagaccagaggcactgggatgacatactgaaaaatgctgtaagaatatgcctgtcaactaagaattctgcatccattaacactatctgtcataattaaaggtgaaataaagacattcccaggtaaatgaaagatgtgtgaatttgttgctagcagacgtgttttacaagaaatacttaaggaaggccttcaggctgaaagtaaattattctaaaatggtaatccacatgaagaaataaaagcatggcaaaagataaatataccaataaatgtgtaagactttaagtatatatacacatttctgcttttttctcttaactggcttaaaatatataagattgcataaaccaatacctatgaaactgcatttctgggcttttaaactataaagttgtaatatatataaataatagtgcaacattttaatttcttattttttcatatatatatgaggtgtgcatgtatatatatgtgtggttatgtgtgtgtgcatgtgtgtgtgtgtgtatatatatatatatatatatatatatatatatatataaaatggttgatttaagactttcaagacagaccttagttcattataacctacttcagattaatactaatttatttcttggaaaatatagaaacatattccaatacaactctattttttcctcccacctttttgctattctctccaaattgatctataggttcaacacaatccctattagaatcccagcagactttttttttaaaaatgacaagctaaattatatatgaaaatgcaaaggacccaaaatagccagaacaactttgggggaaaaaggttgagagatatatatttttcaattataaacttacggtaactgcagtaatcaggacagcatggcagtgtaataagggtagacatagattaaaggagtggcattgaaagtaaaaaaattaagtctcatatttatggtaagtttatttttaacaaagttactctaataattcaatgggggaaaggattgagttttcaacaaatggtactgggagaattgtctatccatttgcaaaaagaataattcagactcctacctcatatcatgcataaaattaacttaaagtttatcatctgcctaaaagaaaaatacaaaactctaaaacttctgggagaagaaacatagtaggaactctttatggcattgtgataagcaaagagttcttagatatggcgctaaaagtaagatccataaaacaaaaattttgtgcagtgggcttcatttaaattaaaacctttagtacttcaaaaaaaaacaccattaagaaatgaaaagataaaccacaagctgggtaaaaatatttgcaattcatatatctgataggggactaacatccataatatcaaaaaaacttttacaagtcaatatcaagaaaagcaacaacctaattaaataatgaacaagccaagacgggcggatcacctgaggtcaggaatttgagaccagcctgcccaacatggcaaaaccccgtctctactaaaaataaaaataaaaaaataaaaataaaattagctgggcgtggtggtgggtgcctgtaatcccagctactcaggagtctgaggcaggagaatcacttgaagtcgggaggcggaggttgcagtgagcctagatcacgccactgcattccagcctgggcgacaagagtgaaactccgtctcaaaaaagaaagaaataataattaacaaattatctgaatagatattttaccaagaagatatacaaatggccaataagcacatgaatagatgctcaccatcattagttattttttaaaaagcccaatttatgctgcaatgagataccactgaaaaggccataatcaaaaaagcagactatagcaaatgtaggaaaggatgtagaaaaactgaaatattcatccataaccgatgagaacttaaacgggaaaacactttggaaaacaatctgacaatttctttaaaactgaaatttaccgcacaatctagtagttcccctaagtatgtacccaagacaggtgaaaacaagttctcctaaagacttcaaaggttatttcttatttatttttaaattcatgacattgccattattttaaaactataaaaaagataaatattgcccacatacataatggtccccaaaatagtctctcctaaaaacttttttagcattgttttattgtggtagaacacacataatatacaatttatcatcttaaccattttaaagtgtatagttcagtggtattaaatacattcataacgtgcaaccattaccgccatccgtttccataactcttttcatcttgtaaaactgaaactctatattcattaaacaataactccccatatcccctaccccagcccctagcaatcaccattctccttttgtcactataattttgatgactgtaagtacctcatatatgtggaatcatacagcaattatctttttattactgaattatataatttagcataatgacctcaagtttcaaacgtattgtagcatatgtcagagtttccatttttaaaatggctgaataatatttcattgtgggtatatacctccttttgtgtatccattcatccacaggtggacagttatattgcttccacattttagctattgtgaaatacgctactacaaacatgggtgtccaatatctcttcaagaccctgctttcaattattttcggtagatagccagaattgcattttctggatcatatagtaactctgttttttgtttttgagacggagtctcgctctgtcgcccaggatggagtgcagtggcgcgatctcggctcactgcaagctccgcctcccgggttcacgccattctcctgcctcagcctcccgagtagctgggactacaggcgcccgccaccacgcccggctaattttttttgtattttcagtggagacggggtttcaccgtgttagccaggatgctttcgatctcccgacctcgtgatccggccgcctcggcctcccaaagtgcttggattacaggcgtgagccaccacgcccggcccagtaactctgttttttaataaggaagtcccattcggttttttgcagtagatgcaccattttacattcccaccaacagtgtgcagggttccaatttccccacatcgtcactaatacttgttactttctagtttttttgatagtagccatctaataggtgtaaggtggtatctcactgtagtttcgatttgcatttccctagtgattagtaatgttgaccatctttttatgtgcttcttggccatttgtatatcttctttggagaaatgtctgttcaagttctttgacaatttttgaattggattatttgttttttgttgttaatttttaggagttctctatatattcttgatatcaatcccttatctgatatttgatttgcaaatattttctcccgttctttgagttgccttttaactttgttggtggtgtcttttgatgcacaaatgttaaggaaattttcatgaagtacaatttgctttttcttttgttgcctgtacctttggtgtcatatctaagaaatccctgccaaatccaatgtcatgaagcttttgccctatgttttcttctaacagtatgatagctttagatctttaatccatttgagttaatttttgtatttgctattagttatgggtccagtttccttcttctctgaaataaaattttatatgtatatttatggcagcattatgcataatagtccaaaagtagaaattatccaagtgcccatcaactattgaacgaataaaatgtagtatattcatacaatggaatattattcaccaataaaataaactgctgacacatgctacaatatggatgaattaaaagaaaaacattatattaaatgaaagaaatcagaggcaaaagggcacatatatgtgattcttttcatatgaaacctcagcaaagggaaatccataagatcaaaaagtagatcagtgggtgtctggggtaaagactgactgaaaatgggcatgagggatcttcctggggggaatagaattgtcctaacactggattgtggttatggctgcacaactctgtaatggaaatgcactgaaactttctgaatttcttaaagtgagaaaagtatagtacctaaggtagacctcaagaaaactcttaaaattttttaaaagctctaggtaaattcaaccaatcaaaaaacaggcaaatcaaatacaaaaaaatttatattgtatcaaaaatttgtgtgtgtgtgtgtgtgtgtgtgtgtgtgtgtgtgtatgccagtcttgccatgaacctcttggtcagtattgaaataatgttccagaaacaaggctacttttgttgagtaaaaaatcaacacaaatgccctgtcctttgaaaatgttagatgcatcttatactgtgtattcctaaacagttgcaagctcctttaggtacttgtttcttctatttatttgctatcatcttctaatggttccccttaggaatccacagtcgaagctcagtcaacgttgactgacagccctgaaagaccctgttgtccactcccagtgtggggagaactgtatgtaatcctttctcaacctaaattcttgtgggaggagaaagagggcacagagccacgtatctgatcaggattgaacctctcacaggggccagcagagaccattgcagtctgtaactacaattgtcacacattcttaccccaaaaggggctttcagaggtcacctggctgagcacaccgcttcccagctggcgaccacctgtcttagtgactttaacactctggattcaaaataggaaaagtgtgtgctcttacttctctggctcaaggcaaggtttaaagatttaaaggtccctgggttctttgggtaaggatttctcattgtgaatataaagggattcttatcattaccaaaacattctgaaaacaatgctgttcctggcgtttaacccaatgtcgtatctgcacacaagataactatgcactgaaatcttactatctaatgttttcaaggtttcaaaaagcaagagagtggtaaataagggggatattgcaaatggaatttctctgcagcctcacaattgagcttctgaaaactccataaaaaaacactaagtgaattaagcctataaaatctgcattgtccccactttttttcctccttgattcctcaaagtcctcaggcttaaagaccccagggaactggcaggtgtagatttccatggaaaccaaccctaaaagaatgaaaacccaaggagagaattgtgtgaagtgccctcactcctgtgtcatttccttgccaacagttttcgaggtcaacctggcttatttcatgaaattagaggccctgctgtcaggatttccccaggcaaaaagggtttgctcagctccattggttgtaaatccacagattgtggttgttctctgcttctagaagaacagccttcacgattctgcctgactttcaaatgccttttatactggcctcattctgattaaccagagccgtgcttttttccacagttagattgggtgtgcttactttaaaatattcattgaaaaataagatattacttaatatgatgttattgaatacaatattcagaaataacgtattcaaaaatattttttaaaaaccacatgaaaagagtaatatgtgtttatagagtatatatatatgtatgcgtgtggttaaaaaacttccaacagtacagaaagtaaaaaaagaaaaaaggaaaatttctatctctttctctctttccaaaggcaaaatggataaaaagtcttaggagtcaccatgatttctccaacactggcctaaggagcaccgtcattaatgtctgcctggatggagaaataagcctcaatttaggaaaatctctaggcttgaaatctattagggaactcctctgtaccttgcttttgtaatttaataaaaatatagcttagaaggcgttctttttttttacttttttcgttttcctcctctcccctcatagatgttttttatctgttcacagacccaactcatgtagtagagcaatggttcttaaacttgagagcacattgaattccctggaggactccgtgcacttcagatgatccacagagctcctgatttagtaggtctggggtggggtctccgaatttgcattcctgagtagctctcaggtgctgctgtgctgcggggtggtgtactatctttaggtagtgctgtcattgattgcttcaagccgacttagagatccacctcggcagttataatatgccattgtttgaacttaccctgtttttatctaatctcatattgtcggacacttaagttctttccaatgtcttcctgttattctcacaacaaccttaagatgagataataagaatagctactatttttgagtacttagaatgggccaagcactgtgaattactttatctgcatagcacttctatcctgaaggtactacattattcttgttttacaggtgaaagaactaagtctaggagaaattaagtagtgtgattaaaataagaagtgagagaggctgggaatctaagaaagactcatctggttgcagagtccatgttctttccagggtctccacccacaaaagtttacaggctagttggacaattaaggatgaaacacaatgaataagaataacagaagtaatgattgccagaagcaaggcagaggagagaagttggcttaatcaaataatccaactgtgactttgcatcccacagggccctgtgcttagaaatgctcctgtttgctttcctgctccagtgtcattgtcttgaaattcttaacaattttttaacaattgtcccgtattttcattttgcattggtctccacaaattatgtagacactcctggaagggttaatttagtcttcaaacttcagccagccaagagctttagcaatgacttagtaaccacattttacagatgatttttgtaatgtttttcctaccatgctttgtttttaccctccaaatggacacactcttgggctgatgttttctacctggaatttgttcagggaggtattttcttgacaagaagaaacatcattaggatgataaatatgaagggagataatactatacacagctttccaaaatcagtcagaaatgttgtctttggtgggggggacgaaatcatttgttaatgctgcatctcctgcccctcattggtttgctaatatatggctatttagctgtagttgacagcctctgaaatttattatttttatataaagcagatattctttttttaatttcatttatttttattttttatttatttatttttttgagatggagcctcactctgtcacccaggctaaagtgcactgacacgatcttggctcactgcaacctccacctcccgggttcaagtgattctcctgcctcagcctcccaagtagctggggttacagactcctgccaccatgcctggctaatttttgtattttttagtagagacaggtttccccttgttgcccaggctgatcttgaactcttgggctcaagtgatctgcccaccttggcgtcccaaagtgttaggattacagacgtgagccaccgtgccaggccagcaaagtaaagattctgaagttttgctacattaactaattttcatctatttcccagggagaaagaattattttcacttttatacgctaaagctgggagaattccactgtgaacacagcgcacaccaactatgccccaggggagtgttgccttgtgtattacatatttcacaccataacaatgttatccgattttataattaacattaaacttttataggaaaaagtaccttgttatactagttgttaacctttggatatatttaaagctcatttcataaggagccatatgctgcttcatcaccgtcctaagtgggctgtgttgctaagtgttatgggatctggtaataaaagatacaaacacaatgtgtatgcccaacaacaggggctgaattaagggagcaacgggagccttaactcttgaatttcctgacttctgtgggtttcatttgcagtctcaacattccagtaatacttcgctttctcacaccacttttttattctttcttcttcaacatccccacctcctctccaaccctgataataactgtttaaacattcatactcacttgcctactgcattgagttatatgattagtttgtacccttttagtgccatcgatgatagggactcattattgagtcaatgtttctaaactatggctctctgacacaaatcaatctgcaaaacgtgtcagaagaaagtactagtgaacccaacaagtatttagaccatttttaaaaaatgtaagcagcttacgtggggatacattctcaagtgtatttttagagtaaaaatagagaatggtaaaaaatggccattgaaaaatctcttacgtcatttctaaagaatatgtgtgggtgtgtatttaatataacaatgatcttcacaaaagcttaaagaacacttacaccagaccaaaagaaggaatcaaagaattaaccttcatgcagacaccgggaaaccatctgtgtcctagcattttcctaggggtgaaaagggaacgggtgggtgaggctaattgtgtcttcttatctttctggggtttacttactttttaaaatagtaagcattcaaatgttaatttatgttaattgattgcttgttcatgaggattaagagaatttgtggagtctcattggatggagggtaacgttttaaagtcagcacctgagttaaatttgatgcaaatgtatatttctggcattaacttgaatttctgtaatatttctattcagagagttgagacattttgattgcattattctccaacttctaggaaaatgtagtaattcagttagattgtgtggagcataaagcagtgcttctcaaactccaatcagcctatgaatcccctggtgaatttttttaaatatggatttggtaggtttgagataggacctcagattacatgttttcaacaagtccccaagacatgttgctgctgtcggtctgcagactacatgctggatagagagagtctaatggaataagtactgcaaactgggaaaacggtagtcatgatacctagctttacttatgcctttttgtgcaaaatgtctttattttagcttcttcacttgaaaacaaagtgagggagaggaggttaccttgctaagtttcttctacagatgagtgtttactcctagttggggcgtatatacacaatacctttaatatgaaaatatttatgttactacttataatgtatgcatacatattttctgcttaacattagaaaaacacaatactgaaactgttaatagctacatccagatatgagttttgagttgcagactaaatatacagaggtgaaagcatctctaggggtgaaatcaactactggttggttgtctcctatgtctgatgctttttgttttactttaaaagagcccagcctgaaatgttataaccttatttaacatagcctgctcagtatttaattatcttttgaattaaaaaccaattatctatgtttaatttaaactctgcaatttaaaagactgtgtccatggataggacctcagctaaatgtgagaatatatatccactatctatttaaagaaatcacagtaggatatgatttatttctcacaagccgtgaaatttcctttcaatataacaaggcatttgggggttaaaaattagattttttaccttgtacatttgtttaagttatttgtagattctggctattagccctttgtcaggtgggtagattgcaaaaattttctcccattctttaggttgcctgttcactctgatgacagtttcttttgctgtgcagaagctctttagtttaattagatcacatttgtctatcttagcttttgttgccattgcttttagtgttttagtcatgaggtctttgcccatgcctatgtcctaaatggtattgcttaggttttcttctagggttgttatggttttcggtcttacaaacaaacccataaaaaagtgggcaaaggatatgaacagatatttttcaagagaagacatttatgcagccaacagacacatgaaaaaatgctcatcatcactggtcatcagagaaatgcaaatgaaaaccacaatgcgataccatctcacaccagttagaatggcaattattaaaaagtcaggaaacaacagatgctggagaggatgtggagaaataggaaagcttttacactgttggtgggagtgtaaattagttcaaccattgtggaagacagtgtggtgattcttcaaggatctagaactagaaataccatttgacccagcaatcccattactgggtgtacacccaaagaattgtaaatcatgcctttatgaagacacatgaacatacatgtttattgtggcactattcacaatagcaaagacttggaacaaacccaaatgtccattgatgataggctggataaagaaaatgtggcacatatacaccatggaatactatgcagccataaaaaaggatgagttaatgtcctttgcaggaacatggatgaagctggaaaccatcattctcagcaaactaacacaggaacagaaaaccaaacactgcatgttctcactcataggtgggagttgagcaatgagaacacctggacacagggtggggaacatcaaacaccggggccttttggagggtggggggctgggggagggatagcattaggaaaaatacctaatgtaaatgacaaattgataggtgcagcaaaccaagatggcacatatatacctatgtaacaaacctgcacattgtgcgcctgtaccctagaacttaaagtataataaaaaaaagaaaaaaattagttttttaatgatgcaaattctgtataaaatatattacaggctgggtgcagtggctcacgccggtaatcccaagcagcactctgggaggccgaggtggatggattgcttgaactcaggagtttgagaccagcctgtgcaacatggcaaaactctgtctctacaaataaatacaaaaaattagctaggtgtggtggtgcacgcctgtggtcccagctactcaggaaactgaggctagaggatcacttgtgtctgggaggtcaaggctgcagtgagccaagattgcacctctgcactccagcctggccagcagagtaagactctgtttcaaaaaaataaaaaatgaaaataataaaaaaaaagagacctgtaatgccaggcactgtcattttcttgtagaatagggcattccatcagaagttatctaatagttggagcctcatactcctgattattccataagccaatgactaatatttcacaatgataatgtctttttactggattcccaaaaacatattaccacattttgataatttaaagattcacacttaaaaaatgttttcattcgttttctttttgatacggtttggctgtgtccccacccagatctcatcttgaattcccacatgttgtgggaaggacctggtgggaggtaattgaatcctggggtcaggtcttttccatgctgttcttgtgatagtgaataagtctcgcgagatctgatggttttaaaaagaggaatttccctgcacaagctctcttctctcgtctgctgccacgtgagacatgcctttcaccttgagccatgattgtgaggcttccccaaccacgtggaattgtaagtccattaagcctctttcttttgcaaattgcccagtcttgggtatgtctttatcagcagtgtgaaaacagactaataacactttttgtgatagattaaattttccatgtactaagaagacataaaaaagaatagtgcaaattgtaaggaaatttaaaatataagttaaccaatgtgatgaaaataaacagaagcctagatctccccatagaagaaggtgctttgggattgctggtttctgtagtcttcttttaccagcaggatggagacagggtccctgatgagaatggggtgattgctaagggtgttggtatggtgagaattcagggtgaggctgctgaccagggtactgagaggggaaattctgagaagtgcagctgcctgcccattccggtgaagagtgaagatggacagagctttgcactgaccctgttgctcttcccgctggggtggccagtgtggaatccaatgagctactaacaaggacagttacctttgcagataaaacaacagtaatttagaggagaattgcaatttactgggattcactaaaagactacccacgagtgaacactacttgctattttatatttgtccaatcaaatttaaaagatgtttattagctcatgcctttctacggtaatgcatcatctttcatgggattgtagagaagctcagtgcaataatttctctggttcaattcctttgctacatataattaatctgcattgataactatggtattttggggatgtatcatttgggaattgcattctcaaatacctttattgtgatgctaaagagtcccaaatcatagtatattaaaccagatatatatatttcctttcatataacaagagagttgaaaggaggtagtgcagagatgaaatgaaagtccatagccctaccacggtcttagcgggttctttccttctgttttaccatcattagcatatggttccctgatggttgtttcagaatagaacgatggctgctacaacaaccagccatagcatccatttcataagcagaaagaatgagcaagggagaaaatattcctactagttcagcaggccccctttagataactctcttagatgacccagacaaagacttcctcttccatcttattacccagcatgatcttctagagaggtggggaaatgtagttgtacctgccctcaacaacataaggatcctgttagtaaaaaggaagggtaatatgaatatcgggtaggcaagtggtagactctggctaccactgtgcggcattttagtgaatgaaagatgacgatgtggcatgtatattcttagaaaggccatgtaagatgatgttatctatgggtcaaatgaatttcccttcaggtgaccaaggtatttacacacattccttgcaggcattaaaaagaaaaaaggaaggagggcagggagaaagccactgccacagttgtggccgagtgaaaggtgaacacctaggtgtggtagttccagtatggcagatggaattgttcactctttcagtgcccccttgtgcccaatatactgtaacaggataatacagggaaacagtcaagaaagaaactttttgaaaactccattcattaaagctacagtatagcaatgtgtggttttagctactagaaatgcaaaaaaataaaaaatacctatacagtatataacttcatgatgctgggacaagacgtcacaatgttaaggcatatctttcttgtgctaagtagttctcttgtcaaaaaatatgttttccatttaaatttggagttgttgggcttttttcctcccttatatttatgtatggtctgattttttttttttgtattggctggttcttcattaatctaccaagctaactgtatttatatgtaaactcaagcctgatgcaagggtcttttgtttctttgttttattttatttttaaataactgtctgaaaagcagtggaatatgggttgcaaaatttaccagcagcactatcatccaacaatcagtttaaaaaggtgaagcaaaaataaggctgctcacacccctgttatgggtaggcactcattgaacattgtgtgtgccctgtagacctgcattctccagtggtcccagtccggttccacagaatcaacttttagaactgtaatcatcaatacagaccaacttactcaactccctctttcacagataaagaagctgaagtcacgaaggaaaaacaaatcctgtcacagtctcatgggacggggtaggaactagaaccaacgactcatccagagttcatattaactccgaactgttgccaccatttacagagactcataggagaagccgcttgctctacagtgtgaggattgcaagctgtgctaggattcaagctcagagtccctgagcctttgtctcctgttctttcctgtgtgcttatgtggtcagtccactttccttctccgacatgaaggcttggcccattccaagtctcctttggaagaaaatgggtaaactatgaatgccattgtttaacactgtcaattggaatattaaaatgtttctttcattagaaataaacttttgtcaatttaaacagtggaagagtaattcatcacaggggaagaggaatgagaacctttggaatttattttcaataaaagatcctgctagtagaagaaaactcctgaaaccctggttttactgatgcccattaacatgtatacttgaagcaagagtatgaagctcttaaaatctgccctttcaaaaactttaaaaagttatgtagggagttataagtacataagatgaaaatgaacaccttctcttagtaaatgtattttaggagcatagagaaattgtaaagagaaaggtgagagtaatagaacttcacctggtaattttctggggtaaaagaaaaggggataaaggtcccggggctatattactaaagaacaaatgagaaagaagggcaacacactgttaaataatgtatgcaacattctgccctgaaattcttattttgagtaagatc

SEQ ID NO: 630 - DNA, 514 bp, Homo Sapiens
  misc_feature (476)..(476): n is a, c, g, or t
agactgtggaggacctggagctggcgggggtcagggcccgcagccgtgccgggtgctcttcagcatgtccttcatcccggtggccgaggattccgacttccccatccacaacctgccctacggcgtcttctcgaccagaggcgacccaagaccgaggataggtgtggccattggcgaccagatcctggacctcagcatcatcaagcacctctttactggtcctgtcctctccaaacaccaggatgtcttcaatcagcctacactcaacagcttcatgggcctgggtcaggctgcctggaaggaggcgagagtgttcttgcagaacttgctgtctgtgagccaagccaggctcagagatgacaccgaacttcggaagtgtgcattcatctcccaggcttctgccacgatgcaccttccagccaccataggagactacacagacttctattcctctcggcagcatgctaccaacgtcnggatcatgttcagggacaaggaggatgcgttgatgcca

SEQ ID NO: 631 - DNA, 488 bp, Homo Sapiens
tttttttttttcatgctttttatttttcggtttatttaatcttctttaacacagccattgttggttcaacaatccaatatttgaggttacattattgcaaaaataaggacatagctgaataggttatgccatcaatatgtttgttaatcctatcccttttattaaagacaaagcacagtttgttaatattgtcttggattaactctatttgtaaggttacttataggggttcatactaaaggcaggggatttgcttcctgggccaattgtctttaaactataatttaagaaatcattagcattttgtaattaaaaacagataaagcaatattttagtacaatgttaggcagcagataaaattaccctgtctgaatatatgtgtacatatacataaaacgctagcatgctttaagaagttaagaaatattaatattctgtgaaattaatatgtaaataaaatataatctggaatgaaattcccattatg

SEQ ID NO: 632 - DNA, 2625 bp, Homo Sapiens
ggcagccgtccggggccgccactctcctcggccggtccctggctcccggaggcggccgcgcgtggatgcggcgggagctggaagcctcaagcagccggcgccgtctctgccccggggcgccctatggcttgaagagcctggccacccagtggctccaccgccctgatggatccactgaatctgtcctggtatgatgatgatctggagaggcagaactggagccggcccttcaacgggtcagacgggaaggcggacagaccccactacaactactatgccacactgctcaccctgctcatcgctgtcatcgtcttcggcaacgtgctggtgtgcatggctgtgtcccgcgagaaggcgctgcagaccaccaccaactacctgatcgtcagcctcgcagtggccgacctcctcgtcgccacactggtcatgccctgggttgtctacctggaggtggtaggtgagtggaaattcagcaggattcactgtgacatcttcgtcactctggacgtcatgatgtgcacggcgagcatcctgaacttgtgtgccatcagcatcgacaggtacacagctgtggccatgcccatgctgtacaatacgcgctacagctccaagcgccgggtcaccgtcatgatctccatcgtctgggtcctgtccttcaccatctcctgcccactcctcttcggactcaataacgcagaccagaacgagtgcatcattgccaacccggccttcgtggtctactcctccatcgtctccttctacgtgcccttcattgtcaccctgctggtctacatcaagatctacattgtcctccgcagacgccgcaagcgagtcaacaccaaacgcagcagccgagctttcagggcccacctgagggctccactaaagggcaactgtactcaccccgaggacatgaaactctgcaccgttatcatgaagtctaatgggagtttcccagtgaacaggcggagagtggaggctgcccggcgagcccaggagctggagatggagatgctctccagcaccagcccacccgagaggacccggtacagccccatcccacccagccaccaccagctgactctccccgacccgtcccaccacggtctccacagcactcctgacagccccgccaaaccagagaagaatgggcatgccaaagaccaccccaagattgccaagatctttgagatccagaccatgcccaatggcaaaacccggacctccctcaagaccatgagccgtagaaagctctcccagcagaaggagaagaaagccactcagatgctcgccattgttctcggcgtgttcatcatctgctggctgcccttcttcatcacacacatcctgaacatacactgtgactgcaacatcccgcctgtcctgtacagcgccttcacgtggctgggctatgtcaacagcgccgtgaaccccatcatctacaccaccttcaacattgagttccgcaaggccttcctgaagatccttcactgctgactctgctgcctgcccgcacagcagcctgcttcccacctcctgcccaggccagccagcctcacccttgcgaaccgtgagcaggaaggcctgggtggatcggcctcctcttcaccccggcagccctgcagtgttcgcttggctccatgctcctcactgcccgcacaccctcactctgccagggcagtgctagtgagctgggcatggtaccagccctggggtgcccccagctcaggggcagctcatagagtcccccctcccacctccagtccccctatccttggcaccaaagatgcagccgccttccttgaccttcctctggggctctagggttgctggagcctgagtcagggcccagaggctgagttttctctttgtggggcttggcgtggagcaggcggtggggagagatggacagttcacaccctgcaaggcccacaggaggcaagcaagctctcttgccgaggagccaggcaacttcagtcctgggagaccatgtaaataccagactgcaggttggacccagagattcccaagccaaaaccttagctccctccgcacccgatgtgacctctactttccagctagtccgacccacctcaccccgttacagctccccaagtggtttccacatgctctgagaagaggagccctcatcttgaagggcccaggagggtctatggggagaggaactccttgcctagcccaccctgctgccttctgacggccctgcaatgtatcccttctcacagcacatgctgccagcctggggcctggcagggaggtcaggccctggaactctatctgggcctgggctaggggacatcagaggttctttgagggactgcctctgccacactctgacgcaaaaccactttccttttctattccttctggcctttcctctctcctgtttcccttcccttccactgcctctgccttagaggagcccacggctaagaggctgctgaaaaccatctgcctggcctggccctgccctgaggaaggaggggaagctgcagcttgggagagcccctggggctagactctgtaacatcactatccatgcaccaaactaataaaactttgacgagtcaccttccaggacccctgggtaaaaaaaaaaaaaaa

SEQ ID NO: 633 - DNA, 290 bp, Homo Sapiens
gcaaccgcattcttttttttttttttttttttttgatgtaacatttgttattttattggaaaaagctggtattaacatatttatagttttattcaacaattgggtaatttgtgagacaccaaagaaaaaaagaatgcacctatgagttacagagtccaaactgatcagggctgacaacttgaccaccatgtatcccacaccaccacccccaccaccaccaccaccaacagctttgttcctaagagaagagcttaatttaaaaccaaacccaaaaaacccccaacaacttc

SEQ ID NO: 634 - DNA, 348 bp, Homo Sapiens
cagggcactgagtgattctggatgggcttctgacctggggacaatttaaacagcattacaaccgacattttggttttcttggggattttataggccaggtacaaagcagaaagtgcatagaagatgtgatccactttgcctgggaagagaagctctttctcctggctgatgaggtgtaccaggacaacgtgtactctccagattgcagattccactccttcaagaaggtgctgtacgagatggggcccgagtactccagcaacgtggagctcgcctccttccactccacctccaagggctacatggggcgagtgtggttacagaggaggctacatggaggtgatcaac

SEQ ID NO: 635 - DNA, 557 bp, Homo Sapiens
tggcacgaggattcagtatgttttcaattctatcataattaatagtctttgcagttgtaaatgccacctttaggttaaatataaaccaagcatctgtcagcatcaatgtaagagagcaaataatgccttaaatgctaagagagtaaaactcaaactgcattgaaatgagcttgtcatctcaatgaacattcataaacacatccctgtttagttctgtgaaagagtagaattaataagtacatatattttcacatagtgattttatatatatatatatacatatatatatatgcctttctttagagttgtgctaaacagtgtgatttttctaatgcacactgctctgtccccttctcctctggttcctgttgcccagaatgtccttcctgtggaatagatcccaggagtcatctctcctaggaagctttctgtgaccacccctcctctgagaggctagacctcagtgcttttagagcacatgaatatctccctgtcataacattttcaccttctctattgacttgtgtgcctcatccatgagaactaagtgttcctta

SEQ ID NO: 636 - DNA, 469 bp, Homo Sapiens
tttttttttttttttttttttttttagagcaatgaacacaataccatttatatatgatacacaagacaaacatatttgaaagggacatccacaagtatgcaaacattcaaagttctggaaagacacacattaagccatgacaaccacagaagggctaaggaaaatttccatgttgaaacacttctggtgccaggtgtggtagctcacgcctgtgatcccagcactttgggaggccaaggtaggcagattacctgaggtcaaggagttcaagaccagcctggtcaacacggtgaaaccttgtctctactaaaaatacaaaaattagcctggcgtggtgggtgcgcctgagtcccactactcaagaggctgggcaggagaatacttgaacccgggaggtggggttgagtaagccgagtcgaccactgaacccagcctggtgacgagcgagacttgtctaaaaaagaaaaaa

SEQ ID NO: 637 - DNA, 475 bp, Homo Sapiens
  misc_feature (337)..(337): n is a, c, g, or t
  misc_feature (352)..(352): n is a, c, g, or t
  misc_feature (435)..(436): n is a, c, g, or t
aatcagtttacacaagagtttattttaaacgtgaaaattatagatcttgagattgaatccatcagtgattcaagagatacacctatttgcctaaaacaacctaagatgtattggttatggaatcatgtgttggataggttcttaagacctgtttcctcaaatcttgacacagttttcaagggtggcttattgacttgcacggttgggcagataatccagatttacctaagattgggtaaaaaagtcatctgtgactttgctggcagggcatttgctaagtggagtacaggatctaaaagggttttcttagacagggcaatattgtccaatgaagtangcagaaggactctgngttagaagcatctgcacaaaaactgatgagacctactcttcactgctctgcagctggatggctgatggcaggctgagcagtgnngaagcaggttttaacaacagggagtcccttcaggtcact

SEQ ID NO: 638 - DNA, 433 bp, Homo Sapiens
tttttttttttttttttttttttttttttttttttttacaaataattatgttatttattttgaataaaaaagtggccaaaataacaatactaatggctctgtatacaaaccacaacatattcaaggttatctcacatttacaaaactgccattatgtacagcactacatattcacagcaactctattagactctaagtaccagaatcatgtaagcaattgaggggaatcccaaatgagaaagagctaaaaccaatggtagttcatcaattggagaaatggccaaccagcgacttggtaaagaaacagaggttctgttacccttttaacaagtaataactaaaatatgattaccccacagggccttatactgacaaaccaccctccccaaatttccatttcattttctccataatcttccccacttcaaaattt

SEQ ID NO: 639 - DNA, 3107 bp, Homo Sapiens
aagcggcaggagcagcgttggcaccggcgaaccatggctgggattttctatttcgccctattttcgtgtctcttcgggatttgcgacgctgtcacaggttccagggtataccccgcgaatgaagttaccttattggattccagatctgttcagggagaacttgggtggatagcaagccctctggaaggagggtgggaggaagtgagtatcatggatgaaaaaaatacaccaatccgaacctaccaagtgtgcaatgtgatggaacccagccagaataactggctacgaactgattggatcacccgagaaggggctcagagggtgtatattgagattaaattcaccttgagggactgcaatagtcttccgggcgtcatggggacttgcaaggagacgtttaacctgtactactatgaatcagacaacgacaaagagcgtttcatcagagagaaccagtttgtcaaaattgacaccattgctgctgatgagagcttcacccaagtggacattggtgacagaatcatgaagctgaacaccgagatccgggatgtagggccattaagcaaaaaggggttttacctggcttttcaggatgtgggggcctgcatcgccctggtatcagtccgtgtgttctataaaaagtgtccactcacagtccgcaatctggcccagtttcctgacaccatcacaggggctgatacgtcttccctggtggaagttcgaggctcctgtgtcaacaactcagaagagaaagatgtgccaaaaatgtactgtggggcagatggtgaatggctggtacccattggcaactgcctatgcaacgctgggcatgaggagcggagcggagaatgccaagcttgcaaaattggatattacaaggctctctccacggatgccacctgtgccaagtgcccaccccacagctactctgtctgggaaggagccacctcgtgcacctgtgaccgaggctttttcagagctgacaacgatgctgcctctatgccctgcacccgtccaccatctgctcccctgaacttgatttcaaatgtcaacgagacatctgtgaacttggaatggagtagccctcagaatacaggtggccgccaggacatttcctataatgtggtatgcaagaaatgtggagctggtgaccccagcaagtgccgaccctgtggaagtggggtccactacaccccacagcagaatggcttgaagaccaccaaagtctccatcactgacctcctagctcataccaattacacctttgaaatctgggctgtgaatggagtgtccaaatataaccctaacccagaccaatcagtttctgtcactgtgaccaccaaccaagcagcaccatcatccattgctttggtccaggctaaagaagtcacaagatacagtgtggcactggcttggctggaaccagatcggcccaatggggtaatcctggaatatgaagtcaagtattatgagaaggatcagaatgagcgaagctatcgtatagttcggacagctgccaggaacacagatatcaaaggcctgaaccctctcacttcctatgttttccacgtgcgagccaggacagcagctggctatggagacttcagtgagcccttggaggttacaaccaacacagtgccttcccggatcattggagatggggctaactccacagtccttctggtctctgtctcgggcagtgtggtgctggtggtaattctcattgcagcttttgtcatcagccggagacggagtaaatacagtaaagccaaacaagaagcggatgaagagaaacatttgaatcaaggtgtaagaacatatgtggacccctttacgtacgaagatcccaaccaagcagtgcgagagtttgccaaagaaattgacgcatcctgcattaagattgaaaaagttataggagttggtgaatttggtgaggtatgcagtgggcgtctcaaagtgcctggcaagagagagatctgtgtggctatcaagactctgaaagctggttatacagacaaacagaggagagacttcctgagtgaggccagcatcatgggacagtttgaccatccgaacatcattcacttggaaggcgtggtcactaaatgtaaaccagtaatgatcataacagagtacatggagaatggctccttggatgcattcctcaggaaaaatgatggcagatttacagtcattcagctggtgggcatgcttcgtggcattgggtctgggatgaagtatttatctgatatgagctatgtgcatcgtgatctggccgcacggaacatcctggtgaacagcaacttggtctgcaaagtgtctgattttggcatgtcccgagtgcttgaggatgatccggaagcagcttacaccaccaggggtggcaagattcctatccggtggactgcgccagaagcaattgcctatcgtaaattcacatcagcaagtgatgtatggagctatggaatcgttatgtgggaagtgatgtcgtacggggagaggccctattgggatatgtccaatcaagatgtgattaaagccattgaggaaggctatcggttaccccctccaatggactgccccattgcgctccaccagctgatgctagactgctggcagaaggagaggagcgacaggcctaaatttgggcagattgtcaacatgttggacaaactcatccgcaaccccaacagcttgaagaggacagggacggagagctccagacctaacactgccttgttggatccaagctcccctgaattctctgctgtggtatcagtgggcgattggctccaggccattaaaatggaccggtataaggataacttcacagctgctggttataccacactagaggctgtggtgcacgtgaaccaggaggacctggcaagaattggtatcacagccatcacgcaccagaataagattttgagcagtgtccaggcaatgcgaacccaaatgcagcagatgcacggcagaatggttcccgtctgagccagtactgaataaactcaaaactcttgaaattagtttacctcatccatgcactttaattgaagaactgcactttttttacttcgtcttcgccctctgaaattaaagaaatg

SEQ ID NO: 640 - DNA, 287 bp, Homo Sapiens
  misc_feature (114)..(114): n is a, c, g, or t
  misc_feature (156)..(156): n is a, c, g, or t
  misc_feature (165)..(165): n is a, c, g, or t
  misc_feature (185)..(185): n is a, c, g, or t
ccctcagtgggagatattttgccaactgccatgtggaagaggtgcctccagctgcccgagacgaccgggcagcccatcggctatgggaggccagcaagaggctggcagggcttnggcctggggaggatgctgaacccgatgaagacccccagtctnaggactcanaggccccatcttctctaagnaccccccaccctgaggagcccacagtttctcaaccttaccccagccctcagagctcaccagatttgtctaagatgacgcaccgaattcaggctaaagttgag

SEQ ID NO: 641 - DNA, 261 bp, Homo Sapiens
  misc_feature (3)..(3): n is a, c, g, or t
  misc_feature (84)..(84): n is a, c, g, or t
  misc_feature (116)..(116): n is a, c, g, or t
  misc_feature (158)..(158): n is a, c, g, or t
  misc_feature (207)..(207): n is a, c, g, or t
  misc_feature (221)..(221): n is a, c, g, or t
  misc_feature (223)..(223): n is a, c, g, or t
  misc_feature (227)..(227): n is a, c, g, or t
  misc_feature (238)..(238): n is a, c, g, or t
  misc_feature (242)..(242): n is a, c, g, or t
  misc_feature (246)..(247): n is a, c, g, or t
  misc_feature (251)..(251): n is a, c, g, or t
aanaggaacgcccaaaccaagccgccccgtggtgcctcctttgatcccgccaaagatcccagaaggggagccccgttgacttcnatgacatccaccgcaagcgcatggagaaaganctgctggagctgcagacactcatcgatgtacatttcgagcancggaagaaggaggaagaggaactggtttccttgaaggagcgcattgaancggcgcccgttcananaaancccagcaaaancgcnttcnnaacntagaaaggaa

SEQ ID NO: 642 - DNA, 479 bp, Homo Sapiens
gcagcggcgttttcggcgactttcccgatcgccaggcaggagtttctctcggtgactactatcgctgtcatgtctggtcgtggcaagcaaggaggcaaggcccgcgccaaggccaagtcgcgctcgtcccgcgctggccttcagttcccggtaggcgagtgcatcgcttgctgcgcaaaggcaactacgcggagcagtgggggccggcgcgccgtctacatggctgcggtcctcgagtatctgaccgccgagatcctggagctggcgggcaacgcggctcgggacaacaagaagacgcgcatcatccctcgtcacctccagctggccatccgcaacgacgaggaactgaacaagctgctgggcaaagtcaccatcgcccaggggtgcgtcttgcctaacatccaggccgtactgctccctaagaagacggagagtcaccacaaggcaaagggcaagtaatgctgacgtcctgcccaagt

SEQ ID NO: 643 - DNA, 218 bp, Homo Sapiens
tttttttttttttttttttttttttttttttttttttttttttttttttgaagacaagggaaagcttttaattatgtgcaattttataatacagattataaacaaatagaacaatgaatagtagtacttactcctttcttgtcatgaatccaggatttaggtcaactcaatatgaaaaactgaagcacactacagacaacaggacatagagaatgagt

SEQ ID NO: 644 - DNA, 154394 bp, Homo Sapiens
gatcaaagggtcctccctggccacttccacctacaggaggtcaaaaatggagagagggaaaacaggttgatatcctgaaccttatggggctgggcttcatccattcctttcatgaatatgcacagacacatgtgcaaacacacacatacactgagctgtaccatgagcaaggcactgtgccgagtgtcaacaattttaaaagatttcacccagctcctgcctttgaggagtgcatggtccagaggaggaagcacgtgatagcagtgtagtgtgaatggtgctggaataggctgatggaacctcatgaatgcacggagaacagaggcctggtgccacccagtgtggacgagaggatggcatagcaggactaagaggtagccaggagccagctcatgaaaggccttatatgctgagccaatgctattgagattggactttgtcttaagagcaatggggagcaactgagcagttttgagcaggacagtggaattatagaatttattctttgaaaatattcctctggcttccgtgtggaggaaggattagaggtgggtggccagtgagggctttgcagttatccagcttagcaggatggagcactgccaacccaaccagagcaaatggggaggccaccagcctcaccctgaccctggacatgcccaccatgatgggaagacacagactgttccacaacaaccccttggaccccagcccagccctggaagaaccatgtaccttgactggcagggaagcctccactccgggcctgggcacacatgggagggtagggccccatgcttggtatgggctcaggctagcgctgctgccctggagtcagagctgtgtagagaggggcaagccccactcccagagagaaggagccacatgccgtgatggcaggtggtcggtgcagaccctcagctgttgggggagtggtcgggatgcctgaaatgtctgggaccgaggttctgggtgcagcctggagagttggggctgtgcgttcttgttgccattgttacattggctcatattgctgagtccttattcattaggctgttgggtacttttagacacacacacacaccagtctggagcacagagaaaactgtcataggcactcaaaattagagcaagttagataaaggggccagtaagtacagacctcacatgcccccagtggtggattcaggggtcactgattctatccattcctacagatgaacaggataaatatacctccgaccccgtccagtttttctatcccatttaatcactcctcagctgagaaagccagaaactcattcctgacgtggctgacaaatgctggggaaatctttggttttcttagagtgagcctctctttgtaaccagagagcaagagaaggaacagggccttaaaatcacttcaagtggcctgtgcctgatcctgaggtccagagaaggagaatgacttattcaagatcacagtttaatcatacatgcctttatccattcactcagcaaacacagttcaaacacctaccacttgccaaaccttctagatagttattaccaacataaccaagcaaagtatatggaatgccagatggcaatgggtacaggagagaaaaataaattggacaaggggatagacagtgctttggaggtagaggcagctttaagtagggtcacactagagtgaagatcgcaaggaggtgaagcttattctgggggaagaatattctaggaaaaggggacagtgagtgcagagtccctaagacaaggcatgctggggcgccggaagaaaagcagaggatggtgtagctggagaggaggtagccaggaggtgagttgtaggagattaagtcagagatgtgcgaggtatgagggagaagttcttttgtagagacttcaccttgactctagtcggatgggagcccatgtgggctctgagcagaaaaggaacagctctgacttaggatttagttggctgctgtgctgtggatagacagacagttggcaagcctgaagtcaaagagtccatgtaggagatccaggcaagaaataatggttgcttgaaccaaggaggcagtagtggaggtgggaagaggaaatcacacagagtctggccagattatggaggtaaaggcaacagtattgactaaaggaccaaatgcaagatgtgagaagaacagagtcagaatgaccccaaggtttttgtcccatgctgctagaaggaagacgtttcccattagccatgttggaggataccacaggagaatgggtctctgtttgagcatcttattcaagatgccattcaacatctagtgaaggtggacaggagacagtggacacaagtcaggacctcagggaccaggtcacaggcagagctagaccttgaacttcaagattcacagatcacactgcttctgactgaggagtgacagaagtgccagagcaatctcaccagctctggaatgttcatcacttgacggctgggctggcaatgaagaagctccatgcagtctttgggacaacactgcaccaagagaccacagcaacaggggagctcgcagagtagaacactggcattcaacccaaagcctcactgtttccagatacaagtgaaggtaaattccctgcccctccccctgccccaccacattcatccatccttgaagaactcctgggagctcactgggaaactcactgagcagtgagtaatatggttttgcttaagccttgctcaagtagcagaataagcaagtttgactaaaattctctagattcacaaatcccaaagccctaaactacagaaaacagactagtcaagagagaggaagctgtctgctggctatttgtggagcatcacccaatcaatgaacaagtatgcatagactgctgggtgcagagggaggggtgtttaagggatgtcttaatcgggttttccagaagcagatcctgagacaaggatttggttgcaagtagttatttagaaagtgaacccaggaagcaccagtaggagaatgaggaagcaagacaggtaatgaatgtattagtgaactgatcaccactgtgagcaattaggctcaattctactctaggaggctgtacagaatgtatctcagggttgtcccaccaaggggcaaggaaactgaggtacttatccactaactctcttttgttgttgagtgttcttcccacaaaccttaacttccaggcacttccagtttgtccctttattaagctgaccaatctcctgaggccagagaaagccttccagcagagaccagcaggtgtttccagtaggacactgtctgtgtgtactgaaaccagagtgtcatagggaattagaaggacgcagcaccaaccataatgggtttcacaggaactgcctggtctccacaaatagggactctaattttggtctggattctaagaaccaccttcaccccagtaaataggactgagatgacttttatcattcctgtaagcagagatagaaatgccagagcaaagtctcattggtccacacagaaagaaggaagcctcggtgctctttaattggagaccagagctgtggcaattcccaaccagtgtcagaattttgcaatgtgttggagacaggcagccctccctaggaatctactgagagacccagatctttgggcccttagtgagtgtttgagtaaataggtaagcagtggctgcggctcaggcaggagggtcctggaagttaatgtcccagcacagagcttcagcccagaccacagtgccaacatcctagcccttctggttaataattatccctaattccttagcgtgggaggcctggagatgaaaatcacaactctccatgtcctcatcagtctgttgtatgtgcatgtgtaccagatacctacatgcaacctcatgaaattccagacattctcatcaacaaatccctttgtcatcttcataaaatccaaagttaaagggcccaccctaagaattgtgactcatagattcctggatggatcaactctatgtgactattagagctagttttctcatgcccatattgggcaaaacctggtaaacagcacccctgtctctccctccccaaaattctgtctggatgagcagtcccttatgtaacaagctaaaacctttacaactgaccatatgtcaggaaacagtaaggtgtttacaagatacatgagaggggagtccctgtctttcaagagctcctgagtcctgccaatgaacaccttaagtacctgccctttaggggatacttgctgaaatcattccttgaatagaatgttagaatggcagaatgacagtggctgccaccgataggtcagagcattaaggactgggtcttttgaccgaccctaggatctctcttcagtggaactctgcccccaccaaccctattcagcctcctcctctatgctcaggcagctactgcttctcagccatcagtacaggctacctcattcaagttgaatttgcaatggctgttgtggttttttgtttttctgaccatgtggggaactctcatataggctttggaattatatagtcctggtttgtccaaagcactctccacaaacaggctgtgtgaccttcaaatagctgcttaacccctctaagcctgtcatctgaaagtagaaatgataatgataacattagagtaaaccacatgaaagtgtctttgtaggttaaaaattgttgaatattggcagtctcataggttccacctaaaacctttgtggggttctggggaagattcggtaagagaatatatgtattactgctagggcctcagatctaactagtttaggaccacagaagaaggtcacgttccccttagtgtctgaaccacatctcctgtcaaatatctacaggataggagttcgaagtctattcttacaggattcccagtgatttcaggaatccttgtggcctcttattccctcccttgtgttcccctcataaagatgttgatgtttattgtgcgtttactctctgccaagtattgtgccaggctctttgtacataaacatcgatgtacctctctacccatgtgaggtgggtgcttctactatcatccccctttcacagataatgaaactttagatatgagctaagaggaatgaaaaaattaaaaataaaaaaaaagcagataaggaaactaaagtgcaaagaagcaaaatgttttgccaaggtcacaaggacctcagggtccgtatggttgtaagaagcagactaggccctaaggtttcttccatgtctggcatcctagggggttaggactgccactgagatgctgaacaaatgataaggcaggcacttccccgacaaagaatttgtgttggtggcaggaggagagaagaaagctgcgaccaggagagctgagccaggagcttttgcccacctcatcatctaaatgagcatcagactctcaggtgttgcagataaaatcccctggcatgtgatcataggtgacatctacccagcgctcatgatggtaatgccaggcactactccaagctccttacatgatcaatcatttaaccctcacaaccttggggtctaaacagtactgttagtcccattttacagatgggtaaattgaggtatggagctgttaagtcactggcccaggatcacacaaccaataagtgacccagctggagatggaacacaagcaggctggctcccaagtccatgacgtgaaccataccagatactgcctgtcagaagtgtaaacagccctgtctcataatcacctcctttgatttggaagcctagaccaggggtcagcaaactatggcctgagagattcagagctaaatctagctgaccaactgtttttataaataacattgcattgaaatacacccacattcatttatttattgactgatttgcaaaaaacaagggcagcagtgagtagatgcaagagatcataggcctgcaaagcataaaacatcaactttctgaccctttatagataaaacttgttgacccctgacctacagtatgcacctaaggtgtgtcctatgtgtcctaagatggctccgacacttgctatgtgaccccagacaagttgctttcctgaatctccatttcctcatctgtaaaatgtgcttgtgggaatttggtgaggaagtgtgtgtatgtgtaagtgcctgacccaaggcaggtgtttgataagggtttgcagctatcattgccaatagtatgatgaaaattatgactgattcctatgatatcactgaagacagggcagagacctttatggccactttatgggcaatgaaaccctggtgcagagagaggatatggtgagaggcagagcccaggtcttcccagtccaagtcctgcactctgctgcctcctttcccccgccttccaatccatagctgccctagtcctcatttatgtttgccagcgtgcggagcagcccttctgtgtttgtgagttttcggcatctgtaagtacccacagccgcacagagctcgccagcacagacatttgtcaaagatgacatgccagtcatccatgccaccggagacagtgacagatgcgctctccagccccaccatccaggcagtggaggatagatggggccttggcaccggcgcccgctcttggcctggcatgtgcagggagctgcagaccaggcaagagacaaattgcagcctggtcagtgggcaggaggctcagtgtgcatgcaggcagatgtggctgcagcctgcccctgaaccagacacctgcctgccctccccagtgtcctagacctgcccaaatctggtgtttgcttaagatttgtatgtggtcactgatgaggaggtgagtgctcacgggctttgggttgtttccaataataatagtgacaatggctgatgctaacatatgctgctctgctgttctaagtccttagcatacatcgagctctttaatccttagccatccggtggtggaggtacaggaaactgagcctagagaggttggaggcctcttccaagttcacacattaagtggcagaggcaggaatcaaatccagacactctggctccagagttcaatgcccctcaggactactgtctaatatttgagagcctggagtggaggaaaaatcgtgactaggcaaaggattcaggtaggcagggctcaccactaacctgagtggacaggaacaggttgccctgcctcaatttttccaccagaaaaaatgagcagtggctgctattgcaaggccctgcaaggtcccagaccagctccagggcaggcctctctgttcttctgggacccttgggcactaggtcctctgccgacacacattcactccctccgcctaataatcccaacccagatcccctggagtatcatctcgtagttcattaaaccatcacctctgtgtccctgaggcaagcttgcagtctgttgagattttgtagggatgtttatggctagtggcagcaaagggaacagaccacataaaacaaaaagagacagtatgagctcttaaaaagtttccaaagtctggcataaaagctcccacaggtgtttcattcatacaaatgaccagcttccctccgctctggatgaagggtttggaaagaccaaagtctggttcagtccagccagtctcctattgtgggaccttccttgcgaaagtacccttctttctctgagccttggtttccttgtctgtaaaatgggtataatgatagtacctatctcataaaattattgtgaggattaaaacacaaaaaacacttagaacagggcccgacacaaagcgaatgctcaacaaatgccaactgttctcattctctggtttttagtttcctcagtgggaaaatgaggaggtgagttttgtgccaggtatgggcttctggctcgaacattctgtgacttcatgatgttcctagggtgcttccttgtctcctcccacttgcctgagtctttcttctttgtttctgtgagccccagccaattagtttactcacaagtgtagggtagagagaactacacaaacaggaagtgttaccactcatactcacagtggtgaatcattccaaccttccatcaagtggatccacctccattggtcgacacagctggggaatctgagctactgtggccagaactctgttgaccacatcctgcaatgacagacctcagaatccttcctgaaccttccatgggaaggagtctgtgacagcccacctgtgtagactgggcctcatcagcctgaatttgctgaaataagtaattccagtttccctgaattcatgcagagggcacccacgctgggaaggagtttctctggcttttcaagctccataaacacttgaaaagtcattttatttttcaatctgtgggcaggatgccaccaaacgaggaagcctcattaaacagaccttgaaggctatttctttgttgttttttttgtgggagtgggatgaggtttggtgttggcttttttttcccccactgatgctttttggataaacacataaatcagcatcatctatattcattagatatcgtgccttgttcagtacaaaattacccctgttttgcatgactttccccccttgtgattaatataaatgacttaagttaattatgtttctcttcatggaaaaatgtatttgtcaaagtgctgaaacatcaataaaaaataaacactgtcatttgaagaagggctcatttgcaaatgagtagctggggtgtggggaaaggaatggactcacccgtctggaggtgtcattctgattgagtaggcacacttcatatttactaacaatgacaaaagcatttttcttagttaagcactcacaggtcctgatgaggtagactgatgtcatcattattaacaataatgacacctcaggcgtagagaaaacaattttccttactagagaaaactaacgctgggtattttaccatccagacctccaaaactaggcccagcatggggactttgcaggaatagaccaagaggcaaatacagatgattggagtgggagggaagagaagtgaagaaaagcaaaccatggagctggtgtggcatctcagagcaacatggaagcttagggatgagacagcacaaacacctccctgggccaatgacaagactaagaaccagagaggggacttgccccttgggtaaacagcatattagtggcagagcccagagagaacccaggactcttgactcctagacccccaccctttccctgcactctgctgcctcccttgccaccagggatcaaaggctccccctcacttgagtaagtggtcaatggcaccagcaaggtgcaggggctcagactgctggacagtcagggccccagggaaatctacaggttactgacttttttcatggtatctggaatagcctttccccacactgactgtcttagtttgggtttcctgaaggcagaccctgagacaagatcgtaggtgctggtggtttatgtaagaggtgagcctaagacaccaagtgaggtggagaagtgagacagggaagggagaaaagccaatacagggcacatgtatgagggggttactgctttggacacttggactcactccccccaggagtgactgcagagaatatgcctctgagttgtcccggtgctggacagggaagcagaaatatttatttactgacctctggggactttaatttccaacccctctgggtcaccctgtacctaagctgagcaaactcccatagtaccagaaaaacccagagatccaaaaccctgagcaggtgagtgggaagcgctagtgggcacagtcactgtctatggcagatgcacgtgaacctggaggtggtatggggggatgtgggtggggcaggcatgttatctactacatcacccttatctaagtgctcccagccttccaagaaatcccccctccaagtaaacatgatcatcttgtcttctgatggtcagaaaccattcatctggccaccttattttacttatcttcttaaatattatttctgtcaccctaaatatactgtaaagcattcaagggcaaaattaaggccattatcattctgtcattcaacaaatacttactgagcacttactctgtgctggactatctttaaggtgctaggaatatagcatcaaagataaagaaaatccttgtcttcaaggaacttgcatcttaaaagtagagctagacaataaacacataaataaatgctataatttcaagtggtgataagtggctcaaagaaaaagaaagcagggtaaaggggatagcataatggaagtgcagtactcctggggacatttgagcaaaagcctgaatgaaataccggagtaagccatgtaagaatctggtggaatggaattcaatcaaagagaatgtcaatgcaaagaccctagggaataacaggaaggctggtgtgacactcagcggagtgaaaaagaaggtggtaggaactgaagaaggggacaaccagatcgtctaggaccttacctttaaacagtgcctggcacaaaagaaaggtactccaagctgactggatggatagatgggtggatataacagatggaaggatggaaataatgacagactagtggatgaagaaagaagaaaacaaagcaggttctataggtagagtgtggtgccaatggtgcattcaaagccagactttgcagaaatagcaaatattgaacccaaagtacccaatgagtagttattagaccaaggaagcagttgaaggagaaatgttcctctctgggcttcagccaatgagaatcctagaaacctgagtgtccttatctttctttacattccctgcagaggcccagcttctcccctgtggtgagtatccaataacattaaatggtattacagtggattaattaaactttggtggctggaagctagtgaatcattccctccaccacatattaccatgtttactcatcagggctccatttttaatagcggtcttttaattaaagcatgtcaccacggtccattagggaagaatttggaggatgagatgtgcatgtgggtgcaagcatcatttaattcagcagttctttactgagtgcctactatgtgcctggcaagtcttgaggtactatgagaaaataaggtgcaagtgaagggcttcaaggaacttacgcgatcaaacaaagtgaattcacactcacgatcaactgaggaacattggcatattaatcattgcttgccaactaaccagaattctttattagtaacttctcccacctagtttaatttggaagaaccaggccaatcataagaaaaattctggggcttttcgttttcagcaaaatatccagggtatactgtggcctagaccctgatgcagtcatatatctttgggaaagcctcctaaaacttctgagcctcaatcagtctcttcaagaataaaagcagaggttgttcttatccagaaattctctagattccagctgtaacattttctcatctgcgaccctccaaatctccaggcccagaccatgaggatgggttttccagaatggtggaaatttcatctaaagtcactctaagatttttacccaccagagaaagatccttttcattacattcatgacattttgttttctgaattttcaaagaggaccaagaagacctgtttggaagtaggagtagttacaatgcatgcactatgtgtgcacttagatgaggaggaacaaaccacatactgccagaaaagcaggctctattcatggggtgactgggtaaaaggcattggaactggaccctaaagactaggtaatagtttgagagtaggagaaatggggggaaagagccaattttcagcctgattctagccatgttccaagtatgggtccccactttgcaactgcatgacaagctcccccaggaggagggaccaggtctctttttcttttgtctgagattcttccttccagctcttcactccttaggcgagctcagccagtctcataggttagggcccacctgtgtgatgatgactcccacatttccatctccagctcagcacctctctgcggagctctctattcagtcagctacctgcttggcacagcacttagaggcttcaagacatcacaaacaacgtggacaaaatgaggctcctatttctgtgtccagtctgttgatcctcattcttcaggtctcaatgtaggagtcacttccccagaatgtaaatatatatcttaccccagaatgtgtgtgtgtgtgtgtgtgtgtgtgtgtgtgtatatatatatatatatacacacacatatatgaatatatttgtttatatatatttatatatacatatatatgaatatttatttatttatatatgaatatttatttatttatttatttatgaatatatatttatttatttatatatatattatatatatgaaggaggggtcaggacctctccgatccctcttctataaacaccctaggttttccttcacaaatgttgtcacattgtcaggaaatctttgtgttgtgatatcttttctgtgaggtatttgatgaatggttgcctgtcttactggatttttaagtcccattgggcatagatcagcccccatttactcaccactgtctcctgagtacctgggactgtgcctagaacataataggcccccagtaaatatttgttaagggaaggcatgggttccccaaccccagccagtgtgcaagatccatttccgcataccactggcacacaacattcaggcactgggagccgcacagtgacggaagcttgaacattttcttcgtgtcaagttctcagtaaagctattttctcacattgtctcatgtaattcttaaaccaccctggaaggaataggttttattgctgtttccattatataggtggggaaacatggctcagaggaaagtggcatgtccaagatcacacatcctgcaggggacagacagaccaaacccatgttttcaccagcctctcatctcacaaacaacactaggtttgttaatacctgggaactctgtgtaagcgaggtccctggcttggtgtcagaagacctgggtttgagtcttgacaatgtcctttgtaagtagcttaaggtagctcctcagttccctgtgagacactgcacacaacatcctttaaactgccttaagaaaaacagccctacaaatgaagactccattgccactccctttgaagcagctgctctcagagtcctctgcactgcctcatctgaattgaactatctccccaccttctcgcagaatcaaaaactagaggctgcaggctgaagagggcaccattattttgtttaactcacagagtatttaaaacttttttttaagttgttgggtaaattctaacaggttttcttcagggtccagatttttaccttctcttgaaaaattagaagctcctgcaacatcagtcccacagctctgcacatcattgactggcatcaattggttgagccaagaggtagccatgctctctccccagtgtgccactatccctacctgaggctgggaatcaggtgtcacttaccttgacatctgttcccttatttttccaacaatgggaatacatttttctgcattcatgtcgctaacagaactaggaaaagcaagcctggaccacaaggatagtgcagtgagagataatgtgagtataattcttgatgcaagtgaagaataatcatgagttcaatatggttaagtgcatgtgtttcaaaacaacacaacccaaacaagattcagcaaaaatactatcccccagctctattttgttatgttgcctctatgacccctgtaagattttgaatttcagatgcttgcttcagttaaataaagagttttctagatgaaggcatgcagtaggtctctaacactgagccactgccttgtccctctcaattaacctttgtctttaagtccctgtctaatgcctactagtagctaggtccctgagattgtaaagaccccaaggccccaggaccctgaagagcccaggaagtatcagaccaatgaaccagacctgaggtctcctgtactcttcagcttctgaactataggagaatcccaaggaaaacagggcaacaacaacttataataaatagtaatactgccagaatcctatttgtatttaccagtttgcaaagcactctcattcattcaacagtcatatggcaaatataagttgaggctctattacagatctaggccctgtgggcgtgatgttatacttggtagtcaagatccctgaccttaggaagcttccagtctggccaggaaacatcagagaactaacatttctatagcactttaccatgaaccagtcactcttctaggtgctttacactgagtaactcatttacccttcatagcaattctaggagataagtactgctgttttccccatttcacagatgaagaaactgaggctacagaagttaagtaacttcctcaagctcagtggtggagccagccatctgacccacagaagcaagttgctggaggcaggcttttgggaccacagactgggaagatgatatcttcaccagtgaagatttccaaggccaacatcacatggccaaattgcatcaccccatggccctgggctcttctccctgttcacactaaaactcagaaacatttattcatggggggagtagtcagcacactggttgctcaggtctgagaatgccagggctgagctagcagggtttgcaggtcccaaggcaatttgcatctcctgttggaagtcttcctcatcaaagcaacggaaatcaatgcagtaaatagttataatgaactgacctgctcacactccctgtctcttcctgaggaagaggaatcatgagagacacattgtttccaaatccttcacctctttccccctcgcctgatcctcccacagggaatcctctttgctcctgtcaacagtgtttgagatgtttcagagtttttattggatcttcattgtagctctgtctgtgaggattcagtgaagctaagatttaagggccagagagagttgaaacttctaccaagcatcagccatggctgccctgctttccagagtactgtccacggacctctgggcctcagggactagagaatgtcaggggaccatctcatttcatacatgtaaaaactgaggcacggagagggcaggaccacccagcacaggatcagcacacctctccaacatcagtacaccccaccttttcaggcagatacaggaatctcctccgcagcaaagtgttgataggtgggaagcagtgctgtgatgcccttagctttggcatccaaatgcttgagttttaatgcctgacccaccatttccttgctgtacaagaccttgagaaagctaattaacctctcagtaactgttttctcatatataaaacagggatgaaaataaaagtatgtgctccattgagttgttggaagctttaataaacacaggaaaaaaattagaattgtgtctaccatgtagtaagtattcaataaatgtcagtgactatgcccatgatgaatatggtgaatatgattatgatgatcatgggcattatccctggtgctaagagtcacttctacaggagtttagcttgccctgacctagaacattgaggcagggcatgaactcaatgttgcactgagaaccagtctaacacaggaatgttttctctgtttcacaggtgtcagtcatgttctctggataaatgataagattgaaagtccttgaaggcaggagacagccccagatatcgttttgttgtctgacacaataccaagcacaaatgatgtgcctaaatcctgggtctttaacccaaggccatctacatatgccctgggcctgccagctcatgaaaaccagcctctgtggcagttggggtgctaaggaattgctccagttgagcttcactggtttttactcttggctgtcatgcttggatctcttgattatgttccatcagttcaccccctgcctctgggctgaaagatttggtgttctttctaagttttcttgcatgatttgtggcttagaacgtctttcccgtacatctctagccctttccatctcaaatgttgactcagattattggctcagggcaaagccactggctccagctcttaaccctgtagaatctcacctatccctggcacccaacatagacatccaccccttcaactccaccaagctagggagtagagagtagttgtcttttccatccattctctcccttcccctccttgtctaatttctaagagttaagagtgggcacttttccaacatttccgtggttacgggtaactatgtcactcaatcctggccacatgaggtgggacactagcccactggaagagttttcttcttaatagaagagagaaatctgtaagaataatcccccactgttcctaccttgggtgctattatgtgaggccttgatgcttgaacctgtggcaatgatcttgcaacatgaggaaagggtcacaagaattgcagagatactgactggagccctgagctgttaaataaaccaactccaaaccaatgggaatggggtatggaaccaccagtctctagattttctgtgacaaggaacaattaagcttccatatttcttaagcctattttagtcaagagctcagttagttgcaggcagaagcattccaaagttttatcaagtaagcatcaatttgcctatcacaaactttatcaaggtgttggtagattctaccttgtagacataatgtgatctactaggaatctatgtagaaaattcaagaatccaagaatttgggagaaaacttaaaagtcgtccatatctgacatatagatcaatggaataaaatggagggtccagaaacaaactctcatatttatggtcaactgattctcaacaagggtgctaagaaaattcaatgggggaaataataggctttttgccaaatagtgctagataacagaatatatccacatgcaaaatatgaattcagaaccctatcacacaccatataaaaaaatagctcaaatggatcaaatatctaaatgtaagcactaagactactaaactttaaaagagaatgcatgtataaatccatgaccttggattaggcaatggtttcttagatatgacaccaaaagcaatcaaagaaaaagacatataaattggacattaacaaaatttaaaaatgttgtgcttcaaagaacatcatcaagaaaatttaaaaaaccttgaatactgtatatattttctccaaaaaagttacacaaatagccaataagctcacaatgtgcttctctgctgagcccagagagagcaagatactactactcaactagccctttagacagccaccacaaacacatacgaacgggcacatgggatgaaatgtgtttaccattcccaatctaggacaacggtacccaaaggaaatgttggtgactatgcccatgatgaatgcttataaaccaacatttcctttgttttgtaaaacatttgaagccatgtccatggacacagaggaaaccatgacggcaccagaatgtctatttctgtccttgagatgatgctaagactaggatatccctgtgtctaggaactcactactattgtactggtgtagctcagtccatctttgaggaacaaaaagaagttctatttttttatttcaacttttatttcagattcagagggtacatgtgcaggtttgttgcaagggtatattgcatgatgctgaggtttggggtacaattgaactcatcatccaggtagtgagtatagtacccaataggtagtttttcaacccttgcccctctccttccatccctctcttgtagtccccagcatctagtgttcccatctttatgccatgtatactcaatgtttagctcccgcttataagtgagaacacgcagtatttggttttctgattctgtattaattctcttaggattatggcatccagctgcatccatgttgctgcaaaggacataatctcattattttttatggctgtatagtattccatggtacatatgtaccacatattatttatccaatccactgctgatgagcacctaagttgattccatgcctttcctattgtgaatagtgctgtgatgaacatacgagtacaagtgtccttttggtagaatatttattttcctttgggtatatccccagtaatgatattgctaagttgaatgatagctctatttttagttatttgagaaatctcctaacagctttccacagtgcctgaactaatttacactcccaccaacagtgcaaaagcattgcctattctccgcaacctcgccaacatctgttgtttttttactttttagtaatagccattctgactgatgtgagatggtatttcatagtggttcttatttatatttctctgacgattagtgatgtggaccattttttatatgtttcttggccactcgtatgtcttcttttgaaaagtgtctgttcatgtcctttacccactgtataatgaagttgtttttcacttgttgatttgtttaagttccttatagacctttgtcaggtgcataccttgcgaatattttttccctttctgcaggttgtctgtttactctgttgatagtttcttttgttgtgcagaagctctttagtttaattaagtcctacttgtcaatatttgtttttgttgcaattgtttttgaggacttagtcataaattctttgccaaggccaatgtccaaaagggtatttcctagatttttttctagggtttttataggtcgaggtctcagatttaagtctttcatccatcttgagttaagtgataagtgcacacaaattaaggtttttttaagtatttttaacttttttaaagtattttttaggtatttttaacccttattttagattcaagggtacatgggcaggtttgttacataggtaaattcatatcacaggagtttgttgtatggattattttgtcacgcaggtattatgcctcgtacaaaacagtttttttttctgctcttctccctcttctcttcttccactctcaggtatgccctgatgtctgttgttgccctctttgtgtccatgtgctctcatcatttagctcccacttatacgtgagaacacgtggtatttggttttctgttcctgagttagtttgctaaggatactggcctccagttccaaccatgttcctgcaaagggcatagtctcattattttttatggctttgtagtattccatggagtattgtaccacattttctttatccaatctactgtttaggttaattccatgtccttgctactgtgaataatgctgtgacaaacatacacatgcaggtgtctttatggtagaataatttacattcttttgcgtatatacccagtagtgggattgctgggttgaatggcagttctgtttttagctctttgagaaattgccacactgctttccacaatggttgaactaatttacactcctaccaacagtgtgtaagcgtccccttttctctgcaaccttgccagcatcagttattttttgacgttgtagtaatagctattgtgactggtgtgaaatggtatctcactgtggttttgatttgcaatcctgtaatgatcagtgatgttgagctttttttatatgcttgttgggcacacgtatgtcttcttttggaaagtatctgttcatgtcctttgcccactttttaatggggttgtttgttttgttcttgtaaatttgtttaagttccttacaaatgctggatatttttaggtctttgtcagatgcatagtttgcaaatattgtcttctattctgtaagttttctgtttactctgttagtttattttgctgtgcagaagctatttaattagatcccatttgtcaatttctgcttttgttgcaattgcttttggtatcttcatcatgaaatcattgcctgtgcctatgtccagcatggtatttcctaggttgtcttctaggggttttatagttcgggattttacatttaagtctttgatccatcttgagttgatttttgtatatggtgtaaggaaggggtccagtctcaatcttccacatatggctagccagttatcccagcaccatttattgagtaggttttccctcttgcttgtttttgtcagctttgtcaaaggtgtgcagccttacttctgggctctctactctgttctattggtctatgtgtctgttttttaccagtaccatactgttctggttactgtaatccagtagtatagtttgaagtcaggtaatgtgatgcctccagttttattctttttgctcaggattgctttggctattcaggctcattttggttccatatgaatttttaaacagttttttctagttctgtgaagagtgtaattggtagtttgatagaaatagcattgaatctataaaaatttcttcaggcagtatggccatttttacaatattgattctttccacccgcaagcatggaatgtttttccacttgtttgtgtcatctctgatttctttgagcagtgttttgtaattctcattgtaaagatcttttactttcctagttagctgtatccattctttaggtcttttattctttttgtggaaattgtgaataggatagcattcttgatttggctcagggcctggttgttgttggtgtataggaatactaattatttttatatgaatacattgattttgcatcctaaaactttgctggagttgtttatcagcttaaggagctttggactgagactatgggattttgtagatacagcatcatgtcatctgcaaacagagatagttttacttcctctcttcctatctgggtgctttttattgctttatctttcctgattgctctggccaggacttccaatagtacgttgaataggagtagtgaaagagggcatacttttctttttctgcttctcatgggaaatgcttccagcttttgcccattcagtaaatgttggccgtgggtttgtcatagattgttcttattattttgaggtacattccttcaatacctagtttgttgagagtttttaacatgaagggattttgagttttattgaaagccttttctgcatctactgaggtgatcatgcggtttttgtctttagttctgtctatttgatgaatcatgtttattgatttgtgtatgttgcaccaaccttgcatcccagggatgaagcctacttgatcatggtggattagctttttgatgtgctgctggatttggtttgatagtattttgttaaggatttttgcatcaatgttcatcagggatattagcctcaacttttctattttgttattgttgtgtctctgccaggttttggtatcaggatgatgctgaccttatagaatgaattggggaggagtccctcctcttcaattgttttggaagagtttcagtaagaatggtaccaattctggtagaatttggctgtgaatccctctggtcctggactttttttattggtatgctatttataactgattccatttgagagcttgttattggtctgttcagggattcaatttattcctggttcagtcttgggagggtgtatgtgtccaggaatgtatccatctcttctagattttccagtttgtttgcatagaggtgttcatagtagtctctgatggttctttctatttctgtggggtcagtgataatatcccctttgtcatttctaattgtgtttatttggatcttctctcttttctttatcagtctagctagcagtctatctattttattatttttttcaaaaaaaactaactcctggattaattgatcttttggatggatttttgtgtctcaatcactttcagtgcaatatgattttggttatttcttgtcttctgctaattttggggttgctttgctcttgcttctctagttcttttcattgtgatgttaggttgttaatttgagaactttctaactttttgatgtgggcatttaacgctataaatttctctcttaactctaccttagctgtgtcaaagagattctggtgtgttgtatctttgttcttgttagcttcaaagaactttttatttctgccttaatttcattatttaaccaaaagtcactcaggatcaggttgcttaatttccatgtaattgtatggttttgagtgattttcttagtcaaattctatttttattgctctgtgatctgagagagtggttggtatgattttggttcttttgcatttgctgaggattgttctatgtccaactgtgtggtcaattttagagtacatgatatgtggttatgcgaagaatgtatattatgttatttgagggtagagagttctgtagatgtgtgtcaggtccatttggtccactgttgaattcaggtcctaaatatctgtgttaattttctgcctcaatgatctgtcttatactgtcagtagggtattgaaatttcccactattattgtatgtgagtctaagtttcttcgtacttgctttatgaatctgtgtgctcttgtgttaggtgctgcatatatatttagaatagttaggtcttcttgttgaattgaacccttcaccattatataatgcccttctttgtctttttctttatttttgttgttttaatgtctgttttgtctgaaattaggatcacaactcctgcttttttcagttttacattttcttggtagatttttctctatccctttattttgagcctatgggtgtcattgcatatgaaatggatctcttgaagacaagatattattgggtcttgcttctttatccagcttgccactctgtgtcttttaattggaacatttagcccatttgccttcaaggttagtattgatatgtgtggatttgatcccgtcatcatgttgttaggtggtaattatgtcaacttgtttgtgtggtagctttatgatgtcactggtctgtgtacttgtgtttttgtagcggctggtaatagtctttcctttccatatttagtgcttctttcgggactccttgtaaggcaggtctggtggcaatgaattgcctcaactttgcttgtctaaaaaggattttacttctctttcgcttgtgaagcttagtttggccagatctaaaatccttggttggaatttcttttatttaagaatgttgaatataggcccccaatctcttctggcttgtagggtttctgcttagaggtccacgttagtctgatgggcttccctttgtaagtgacctgtcctttctccatagttgcctttaacatttttttctttcatttcaaccctggagaatctgacggttgtgtcttggggaattatctttttgtgaagtttttgcaggggctctctgcatttcctaaagtttaatgttggcctctctagctatgttggggaagttctcacggatgatatcctgaaatatgttttccaagttgcttccattctccccatccttttcagggatgctaatgagtcacagattcagtctctctacatagtatcatatttctcagaggttttattcattccttttcattctctcttctttattcttgtctgactgtctcatttcagaaagccagtcttcaagctctgagatttttttcttagcctggtctattctactgttaatacttggaatagcattatgaaattcttgtaatacatttacaattaccagccctgtcaagtcagttatgttattttctatactggctattttttctgtcagttcctgtatcattttattgtaattcttagcttccttaggttgtgtttcaacattctcctgactgttgatgatcttcatttctacccatattctgaattctagttctgtcatttcagccatctcagcccagttaagaacacttgctggagaactaatgtggttgtttggaggaaagaagacactctgcgtttttgagttgtcagagttcttgtgctagttctttctcatctgtgtgggctgatgttccttcagtctttgaagttgctgacctttggattttttttttcttttatcctatttgatgaccttaggggtttgattgtggcataaggtggattcagtcaactggcttcatttctaaaagattttagggagccaagtctcagctcaggactcctgggccacattctctaactctgggagactggtattgagccccagctttgttccctgactcctcgaggttaggaacctgatgcactgggggggccaagatgctgctggaccactggtcacagtgctctggtggatggtgccagccaaagcacttcacagggcagtggtagtgagctctgtcctcatttgcacatgccagtagcagtgcagtggcagtgcagcagggtgcatgctcagctgcagcagggtgttagtgggtactggggtgctggcctctgtgcaagtgttcacagcagcagcagtggcagcacagcttggggtgggccccactggacactgggcaactgtgcatgcattaacaccaatggtggtgttagcatggagacagggtgctagtgggggcaggactgtgtgtacccttgtgcacgtacatgagggcagcagtggctacccagggtggggacgggtccactgtttcagctggggtcaggcattggcaggcaaggctagcaggcttcatgcctactaatactctgacaacaatggcagttgggggggcagtgcactcaagtcagcagcagtggcatgtcagggtgcctgcacacacatatccttgtggagaaggaaaggcaaagtccacctgcacaaggtccacatgtgctggcaaagtgatgtggggagaccctgggtgagtatatacaggcaaagtggcacaggggaggctacagtaggggaagagcaggggtggagttagtgtgtgtccacgggtggctctgctggagcactctgccggtcaggtacagcctgccagccctgaagctatgatgcaggccaaggcagtacctgagggctgcactgcaagcagttgtggccaggctggggcctcaggagaggccatcagactaaggggtgctcagatcagactagtcctgtctcatgggcaagaccaccctgcagttccagtctaacagttcccctagggctatagtctcttatggcagcaagttgagcctaagaggatgggcatccctggccatgcttcactacagatgcccctacaccaaaccctctgggctccacactacctggagttcttccccatctcttctctaagcagcaattcctgccaattcaagtgtccatggtagtcgagtggtcacctcctggtggaattccagaggcccaaggttagagcaggttgctccttgcctgttgaactcaccccttcatgcaggcatcattgaggggcaggaacgagtcccagtgtgcagaagccccttgcagggttcccagcttcctcctgcttcagcccagcctctgtgtcttccttatattcaccctgaatgccttccctctgaagacatgctaggagtgcaccagtcttcctgatatcccagtctctcggtgagagatgttcctcctggctgtgtctagtcagcagccatcttggagctagtcctctgagctcagtttcattcttctgcatatggatagtcagttactccagcaccatttattgaatacggactttctccattgcttatttttgtcaactttgtcaaagatcagttggttgtagctatgcagctttatttctgggttttctattctgttccattggtctatgtgtctgtttttgtaccagtaccatgctgttttggtcactgtagccttgtagtatagtttgaagtcaggtaatgtgatgcctctggctttgttctttttgcttaggattgctttggatatttgggctctttttttttttggttccataaggattttagaagttttttctaattccgtgaaaaatgacattggtagtttgatcagaatagcattgaatctgaagattgttttggcagtatggactttttaaagaattgattcttccaattcatgagtatggaatgtttttccatttgtttgtgtcatctatgatttctttcagaagtgttttgtagtttttcttgtagagatgtttcacttccttggttagatgtattcctaggtatttgtgtgtgtgtgtgtggcgattgtaaatgagattaggttcttgatttaacgctcagcttgaacattattggtgtatagaaatgctggtgatttttgtacattgattttgtatcctgaaactttactgaagtcatttatcagttccaggagccttttggcagagtctttagggttttctaggtatagaaacatatcatcagtgaagagaaataattcgtcttcctcttttcctatttggatgccttttatcttttctcttgccagattgctctggctaggacttccagtactatgttgaataggagtggtgagagtgggcatccttgtcttattctagttcttgaggggaatgcttccaggaaaaagttctatttcacaagcaatcaaagaaatgtaaaacaaagcaatgaacatttgtttttcatccataatattaacaattagttaaaatataatattcagtggtggcaagggtatggtaagatagactcaagttctcactggaataaaatgtagtccatctgtagaataaagttgaacaatgtgctcttaaacccaggcattccatccttattcttatcataaaactcagagattaagatgggtgttaattatataaagtcattaatcaagattcttattgtacaagccagtaattgaaacaacttgtatatgcagcaagaagggaattgttgaccttatggaagagtagaatgatagatgccagcagctggaaatgggtggggggaatgaaaagaggttggttaatgggtataaacctacatttagacagaaggaataagtcctacatttaggtaggaataaacctacatttagatagaaggaataagtcctagtggacacagtaaggtgactatagtaaacaatttattgtatatttcaaaatagctaaaagggaagacttgaaatgttttgaacacaaagaattaataaatgtttgaggtgatggatatcctaaataccttcatttgatcagtacacatcacatgcatgtatcaaaatatcacatgtaccccataaatatgtataattatctatgaataaaaaaagaaaagaaagaggggaatggttacataagttataatatacctatatgctagaatggattttgaaatagttggatggcatcaccatataacgttacatttaaaaaccagggttccagccaggcatggtggctcacacctgtaatcctaacactttgggaggccaaggcaggcagatcacctgaggtcagaagttcaagaccagcctggccaacatggtgaaaccccgtctctactaaaactataaaaattagccaggtgtggtggtgggcacctgcaatcccagctactcaggacgctgaggcaaaagaatcacttgaaaccaggaggcagaggttgcagtgagctgagattgtgccactgcactttagcctgggcgacagagcaagaccctgtctcaaaaagaaaaaaccagggtccaacattaaaatgtacatgatttctaattacataaaaatctttgctaattcatagaaatgtgactggaaagaaatacaacaaagcactgataatcacagttactggacagtgggatgaacagtaatgcatatttctgtctgtattctttcctatactctccacattttctcaaataatcatgttttcttttttagaggaaaaacagcattattacaaaaaagaaaggagccaaagatcttaagtcaccatggctccttctattgcccgctgagctgtgtctcccaagctcactgaccttcagaggctttgttcataaaataaggacaatggtatctaagagtcttcacagaattgctgtgaagataaaataagaaaacgacatgctttgtaaattgtaaagcattgtacaaatgttagctgttactaacattataacacagaattaattccaataatctgagagaagagaaaagaaattcataataagatacctcaggctttgacataggaactaggaaaatacaagaataagctaagaatagaaagaagtaaaacatccacaggaatcctggagaatgttcactagcatatctcaggaagctcagagaaaacatttaacaagaagccaaaaaaaaaaaaattcacaaggcaaccaaatattaacagcactgcttggctaacaagccacacatgatattttgtctttaggttttttagctttctgttttgtttcattttgttttttcaagtcttctgaaaattgagaaatgatcaagttgggagaatggaggagttcactcattgtgacaggcagataaaaattagagataacttaggtcaaaatctattgaagaagcatcttgctccaaaagtcaaaatcagcacccagagggagaaaactggaggacagagagggcacttaatgatcacagggccaggactggactcagaaatgacaaggacccagcaaaaggattcaaattctttaccttgcaaaggaaaatgcctgtggccactcgttgctgcccactccttcctatacaagactctcctattcttgcttcttgagtgctcacctgtcccactcccctgcagctccctctctgacttcccttccctccccactccacactgtgcctgctctaagggtcctttttcactccctgctcttgcctatcctccctgttatttctccctgttctagctaacaccttcaaatctacatcttcatgcaggatcatttctcaacccccttaccatctctctaaatgcctctcagacacacacccccagaagccttgctgcccctggaaactaagcctgcagccaaatgcgtcttccttttttttttttttttttttttttattatactttaagttctagggtacatgtgcacaacgtgcaggtttgttacgtatgtatacttgtgccatgttggtgtgctgcacccattaactcgtcatttacattaggtatgtctcctaatgctatcgttcccctctcccccaaccccacaacaggccccggtgtgtgatgttccccttcctgtgcgtcttctaaaaaaaatgcgtcttctaaaaaaaacgcaaacaaaccagtgaaagtgggttcaatgtatccttacttgctagtcctaataacaattctgctagaaacaatttcctcttgtgcttcttcttctcatcccaaactaaactgatcatgtcccaaatactattaatacaatctttcatatttttttctaccaggcccttccacctgcccccatcccagtccagagattgataggtcactgtggcagctttctgattaccttctcatcactgcatctcctctccccaatcacttgtaaatgccactgtcaaagggagttttgcaagacaacactttctcctcacttggattctcccaacaaaggctttcaatgactaccttaaaggcctattagataaagaacaaatgcttttcctaacattcaagctcctgagtcctagctaagggctggatggatggaaatgtcttggccaagttcaagggttgggccaagatggtggccaacattagatttcaagcatgaaggctagggataccagttgtcatgagttaattgtgcatgggcagggctgttaatggtcaaaaaaagagtcaagtcttgggaaagaatataattgtcaacatttgagcataaagaacaacctcccaaagcagaatcattccagaaatggaaaggaacacagagatgagaggcaggagggtgggcttcagaaacaaggacagaagccaaagttggggccaaagaggcccttcccatgggcagatcagaagtgtgcttgctcagagcccaggaggctgaggttgggcaacatagtgaatgtgaagccaactctgtggagcacttgctccccacacagtgctcactcttctccatagaataaggcaagctgtagctctgaaaaagtcaagagtgtagcttctggaaaattaacctaaaagtatagaagccacccaaagcatagaaagcatccattcatcaactgatgaatggatagacaaaatgttgtatatccaatacaatggaatattattcagccataaaaaggaatgaagtatgttgcatattgcaacatgataataccttgaaagcattttatgccaagtgaaagaagccagaaacaaaaggccacatattgtaagatttcatttatataaaatgtccagcatatgcagatctctagagacagaaagtatcacagattggtgattgcttagggctgggaagattgggaggctaatgggtaataattaagaggtatggggtttccttttggggtaataaaaatgttgtaaaattgatggtggatgaatgtacaactctatactaaaacacattgaattatacactgtaaatggtaaattgtatgttatatgaattatatctcaataaagctgctttttaacaaaggtggcagttggttcaaagtagacttcaattctacacgaccaaagaaagaatcaaaaaataagtcagcaaggaaaaagtgaattttataacacctctatcctggcagcttgtggaaagcccaaagacgtgctatgtaatcttttctgtctccattgcgagattattttcttttctctgccccttggtgctacctctgcagcttatacatatttctgtttctccttcaatagcaatagattataactgttggccaccctggctgcttccctactgcacactgtggctctcagaggactgagactgttccctattggctcctatatctctagtccctggcacaagattgatgctgactaaataactgttgaattgatattaatgttataaatcctggtcccttttatctaaaaaatcttactatctgatgagaaactagtaacactagttgctgatgaggagaactcagtagttagggagagggatgggagagaagcattttgcacaccctttagtacctctggaatttcatgtatgtcaatatgtcaccttctccccagataaattaatttaatgttttaaattgtttaaaaatatatcatttattagcaaagacacagaattcatgcatttgacaaaacagagaactgtagaatgtgacaaagctctcaggagagcagactcagacagcaaactcttcagtgggaggcccaggggagtggaaatcaaagtccccaggagaccagagtggagagaattatagctctcttctcataattctaaggaagcaattgtagttctccattcattcttggtaatgacatcagggtttctctgccagcctcaacaatctcaccactgccagtctcaaggctgatacagattcatccacatcatgtggcattcacatccttgctgccatgcccacctgtccactcaggaggacagctgctgcagccagaaactgggagagaagacctcattgctgggcagaattactcactaactagtacagcatacgaagaccaccctcgccacacaaggagaggcacacctggaagcactggaagagaggctaacctcgtcccccatgccctttcctcctttctttgaaggtttttcccctctcttgggaccacttatgcaccttaagacccctggaccctcatgctgcacctcattgtccctaagcactgacgcacatcacagtgagaaaatagaaaataatgggacccaaatgtccccaaaagacaccagccctcacagggagccagcacctggttggggtacactttgaaatggcctgtagatgtctcagcctctgcctcctccaagtaagcaccctgaaagcagctctgcaactcctcaccattcatcaccagcccccagcatagtcccggtacatgacaggcagtatttgttgtttagctaacaatgaatgagcatgtagtagtgccatgcactgttgcagttcatttaatcctgacatcagccttaagaggcaaatgctattagtcccattttacaagtaagtcacagagaacttgaaatcacttgcccaagagcccacagctactaagtgacagaaccaggacacaaactcaatcggctacagaattctttagcttaactgaaatgctcatgactcatacaagagatattgaaagtgtgtgtgtgtcagggtgaaggtgggcaggggcaggggtagaaggaagaaagagaaagacaagaaaagaagggtggtaggcagggagggacagaggaggagaaaaagtgaggtggatggaagggaggccactaggtcccgggcacaggctttccaccttgagaggcagcaactctatacggtcagtaccctacagtccagagactgacccaggttgaacaaactctcaagtgactgatgaataagccagaatatcaatcagtttattagtttcagagagaactattacttccaagaaaaccagagtctcacgtccattggtgggaggtcaatgtacatgggaaaaggatcagcctcatctgaagcttgcgtggaaagcaaggactcggtgccagagagccacaggatgatgttaatggcttgtgtcagtgagttatgattgtctggtgctccctgctcctcctagacccatctgtcaagcagagcggatgtttctgtcagccagtcgggaccccttgctttggacaatgccggaaaaacactgacaaattactgctccgtggcatccccttcctctagaccatgcacagaccaccccactttggttaatacatttgtttcccagacgaggcacattgtgattgattagatttcacaattgattaggtttcacaatcccagatgtttaacttcattatgcatggattcttcttactaacataatctcagaggacaaccatgttctgaaaaataaaaaggggaaaaaaacaggacttattctcaggcctgttgctgctctcatcctctaagttggctctttgtctcagaaaagggtccagtttgtgtcttcacagtgtgaacaaattgggaactggttgggagggggacatgatgggatgggatgaaaaccaagcctggattaaggaggctgactccactgcagaggaatgagcttacagctcaaaaaactgtgatgctactctagttagtctaatttaatcctagctgcttgtgaaggccatgcataggctgcctagcttatcaaatttctctggtacagtacaagaccttataaccagtagcagaattttttggtgtcactactaaaagtcatatttaaatttaccaagcaccttctacattgtagatgttgtgtcaaactcttacacgcatgtgttagttaaccattgctgtgtaacaaattatcttccacgattcagcgtcttaaaacaacatgcatcgactgtcttgcagtttctgtgggtccaggcacagcctagctgggtcctctggctctcacaatgctgcagtctcatcttgaggctggactgggaaagactcacttccaagctcatgtccatgattattgtaaagatttcttccctcttgaattgttggactgagagttctcctcctcagggagcccccatgagcttttggctggagacctccacacttccttactatgtgcccttctccatagaccatctcataccatggcagcttgcctcattagactgagcaagtgagagggcaaggaacagtaccagtgacagaaagagagagagagagaaggagaacgctagcaagaaagaagtcacagactacagacttaaccatggaagtaacaaccccttacttcgctctattccatttgttagaatcaagtcactaggtcccatgcacactcaacgggatgggatacagaggggataaatactaggaggtggggattgttgggagccagtcagaagcacatgacctcctcaaggcaaccctgtgagatagatgctattcctgttctatgaattttccagatgtggaagctcagagaggttaagtcagttgtccaaagtcacatagcttgctgatggtggaatcagatctcacatacgaatctgattttataatcattcactgagttcagcttggtcaagtgattttcccatagtggtcccaatatcctatcaaaagaaggtcactcattctgtcaatgagtaaggttggttgcctctaatttagcatgagactaatttgaagggagaccaatttttggtggccactagcatcaggaccaagatctgggcctttccaattctggactttgaatctcagacttgctgcagagatgtcctgtgctcctcctccaacctggctctgtcaacacaaggcagtacctcactcttggtcactgcctggtttcccttccctattattgtagctgatgtttgtatatacagtattccccttagcaacctgcccaatgacataaccctgtagcaccaggcatagttcaataatgtctcataaacacttattaaacactactttgtaccatgaattgagtgatgcagagaaaaatcagacattgcacctatcctcaagacagtcacaaagtgtcttgattctagcattgtgccatccaatacagtagctactggttacatctggctaccaagtacttgcaatgtggctggtctgaaatgagataagttgtcactctaaaataacagtggatttcaaagacatatgaaaaaagtaaaaatatctcatcaatatttttatattgattgtaaaacaataatatttggggtatgttgaattaaataaaatatactattgaaattcatttcacttctttttagtttttttaatgtgtaatgtggcattccacatcggactcacatttgtggctcttgtcacatttcccttggaccaccctggtctagaggcagggagtcacgtgatacccacaattcccatttattgagggttcaccctgtgcctgtgttccacatactctctctctacatggaacacaagttatttcatctagtcctcataataaactcatgcagtagacatcattatttcctcttaccactaaagcggaggctcggtggactgaagcaccttgcctacagccacacagtaagtgggtgagcaagactgagaagctatggggctccagagtccatcagaaagaggaatacacacctgtgctgttcagagtgatggacgctggaatggagccacatggggaacccaggagaaagcatccaactccaccttggaaggccaaggaagacctccagatagacatgacgcttaagctgagtaagcccagaataaagatatccacgaagccaacaggcaggagagagctttcccagcagaggaagcagctggcgtgaaaccccagaagcatgaaactgcgtggtgcattcagggaacagtgtgggtttgacataagaaagtggagggagataagacgagcaacataagcagaaactttgcagtaaaagaactacacaccgtgcagaggggtttggactttgtcctgttgggtcagtagtctcaactctggccgcgcattggaatcaccaggagaactttttaaaataccaatgcccaggacccatgtcaaagcaattaaatcggaagatcataggagatggtgatgaggtggcccaggctccagaatttgttaaatactctctccagcgattctaatgtgtggctgggttgagaagctcttcatagtattaggaatttgcggaatagctttaagaaatgaagtcaaatgatcagagttttgtcttaggaagatcattctgagggttgcatcgaaaatgaattattttccattctccagtaactctggaagccgggaaaccaagcgggtttctactgaaatagtccaggtcagggatgctgaggcctgaggccacgtagatgaatggaatggctgtgggggttgaggtgcggagccccctgagagaggcccctgctatggttctgaccacctccagcctcaagcacttccaactgcctcctgcatctctcccactaggtgtcccacagacatctccagctcatcacatcctcattggaattattacattcccccagagcctgttcctgcaggttttcctaaggtttccttcattcccctcatggctccctagaaaccctccacccctccaggtccatcatcaactcctctccctctctcccctcttttcccacatccaatcaatcagcaggtcttgttgcttttatcctcaaagactgtcagaacagctcttccctgtcactccccagcccctctcttattcaggctctttcatttatggcttgaatccttgtgacattccctgtggcaatcgctactggatttggatgtccaaagccatttgaaactctgattcaataggtcgggtgtagggctcaggcatcacacacatgcacacacacacacacacacacacacacgcacacacacaaagagatataatctcccaaagttattctaacttcgttttagatatgtggttctaaaagtatgtccttgtaccagcagcatcaacatacctgggaacttgttagaaatgaaaattcttggacctccaccccaagtctactgaatcagaaccctgggggtaagacccagagagctgtgctttaacaatcccttcaggtcattttgatgcacattcaggttcaagaatcacctatccaaactactcatggaaatctcattcccacttgctaatgattgattttcagtgtgcacataacccagttctggccaatgaaacatgaaagaaaatcttccaggagggcttctggaaaaaaaatgttttctccctgatagaaaaagggagccatattttaaaaaaagctctttctccaatatgtatactttatgtgagtaataggacctgttctcatgtgaggctgtgatgcttggagctatggctgctatcctgggaccatgaggagaaagtggagaggatcacaggaaagctaatccaaaacctgatgttaaactttcaaattaatcaattctggaacttcccaatcttcatatctgatgcaagatcactgtcattcttatttaagccactcttagttatatactttcttacttgcagccaaaagcatcctgacttctatagcctcctgactgttatccatagttccaggctcttcccttcaaatctatcctactgtgagaaactgtgaagggtcttagattttaccctatctacaggctaacaactgagcatgaaccctggtgaaaggcataaaacttcttggtcagaggcaaaatattgtattactcatggtacagcaagcaccatgtttgcatcagttccccttcttctcaagtcacacagggacaacactgtgggcccatgtggtacctacacacccagtgggttgcattacaggagaagaaccccaagccaagggcccaaaaaagcagtaagcagcaaacaacaaataggttctcctcctgtcctcccaggtagggatggttaccttgccctacttagtcacctttatgaccagatacagaactgctcagtatcgagaaagagacaaaccctgcaatctgagacattcagcaaaaaagtgcagggaagttcagagctcatagtgaactgcctttccaacaccgtgtttatcttccagctagagctcccaaatgtccatggctgtagtcacctaagtccttgcctcagataccagcagagtctgagctagcttgagcccttaatcatcccttctcatttctggctgaaacctatcacaccctccaaaaaagactgactatgccccagcggctcaaggatactcaccaggcactttctcttacctccgcacagagtccacttcttgtctggcatcacagttttccagactttcatcttccaccaggcccctcctctcatctgcatctctttgaatttatgcttcagtgacagtctcagtcttgattccccttttggtcctacgtgcccagggttctgcattttccagggcagtccgagtctactttgttctctcaccgccagcaccctggacttccaccagtccagatgagagttcagacaagcggctccctgttgcctcctaagcacataacactcctcactctggaatcaaagccctacatgccctcctccaatttccttctctgaaattatctccaactatccctctacagtctacacactccccagggttcctggactatgtggttttctccatcccatctgttgtttttcccctctagacctttcctcatgatctttgctggatttagaatgtgctcttcctccccactctgctcctggggaaatcctatccctccctcaggcccatctgaaatgaagactttggtaaacctctgtacggttctctccctgctggccaggccctctgcttcttttcaacccaggggctgtgagcttctcttacagttctcatctttccagtcttctgtgacgtcctcccaggctggtctcattcctgctgcaaaataaaagctcacaaaagcagggactacttgatactcccttttgtctccctttctgacctgagtactgttgctagctctgttactaatagtgttctcccctaaatgcgtttgaacaccatgactgctttttcctaactaaagcaaatgagaaagccctgctgtgaactgcatccccgccatgctagtccatttttctgctgccttagataccagaggagggatgaagccttcgtgtcactgaaactgatgtcacttgttgagtccgccaaagggcaaataggcaaaatacaactctataggggaaatatgttgtgattgggggtgtgcaaactacacaatctcccaaacagtgtgctgagaattgattccaggtatatctggatacttcagcccttgcagtagctaggtggggcctggattgggctgagcctagtgggctgtaaaaacatcacttttgtgtatttatgaaaataaaaaggattgaaagcctagctttagggatgtggaattcctagcaccaaagggcctagcatcttgagggtctaatcctgcaaaggtttagactgtttcactcataagcaccaaataaagggaattgtcaatgaaatgaagataagaatgaggagttgagagggggacaggctatgctgaaaaatgtgatgaaagcttgtgtatggattgggactaggatggaatggctcagaagaaacgagatgggcataggtctagcatgaattgtggtaagaacaggaggcaatgggttagagagggagttaatggaatttgcgtgagctggaaatagggtggatggataggggagtaaggctccacccagaaaaacccacctggcttcctcaatgtttcctttcctccatccttcccagtaccctgatggatagctttgcacagataaattttgttcccagcccatgtccaaacaatatcacaaaatcagccctagccagttgtttctgtttacagccctgtctgtgattgatccagctctggaaaagcccatttatcatgaggaaccaaagcttcatggcctactgtctattttgttgctttattccctagcactaaatgggacttcaggacctcccacttgttccagtacccaatgacatgcctatatttccacactcagtttgcccttcccttcagcccctctagctctcagccttcctgggaccttaaataagtcacgcagctcctttcaccaactcttttcttgttctcgttacttctgggctcttctgcctttctatctcgtctccttctctcagcagctcactgtcctttccaatttcagctgaaatcagattccttctcccttgcctttgctttcccacctcccatggcctctcttatcatttattatttaactcagtcaccatattatgtatgcacaagagccatttctgaacatggtcggcatgaaaaaaataggacccaaagcagaagcaaacacctcttccctatcagtctcacagctccattgtcatcctgctccagtcctgagcaaggtccagcgaaacagccagatctggccaacacaccctcaagcccaattaacttcttaggttggacacagggaaaatttccagatggctttttacagatatccttcaatttatgtaagagatgccttcctggaagtggatgtttgaatgaaattccaaatggaatatcaggagggtcaggcacacaggatgtgtggttcagagacccaggttctattcttcttgagatggagtctcgctctgttgcccaggctggagtgcagtggtgcaatctcggctcactgcaacctccacctccagggttcaagcaattccctgcctcagcctcccaagtagctgggattacaggtgcccaccaccacaaccagctaaattttgtgggtttttttttttcttaagtagagacggagtttcaccatcttggccaggctggtcttgaactcctgacctcatgatccacccacctcggcctcccaaagtggtgggattacagacctgagccaccgcgccctggcctccagcttctattctttaatagccctcattaacttacttccagaacttgggcaagacctgtagcttctctagatctcaatttccccatttataaaacaagggagccagactatatttcctcaagtttctttcagtgtgaaaattcaaaaactcctattttacttaatgatccacatgattccattggagatccttcctacagttaaaattcagctctctcctcatcaataggtcattacggagcatgtgctatgctgctgcgcctcattagaagggaatgtagattaacctggtgaagccctccttttatagatgaagagaccagagcccagagaggagaagcacctaatcctggggtcacacagccagtgagaggcagagtcagtctaaaatgtacaagtcctggcctgagactactctttttttcctgtgtggtgttttaagcatgactgcaaatatttttatcctccttccatcaagaggtagatctatgtcccctactttctttttctttttttttttttttttttttgagacggagtctcgctcttgttgcccaggctggagtgcaatggcacaacctcagctcaccgcaacctccacttcccaggttcaagcgattctcctgcctcagcctcccaagtagctgggattacaggcatgtgccatcacacccagttaactttgtatttttagtagagatgaggtttctccatgttggtcaggctggtctcaaactggcaacctcaggtgatccgcccacctcagcctaccaaagtgcttagattacagctgtgagccaccacagcagaccttgtcccctactttttatttgaatgggtccttggcacctcccaccaatagtacatttggaatgaatgctatgtaacttccaaggcagggtgcatagaaggccatacagcttcagcctagctctcaaaggacatttattttctctcagagccttcatgtaagaagtccaatgggttgggtgctgtggctcacgcctgtaatcccagcactttgggaggccgaggtgggtggatcacctcggaggtccggagttcaagaccagcctggccagcatggtgaaaccctgtctctactaaagatacaaaaaaattagcaggatatggtggtgcacacctgtaatcctacttactccggagctgaggtggaaggatctcttgaatcccggaggcggaggttgcagtgaaccaagattaaaacactgcactccagccttgctctgtctcaaaaaaaaaaaaaaaagtctaacaatcctgagaactccatgctctctcagctgagcccacccgtaagccagcccagcccagctgccagacatatgagtgaaaaaactattggaagtggatcctccagcccccagtggttgaaagcacccccattccagtcctcccctgaaagatccacctctgtgcttttttctaacttctgacccacagaatttgggatcacaataaaatagtggttgtttcatgccacaaagctttggagcagttttttacatcgtcatagacaacctgaagaactagtaaactctcatgttggctaatattcttgggctcccttcccccaggtgaccaatgccaggagtgtgtgacttgcagcacatgtgctgaaggtggagagaggtagcctctgcctcctcacactgcacatcccctcacctgcctccagtgtggtcagttcacataggctttcactcctctgcccaggcaaagttctcctctctcctgccacggtcctttgtttatatcgtgagtgcaggcttgtcacacggatagcaaccagattatttatgtttgtcttcactagactacaggctctaaagggacacagctgtattctatgcatttccctgtgctgaggcctagcacctagtgggcgtgaaataaatacgtgtggaatgaaactgtcaaagaccatgtgaccagctggccctgaccccctgctaacaagcagcagacccagaacccctttctggttctcctccaggcagggcacagttgtttcctatctgagcaggctccatttgcttcacatcagcccaagaacagggaatgggaaatgccttgtgctgcaggagggaagacaaagtaagccagagagcacttggccatctggggctgggagcggaagagaatggaaccattctggagagccagacatttgttttgtagttgttgcctttgtgaatgtacatgtcctgaaaccctggttaattttcttgttcaaacattggtttaaaattgctggctctaggagagatactgtccttcagcaggttctgttataaactttgcaactccaaggtctgattcagcagcaagctggaaaagttcctggttgctaagagaccagagagcaaattagcagctcacaaaagacccagctaagaccagtaaaaaataagacaaacgaaaacaaggtaggaaatgggcctcctcaaaatcaaaataaggtaaacaaactggctaggaaaatgtctgattggaaaagacaattataagtattcttcatgctgaagtaaaatgcactataggtagctaaactctatctttgtctttttgtcacttgaagaaaacagcaggggagcccctttctagtcctgaaattccggatctatgagtcagagggaaaaacaaactgtcccagttgataaggaggaaagaaaaaagtgaaataggctgcctcttttatgagctctccctgccaggacggtgaatgggctacctggggtggtggcccagaaacattcctgcaagcaaacaaaagcctccccccaggaaaggtttctgatcactgctggtccaaggctcagccgcaacagagggctctgacccccacaggacttggccagacacttcaagatcccatctggcaatcaagcatgagaattcaggtacttgtaataagaaggggcaaagagaaaagtaccaaataggtcccaggtattaaatatttattttgttaaagtgcctctatagctatgatttttagtaatttcttttctggtcagacaatctagtaaaatattatattaaaattatttttaatcaaaaacagaaaaaagcatgccaatcacttacctctgatggaaattcattctccaagacacacagttttcctaagaacctactgcttagctggacaaaatagtaggaaaatgctccaagtggaaattaccagcctcttgagggaggagcttgaaaatcttaagtgatcacagaaaagtcacagtcatctgggttttggagaccagagaagaaatgaagaagggcaaaaaaaaaaaaaaaaagaaaaaaagaaaaagatggggtgtggggaggaagatggggaaacatggagctacaaattgggagaaaattaaggcagccagtaggcatatgtcagggagctatggcgtgatatgcctaagaactatgtgactgaatagcctccacttatcaatatttgttggacagcaaaaggatttcagaatatgatggatccaacaagcatgaaataatctttaggggaaaaaattacaattccccacatggcagcttccttcagatcttttctgacaatcctgtttgtcagatttctaaatcgcatgcaactgctatattttaggcagagctggtatcttcctggaaaaagaccgtcccaaatattcagtgcccctccctgcaggagaaatagacacctcctttctgatatatgcagctctggccaaatgacttgctttggcccatgaaatgtgagcagaagtcacatgtgtcactttggagtataagttttaagagctagcacgtggttctctggcttttctcttgctgtcacaatgaccagaacatgttccagatagtgccttatccaacaggcttggtccccaagagaagaaagcatggaacagagctgtggctggattgcagtggacacgtagcccagatgaaaaataagttctgttgtggagttacctgcaattgcagcaaaacctagcctatgtgactaatatacatggcccacgggactaaaaggtggccagagttgcccctcgccctcattcacattttctcactagctggccacagtctcaccttgagaggaaagtcattatgctccaggtggctttcttagaattcagatatgttgcctgactgacccaggaaatcagggctggcagccctgctgctgagcgtggttcagtacccaagaaacaggcaaagatggcgcacggagctgagaggagacagaaccatgaacttcgagttggaaatgccaggttggagctggctcaccagttctaatttaacccaaaaagaacaaacaaaaaacaaaacaagcaaacagaaaaaaaaaaaaaaaacactagaccttcttattcctacctttagaactttagagagtgttgatatttaaaaaaaaaaaaaaaaaaaaaaaaaggcaaacaaacaaaaaactgacccccaaagccaaaagaaataacatgtctttattgaagaaatgtccattcttccttcaaagcctctttcccttaacaaacgtggtatgcacagcaaaatggaaaagatgtcagcctccacagtacagaggaggtgagaagatctgcttcccagcacactgtggaaaggcagggcctggagcaaggctgtgacctcagctgcacatctgggtcctaagaccactggagggagctgtgctgagtcaaggttagagagcccttggcaagcagatccccggcaaggcagccaagtcaaagaggaagtttgaacacttaatgggacatcaaatgggattttccctgcaatctcagaacttctgctaaaagccctaaagtggatagcaataagtaaaagtgcccccgcagtctaaaaagaaagtgatcagaggatacctgcaggattttctcaaagatgagtgatccaatcctcccatcccacctccaccaccccaagagaatactagaagatttgcgagtccattgaaataggcgcatttctaagagtagggagttgtcagcctagtaggaaaggctagggtgtttctccatccctccctttccccatgaaggcaggaggaagatgtttctcccatcctcaagtgaggcacaaagatccaagagaacagcagggaggtcaggaggccttcgagagggagagagtgagtccaatacccagctgggtgctggctgagccacagaaaccagtaggctgacatggtgctccccagacaggagcttggggcttgcccttgcccccaggttctggaacagggaggctggcacctgctttttgtccagagaattgtaaaggaatgtaggaagctggctgggctggcttgcagtggcaagtacagagagggcatgaggtgggcatccctctcatctgggccacgtgaccactacggaatgtgtccctactctaggtctgataagacttcctcctaaaagggaagcccaggaactagaggcaaggtgtgggggaaggtggtaaaaagcagactaggccacctctccaaggcagacctagctcaggcttgagctgagggatggggaggggagaagcatagtgctgggtatgagattgaagttttgatttagcccggccacgacctttcaatgcttgaaagtgaggtgaggcagccaaaataaaactagttattataactgaaggtgaccaaaaagctgtgggctgtgcctgaaacaacgtcaagggatggtccagaaataaggaagagaaatgcaacagagagctagaaaacaatagttggagaaaaataaagccacctcctgattgtactccatggagtcacatcggtcaaaaaaccaattacaattggagggaaattcaccagagagagaagtgctgtctagagagtaactatgattggggagaactgcccaaagacattccattctccatctcattagagtatgcattctccagggtgtgaatgctcccaagtgctcccaagggggtggaaattggctggggtgggggtgtgaaaaatcttagatgtttcaaagttttatgaccctccaaagtttaatcctgcccaacaaaatagtatgtaattatttcttaatttatgtttactatacatttatttatcaatacatatcttatctctctataaatttatattattttatgttattatttaaaatagtgtttaggatagggaaaaaatgaaaggaagggaattttttttccttaggggaacaatgctgaagaaaagtctagaaacattgagttagagagaaacacaacattcaacctcaaaccagaactggtgtttggataaaatttttctggctccaagtagaattgctttcactgaatttgttttgatatcctaccttttgagggctttatcctctgcttcacaaggtgtccttttcatagggacccagaagagaacgttctttcaggtttcactgtaaagaaaagcagtgcttcttctggataaatggtttgtttatcttttatgttttatcttttatgagatttgttatgcacatctcaaattagatcaagtttccctctttgcttcagccacaggggagctcagggcaccttttgtaaccactgcaggactgggccatatgcatatctgggactttgccttatctgtgcttttagtatttttctacttttaactttgccccaattccctcaactgtgttttaactctttcctatttcatgtatttttataagccccctacaatcctttgtggaatatgtgggatataaatatgtaaagaggaacactacctctccttccaaagttttctttccgcccactcttattaagtctgtccttatacagttgcttttctttttaactcaatgcacaactaaaaggtattctattgggttttatctttttcttagttttccaggatattaagatcatcttgaaaactgattctgtaacccaacatgtttgccaactttgtgttatccatagtgttgaggaccatacctcccatgtcttcatccaagtcattgataacaatgttgaatggaacagggctaagacagacccctaaggtatgccactagagaccttcttccagccaatatcaatgcactaatcccctttctcttctgatatggttgaaccaacgattagcccaccacatttctgccatctgtcttctggctaagctacttggtcaaacatctctctgaccaaggagcctctgcctacagcattccttagacctgttactcttaatatcgctccccaaaaggaagtaggctgacactggatgccgggaactcaactctactgcaattgtgtggctgccacctctgcactggaaatttgatactggatcccaaaaataagaagcctgagttgccagctgcatgagtaaaatgaatacaccacccagagctatgtgtttccaaatcaaagtctaatgtaggttctcctcaccggtggagcctgggtcacatgactggcaccagctgcaaaaaatactaaaaatctcagttctctggattctgccttggagcagcagttcccatatgtcaggaactctaacaaggattagaatgatgctcaaaaagtgctaagcagtcagacatgacgaatgtccctagagcccaaatggtggggggacatggctgcccaatgagcccaggctccatcctgcagttctcagacccttctccaagctcctaggagaggaaagccagtgggctaaccttggacggggtgctttccagagacagtctcagctagtttgcaaggggtcaggcagtgctgtgaaggctgtcggtgccctcctgatgtcccctcagggcatttgatcccctcctggtgtgcttccacctgagtcagcaggcacctgagtctctgtgtcagaggactgttctcgggcagcctcagccctgggaattcacatcccctaagacaaccctcaatcaatatgattgacaacataaggattaaacattctccagccttctccatgatgaaacaactctgaagtgtgacttacaccattaacagacatcccctgtgggactcttccaaagttaccctcggggacactttgcttcatactcacttctttcccttctttcttccagttccctacgacctctggattttccctgggaacacacttcctaacactttcacacaaacctttgcctcagggtctgcttctggaaaccaacctaaaacaggaaaccatggctgccggaagtccatggtggtaaatcgggaattactagagaaggaatgaagagaagaccccaaacgtgtccgttgtccccctggttggaccccctccagaccaccttggttctgaatgtagaaacttaacctctaaatatctgcccaggccctgccctggtccagaagcagagctggaactcaaaaccagttttgctgaaggtgtgcaccttcccaacatccactggtgagaacatcccagcacactgctctgtaacttccagaattcattcctttcccctttttgaatgtcaagagctcatatgcccatctcatgtcattgagcgcaaatccctcccctataatttatcaaagattgatgacagtgactctgaaatctcatgtcaagtccctcccaggctgcacgacataattcatcagggtcagagccctgagtttatcacagctgctgctaccggctttactgcctcaatgcctgtccttgacttcaatcccctctttgcaatgtttgttctacccttttcaattggaagaccactttccttactggaaaagaaggaggtaaaatcatagttaggcagcacagccctcactttaccttcggcgaatgttaaatcattttctccacgcaaatctttcccttaatttttgcatgtagaacagagaacaatggggttcctcagagagttcagaacccctagctcatttgagacagtagattttcctaccccacttcttacaggtggggccacactgctggattcagcccttgccctctgtcacttaggggacgctgaaggctgttttacaaaatgtgaaccttcatggccacttctgaatcctaagccaactgttttcggacccaggctgcttcttctcctgctgacagctgtcactcctttattcccaaccacctctctacttaagagcctgactaaaagtttttttttttttttttttgagacggagtctcgctctgttgcccaggctggagtgcagtggcatgatctcggctcactgcaacctccgccccccaagttcaagcgattctcctgcctcagcctcccaagtagctgggactacaggagcatgccaccatgcccggctaatttttgtatttttagtagagaccaggtttcactatgttggccaggctggtctcgaactcctgacctcctgatccacccacctcagcctcccaaagtgctgggattacaggcgtgagcgaccgcgcccggcaagagactaaaagttcttaattatagtccctggcccatactttgaattctcttggcttttattcctgagggcaggcctcatgaaatcacccctttccatcactttaagggaaggaccatcctgcctcatcctcaggaagtaacatttttctgcaaggttagccaccaacaattgcctttagggtcatcaaatttttgagactctcaagcccagaagatgccctggttccctggcttctaagcctcttgcgtccctaatttcttactacaacttacccttccattcttgcactatttttttctaatctagctataagagagattcacttagtttctttagctaaatttccatttttcctcttcagctggatcaatgctattttaaaacaacaacaataccaggaagagtaaatgagaatctaacgaaaatagttatctgcagggtgtgaatagaaatgtagaaatgtagcaaaagggctagggatcggagggagacatcttctagtataccgtcttatatatgtttgatttttcaatcatttaaatgtttttacatgtttagaaacaaaattaaattaccaagagcgaaaaaaaactaaacctaaagatgagttttaacaaaagcaaatgaaacctaattctgtatcaaatcatatagaaaaattctaattcaaagaatttgggacacagtaccctgactatacacccttaatggaatatattctaaagagaataaacaccacaaagatgccttaaacctgactgagtaggtttgttcttagtagtataactggtgcagtaactctgaaatgatttgtgtgtgttgtagaatagagaaagttaatgaatatgttggcattttgagaaccaagttctcactgtgagagaaagaacacatgaatagggattgtgggaagggaaggaagaccctggggtgttggatttgaattggaagtatcaaagtaaatacaagatttctttttttgaaaaagtatttgctagctctatccactgaaagagcctagaaataacaatgctccaatggaatgagtgcaccaagcacccagaatttggttttttaatagtgttctccattgaaaggagccaggagccttgggagaaatgactgatccgattctggagcagagacagtacagggtaagcctaggatgtcaggttgcgctaaaaatcaagaaagtgctcaaattctaatggtgacatgtcaaaggagcacgggagccaaactgaaagggctcccaccaggcaaattttggacaatttgagttttaatatttgtaattaattatgacacatggattttttttaagttccccagttcatggtgatattcaaaagggtggggaaactcttcttcatgaaagaatgcctgttaatgaagtagaatgatagaattagacaattaccattttacaacgtagtgagttactcggctaagaatcatcggtgtattctgttaccattgaataaaaggttggtgagatattcatgcagttcaaatataaccccttcagattacttagtaagtaaaaaggggcaagggtgcaatggagaacagtggtggacaccacttaaccaaatgatcaaactcagcatctaataacgggaccaactgacatgaaatggcagccaatttctctacaatagaaatggcacggattcttcaaaaatctcaggaaggaccgagcacagtggctcacgcctgtaatttcagcactttgggaggccaaggcgggtggatcacttgaggtcaaggaattcaagaccagcctgacatagtgaagtgaaactccgtctctactaaaaatacaaaaattagccaggaggtggcgcacgtctgtggtccctgctacacggaaggctgaggcaggagaatcgcttgaacagggaggaggaggctgcaatgagccgagatcatgccactgcactccagcctgggcaacagagtgagaccctgtctcaaaaaaaaaaaaaaaaagaaagaaagaaaaaagaaaagaaaaaagaaagtcaagaagaattttaaaaaatgatctattctagactcaaggataataaagacacatgcaatgcatgatccttgaatcaaggagggaactacaaaggacattgtggggacaatggaggatatttggatgtggatagtatatgaaatagtgctatatcaatattacatttcttgaatgtgatatggtattgtgaaggagagtatctttagaagagatgtgctgtagtgtttaagagaaagtattatgatgtctataacttaaatgattcagattttttagaaatatatatatgctaggtgtggtggctcatgcctgtaatcccagcattttgggaggccgaggcgggcagatcacctaaggtcaggagtttgagaccagcctggccaacatggcaaaaccctgtctggcaaaaccctgtctgtactaaaaatacaaaaattagcccagcatggtagcacatgcctgtaaccccagctactcaggaagctgaggcctgtaaccccagctactcaggaagctgaggcaggagaatcatttgaacctaggaggcagaggatgcagtgagccgagatcacgccattgcactccagcctgagcaacaagagcaaaattccatctcaagaaaaaaaaaaaaaaagaaaaaagaaagaaacatagataaatagatagatagatagatagatagatagatagatagatagatagatagatgatagatagataggcataggcatagatagagagagagagacatggctaatgtaagtgaaacgttccaggtgttcatcgtactcttctttcaactcattcatagatttgaaactttttgaaattaaaaattgaagtaggagaatgctctggcttcacctcaaaccatttaagtcaaaatctctaggggtcagcccaagtttcttttatagcatttctccagaagtgtttactgtgcatccagggttgagaactactggcctacctgattcatgatgatgtccaggccctcagaccctgcctcagcccccaaggaccctgaaaataagtctcttaaaggtcacaggggcatctgagtctccagcaggcccttgcagccctgagtcagtagcccaggctaaggaggagagagtaaagagtcttcatagaagtgtctgcttagcataggaaccctgactgcttttaggtccttctggcttcctcctgccaggcctctcccttctcagaggcccctctgagataaccctcattctgccccttcaggctgcctctgaaaacctcaggcctctcttcctcctcccttgttcataaggcctccagcaagggaccttgcatggcacgccctcaataaatgagtgccaggtgagccgaggtgggctcactcacactgtgcctctctcactgtcaccctcaggggggaggaggaaaagcccatatcaaacatgggcaaagggttttactttgtccaaaaaaaaaaaaaaaagcagaagctgaaggtcaaagaagcaaagagagtgggaaggactctgttctttacaaagaacagagtcatgacacctcacactggacccttgctaggtgtaggtgctgtggccgcactgaatctgtgttatctcataaaatcaacagcctagccttatggggtgggtcatactgtcattgtcacttcacaccatgtgtccccagcatcacacagctggaacctcagcagtctcggaccaaagcccacacctctagccatggtgctagactgcctacataggacttaaggaggagaaggaaagcaagagccaatattgatgaggcgcctactaagatgatcttgttgaattctctctgcagccctgtgaagtcaatcttatcttcttttgatgaagctgagcaaatggactctgagataaagtaatttcattccatcatgttgaacaagcctaaaatgtatcatgatctgcattgtcttctgtatgaatggcaatctctggagttgtgcaacccaggatcaagagtgacttgcccagggctatgctgccagtaagggatggtctctggatttggaagcaaggtctctcagactttggcctccctggaaaagccctgctgtcccctcacccccaccacctcaagtgttctgttaccagacatctctccgcagggatcagaacctcccttctgcagggagaagtgagtcttccactgcgctgccatcaaggaggtgtcagaaccctgagctcttctagacagacctcagctgttgaacatgtgaagaacatgcctttctgcagatgatgaagtgggatgttggggatgagaaagcagaggcagaaaagtctgaggcatgccccccacaattcagcagactgtggggtagtggcactcatagctaggatgaccagctcatcccagttttctcaggactttccttgttttagcattgaaagtcccacatccagggacaaccttcaatcccagtcaagggagatggttaatgtcttggtcagcttgagctgccataacaaaatcccatgatggaataaaacaacagacaaatttctttctcacagttttccaacatcgaggtgctggccaatttggtttctgttgaatgctctctccctggcttgtagaaagcatcttcctagcgtgtgctcatgtgggctttccctggtgtgtgcacatggagaaaaagtaagaaaaagagggagaacaagagacaggaagaaagagagtgcgctcaggagaatgctccaacgtctcttcttaaaggacattaatcctgtcatgggggccctaccctcatgacctcatctaaccctaaatacctccaaaagtctatctccagatacagctacattggggtttcaacatttggattttgggtagacacagttcagtccacagcagttgaataacctacttgcagccaaatccctcttctcaacccctggtccccgagatgcccaaggggagaaggctatctattcttccagaaacccactcagccacaacagctagtagatgaataccttgcactggagtttctggttttttccagattccaggcctaaggaaccctaagtggtgcctggctttcgtttccaaggcagagtctcctaagagtgggctgggtagggagggtgatcctcaaaactcctagttgctatggataaggttctgagagaccacacatctgtacacaaagtcacacccaaatgcttcttttgtgggcctttccagatgccccagtcaagagggagaaaaggcaaggaggctgtgcatagaccagggctagaatcctggctaacactcacagcctgcataacttccccgtgcctcagctttctttcctgtaaaatggggatgcattataagggttagaataaaatgggtttcaagtgtttggcacctagtaattgttcagtaaatggtaatcatctttatttctctcctgcctaccttgcattccctccattccccctcccctacctttcccattttttcattcattcaacaagtacttattgaataactactatgctgtagtcactggggatgcaggagtaaataaaacagtttctccctccaagaaacttacatcacggcctgaaaaaactaaaagaaaaataaatatgaaaataaatatgaaagtgacattatgtgatggttcactttaggtgtcaacttgactgggctaagggatgcccagatctttggtaaaacaggatttgtgggtatgtctgtgagggtgtttctggaagagattagcatttgaattggtagcctaagtaaagaagatccgacctcaccaatctgggcaggtatcacccaatcccttgagagcctggatagagcaaaaaggtggaggaagagcaatgtccctcctctccctgagctgggacaaccatcttctccttcctttgaacattagagctcttgatccttgagccttcagactccaaaacttacaccactatccttccttctccctggtttgtaggcccttggcctcagaactataccactgggtttaccagtgaattattatttaccagtgaattataccactggctttcctgggtctccagcttacagacagcagattgtggaacttctcagcctccaaattgcgtgagccaattcccatgataaatttcctcttatatatacagatggtccccaaccttcaatggatcaacttataatttttcagctttacaatgagtttataggggtgtaaccccatcataagtcaaggagcatctggacttataatggttcgacttttgatttttcaactttacaagaggtttatcaggatattaaatacattttgacttacaatatttttgacttacaatgggtttaccagaatgtaggcctattgtaagccaaggaacagctgcatctaaatatatcctattggttctgcttctctggaggaccctgactaatacagactacgatagaggtgggaatggaggccagaggaggcaggagagtggatgaatctgcagcccagattcatctagaatggataaatggaaagggatgaaagggatggaaaaagatggaagccaagagagaaagagatcagaaacataaattttggaaccatcagagtcaagatagcctttaaagccagaagtagatgagatcaatgagggagcaatggtagacagagagaacctctgaggtctgcagggctccaaccttcagaggttgaggagacaaggaaggacccctaaaaaggggtcacagctagagacaggacattgagggagagggcatcctagaagtccacactgcagaagatctgaggggaaatgggaagagaggtctggagagagcagtgtagacagctcccctacagtggagtgtgtgcctgggagtcggcatcccagctgcaaggagaagccccaaacggtatggccatgtttcttttatctctgggtctccccaacacacagtaggttctcaatcaaaatctactgagttggcatcagttagatgtcctgtttatggctgaggcaaagtctggagatttcccctacctctcaggccctcgctgcaggcctctgacactccagggatagctggcaagcccacaaggcctccctgagggtccttctctctcagaaaatatcagcacatgtgtccagcagggcctttgatggcttcacacaagaggagagtcatgtgtgcattcctggctctctggacaagaaataaatgttcaggcggagagggagaacttggctgaagtggaggagggaattgaaatcactgaacaaaataacagcaacaccaataacaaccatttattgatctcctgttctgtagcagacgctaggacaaatgcagggcatttgttgacattgtctttcatctcagtccagttcagtccatctccagttacctggtgagggaggggctgcaaaccccaccctacaatgagttaccctgctgcctgaggccacatacacagtagctccaaggctgatgttcctcaaccactgtgtgaagatttatcattgaagaaaggagagatggaggtaggaatagcaaaggctaaagacaaagctaccccaagcagcagcatctccttccatgacttcaactccactgacaccaggctgacctgggctttccctttgcctttcccaccatcacctttgctagctggtgggactttcaggccaatgggttacatgtttagaaacaaaattgggcagtgggctggggccagcaaccacagaaccttcctcctcagccattgtcattaagtaggcagagatttcctgaccttgtcagtagccctctattagtccattttcatgctgccaataaaggcatacccaagactgggtaatttattaagaaaatgaggtttaatggactcacagttccacatggctggggaggcctcacagtcatggcagaaggcgagaggcacatcttacgtgacagcaggtaagagaggaagagagccaagtgaaaagggtttccccttataaaatcatcagatctcatgagacttattcactaccatggaacagtatcagggaaacagcccccatgattcaattatttcccactgattccctcccacaacacatgggaattatgggagctacaattcaagatgagatttgggtggggacacagccaaaccatatcaagcccctcagccaacattttcatggtggcagctgctcatgaagtgtaatctaaaaggacataaaaaacattcatacacacatacacacacacatacatacatatacacacacaaacattcatcacacactcaaaaaatctctcccattggctcacctcagcacctgaaattctgccaatttaaggtcctgtggagaccagagtagttgttatgtttatcaatatgtgtatactcactgcacttcagggaagctggagtttaaaggctggaggactaggaccaaagaaagaacagttgtgctggtggagagaaaaggaagtgagacaagctgagccttgccagagaaaaggcagccaggatagtgcagaagagggaaaggtggaggctcccgaagggatggaagccaagcatggaagaggaaaagagtcgggtctttttctgctctcctaagagttctggtttggtatcgtggttgcgagtgtgagatcaaacaaccaggccgggagcagtggctcatgcctgtagtcccaccaggctggtcacctgaggtcaggagttcaagtccagcctggccaacatggcgaaaccccgtctctactacaaatacaaaaattagccaggtatggtggtgggcacctgtaatcccagctactcgggaagctgaggcaggagaattgcttgaacccaggaagtggaggttgcagtgagccaagatcacaccactgcactccagcctgggtgacaagggcaaaactccatctcaaaaaaaagaaagaaaagaaatcaaacaaccaaggcccaaatcccagtggtgtcacttgctaattacgtggcttaggaaattactcaatcctcctatctgcatccttaaaatgggaagaatgacagtacacatcttgaagggtgatcttgaggcttcagtgaggtaatccatgcaaggaccttagcacagttcccagaattgaataaacacacagtaaatgtttaatattattattaatatttaactgaagtctgcggcctgtttccaccatcagctcctccagccatgagttggagtctgccaaggattttagagttcattgattctctggatgtgaatcattgtaaacagatagattggtgtcttctgtttggagacaatatctccccttcttccaatggcagaacatctggtgacttcccaggagataaaagggtggagtacaataaaggccagaaacctggttctccctgagggagcagaatgagaggaataggtcccggtggcatatgctgctttccttgaccttggcacctgttccaagctggcagagtgcagaggagggagcactggggacacagaaattggtgtaactcctacagacagcaatgtgctcatagctcaaaattttaaacgcgtgtccccttgaccctaaattttggtttctaggatttttttttttacagatatgcccccacatacaaaatgatgtaaatgcaaagttattcactgcaggatttgttatgacacagagactgggaaaaaaatctaaatgttcacactttactgaatatattatggtccatccatacaatggaatattatgcaacagtggaaaactgtgaagaaatgtctataaactgattatgaaaagatctccaagatccattgttaagtaaaacagcagggtccagaagaatgtagaaaaagtgagaaaaagtaatatgtattcaatatgcatagactatatattcaatatgtatagaataacaccaaaagaaaactcaagagatgataatattggtctctgaagaagggatccaagaagccaaaagacaagatagtcactgacttttctttcatatattttgaattttaaaatgctgaagacaactaaattttgtttacaagcacgggacttggagtcagacagacccaggttcaaaacccagatccactggctatgtgatgttgggcaggtcacttcagatcactttaatctctttgagctttgtttcccatttgtaaaacaaggatgagaataatacctatatcacagggtggttgtgagcattcactgagatggtatttttaaaaatatcctatgtggagacaggcatggtggctcacacctataatctcagtgactcaagaggctgaggcaggaggatcgcttaagcccaggagctcgaggttgcagtgagccaagatcacaccactgcactccaacatgggcaacagagtgaggctgcctaaaatagaaaacaaaacaaaatggggaggtagctacagcaaagatgacttttaataaatttttgatgaatctgcatttattcccttctatatgcccaggagagcattataaggtaaggttcaggattgccagtagatggaataaagagaaatgaaagtaaatatctatcttacaaggagtggagggtggcaggtccctcagtgcatgtgtgctgaggaattcgcatcactcacatgtgctgaagagtccatccagctcaccgtttataatgccagggtttgcggggggcagtccccatcaccaggtcattggatcctcactgaggaccctatgacatgaacaagctggagactcctggtgccattttacagataagctctcccagggagctgcatgatgggcctaatgttattaatcgaacagacatgagtggagaggcagtaggtcagtgtgaagtgagcataggttctgggaagaaaacaagttctggttggccatttaactgtgctgagcctcagctcctgcagccacaaaagggagatcataacaccagctgcaaaatgttgtgtgaatcagagcttcaggcactgtgaccaagacacgggaaagctcagtcaatggaagctatgattatttgtgtgggattatgattggaggaaggcagtggggctgtgtgcccccaaaagtgccttaaccactcaaaaacagaatctctgccatgaaggagttcacagtctaataagagaaagagacagatcatctctattcaataaagttccccctaaataaaaatatggtttacatcagttagaatgacgatcattaaaaagtcaggaaataacaggtgctagagaggatgtggagaaataggaacacttttacactgttggtgggactgtaaactagttcaaccattgtagaagacaatgtggcgattcctcaagaatctagaactagaaataccatttgacccagccatcccattactgggtatatacccaaaggattataaatcatgctgctataaagacacatgcacacgtatgtttattgcggcactattcacaatagcagactttgaaccaacccaaatgtccatcaatgatagactggattaagaaaatgtggcatatatacaccatggaatactatgcagccataaaaaaggatgagttcatgtcctttgcagggacatggatgaagctggaaaccatcattctcagcaaactatcgcaaggacagaaaaccaaacaccgcatattctcactcataggtgagaattgaacaatgagaacacttggatacaggaaggggaacatcacacaccggggcctgtcatggggtggggagcggggagggacagcattaggagatatacctaatgtaaatgatgagttaatgggtgcagcacaccaacatggcgcatgtatacatatgtaacaaacctgcacgttgtgcaggtgtaccctagaacttaaagtataataaaaaaaaaagaaaagaatgttcaaaaaaaaatacggtttacacaagtgtattcctgtatatcatggtctcattataggtgtagtgccaggtgttcccatcggccatgattaaaaatatcaagaggtgggtgtcaaggagtggaagggtgggaaggccggaagcaaagcagagaagtttgcaaagatccctgcaacgataaatgaagatggggaggagtcaaatggggcctccaaggagcttcctttgcgaggcattggtgaggagggagtgcagtgagctgtgtacgagaggctgaagcagggacctgggcctagggcaccacagcaagcatcttagggagggggctgacaactgcagccccaggtgtgctgataacatcacatgctagtcctactttcctactttatttttcttgcgaaccttaattattccagagactgagtcaacaaacaaccctgaatcataaagtcaaaaggccttcacaaaaggatgctgatattagcacattgtgaacttactctgttgggaatgcgatctttcagaacaacccaggagcagggtactattttcatcccacccttctacagacgaggaagcagactcagaaagattcattcatgtctgaggtcacacagccagccaggggcgaagccaggattcaagccaggtgtgtctgatgaaaacactcctgctcttcctcacttcactgtaggttttgaacatactttttttgctgctgtgaaggaaaataaatgcagatgtggcagcagtagtatatgaatctatgcatgtgataaaacgtcatagaattatgtacaaggcatactaaaaaaaaatgagtacttgcaaaaactggggaaatccgaggaagatctatgatctagttaattgcattgtgccagtgtttgttttctggttttgataatgcactgtaattagtcagatgtcacctttagggcaagctgggagatgagtctacagaagctctctttttgcaatttcttgtgagtctatgcttttttcgaagtagaaatctggaaaaaatacatgtagaaatctcctgttgaaaatacaaacagggccagagtaggaccaaggagactcaacagctcctagtaagtaaagaacagcaccagggcattaccagggcagtaggagccttcattccaaacgttaagaattacaaaatgatacagctgcccccttacttacaggactcttgtatagctttattttagggtaacccaagttttccagattcacctggctacagggggggctcacctttacagatatcactcatgtttcaccaatctttcccctccttgctatgacagagcttccagcccaccccaaacctcacccacccagtcactgctggggccctctggaggtgtctcacacaagcctactggccagatgctgtagtctgctgctcacctgctaccctgtctgcaggtgccctctgtgcccagaaattccagggtgttgcgtcagcagggcccctgtgccaggcacagaggtgactagggtctgtgcccaagaatggcctctggatcttagcaaaccccaacccaattccactggactcccctggcctgaagcttctctgcattccacacagaaagtgggtggatgcccactgaaggtcaatcttgattgcctggcaccaaagcagggcagcatatgtccaacagagccctcatgaaaactgctcccaaatcctccactctgaggtttagagatgtgtgcaaggttttgaaacacaaatgcagttacagtaagagctaacatttactgagcatttactatgtgccagaccaagcaattcacatgggtaaacttgtctaattctgatagataggtaagctgctgccacaaagagacccatcaataataacccagtggcttaaagaagatagaaatgtagttctctctcacataatctgagggagtccccctggtcagcagcagctttgcttcaggcagagtccacggcccaggttctttccatcttgtttctctgccatcccccaaaacgtcctcagcctcatggtggcagctgggtcattgccatgcctgtttgcagaccaggaggagagaggcagcaggcacgaggcatgctgatcgccccacatcactgggcctgggactctcatgcaccactccactcacattctgctaatgagaacattctgcaggtgagaacttagttacacaggctcacctaactgtagggagtctggggagatggggatatgtgtgcccgagcaattcttttacagtgaaagaagagaaaatgtgttctggtggaccattgtccctccaccacacttcctcacaggtatgaccaaagatgttcagaatggttaaatgcttgccctaggtaaaaactatctaatctgataagttaattttaaccagtgaagtagacctggacccctttcagataaaatatgcgttttgtgtgttttaatagggatccaatggagatgcaaaacttaacccagaagcatagctctagcgggagatacagggtcgggggtttggcagggctttttgagtggcatcatagtccgggctttagaacggggagtcttgaatgagtccaggtccttcatatgggaaaaccactaaaaatctcagccctcagctctgagacagaatccagggtgataatggatgtggcacagctagtgagctgcaagtggctgtcacatgtagggggttattttttatctaaggggatctgcacatcccaccaccaaagctgccttttgggaaggtaacaggtgaccctgtccaaggtctgggctgaggatgaacaagtttccaaaggtgagctgcaaggagcttgacaggagtgtgtgtgtgtatctgtgtgcatgtttgtgttcgtgtgcacacatttgtgtgcatgtgtgtgtatatgtgcaaatgcacacgagcagcttcagccagctgagcagccagtcatttattcatatggatgacttgatttttgattgagttaacaagtacttattaaacacagttttgcaaaggcctgcagtaaattggaagctatacaggaaccctataagtttttacaaccctgcattcttcaaatattggaataatataaaagataagtagggagtaagaggaaggaagagcaaacactagagaaggaggagccatgggaaagtgggttagaagagaaggaggagggttggttgtccttctggtttcgaagcaccagtgggtccattcaccaatgaatacaaaccaacctattgtgcaaattattaaactacatcatctgtcctagtctgagctaatattcactacaatggctcatgttgctgagtgcttactaagctccaggcactatactaagtgttttatatattctatctcatttaaccctgactaccctgaggactggcactattattgtggctctgttattagcctattttatgggtgcagaaatgaaggcagacagatgttaagcaactgactcaaggtcacacagctagtaaactgcagactcaggcctgtctgattcctaacctaaccaccatgtctaacacttgttgcccataggcctcagtctcctcgtttgtgaaatggaaccactacatccagctttgcttgccctatgggctgttgcaaggatccactgagaagtgattgccaaggtgcactgtgaacttacaaaacctaatgtaaaagaatcaaaccacattgctccaagttttgctaagatgaatctaccttaggatcatctagagaataaaacagttactagcaaccaagattaaattaagcctcctctgtttggaaacaactttagaggaaggatgttgttgatttgcctggcagagaatggttccaagcctaagagctcacagttgtttttatcccaaccgccttatcagaatatttaggaatcaataatgtagtggcatgctctgaggattctcaagaagtcctatggcgagccccacatgcagaaaaactaaaaacccctggtcaataatcaacaccaacttgccagccattgactgggtcactgtggaagtggatcctccagccccagtcaaaccttcagatgactgctgcctcatggagtccctgaaccaggaactgctcctgactccttgagccacagacacagtgagagattataaatgactactgtgtgaggccactaagttggaggggttggtaatttgtaatacagcaatagataattcatacagcacctatgataccttgtgacttaagtacaaggttattgggtattaaccaaaattctagttttcaagcaagagaaactattctggtacatgtaagccaaaggggaattttcagggagggcgtcagggctcatcaaatccaagaaaagactggagactcaagtgtaggatcctctggcaacagaactccagctccagttcagggagaggaacagccaggtttccacacctccatggctccagagagccactaatcattccacacatcttgatttagtccgttcagactgccataaagaataccaaagactgggtggctcaaacagcaaacatttggttctcacagttctggaggatgggaagtccaagatcaaggttctgacagatatggtggctggtgagggcccttttcctggttctcagaccaccatcttctcattgtatgctcatgtggtaagaagcagagagaaaagaagcaagttctcctgtgtctcttcttataagggcactaatgccattcatgaaggctccaccttcatgacctaattacctcccaaaggccccacttctgaatagcatcttattgagggttaggattttaacaaatgaattttgggggcacacaaacattcaatccatagcacaacctccgtgtactcactgaggattcagtgtctagagtgacagagacattgatcatgttccagccccctgactgcaccaagggtgagagaaagcatctgccccttggtattatttccctctgagacaaatcccactagggaaagatgattcttgaaagcaagtcatggtgcttttagagaaggggatgggatgctctgcagccaacatcaataaatgcccagccagtggtcattagatggtgttacaaagaagaaggccttgaataatactgaaccaggctacgtgtaggctgtgggctttatagtcattaatcctcacaataatcttaaaaggaggatgatattatccccgtcatccagacaaggaggcagaacctcagatacattaagtaacttgccagaatccacgtggaaagtgatgaagctggcttctaagttaaagtctatggggttccagagtccttacttgtcccacataaccaggcttccaagaagggcctcaagggaatggaaccacattcttgctttgatgaagtcaaataaattaaaaagagtttattaagggaaagagacagagactgaagtaaagggttcacctgatcttctcccaaggaagaatgtgcctgagtcatatctgactggcttgacccagaaagaagagggtagtcacaggcagaaaggaaggacaacacaggcacacagagacgggcggtctccagaactcaaaacttcccaagggtttacaccctgtgtactgaacatggtccgcttctgccacctagccacagatggtctcctcagccacagcacaagaagcccaactgtggtgaaagcctgtgggtgggtatgcagcaagcacaagccacatgtaaaggctttcctggtaaatttccaagatgaccaatgccactgagtcctcttctctgtcatgtgccttcttcatatttatccgagattcccagggacaggatggccagctcctcctttagattagggagggtgggtccttccccacccccatctatactctctgccccactaaagaacttttctataatcccatcttcaccatactcagcatttgccaaatattattcttcattttctaattgtgtcttttctagtttgtttggaaatgaaatctggtttcacctgaaggttgagagctaatatgaagcatattcctgcccttgggctaatatctttatgacatcatgacactaaccagctagaactgacttagtttttgttggccagaagccataacatctctgccaacaagaaactagcataggctggattaaagtcagcatgagaaagattacctgaagataagaaaataaatgaaggcccaccatgcttctaagcacatagtaaatagtcaaatatgtgcagaggagatgcataaacatatctgtgcaaggctttcaaaaggatcaggaagacaggtctcacaaaaaaagcatttccaggctttgtattttacagaccaatatttttgtgttttgttttttattttggggaggaaaatccacacaggattattatctttttactttaccaagtagagacattttaataaagctttaccatcctttcataagataatagacctgttaacacaagccaagtatgaagtataatcacagaataaaggacagtctttccagggaaaaatcatcggcacactggatacgggtctttgttttacactatatagtccctctctggctagtttaagcacaaacaatatattatggagcccagatagatagttcacaaatcactggaaaggctgtagggatatactccaagttgaattccatattaacaccccaaactatgccacgtaacttaccactgagggagctgctgccacagccgctgaccactctagctcctcaaaatgagcaccagctctgtgccctgttcagctccctccattattccaaattacccctccatattccaaatcaaagtcctgcatgagtcccagctgattggctgaacctaagcatatctagatccccatctgccaaggagtctgggaaacgtagttttagttttcagcctctgcagtacagggaggcacaggggctggagaaggcatggagtgaaccagttagccactgttggtgagctttttgtcagaccacagcacttctaaaacatgtcaaggtctaagcctgggttacagaatcacatttgggtgtactggcatgagagccatcctaaggaatgtgtgcagtcacgctttattgagaagattctgaaggtcagtggtcttacacaggcaccttatcaaggttctgacagatatggtgtctagtgagggccctcttcctggttctcagaccaccatcttctcattgtgtgcgcccatgtgataaaaagcagacagaaaggaagcaagctctcctgtgtctcttcttataagggtgctaatgccattcatgagggctccaccttcatgacctaattacctcctaaaggccccacttcctaataccatcttattgagggttaggattttaacatatgaattttaggggcatagaaacattcaatccatagtacatcctcagtctactctgctgccagaaccttgatatggcacctactgagtgaatggctgttcttaagaagggaatttgctgcctgaggctacagcatgaccacactctgactgtagtagacatctgtcatatttgtggcttctcatcaacttttgagtagctttcccgtatctggggatattctcatgtaataagtctcatctccctaatattgaagtcagagatcgagtcagagttcagagcgttcaggtgtctttgcagctaagattcagggatgtggtctgagctctcacaacccaaggcctccactagagatttgattcagaagtgagtagcataaagagcaggcagtgcacggagcttctgtttttgctggcatggaaggcagcagaggccttagctttcagaagtggtggtgaggggccgggcacagtggctcacgcctgtattcccagcactttgggaggccgacgggggccaatcacgaggtcaagagagcaagaccatcctggccaacatggtgaaaccccgtctctactaaaaatacaaaaagaaattagccaggcgtggtggcgggcacctgtagtcccagctactcagaaggctgaggtagcagaatggcgtgaacccgggaggtggagcttgcagtgagccgagatcgcaccactgcactccagcctgggtgacagagcaagactccatctcaaaaaaaaaaaaaaaaaatgtggtggtgaggtctggttcctgcctcagaagtagcatcagtggtggtggcaagagtggctgcaataaagtcaagttcctggtgtccagtgctcagtagcagcagccatagtaataccagtttccctccatgatctagccctacagcacagtttagggcattgttcttggaaactttaccccaaatctatttctccaccctccaaatgattgtttgtccttcagtttcctttattaaatcccatctgcctcaactagccagagtgaatcctgttgtcagcaaccaacaacccacttgatgtgctagataagccaggaacactgaccctgaatctactgcctctacaccaggctgcagtgtgaaccatttctgcaacagagagtatcggcctgaacctcatctcccattgccttcttgagtcaggtacaaagaaggatgggaggaaagcgtacttccttctgactcccagctttccaggagctcctacagaacaagaatgtttcttcttcactggattgttatcaccaacaatttgtgcagggcttagcacagagtaggtattcagcaaatgtttgacgaattaataaataagtgaatggtaaaaacactataaagttatacccagctggattcctaacccagatctgtgctgtccattaacagtacccactagccacacatggccactaaacaactgaaatgtggctagtgcaattgaggaactgaatttttattttatttcagtgaactaaaatttaaaaactgatacctaatcccatttttggaaaacttttggctcatttgtgtatgtaaatgtacattttagctataaattgtataaaagctgaatacagatgaaatctttccaatgaaaaattagcatacaaattgagatgtggtgtaattgcaaagtatacaccagattccaaataatataaaaaagaatgtaaaatatactattaatgttatattgattacatgtggaaataatattctgaatatattaggttaaatgaaacattaaagttgacttcacctatttctatttacaatttttgatgtgactactagaaagtgtaaaattatatatgtggctttcattgaatttctgttagcacagatctgaacattagcataaatattgctcagtggtcaaaggggatgccaaggacacacatttcctctgagcactagaggctccaaccccacagacctaggcccaaccttaccctttcatttccccatcgcctttccccagactccaaatccagcaggaggaagtgtagacgtgggcctctgcaacatgtgaaaaagcagaaatcacaaacgcagtgtttttcagcaggtgatttaggcaactcttcatcagggaaagggctggaagtaaggccacaagcagtgatcaattgtttgctatttgaaggcaattcaaaaagaaaaaaaaatccccaagtgaacgttccttgggtgaccagtgtgccacctctgcataagtctatgaaatcaaaggccctgggacagcctctaatatggtagcttcattccaaggaagagtttaaagcacaaagaagagctgttctagttagtatgagtcagggctaaatgttaagtctcctgatgctcactggggcacaccatctctcagcattaggtgccaatacataacatgccaaatgggtttgatgtgagaaaggaagtgtctgccttataggaatcacttggcctgcatctaccccaggatttccaagcctccctttgccagcactggaaacgcattttgagaaattggagttggggccagaaagcattctattcccatcactggaatctgtgtggcttctatttgcaactccagtagatgtgaaactcttaaaatgattttttccagggtaggaaggaacacaatgatgtctttggctaaacagtgccgggctactgcacagttcaatcctgagctaagtgaagggggaaaagtccggggcactaatctggcgtgactggcagcacccgatggggtaaggaggacagatgagaagggtaggagaggactggtggggataggggaacagggaagggatggaaaggcctgcttctgaaggcttgcatctaacagaaaaggaagggaacctccctgacttaccatgcgggacccaggtaattttcatactggaagcacaatctacaaaatgcttccctccaacccatccccataggtacaattttaccaaataaaatcattcatactcacatccaaatttgccaatctgagcaaaatatagttagtaacaaaggaaggcaattttcatattttatcattcatcatagaaaaaaagctttaatattttttaattaaatacagaagaaaattgtgttgccagagagattgtttgcctgcctttgaacaaattaacaacacctgtttgcaaacaaaagaatttccagaatggagtcaaaccctttattctctgttcaggacccagcccattcatgtcttttgtatacagtatcaaacacatagtaggtgctgaataagtatctgctgactgaatggggtgcctcttttatccctatcctttatttcccaaccctaaactggatcttgatccatggggaaaatatccccacccatccattcctagagtagccctgtctctttcaacagtctttgatacataacattggtttagagacatatgcctgaagggaaaagagggagggtttcaggcagagaaagaaacacacaaagacagggcacagagactaggcagaaacaaaaagatctaagacagagagagagagtaactgaaacacaggtgcagagcgggaacaactgtgggagacagggacagaaaaaccaagtcagagaaacttaaaacgcacaccattggagataaagagataaaagggctgggccagaatgatcatcttgaagtttctactcagctttaatgttttctgatagagaaaatggcagagagagaggaagacacggcctaagcaggaggataaagagacaaaggaagttagtagaggcagaggcagccagccaggcgtgcctagccgggaagcctggtcctaccccggcctcacacccacggggatgggctcccatgcccactttcggctcctaccttaagtccagccaccctcttcccctacccgcccctaaagatctccaaaccactcggcaaatcaaatcctctctccccaacatcctccgtgaagcattctcgctgctccagcccgcactcagctcttcccctctcaactcctaaagccacacccacctcccctaaccacagggcagggctgttttcgagtttgcccttggctcctatgagcacatcttgactcctgcaaaagaactgtgtgcttgtcagggctccagaccctacctcctatattccagtattcttcatgacaccagcccaatgcccggtcttcctaagtgctcagtgaatactttagggcctgaccggccctaaagtgcacgcggggaccgtggccgtcccctggtcagtttggcaggctggccacgctgaggccatctcctgggctcctgcgccctctgccggccaggaggggacccgcacgcgggacagctcgcggccggaagggcgcgcctgctgctgggaggctggcgaggacgcgggcggccctggcaccgtccgagggttctgggaagggtggtgggcacagccaggaacagctgctgtgttcctcttaggcgtaggagaacaacccctctcgcccctacacctcctccggccctgcccgctgggcgctcagagcttctcgtccagctccaggccctggttatcccgggcgcccccgcgctcggggcctgggctgccgccgtgtgtcccactcaggtagttctggatggcggaggcgcagtctagccgctccatgacggtcatgaggtagtgcagctcctgcaggctgccgttctgctcctcaaacaactccaggatggccgctgcggggctgcgctggcaggacaggaacctggcccgaggtaggggaggaagagaagggtgtaggagcagggaggggctccccccctgctgcaggctccctgggctgcgcagcgcaaggtccgtcccttccccatcctgtagcttttgtccttgtcctgctcttgcctgccttccagggcacaggaggtgggaagccccagggctttgaaacttgagattgtcctggcttggaggccaactctgacccctactcctctctaggcttcagtttcctcttattaagatgagggcttagacaagaggacctctaagtttgctacagttctgatgttctgtaattgccttctctacctcccccactccaaatacacccctagcctccccctagcctcctaactccctccttcctccctctctcctaggccacaacatcctgctcactactaaggaaacagttgctgtaaaccatggctttttatcacgactctcccgtccactaaaaccttccagagtctctcacctcctaaccagcccacgctccatgagcctttctggctcatccagcacctggccttgccctgtctttatgctttctctcctttctcccatcctgaacccccttagctcaggcctctctctttctcgccttgcacacactacacccacagccacctctgctactccccaaaacaaaatggctgatctcttccccatcacttcctccctgaagccctttctagttcacccctcccaggtggaagagaacattctgcatccctcagttcagacttctggtcataacgcccgcagttcattattattcttgcttcagctgttttctgtctctcttcaatgtgttatacaatactggattcttacaggaaggcacaaggaacacttgcctttatttttcaagctctctgaaccctttactagtgtgtgcgctcctaggcgccgggaccatgcctcattcatcttgtatcatagtgcttagcacagtttccagggcataataggtacttgataaatgtttaaatgaatgatttaaaaatccaccctgtagtttgcagaccagcctggccaacctggtgaaaccccgtctgtactaaaaataaaaaattagctggacatggtggcgtgtgcctgtaatcccagctactcgggaggctgaggcaggagaattacttgaacccgggagatggaggttgcagtgagccaagattgcgccattgcactccagcctgggcgacagagcaagactccgtctcaaataatgataataataataaataaaaatccaccctgttttcagggtccagctctagccccatcaccaggataaagtcttccctgaccgctgcactcatagtgtagtttctggagcttagctcagtattctcctgctttctgagttccttgacagggatcatgactgcactgtcaccattattgataacatttattgaattaacaagtgtcaggcacccagctacatgctttacacacattatcctataatctgtcttgctcctcctcagggcatagcatggcaagcactcaacatgtaccaaataacttccatgttaatggattcactgttaaatgttaattgagcacctactatgcaccaggcatcattctaggtactgatgatacagtgattaatagagctgcccttttatgggaaatagggtggacagtagccattctctgacttttaagtcactcccttgcctgtgatccagtctccagagtgtcctgaggaaccccattccagcccaccctcctctaccatccacagacctcacccctcttcctaccggatcttcatgccgcaaagccccaggtgggaggccagtctgcgccagtcattgccggtgatgctgtttggctccaataacatccgcagctgctcaaagagctctgggggcagccttaggcagggaaaagggtgttcttggaagaaagggacaaacagacccactctggttctcccatatgcaccctaaatgctgtagtcaccctgtgggtgccagggtaggaacccaacatcccccaggcagcagcccaagcaacccccgtctcacctattgcatgggggcggctgggaaacaggtggtggcgctgcccaggattcctcctctgatgcctggaatctgaggatttccatatacttggtctccaagccctgagtcaacacagggcagggaacacacttaggggtcacaagccatccccctgagtaagaagctggagtcctacctccattcctcatgtctctccttcagtctgtcactcagagccaccttaccaggagatacaaccctgctccacccagcaccctctacccactgtctccctgtgacttcagaaccgcaccttcagccttatgtttgcccctgagctctttgggaactgggacatgaagaccagagtgcagcctgagccaccaggggaagtcctgggtggggccgtggagcagtgggaggtcatccaaccatagagacactgatctcagccatatgtgtaccttcctccattccaaccttcccttcctcttctccaagtgacaacagggtatctgcctgccctccactaaggtgccactatggttccccaaagactctcaactccgatttcttcgcatcttcccttggtgcagcaggagaggagagatacctaactcccagcctgcctactcaagaccctcttcctggtcacttcccacactgaaaatacaaaacatcatctctcaaatcccacactgaagataccaaacatcatctctcaaatgtagacaatcagcctagaaagaaaccatatcaacttgatgccccagttctctgagttgggagaaggggttaaactagggtttggttcttttagcttcctgctggattcatccaccgatagacaaggagagtcagggatgagggtaacttggagcccagatgatctcagcccctcaaagagctggtatgggggctctatggaaagtgccatctttacctatgtgattaagaccatagttactgggcaccagaccctgtgcccactttgcctaggatttcccccaggccctgcccttcctctgcccctcagctccaactcacatcctggaaggtgtgcatggtgacaatgatctcattggttagtgctgaacagtcctcattctcatcggctataaagagaaggtgacagcgtggccagtgagtgaggaaacggcctggggtaagagcaggagaaggtaagggactctatagtaagacttgggaaatctgaggaagctggggtccaacactccatttttctctctgcaaagatctgtgtggctcctggcctttcagggaaggtctgtgtgcatggctgcatgggggtctgcagagctccagggttactgggagggaaggagaggagacaggatgggaaaagagaggggaggaggtacacacagggctcccggactacctgcttttctccggaagcagaaggagcggaaggggcactttccatgccagatgtggagatggggaaccagctggcaactgctgtcatccacattctcccaacctggtgagtaggcagacagcagagggcctcagagagtggggccttaaacaagtattgaagggggctgtggggaggcatgaggacagaacaaaggcaggagggtctcaagggaatgggaatccccagagcctgggctgggaccccaagagggcccttgcactataaaagccttccatcctttcctgcttctgtggggtataacccctctccttcccacctgccacctggcatcaccctgtccaaggagtgagtggcaagggctcagtagacagcagagtggtcaaagccctgggggctccatgaggctactgctggcccagaggtcacaaacagacttggggcctggtgtggtggctcacacctataatcccaacactttcagaggccgagacgggtagattacttgaggtcaggggttcgagaccagcctggacaacatgatgaaaccccgtctctaccaaaaatacaaaaaaattagccaggcatggtggtgggcacctgtaattgcagctactcaggagactgaggcaggagaataacttgaacccaggaggcggaggttgctgtgagccaagatcaagccactgcactccggcctgggcaacagagcgaaactccatctcgggaaaaaaaaagagagagagacttgggatccccagatctccagatgtccaggggaggcccagaacccttcattcctgtggggctcccgatcatcctatcccacaggccactgcctccctcaccctctgagatgtacgtgagcttcaggcactggtcgcccctagccccattgaagtcgaagagctggcagggcccacgcaggcgcccaccatggggctgctcgttggtcagtgcccactgcagggcgcagggcgtgttgttgaggaagtagatacgcagttgcagatgggactgtcctggcaccagcggtgagcagaatacggccagctgcagccatttgcgggcttcgcgccccacaggtgcctccagcacacaggtgtagaggctgcagagggagccagtggcaggcactaatgtgcagggaaggctaagacaccaacacactgccaccagcctcctgccacctgaggggcctctgtggggccttcaaggaggttcagagaacactcgaggggagcacttagggaggaactggtaggttggggatgaaaagtgagcatgtcacagtgactggtgactgaatggggaggagagctggcaggggagagagggaaagtgggctcagggtgaccatgcttgggagggcacccgcacatggccctattcctgtcaatgggtggcaaggaggctgggaggcagaggacctaggactctagaaagacaaagagaagaaggacagagatggaatggagtcttagagaactggtgctaagcctggggacagtcctgaaaggggcacagtgtagagagagataatttgaaagacagagagagatgggaaagacaggtccctcttagatggagagatggtgctgagtcagacacttccagacagacagagagacagcaatgggatttgcagtcatggacatgattgatgtgagaaaaactgctacaaacattaggacagaggggccagaaagagacaccaggggataaaggatttgcagaccatcttctatacagagagatgaagataaggcagacagagaaagtgggcaggaaagacagtcctcagagagatgggtgtgggaagacaggccaatggcatgtgcctacctgaagtgggagaggtggatgcgacactcatcccgggaggcgtgggcccccggccgccccaggggcctccataccttggcatccagcagggtagtgttgctgctgtaggtgcgagcatggctgggctgctcggcacagtgtttgaacgtgagagtgcaaggcttcaggaaggaggccccatgggggccacatgccaccacagggcttaccagcccctgggcttgggacagcgatggggcgtccgacaggtcccacaccaggatcaaagacacccgctcctggcggcccacagccacagcacctggcagggagagggagagctgagatgggcctggtaggcaggcacacccctgcccctgaaagaggccaggccagagagaaaggaggtggggcaggagcccaggagagacccccagcagggcacacagggaagtggtatgaacaagagtaagacgactgtggagctgacttgtagtgtaaccctaagcaagacacttccctttccacccaggctgctgctagcccatagtgtgccttgtgtgaatttgcaaatggtgctcttccctccctttactagagaattgtcacagcatactgattcattagaacaaggcactttacttccacctgccaggaagttgtcccaaaagatatgtaatatgtccatccctgaagtcaataaagctatactcaaaatataaacaattatcagaagtaaaaggtgtctatgaacattgctccctcagatgtggtgacctaatgtacagtctgaccaactgtatgcggagatgagagccaggagctgttacctggtgggatgagcaaggagatgcctgtatcctggagcatcaggcaaccgccgcggtgatccacctctcgagccgaaaacaccaacagtttgtgcatcaactggcggaccatggtctggccttgagtgggtgtgtgtagctcctggtagaaggcaaccatctctggcagtgtggctggcaggtgctgccttgagacctcattttctagttggggggtaggctgggacactggttcctcttgaccattcagtgtccagcaggcccccagcagccttctagggcagtgccatcgaaggcattgggccagaaggaggacacttgccactgggacccccaccagcagtaggaactgggagggttggaatgaactctcctgggggcacattcgcctggttactcaatgccgctggctctccttcacccctgtgccagccaaagccaaaggcctggtggggaagaaggggtcagtgtcagggtaagcccttttaagttgtggaggtcaaggcttggcttacacatagctgcaagttgtcttcattccagcgcacactgcacactttagtcacaccaattcttttaacctgtctctcttactcgagaacctaccctggctccccgtgacctaatacatcaaggtaaactgttctgaagcagagtgagcttgggtttacagttagagaacatgagttcaaatgtcaccttggtcactgtggctgggtaaacttatcatattgatgtaaggcaggagagccccaaaattggggcttagtttgggagggtttgtggcttcacctaggcaagaattcaagggtgagccagtggtgtcagacagcaactttcactaaagtggcagagtatagcagcagcagaggtatgctccttacagagcagagctaaccctaggcagtgtgcccagggtagcagctctggggcatttctgccatcatatttatgtccacttttaattacatgcagtaaggggtgggttattcagaaatttctagaaaaaggagtggtagcttcgggtcactgccatggaaaggggcagtaacttccaggcatcgccatggcagtggtaaactgtcatggcactggtgggcatgtcttatggagaggtgcttttggtgccttttccctgtttcagccagttttctatctggcctggaatcaaatcccacctcctgcctcaatactgcttaatgtacctcagtttcctcatctgtccaaatatctaccttgatctacaagtgctgatacaaaaaaatctataagtggaaaaagcaagtcgcagagagataaaatattctgagctcattaatgtgaaaaacaaaactgcatataaatagatacatatttatgggtgcatatatggaaatgtaaaggtatagagaaaggtctggagcagtggtgtacaataaaaatgtaatgtgaactacacatgtaattttaaatttcctgatggccacattaaaaagaacaggagaaattaatacattttatttaacccaatatattcaaaatgttatttcaacaggtaatcgatataaaattatgagatatttttactttcttccttcatacccagtctttgaaatccatgtgtaatttatatgaacagaacagctcacttgggactggctgtatttcaagtgcccagtagccacgtgtactaatgaatccggtcttagactgtgcaggtctggaaggacacacccccaaactattcccatgagtcacaacaaattgagaaggtggaaggtgtgaataaaaactttgtatttttttaaatccttttctctgtactttgaatttttcacatcaagcatgtagtttgtattaactttgtaattcttttctgaagctattaaaagtggggaaaaagtgcctctttgtgtaatggtgaggatggcataaggtcatgtgaaaagtatttgtagatgagaaagcactgtccaaatgtatgtgtttctttatgcccctccttctgccagaaaggcctgaaggtagctcacagggataggcaacatacaacaagaacaacaaaagctaaaagtggaagcaaaaaaaaaaaaaaatgaagaagacaaaacacaaagatgcagccctacagtgaagctggaatgaggcagggcaaaagcatacactcacctcctgctcacctggctacccagccaggccacaggctgagacttcccagtagctcttcctgaggccctccagaacccacctccgcctcctcctacttcccctcttccagcccctacaatttccaacacgcctgccctgtagcctgcccaggctccccacacctgcttaattctagcctctggcttttgctcatgctgttttctgtttctccactcacttgctctccccacttgtttcctctccctacgtggatcctcccattcaatagtgcctcccgctggtgcaccggcctttgacagcctccagctcgcgaaatctctctccacagccatcccaccatactgagtcactcttgattatgtgctgtcatgtgtgattttcccactcaaatgaacattttctaagcaccggctgtgtatcggacactgtgggaagttcaatcctgccaaagatgacgtcttattccgctctcaaggagcttctgcaggaatggaattcattggcttggtagctgagttctgtgaggcacaacgtcctccttcagagccctgggaggcccctctggttgactcactagaggctgcactggaagagcttccagtatccagtcctccccacgcccttcacttgcactacccacctggaactgaggcttggcccaccttcttccttccaacctcaggacccatgaaaactgaagccccttcctagtgcctcttagaccagggcagaacctccactgtatcctcaggattgaagactggggcagtacctgtttctcccatgtcctcactgaaagtgtgaataagaagcgggggttggcattgttctctttgcctaaagagccaacccagcagacaatgcaccagcctttttcaaccaggcatcctggagggcacacaggtgaatcagtgaattggcagtgtcccaaagctgatgggaagggggttggagcagcaagctaccgttgatgtcccatcatttcttttggttctttcacattagtaataattataattccaactgtaataacaatagctaacattcgcagagctttactcaatgccactgtgttaaagcactctccatggcttgtctcatctcatcctcacagcagccttaggagcgaggtgttatttttatctccatttcacagataaggaatccgagctttctccccacagtgaagatggatagggaattactaaacaactgaagacaggcaggaaggaggagcaaagacgaacaaggacttccagagataccccctttctctctccaccccttcttttccccaagtatcttcctttccttctctagaagaaataaagttggaagagaaagaagcaaaaatgaagtaaagacaaatagaaggacctaaatttacatcctcagttatgtggtaatacccaccccactacaccacacccccacctaccaaggtaccagtggcaggggatggaattgctaaagggatgaaaggaggggccccagctcgcttacacagcagtaaccttcctggggccaccaaagaccagagtccagatccccagtgaggtgcacctcactgggtggtgcagtagagtcccctggctcaacctccgaccctggagaagttggcatgcaccactcccaaagccccactgggcctctcccagggtgactgctcttccaggctgccctggccctcactgcatcctccctctggctccagaatggggaaaggtccggagtcttgctgaatggcaactatagcactgcagccattcgagtgtgacttggggcatcccaaccccatgcctggactcctcattacccactcctccagtctgtcttgctccagaccccagatcaccctgggtagcgggtccccgaaacgagagtcctttagaatgctgccatcacctgtccctaggcagttgcatcctccagcacaaagatccaaactcctgctgcaaagttctgctcataccctttaagaaaactctcaacctttcctccacctcactggttctccctgtgcctccccaacacctgatagatgtccagttactgcagaacataacaagtactgggatggatggtccaaacccaagtcatgaatggcatttgttagtatagtagacatttccgcaggacacagaatcatcccagtggtcctcatacccattggccaagtcccattttcctcccctcctccagcagagggtccctacactccagcaggcaggctaagctggcctggctcctcccccgaagctccaggtaaccccatcacaatgcccatcccctctccagctgccccaagggggtgctcaacttaccgtctaggagctcttagaggctgctggctggtccagttccttctccgagaaacaagggtcagccagattcagtcggcaggccagcagacaagtggaggtgggcggggaatccaggcaggagtggcctggcatttcctggcagagccctgcctcccagctgtctaaagaggggtgagggagagtgtccctgtctattggcaaagtccagcccaggtaagggattagctgaggatcccagaagtcagtgaactttccagtctaggtctggaaggaaggagggaggcagggagacaacctgggtgtaggtgctgcaccttgaaacccctccttacagtgccctctgctggtgagtggctgtccccagccagaggctattattaaaatagcagataggaggaggagggaaccttcatctgagtttcttaaactataatgtgcacaacagtcacctgggagatcttgttaaaatgcaggctctgattctgtaggtctagtatggggcctgagattctgcagctcaaagaagctcccagctgatgccaatgcaaccggtccaaggagcttagagagcatctagttccacccgctccccacacagagaagacagtggagccactgagacggttaatgactcaccagttgctggtggacctgagatgtacccatatttttccttacacaaggtgctttctacttcccccacccaaagttggcagagacactgccggttgggagacaactgaactttggggccatttgccattctgagttcttaaaactctgcctaggagcggtggcaccacaagaatgaaaactccttgtggaacttttcccatgttttcggctgtctcctcagctcctggtacagcctgatagatagaaggtgttcaataaacatgtcttgaatgaatgagtgaagcagttgagagggaaaaggatgcattttggctccaactggccaacactgagcccaggtgagccacacgttgggtatgtaatattgggcaagctacttaactcctctgaacctcaattcccttgtctgtcaaatgcagttaagaatatctaccttgtgtgagataataattgtcattattgagctaataaatgtcaaatgcccaccacagaatgggtggtcaatagatggtaaccgttgtcaccagggtctggcctcctgcagttgaggaggcatggtgaacgcccccccaggcccctagttatcatctcccatagaaaataagtaacttcctctgcttttgtctcagttaataattctctagcctcttgtctctgactgcaatgccctcccctctgcttccttccctggtggaggtgagagggtggaataaacctcccaggggagcccagtaccccaaagtgcagagatggtagagagcgggcaacctgggaagcagacctcatgcctaaagacaagccaggaaggggtgctcagaactttgatagggaatgaaaggagtggggtaggggtgtttgtctttgttgaacaaagctctgtctgagtcacacaggaggctggactttgccaacagacagggacactctcccctacccctctttagggcggctgggaggcaggactttctgccaggaagcgccaggtcactcctccttgactccccacccacctccacttgtcagctgccttctcctctgagtcataaagtcctaggggtttgtgaaagatctgtcaagctagggttctaagccaggaaggtcatgccaaccaggaggctataaccaggggctgtgttcatggattatgaactcacttcccaagctagttcttgccactcttggggacaatcccaattataaggaggctctgaagaaatgtgaaggctcctaccactcactcccatggccacagagctggttcatgggatgcaaagaccacaggcatcaacagcattataactgggggctgagctgtcacaggagggccagtgtcaaaccctcaccacaagccctcaaacattccatcaaggggtagcctccagaggccaggcaccaaggagggtctggcagaccagaggggctcctcctgagaggaactctttggggccatgaaacagcaacttggacttcccagccagtgtcaccacccttctcatctgagaaaggcagatcagcagggagcaccactccaccctcctcccagccccaccctcctcccagccccaccctcctctgccttccacacatcatatgtcatcaggccccccgcctgggaggtgtgctgccagaggtaaggggagcacaggcctaggaaccaggaggcactgggagaggcaggtgtcaggagaaaagaggatgggggcagggaggggcagggagggggcctccaccactggacagaaatgtagaaaaacaggaaggcagaagatgagcaaacggacagtcaggagcacagaaagacaagtagaaatatgcacaggtgggcatgctgctcagctctgtcccagaacctccaggaccagtgtccctgacccttgacagaaaaggatggattagggccaggcacagtggctcatgcctgtaatcccagcactttgggaggccaaggcgggtggatcacctgaggtcaggagttcgagaccagcctgaccaacatggcaaaaccccatctctactaaaaatacaaaattagccgggcatggtggcgcacgcctgtaatcccagctactagggaggctgagacaggagaatcacttgaactagggaggcagaggttgcagtgagccgagattgcaccactgcactccagcctggacaacaagagtgaaactctgtatgaaaagaaaaaaaaaaaaaggatggattagatagtcagtccagaatactgaaaataatcagattgttttctctccttcaaatctggttaatcatggggggaggctgaaatatcatgaacaaatgagaagaatgatatttgtggggccttggtggggccttggctggaggagggtctgtacattgtcccacatgcaaatgacatgcaaagcaacatgccaccttggcagctttttaatcaaagaccaggcagttgtttccttgaaaagtcaggccacaagaaacctggatgcttgtgcttacatcctgacactctgggaatggaaagatggagcaggaagctcataccccatggctccaggggtagaagagagctaaaagttcagaaaaaggaatccacggtgtcaacaggccaagtttgaatttgggcaggagatcagcctgggtgggccccatgagtgtgccagtctgatatggtgagataagcctgggacagatgtgctgccgcattcgtgactagaaaagagtccccaggaatttctggctcctgccttcagattgtgaactttccaggttggtagatcagcttaggtagaacagttctcggtgagggccagctacatacctggctaagcgctgcccactgcagaaaagctcatcacccgggacctgatctccaggactcagaagcacttggaggaaggcctattcacttagaagcagttaccagtgctgggcagtgtcctccaagtgccagaggagtgctgtggagaaaagaagtccatggaagccaggagatgggcaaggtgtggcctggggttggagagagctcagaggtacaggactggagctgggccagggagagaggaaggacctccgtgagtagaccttctctgaggggctcaggccaggaaatgagtcaggttaggaggcagagacagacgaggagccgcaggggaaggctcatcactagcatgttctctgcctccccagattttgcctcttcaaggtgaatgcggcttcaaggggctatctttgtgctcctgccccacctggggcccatcctggtctggctgttcactcgtgatcacatgtctggttggtgtgagggcccgaggatgctgtcctggtgcccattctacaaagtcttattgcttgtacagacagccatctactctgtcgtggggtgagtacttgtttctcacacatggccctggtacccaatggggtgggaacaagtcctctatatctgaattactcccatatattggcctccaaaggtaggcgctttgtcttgcctctcaccaccatagtgggtcctccagaaagtaagaaaccctctatgcctgcctggggttccagttagcccttcttccaccctctctaagtctccccagcccctcctccacctcaccatgcccagctcctcccaccaactccctccctggcccttacatgatgcctaaacccatctgcccccatttcagcccacaagggtatccaagagtccttatgccagagagcctcctccatttgccacggaacctcctcccactgaatgtttttgccaccatgtctccacagctatgcctcctacctggtgtggaaggacctgggagggggcttggggtggcccctggccctgcctcttggcctctatgctgttcagctcaccatcagctggactgtcctggttctctttttcacagtccacaaccctggtctggtaaggcacacagtgctcagtagcagaagtaatgtgggagagggtgaaaccacctggctccagaagcacataattcagcagagcaattgagtgcaggcaggtaatgggtgggcagacttctctgcactcccatggtgtgcacagagccccagggactgagctcgttgctgggctgggtactgcagaaaggtggaggtgctggttctcgggcagccagctgacccccggcctctatgcccaggccctgctgcacctgctgctgctgtatgggctggtggtgagcacagcactgatctggcatcccatcaacaaactggctgccctgttactgctgccctacctagcctggctcaccgtgacttcagccctcacctaccacctgtggagggacagcctttgtccagtgcaccagcctcagcccacggagaagagtgactgaggccctagggcatgggagaggagggacgcccagggtggggaggaagagtctgcaagcagggctgtggagttagggttcaccccaatgggaccaccctcctgggtcccctggtgccgtttttccttagaaatcagagaaatgggaaagggggggaaactgattttacacttaaataataaaatcctattagtaactctgaaggtatgatgtgaagtgtgtatttgaatgcataatatgatgactagggcggcagagtgggatagaagcttctggacctctgtgtgagtgtgtgcgcgtgaatgaatgtgtgaaggcccatgggggaggggtgggcacaccagctcgcctccattcacatgcctccccacctggcataaagatttagcactcagatgtttaattacctgaaaaacaaaaggctttttaaaagtgacaaaaaagccaaaacagaaaaatacaccttaaaaaagggtactagggggccaggagtggtggctcacacctgtaatcccagcactttgggaggccaaggcgggtggatcatgaggtcaggagttcgagaccagcctggccaacatggtgaaaccctgcctccaaaaatacaaacattagctgggtgcagtggtgagtacctgtagtcctagctactcaggaagctgaggcaggagaatcacttgaacccggggaagaggaggttgcagtgagccgagatcatgccactgcactccagcctgggtgacagagtgagactccatctcaaaaaaaaagggggggatactaattatacatgttaaggttatatagtatatattatacattaatttatatatcagatttatgatgcaatatctagttataacatatactatggttgtatgatatatatgttatacatctctgataaataagattatagaccttcttttttgctttcatacattcctatgctttccttattttacatcaattaattactattagaataaggcaaagaagattgaaaaaaagagattaagcctcagggtgctgacaggtgaatccataggagcttcttgttcagccttctatcttgcttctctttttctaaaccttcttagtggctttttaatttttgactcctcccttctctgattttcttctgtccttgtttcaaagccctgatggtggcaaggagtgaccgcccttgagtaagcctcctcaaatctttaacaaggtcagctggaaggcccagacaccttgcagtagggggtctccacctgctgcatgatggggatcaccagaattgtttaaaaatcctcatcagcctctccaggaaggaggcctgggcatcaacatttttaaaacttcccaagacctcctcaggtgcagccaaggctgtaccacagctgtttggagctatttaaaaaaatgcatgttcctcagaccgcactcaggacccataaatgagaacgttgcgggtgggctcttggcatcttcagatttaaaacctcctgagcacttctgtcagctgctagctagtttgagtgctttgggcacagatcgtttatcagggcccgtttagccttgacactctgaggttttgtgagctgagttttagagctgaaacaaactgtatgctctcaggtgagaagccagtaaggcagcataatttgagaagaggagtggctctttccagagctcacccaagagagggagtctgcagcctcccctcctccaccaagggcatgctcagcccagtgggtcaggtcacaggcaccccaggaggacacacacagtgtcccacccacctttgtatctccagccccaggacagggcagagcacagagtaggtgcttgtacgtttttatttgttgattaattgaacgaataaatgaacacattgttgtactttaaaaacaaatgctgaccagcacctgccgccacccctacccccacccctactctggaacaactgaaaaaagaagggaaaggctttaatcattttggaaactcctggttctaatgtgcagccaaactgagatgtgctgctgcagggtattgcttcttactgcttctcaaagtgtgccccagagacctcctgagacacttgttgggactccagacccatgaaatcaggtcatcttggggagtgagagcaatagggtatggtgatttgcagttctggccatggagtcagaccaacctggggttggatattgactctgttatctattaactggtaacctggtgcaacttctagctataaatactgatggacagaggataggctcggaacccaaaatacatgggttcttacccagctctaccaccattgtgtgatcttggcaagtgggcaccccagacattatcttccattatcattattatcatctcataataatatatgcattgtaatatttgctaccaattttattcattaccagctaattctagaagttaggtggaacctccaagaagatgtatgatgcctagggtattactttgacctccccaaggcaagctggagccactaacccatgcctctagcttaggacttagccctagaagaaagcttaatttgggcagtgtcccaagccctgggctagcacgaccgcctgatacagcatgagccaagctaaagagatttttggccatgtgcagaaactcagcatgaaagggcagaatcccaactccaaactcttatcctctaactccaaagttgtccttaaaatcctcctctgccccagctccttggttcctgggtgaagggagcccctaatcccacagtctccaacctccctggggctcttatctttccccttaccccacttcccagttcagagcccagcctagtggacacctgcctttgcccctcctctcttgttacttaagagctgtgcctaaatagacttggagctgcctcttctctttgcaagtgtatcccaagcttccaccattcaaattatgtgcacatttttgttctgaggcagtatttttccatttgcctctgatttggttgagtcggagacagacaagatcataaggctctgcagatctcccgtccagcggctagagaggcactaggtaaaacagcagacccaggaggtggcatatctcattctattgtatcctagttcatcctttcctcttctaaaccttcactcttcctcactttgccaatttctgcagaatggaaacatagagaggctaggtgagatggcagagtggtaggtgtatgtctagtggtcaaagattggtcagctgggctaggaacagggcagagtgtaggatgtatttattctgcacatctctggcccctcctacctacaggcaggtagagctgctgcgcaggagatgcctagaggcccctgaatgttgtcagtcctgggccagggctccaaagtctcttttcttttgtgaatggccactatctgctctgtcgcttggggctcccctgtaccccaagcccagtttcagagtcttcccagaggtcccctttcttgtagttccagaaaacaagcacacaatccttttgttttaaggattttactgctgattctcattagcagcttacaaggtactcagtccaaagcccaactttgctgagaactccctcagatctcgaccttcctcttgtatcctcaagtagagcccaaaaaaacatttacttgcctcccagactccttctccccccacccccaaatgttgaggacactccatacatttaggctcttcttctggtatggaagccaggggaagccatccctggtcacaccagggccttgatcatgttcatcagggcctcatttgtccctttcccaggtcgcccagcccacacagagattatccgctaagacaagtaccagaaaaatccccctagcgtccacttgcacctactctaacacatttctcattttaagggctgaaattcccctctcaagttgattgtagtttgtcacctcttcccagtaggttctttggccttgcaaacaccccttcaaagaggaatactattagtcaccttaatgtacatgatccttatcagatcactttctttaaagactgaaagtgccagccacgggagctgggcagtgccaggagtagccactggaatggaaaccatggtgaccaggactaaagtcaccattttacccagggtggtgtgtcccacatggcaaagcaagcattgtgtcctgtacagaagactgtaaactctgtcctgccctgtgattctggtgccttctccaatcccagcctcagactctgggagacccttggccccctcccctcttcattggccaaggctgctcaaagccctggacacctcacgtttatatcaacagagcagttgctagaggaagcagcctcccgccctccagaggggtgtctggtgcccgagccctgttgtttgtgtaccttgtctcagtagtgaccagaggggcaggcaggcctgggctgtgtctctggggcaacgtactgttggggtcccagctgtccctgcacataaagcaccgactccatcaatgcacccctgaggtatcctctttcagggagtgagaatttaaaccttcctctggtgaggcttctattttccaccagccctgctcctggcctctctgctcccttcccaatgagggcagctccacatccagccaagatccaaggaacaaccatgcctgaccctgtcctctccttctcagccacctcctagaatctctgaatgttttctgaaatgaccgtgggaaacaggacagggagaggcatgctgcagcgtatcccaggcctaacccagctcctttcagccactgccatcccaacagaagggggcaagggcctgcagagacaggctgggaggattccaattttggtttccatccccagatactagctgtctggtgtctctttacctgtacccccaaaacacagatacacacacacacacacccctcatgtaccaattactccctagagtctgtttttcctgcaagaactccttctcagcttcttcaactcccactggtctctgtccttcccttctcccagagctgggcctcatgggtgctggcagcagttgagactgaatggtgaaggaggtaaaacatgactctggaagcacatggctctgccctctctagctgcatcaccttgggcaagtcacttaacctctctggtctcaatttcctcaccagaaaaattaggataataatagtacctaccccaaacatccttgtgaggaataaatgagttaacctacataatattttagagtaatgtcaggccagcagcaaggactgtgttaatgtcagctctccttgttactaaattccagggaatatgacacagtaggagaagcatggaacttgggagctgacagatatgggttcaaatcccagcaccccactgactccacatgtgaccttgaatgaaataccttactgcccagtatcctcctgtgcaggagggggactactgatagaaccttacccaatagggttaacactgggtgtggggtgtgccagccctgaagagtatagaggcagctgtagggagaggagtcaagctcctggaatctgatcccccagattagttgctgcactctggggtgagcagagtaaactggtctgacttggaaagaagagccagagaccagccaggaattcaggcccccaggaggtgccataaatagctagagcagatcagagggcctccagggatggcaggctgggagacggggaaggctcaaaggagcagtgaaaaaggaagctgtcagtcatcagtctgggggcagacccaggaccctctcccaaaggtcgaagggaaaactgtctataagtaagacagaagaaaggggtcaactcttaaggaccagcctgagaccacctgggcaccattcactctgagctgttgggagaggcaggaaattctcgacacgccattcacctgtggtcttcacaagcccactcggcgccctattttctgccctttgaccatttggaaatagaaatcaatagcacagcctgtgtcacagatgggaaaacggaggctcagagatgtcaagtgatttgtccaagatcacacagtgaatcgggctaagatggggatatgaacgtagaatattttttgcctcctaatccagggttatacatgacagccaaaatagaaggccctgtcctcagggaggaagtctttcttgcaggggaacagtgaactgaaaggatccatcctccttgctttcctccccaagacattttactcttcctccgttgatccaagcatatcaccctagctgggcctgggaagtgtgagagggatgcacatttataatgcttcagagatgtttcatcaaaggtagctgtgcgcagccctgggaataggctaaacttgaacttgggctctgaagacctgaactcaaagcccgtgtgatcttatacaaatcacttcacctttctcagccacaagtccctaacttgcaaaatgaggcccataattcacacccatgtgagactggtgtaaggactaaatgagataatgcatgcttgaatgcttgattaatgccccaaatatgataaaagctgggatcccctggtgagccagcaccttatttatctctgtactcttggtatttaccaccgcacctggaacataggaacctctgataaatgttgactgaacaagaaaatgaagtaaactctttacatttaaacgtggtatgtttgtgtgataacaacattctttgcagtttatcagctgccactgtctttttattgtggacacaggcactattatctctactcagtgctttattccccccgaaaaatgtttgaaaaaataagatccagataaaaatgctttcagtggctgggcgcggtggctcatgccacccagcattttgggaggccaaggcaggcggatcacgaggtcaggagatggagaccatcctggccacatggtgaaaccctgtctctactaaaattacaaaaattagctgggcctggtggcacatgccagtagtcccagctactttggaggctgaggcaggagaatcggttgaactcgggaggcggaggttgcagtgagccaagatcgtgccactgcactccagtctggtgacagagtgagactccatctcaaaaaataaataataataatccttttagtagtaaatccaaaaggtaggggaccatataatttattgtccacagcgggacacctttgggagtaaaggggtgctattagtaattatgtctggacaacaggaagaaaccatgactggcaaaccaaaatgctgggcatcacactaacagagcactctgctgctcagactctctggaggagtgagccctaaatcttccaaaccatcttgactcctcttctttagtcagaccctccaaagggtgccctaccctctcatccccaccagccaaacccatttggagctgttttcagatccgttccccagtgttcttaggttcctcattttcaacctacaagtgaccctgaccccttccttctgcttccctgagaatggcctagagtgtttgcactgctccaaacacgaagacttttgcctctgctaagtacccatcatgagagctgcaaaaatcatctagccatcctctgctgctgttccggctcagggtcttttctatgggcccccatcatctctctctggcctcagtaggcttctcactggtcccctgcctctgctcttcccaagtgctcagaccacctgtctcacctgttcagagacaatggcttcccacctcagtctgagaaaaagcaaggtacttatgacagcccataaggccccagtcccttttacccttgttatctctctggcttaatctcttagaactcttcagtcacccagatgtatgtcctcgctagttcctcaaacaccccaggaatgctcccttctcagagcctttgctcacgttgttcccttccttggaacgctttcctcttagacaaccaaatgattagttcccttgccttcttcacgtcttcttcaattgtctccttttcaaagtccttcaccctggccatcctataagtacgtaaccccacctcttagcacttcctgtttccatttcctgtcttttctccttggcacttgtcatcacaaaatagaccatgtattttacttaccttatttgttgttcagttcctcaagctccacaaatcatcacagcagggattttcatttgctttgttcttttgccatattcccagtacctgaaacagcacctggcatagagtagatactcaataaatatttgttaagaagaataaaagactgactgtgagggcacatagcatggaggttgaatatttggcctgaagtacaaaagcctgcattttaatcccggctctgcacacttctgtgactcagtttacctgtaacttgggataatacacatcgcctcccatggctgtggcaagcatgcatctgatttcatttaaacccctaaacccactgcctggcctgtttcaaaatctctgagctaagtaaatggcagctattgttactcagggaggctcctgatcgatttgacattacattatggctttgtaacaggcaaatcagcacccaccgcttttgagtcataactcacacacttactccccaaattgtcagttttgatcccacctctgccaggacccctcctttcctgaacccacgttcccccaaagcaaatggcctgggtctttttgcagtcagcccctttcaacacacatctcctcctgtttaaatctcagaaggccaccctcctaaatctcaggatgcctgccctggggccccttccacactctcccccagtggagctagggaatttgggtgggaaacaaaggggagaacataaggtgagctgagagggagagggagaagagagcaggccaagccatacccacctgccaggttcctgtctttgcctactgataaataggggatactaatggccagattttccattcccccaccccagcacccgctgtcactcaattaaaaaaagatagagggagagagcctgggggaggggcaggaggccttggctataaagcctgtggctaagtggggaaagcacgaagcctggcctgctgggtccttttcccgtcatccccagccagatttagctgctgacagctgcttgggactctgccgccagggcctggcccagacctgcctgcctctctcctctccctcagtgactcctgagccacagcccctccatggcccagaaggaagaggctgctgtggccactgaggctgcctcccagaatggggaggatctggagaacctggacgaccctgagaagctgaaagagctgattgagctgccgccctttgagattgtcacagggtaagcctcagatgtgggtcagggttctgctccctagaagagtgcagccttgggttaggctgtggaaattcaggatggttatattaggcgtcagggacagctacaaccctgcagcagtgagagtgcaccagtgggcccggcaggggtggtaggggacccagcagcaaattctcttggcttctcagggtgacaccttgggctctctaatcagggagaggtaggaggagctccttggaggcaaaagcccagagaataaaaccacccttcaggcctcctggtattgggatggccacctgcctctctgggtagaagcttagtcccagggagtttggcgaggacagaggatgagactggcacatctatatgtggctccgttcaaagcaacccttcccctcaacttctctgttcctgagtgggtctctccgctagccataggcctctagccctttctttagagcttcttcctggagtagatgctcccaagacaggaaagatagatccatcctttcccaagactcagaagcagcttttttcttattaaatcttttgagtctcctcaggggctgtcccacagagaaacagagaaattacatgcagataacgcagcccaggagcttatggacacaggagctgttccaacatgctcaggcattgcctggaggaactgggacccaaagaaaagggtctacagactgcaaggagggggctgtgtgcagggtacctctgtcttatccagattatgccatctccaggaataaaactaagtagtcttcttcctcttccctttctattcctgtagtggaagacccttctaaatcctgagcaaagaataaaaagagaatctatgaggccatatttcctccttgaaccaaacgttcccttcatggggtctccaggaatgaccacaggcagagtgggtgcgagactaagagaagtttcaggaagaaaggaggcatgatgctttcaagggggaaaggaagccctgagtggcaatttggacttgatatttcaagcttgacaagtgattttccagtcagccacagttttagcacttataacatgaagatctatagtagtaaggtcccttccagctcagatgttttctgattttcaagagaacctaagggaaaatgcatcctatttcctgaggcaagagtagcccctgaatttccatttgcccatgcccacccaactaatctcaccctcatcctaggattaagggagcagctgggcacagattaatatagacacagggaaagcctaaggcagcctggccaggagagtcctcaattccagtggctttcttatggaaggagagcctttttctaacacctaagcatgctggtatacgctatccttagtcatacacacacgcgtgtgcacactacactcttgtgtggctttccaacacagagggagggtaggtcaagaacagaattagactatgtttgttcagctgaacatgctttgggggtcccagagcaatggatcctgaagggttaagtccactgatataacttacatttgtccagggctttataatcacaacatagtttcatgaacatgagaccattcaacactcagcacaaaggtaggagagggagatatattattgccactttacagagggggaaactgagactcagagagattgaatggtatgtccaaaaccacagaactggtaggtggcacatcttcttactcccagcaaagtatcctttctactggtttcttattcattctggatcccaggtttcccagagctccacgttatctctatctgggaggtagtgaggacccaaggctcagaaaaaggggcacagaaggggcaacgttctgagcattctgtgaacagttcaggtgggagcagagcgctgagtgtttcctggccacaagtaacagctgtagagagctgtctcctgggcccctctgggtaaacagatggcttaaaatagcccagaggtgcagctgggtctgtgcagggagagggtgagggaatagctttcctctccttccctcttgagatgcattccccccaggactccctcctggagtcaagggggtcagcaaagcagcttttctagcctggtctcctatagggaagatctttagtgctccttatatttgggccaaaaactagcagaagagcaggtagcttttccggaaacagtccgacatgaggagggtagctggtaggaaggagagatgcccagctcatagcgattctggttgaatagggcattcaggatagaaagcggaactgagcacattaacaaaataacatggtagaatgttctggaaaagggcctaagcctgccgtagcgtgctgaagccagttcctgttggttcacaagtctcttccctactctgcatccagtgatatcacctcgggagcttgaaatctctgtaatgggagtacttaccttatggaaatcagcaaactttagaaattggggattcttccttctatcagagagatgagtgttacacttatcagcacaccattgaaaaccagaaacctctgaaagtgagaggaagagcagtgggaaagggatcaggtttggtaatgcttaagacggagctctgaaggatacaatttgaggcctggagaaggcatcatatgtatcatacatcaatttcctttttcttttttggagatggggtcttgcttcttgctctgttgcccaggatggagtgcagtggtgcaatcacagctcactgtcgtcgcaacctcccgggctcaggtgatcttcctgcctcagcctcccaagtagctaagactacaggtgcatgccaccacgcccagctaatctttgtatttttatagagatgggttctgactgtgttgcccaggctgctctcaaactcctggcttcaagcaatcctcatgcctcagcctcccaaagtgctgggactattggcgtgggccactgtgcccagactagctttgagtgtctactgttgtccaaaaccttagaagttagattactcactctttcaggtgaggaaactaagcctcagagggattaagtcatatggccaaagcttgttgatggagtaggatgtgaaccccaggactgtctgactccaaatcatcacactgcatccaaaaaaccagagaggattctttttatatttactgaataagagtttttcatttactgcctgtttcccctgttagtatttaacctctatgaggacagcactttgtctttttcactgctttatctttagcacctagctcctgataggtactcaatacgtatttgttgaataaatgaatgacctaatgaataagaaccttttgggtggttcttaggctctctgtcagacaagacagggaatgaactgggggagggtttcttgaggacagcagctcagggtgtatgacgatccagcaacactagatttaggtaagaattcccctggctcatgcctgcttctggacacagcacgttttagtagagctctggggcacgagagctggttgtctccccagctttccaacccagtgagaagtgactgtggctctgcctggcagcacccttgatgtgagcttggctttgtctctagttatgttgtatatgtttttacagaaagcagaacctcctatcccagggattattatggaacaaagataaatggcacacagagtgattcttcttctaaccacttctttagctaccagtagtttactctagccatgtaaggaacacagagaggcagtgtccagaggagaagggtgagataaggagtgaggggacttcgacaccagttaacaccagccacagccctttaccctcaccctggcctctggagcacgctgggtggtgtgtcaccaagaagagaaggcagcgcactgactctggccaacctgccttccacagagggttgggggcaggtcaaagctcaggtgtgaagaccatgcctaccagggaaaacaggcaagttcagggtttcccttgggcaaaatcccatccagtcccacagtctggagttcccttctcagctctagggagtcaggctgctagaaccctctgctcctgctcttactactctttctgattatgcccactccttggtatccgctttgaaaagtggtctgagaaagcagaaggccaatgaaaccagcaatcctccctctttcacgccagtcaccaacaggtctagtgagggaaagctgaaacaagtcaacacataattacctatgagtagatttttccactcatggattattctggagcaaatgtttaatctcagtccagcttcaactgccctctgggttgcttcctttcacagtatagatttacgcttagaaaattcaaacgttttgaatgtgaacctgagaaaaatgtattacatttactcacatcccttctccctccatcaagcagattatcttcccaattttttttctagatatttggactctctgtttcctcccaagtgaactgaaatgtccagtagcctgggtctaagcagatgaagtgtgactggtcttgtttggagaaagtatgaggaaatggtgcttaacaaggtgctatcagaggctggggagagggaatagaaatcaggctgtaggtttctacgcatgaggaagtgactggatcagggaaagaaatctactaccagcatctctctcctgaccaccacccaccaccaccaccccaccccacacacacacacacacacacacacacacacacacacgtttctacgcatgaggaagtgactggatcagggaaagaaatctactaccagcatctctctactgaccaccacccaccaccaccaccccaccacacacccacacacacacacacacacacaggtttctacgcatgaggaagtgactggatcagggaaagaaatctactaccagcatctctctactgaccaccacccaccaacaccaccccaccacacacacacacacacacacacacactcacacacacacacacccccacccctttaccagtaaaatattttctgggttaaatgtaaagggctatagttaaatatgatacttaggcctatcatgctacttaaaaaaaactgctggtgatgatttaacaagttaggtgtcattatttccttccttccactagtgggcataatagtgttaatttattctgtgagtctacaaaattgcccaagatggccatgttgtctagttccctggagaaattccagacttctactacctctgttctcctggtttccccccaggacgtagctatttcggtctgtgagaggcctaaagaatctcatctgacctttttgctccttctagaagaccaagaaacccattcagaaatcaagcaagtttagtctctgagcaagcccaagggaacgactaggaaccaaaccttccctgcctttcctttgctccttgaaagcacttcttttcctgaggcatctagtccagaaggccctgctgagggacagagtagattctagggctgctggccagaggggttggaaacccgtatttatagagagatgacctttcttcctctcccttgggtttcaggtttctttgggtcttctcctcttgcctagggaagaggaggaggggaaaatgtcagagcttaagaagggcagaaagaaacagtcacctcacaaccatcaaagccaatttgcaattgcatgctgggccaaattcacactggcctaaattcatactttcagctgagctatagggagctccagaaggaaaagagggaccacacagcagctactgtttaagcttccaagctatttgagtagccatgaatacttgccagggttccacctgataatccatcatataggtggccctggattagacttggggagtggggcaaaaggtcttgaagagcaagtttgggcaggaacggtaagctctgagcttctcaaaagcaaaaagccactccaggaagtgaagggaccatttggcaactggtaaagttgaggagtggtctggtggggtgagtacctttggggagcactcactataagtgaacgcctgacagggattgagaagaggagcagggaaacatcaggcgatccattctcctaaaatgttaagtaaacaataaacacctccaactagggacacaggggcttagagagctaagtatagtacctgatggaatcctggggctgggtcctcaaacacatccatctccacagtggaaaatgaacctgacagcacgggacatggaaacttgggtggatacattttggtgatgggtgggggtgagggaatcctgcagggaaataagtcaagtttactcatatctttggcatctgctgctcatccctaggcagccaaggccctgggataccagggattcccctgcagcccagggagtctgttgacttctttggggaaagagaagaggtggagacaggcaatagtagaattaatggtgccataggtatctcttggggcaggcagagagattacatttttaaaaaggaaaacattgaatctttctagctggtactcatctcctcctctcttgacatttttcatctctcctattaaaaattcattttctttggacttcaaacttgaacaaatcttgcctattttagaaaaacacacacatacacataaaagtaaaaacaatcttcaactctgatgtcttctctggcccttctcttttttcttctccttgttattaccaaaattttcaaaattcctggacttttcctgctgttttcatttcctaaccatccatctcctcctcaaaggcacccacacaattcatcaccaagtttagtgtcctaagatacctactggacttgttcaatttgaggcttttcctcagcttcacactatctgcctattgccaagactgtaatcttgcatggacatcatttttattgttttccttctcaagaacctgtaacaattctctactgcctcccgaatcaaggccaaactttcgagaaccttcataatacttcctttactgtacctatccaattttagcagtcttataatgttctcagctgttttatttacatcttctctgtccagctgcaatctagctgctaaattataagcatctggagggcagagaccaagtcctttaagatttggaggtgactcaatactaaatacaggcttaactatcccaagatacccttgagtagtctgtcctcacagataaaaattcttggacacttagcatgtgacaatccctttacctgaaagtaaacagacttgagaagtagtcacttgagaaggagagcatgttattgcaagttttaggccatttcatgccaagatgcaatttacatgagttacaaggaagagaaaaaagcataaaatgctctgcaaaatctttgttttgctctgtcatgagaaattttatatgcttgctacttacctggccacttattggaatcatccagagagctttttaaaaatactgatgcttggaccacctctccacatgttctgatttaattggtttggcatgaggcccaggcactgacattctcagtcttctaggtgattctaaggtataggcaggttaaagattcagtgatttagaaatgtaggggtatgttgtgctggaagagtgatggtggagacaatgtcctagtagggtgaccaaaatgcacacctcagtccaaattctcctctccttcagataaacccttctggattttttaatgcttttttttttttttttttttttgtcactgatgttaccacagacaagacctatttatagtaagagtgaatgcatttctgaagtactgacctggaagagctacctactctaggctggttctagaaacaagaacttatcattctttcctgtccttttgtctccttgacctacagagaacggctgcctgccaacttctttaaattccagttccggaatgtggagtacagttccgggaggaacaagaccttcctctgctatgtggttgaagcacagggcaaggggggccaagtgcaggcatctcggggatacctagaggatgagcatgcggctgcccatgcagaggaagctttcttcaacaccatcctgccagccttcgacccagccctgcggtacaatgtcacctggtatgtgtcctccagcccctgtgcagcgtgtgctgaccgcattatcaaaacccttagcaagaccaagaacctgcgtctgctcattctggtgggtcgactcttcatgtgggaggagccggagatccaggctgctctgaagaagctgaaggaggctggctgtaaactgcgcatcatgaagccccaggacttcgaatatgtctggcagaattttgtggagcaagaagagggtgaatccaaggcctttcagccctgggaggacattcaggagaacttcctatactacgaggagaagttggcagacatcctgaagtagggcaactgggctttgcctcacgtgagttttcctggtgccatggcaccaacactttattatgttaactccagtagaaggtgtgaggtcaggtagaatctgtgatatgtctgattttcctttggaagggtttcatttctctgcttttgactggttgcaaaaatagtttagaacatgtctctttcctctgaatccctctctaaacttttccctcccacacttttgtatcaaagtaactttcccctaacttagaatactcaaggttgacaggaatcctaaaactttcatgaggcaagatgacgttctttggtaagatttagatggtgcaagcacctgctactgaaccacagcagagaagatactgaaatcctctgagtatgcccctgtgtacatgtcagggattactaattccagacatcttctagatgcctcactcccatatccactggcaatcttaccattccatttttctctaatgaatgttttttagtccttcagggacaattttttcacttatggtaattttgaaattccccaaatggactggtatttaacttgttttaagccagacctgctttcatgttttcaaacaaatggctacactttgaaggagaccaacaattgctgtgtgaaaatacaatacgggaacattttccttatgttgagaagacctcagtagaattcatggaggatgtcgaatgcaggaatggggataatatagcaacaagctagtccatgcaggaacatttaaagagttaaaaagacatttgtaaagtaggcagcagctcagaagtaacctcttacagatatcaagaggtgataggagaaagattagctatttaagcaaataattaggacacaattaaggccaatttggcctcttgctgagggtaaattaaactctaacagaaacaggctaattaccctcaggaaagagggctaaaggatcctttactatcttttttacatttagtctgattgagtttgcgcctacagaaatgctatgacgaagccccctttgcaaggccccagttactgatcaaaatcttccagtaatagaggaggggtactcacgacactcttacccaactttaatcctgcaacaactcacatattactaaaacatgaaaacaacaagcttccatgaagataatttacttttggtctctctcactcctaacacccttaagagaagatgtcgcttcatagacacgtttaggaaatatcaatgttccagagcttgatgttggcaggtgttttctattagacatgcacatgggcacctgatcattctcaagctgagcatttgccaacccatgaagatacaactttcagccatttcttttaaaaagcaggacccagtcactgaagtcagtgagcctatgatagggtatactgtgtggtactctgctcacataaaataagacactttatagtggtgaacagtagtcaaaacagatttctgagggtgccctctgagaatataaaatttaacttttagaattccttgaagattttgttagtgtatgtactatcactgtaattataaacccaacatagattctacagactaaccggcagcttaaaatttaaccccagtatattttcctttcagacatctttcagagtcaagggcccaggtgcctaactagcaagtccttagagcttttttttttttttttttttttcagtgatttcaaatataactgtattatctggacccattaacatgcttccctgtcttctatttgaattgctcatgtttgtgaagggaaaggttaagatatatcaagttaaaaaaaaaaaaactggcatgagataagagtgtaatctaaaagcccaaaagaacaaccctgcttaattaaaataatcttgagaaatgagcatttgttaaataaagtgtcttattttacatacttatttcatctttcttttttttttttttaatgacaaaatagtatttaatcctatatttagtcaaaagaccagagttaaaccagatctcttctggggctttttctgtgtaaaccacatcaaaacatgaacgaaagactggcttctggtttagtcaatcctggtaaatttacccaatcctgcaaaggaaactatggaggagaaatccagggacttgttgggaagggcacacagaaaccttagttcaaaaagaaactagtcattgttcggggccagcagagctctcagtaacacattttctttgtttgttttaccaaggtattcctgctgccaccaagagacagcaatgacatgtacagccatctgggacatgcctgtcttcctaataccatttggagctggacaacatttgacaccaaccaatcatactggacaaggcccttagaggacttgaaatatacttctcatgctgtagtttatttaggctgtgactctctctctaatgctgctctcgggaaggacgaaagtgacctgcaaggagagaaatgcaaccatacatgggctccagtcaactatgggactgaaggtcctaattgctcacccaagggggctgcttaacacaaacagcctcagacccgaggtttagatttctgaaatatgcattttatgttaagttgggtatttttttaaaaaaagaaaaacagcaacattaataaaagaagtggtgtgtttttcccgtggccagatttttaagaaacttgaacatctggaagttgccacagacaagcgagctagtccagacacagggacactccaggctatgaaccaagccatggttaaaccaagacttgcctagacaatgcagaataactctcccatacagacttcttacgacaatcaagtgagggcctttcccttctctgaaggcaagtaatagggcagaaggtggaacaaaaagcatgagaaatctaaggtagccacatcccaaatgccagttaataagcaactagcttctttattagagaggagcgggtgaaaagtagtagtttaatgttcagatatacaatcatttaaaagtattcaatacatggtgtttgatggtaatggcaggatgatgtcaagtctctctttttttttttttaaaggtttgtttgagtcctatgtggaagcaaaaattcacaggtgaatttccgggtgtttgccaaactctaactaggtttccaggaataatgtgttcactctgattaccagggcatgcctcctttcctcaggcttcaagtgtgataagtcgtcggaatttgacccaagactactatcggcaaatgacaaagtgctttatcacattcctgctaagtcccagaattccacttacagccaatcctgaatgagactaggttttgtctaaagaatcaaggctcaaacgccaagaaaaaaataataataataaccataatctctttaaaagtaaaggaagcctagaaaatccatgttttgacttgtgttaaggtttacagatggtactcaatttacaatggtttgtcttgcaatttttggactttacaacggtgcaaaagccatacacattcagtacacccttcaactgaactcaacttaagatggggttacccagacatagacctaagttgaggagcatctgtaattgcagagttaagcaaaatattttaagtttctttaagtttcttatcccccactctcactttcaattttgtgtatttagataatctctccttcctttttcccttcaactttatgtggacaaaagcaatgcttcaagaaaagcctcaatctaaaagtttgataatgaacttgaccctccactgcccctaccccaacaacatgaagaacttgtctgttccacctagaaatacaaaagtgaaatacttttttgaaactgttgcctcttatcaggctgatatgtgataagaacacagtctaaagtacaaagattatatttaaccagtactttcctggtgttttaaccagccccttctaaaatacagttgttcttttatacttgggaaagcagcaagtcctgtgacagacccaaagtcactctagggagaaaatcaatagcaagtctggctgttttaactctcaacaccactgtaagggaaaacaagaaaatgtctagtttcccgaatagctctgatactgaaccattggctaaatccatgaactttattttcctaccatgaccacaatagacgactggtctttgcagcttcggaagaaaagaggactaatatttagaccccagctggctgcacatccaaatcttctatggaggttaaaaacacaaaagtggccatcccactccaccaccaaatttttttttttaattgagatagggtcttgctctgttgcccacactggagtgcagtggcacaatcacagctcaatgcaacttcaacctcccaggctcaagccatcctcccgcctcaacctctagagtagctggaactacaggcctgcaccaccaggcccagctaatttttaatttcttttttttttgtagagacagggtctcgctatgttaaccaggtttgtctcaaactcctgggctcaagtcatcctccagtctcagcctctcaaagtgctgagatgacaggtatgagaattttttgagaggaagtggcctttatttttttaaagaagactcataaggatttttgacaatcactgatttattgggtcactagtctgtgctaagtactctgccaggcatttaacatacattatttcacttgttttcatgattaaattcaggcaggttcaatcacagaaaccatgcagtggacaaaagagagaaaaagttcaccatgaggagattctaaaaacctgccttttgacttgtctatttttatctcttatttctcactttgcttctcctcccgcttggaccctttgtctgactgtttgaaattaagttgcaggtgaaccctccattacccatgtccagaacaaatagacataagcacagaacctcactaactccccaaatttttatttttccatttttatcaccacaaatttcttggtaacaatgtagaatttaattttgtaattaaaacaaaaactctcccctaggaggaatctgatgacataaggataacaccaagttatgtgcacaaacgacaaaaaatgccaaactaactggaatgatcatccttcctgaaatttctcttaaaaagcagagaagtagaaccaatgctgccacctagtggccagccaaacaaatcaggtagcatactggagaaaaaggtcatagtcccgacaatctggtttccctgcctattatcaagccacctaactccttacttttccacaaaaaaacacaaccacatatcttaagcaagccctcctccacagtcataatccaaatacttgaatacagcaaccaaagtctgtcttgttaaacacactacttctcatgaaactttcctctgcctattttaaggtaggtttgcccggtcctatggcccagtagagatgacacaggagaacacggaaacatccaaaatgttcactggttcagagtgtgtacacagtaattttgatgtctgttgcctcaaatacctcctcgatcatcgcagatacattttcccattgcagacgatcaagaccacatccaatcctgaaaaagacaaaatatctccattgatggtaacgaaagtatctaggaaactgctcctctcttttaagctatatccactcaaagcataaaaacaaataatctagtctgacacccttatgggcaaccatggtaggagtttggaagtcaattcttgttgtgagtcaccgaagaccattcctagacagctctaacatccaaaaactatcacttctgtttgcctaataagatactactttccaactatttcatgctacatttagaaatgtgtaactgtcatgacattagagactcattatccctctatgactactgactaaaattggctgtggatggatggtgaaaggttggtattttaaaaatgcacttatggtaacagaatgttaacgaaagtaaggagaagaggaatgaggtacaggatctgcaaaaaagaaagtcaagagggaatgctgggaaatggtaagatagttgcaatccaggagtaaggtctttgcaacaccctggtaagaataaactcagtccataaaactctactacttggcaccttccaagatgttactctagtgatcctcaacacgcctagggaaaaaagagacctaaaattggtaatttcatgtcataatgtgataattaagtccataaggaattgtgattaaaaaaaaagtttctgatatgtatgtacaccataaatatatcaaagaccagtgtaaaataagggacatttgaggccatatgcaaagtaatgtggggcgcaagataaaactgcatgtatgctcagcattgactcaaaactaccagggtgacaggaagaaaagaggtgaggcccatttcctgaaaagaaagcaaagggactactgaaccctcaatgtcattccctaaattcccaatagctaaagtctaagaagttacatcagggacagatcctctggctattacccatactgaccaaaacaagtgtgcagtataaaagggaatgataatttacaactttcttgacgcaaagtaataggtttgggagatgggaagtggtccaagaggaaaaccaccattgctcagtcttgattctttagcttacattgctttaggaataaaggccaagcttcaagcagagggtgctgagaattcaacaaatgtagctgaatgacaatggtcgctctctgctaagcaggctgaggcagatgtatatttcaaggtaattgtcctgattcattcaactcaagctagaaaatggctgtgccttagtctaaagccagacaactggttcactggtggttttacaaaattttgacttttgtccacctttaaatctatattttgggttaagcttttaagttgtttgtctttgggtaagatagtaaaccccaccaatcaattaaatctccatttaggaccatggatttccttgcctgggcatggagaggtcagtgactccattcttcagacaatgagacttcattgcctctaaactcttctgtaagttttcataagttggcttgtgcgaagcccttttctttgtaatctgaacacaaaggattcaaactttcatcatcccaaaatgatagccaaagaaaagtcatcacattcccccaacatcccaataattaaaagagtaagcacatttttatagaattagtctagagcaaggatgacaaatgtcatattgccctttccacactgttatgggagaccttcaagaaaatccactaaatagaggctgagaaacccagactctgccacgtagcaatctttccttttcctaggaaacccatgagattagcagatgatgcctattgtcaatatttttaagcaaggtaggtgaagtctctgtgccacttccaagagataagctgcatatctctaacagggaagaaagcataccacctgaaaattccctgctaaaagcctctacttatttagaaactgtgcttgcttgctttttgtctctctacataaaacaacagaaaaaactggtagggtcccaaagtaaaaccactggaagccacataagctttaaggacagaattcaaaggggctaggacatctccccactcagtttgtcatccagatcaggcttgtagtgggttagctgtaagctacccaccaccaccactaaggaagccacaccctttcagggaccaaatgccatcctggactgttgaagaaccccacattcaggcagtagttaggagaggagctaagtattatttgggactgcacttattattttttgtttttattcacccccttgctatcagtgtgctatttgacatggaataagagaaaagctcctttgggaaatctgtctcttgagacattattgtttttatctcactctgcctaggaaatatagtatggcaggcattcctaacttttgcaagtcttagaacaggcctatggtacatgatacacgactttcccacagagctgggatgcagcctcacatttctttctaacccagtgctccaagtagccgccatcactggactggagttgtcataagataggaagctttttgacattcttagttgtctagaatagaacatcatgatcaacacaaatgcagtgcagcccatctgttcacaaatccttaaaatgtattaagaactggccctgaaaaaaaaaggaattggccccatcttaccaagtaatatatatatcgcccatctctcttcagaacagccacttctccagatttcttttctaagaaaaagttatttaatagtagaaatgaaaaagaaaaccaaacactgatctctaaagattttaaaatgtttacagatctgagtttacctcagaactagaattttcaacactgaagaagggaatagggaagacctattgtctcccacaaacactttgctttttatcagcattcccaaatactatattccttaacttaacagctttcttacagtcatgtttcctcacaacccatcttttgtaccactactacttttaaatatatcctcatttgtccacaaactttctctattgccttgaaattgttttatagtgtgtagttttttacttgccaaatgtgtatttactcaataattatctttttacatacaaagagctgtataaggcattatgaggaatacagatatataaaaaaggaattaattattacagagttttcaatccagagaagatatcatcattccaaataactataatacaaagcagtaagaattgcttttgtctaaggctaagaatcactgtggacactgatgctgttaagcctggaatgtggtcggagaaactgttgcagaagctttacataggattctagtgcacatttctggtttaaagtggcccgtagaaagtgatgggaggggtctgtaaggaagaagaggtttctaaattcctctttgaagagaaagcagaatattggtaagtaaaggatcttgaatgccaacctatagactaagcatctcagagttatttcaagtttcagagaagtacagtaatatcgtcaagaaagtttcatgatacaagaggaagagattaaaaaccttcacaggagttgggttttgatatggtaaacgtctaaactagaggccattcttggggaggaaaatcttaaaaacatttggttcttaggaatcccctctttacacgcatattttattaaagtgtaacagattaaaaggtgctctagccagggcaaaccaggtaagtggtttccaaaactcacgttgatttaaaagttcttgcacccctccaaatttcttcttaaagaggacagctatcccagcgcccatgcgacaatcctcactgatacagtgggctaaagagtctgttttcgggcatgcaaaaaggtctcctttcacataagtgatctaaaaaatgtgcaaaggaaaagacaatgttttattagatacagtaaaatactaagctatttttctgtattttgtgtcccccacgactacctctcccggcaccccttcctccaatctgatttaaagccaaaccaattacagcatgtgtaaaaggaaagtaatggatgatccctgcctagaattttgagcctttttaaagtaaatcagctagagagaaaaaaagataatgcaatcattaatttaattaaaaagtgtttatgcttttgacctccattattacgaatttcagttcaccaataagtcaatagttgttacgcactctgcttccttctggatcttcattaaggctgctggccatgatactgagtcgctatttccagaatttaagtgtttcttcagctatgagaagggaaaaggaagtaaaaatgcttaggcagccttagtatataatattctgattgccctgtacaaccacttaataggcttttttccccaacgtttatcgatgaatgtgagtttgttcggcccctgggacgtaatacaaaacccttctggggcaaagaggaagaacgcttaggttcggaggctgtctcgacccgctctcatttcgtgctttcctggagcgccccgctccgtcagcggaagcaaagcccatccctaagacacgcctcctcctttctccagggccactccggagcaaggccgatttaggacggtctccttttctctgcacgacgcaaaagtatttccccagtgggtctggcttagaagaaaacagaagggacttggccacagtcccgttaagccgcaaccacagagtgtacagggtactggcgtgctgagccccaggcgtggggaaaggaaggcggcctctcaaggaacgttcaccccccacttttttggggggtgcgtgggagaaggaaagagtctattgaagcctcccattctctgtctcctaccctagggcgggtcagcgaggacgcagtctgtcctggggtcctatgggagggtgcggggaggctcgctcaaagccccaacgtacccaagtcacccttcacctggaaaggagtcggttgtttggaggtccccgccccgcggggaagggctccggatccgaccctggtaggtggggagcagcggaccagcccaaacgcggagccaatcccgccaaagcccttaattgcacgcatctaagatggccgcccccgcccggtagcggggcggaaacgagcccctctagcttgctagccgagcccacactctttggcgaaggccgccgaacttccggcagtaaattccgtggtttcccgccgccgcccgcgcatgcgtaacgaaactgccccacgagtcgggaaaagtggcgcttgcgcattagccgcaggggtgtgtcctagtggccacttggaaaggggtgggcagctggcaaaggggctagttagcgcctgcgtagtactaagctcaaggcagcgttttgagttgaagggtctggcgcgtctggaaagcgcctgcgtattcctttcactgggggtggtgtcaaagcgggaaggtgggcgtggcttcagggaacgcctgcgcgttgctcctccgaaggggtggggcgatccctgaactggagttagtgggcgtggcctcagaggcgcctgcgcggaggcggttggagggaggcccgattcccctttgttcgggttcgccattttgctaggcagcggcagtggcggcggcagcggcggctggagcctctgattgggtttcggagtccggtactggagccaatcagcgcgggcagcgaaccgggggagcgaggcacggtgagtgtgaggagccaatatccagcggcccagagccggccccagcgccccgattggcgggtctcgctgaccactcaggagaggcccaggcgcccgtcgagcccggggagtcgagctgagcctagccgagccgggcggccagcggccccggcccggggcctgcgagcgcctcggggcactcccggccgaggcctgcaggggccgccccgcgcggggatggcgcctcggggagcaggcacctcggggctccgaccctcgcagggtgccagggccagttgggaatgcgtccctgttccccgactcaggcccaggttctcaggccccaggcctggggccacgaatggccctacactaggggacacatgcgcgccctgggcctcggcgatttcctcctggtcgttctggccgcaaacttaaacctgcccttgcactctccactctccggcccttgggacaggaagcctccccggggcccgcgccccccgctccccgctcccagcgagccgggtctgtcttatctgcagcccctctaggtcgggagggaggcctggggagggtgcgcgccgcggccgcggggtcccgtgtgcggctggcaacggggctggcccgcccacgcctcggagccctatgggcccgcccccgctgtctccctggtggggagagggggccgttagttcgcccactccccctgctccgccgcgcccctcctcccagcccgctccgcccgggtctccggcccggcgccgttaccaccccttttggctcgtcatttcctctcttccccgccccgttcgcagtggcaggaccgcacacctccgtcttggagcccaaccaagcggtctccgtttcttgtccgggctgtaagaccagtccattcggtgcctggaacctcactcttagaagattgatacccttgcgcattctttccggaggctgcacaacttgctgttcatattactaatcttatccactgctcattttgtgaaatctccctcccttgggaatatagtacagttttgggggttttttttccctttgtttttgccttcgcctttctatgttactttgtgtcaggcttgacccagtccactcatctcttggtttatgtttttctgatacactttcaagtcctgtgttaacgttttctcagcagatgtttagaaactaacagtgttgtggggttttccttagggtgagaggttgctgttggcaaccaattatccagcagttagtatatgccaggtataatccgtgtgttagggagggagtacgtagaggtcaataagaactgtgcctacctgatggaaattgacaggtgaacaggtagttaatacctaacggttagtgctataaaggggccaagttcagttgctgtgaagtatccatgcgtgagctagcctccgtgaaaggcttatcaccaccgcacttttgactggccttgaagaatgatggtaattcttccacaggaaagatggaagagcttgctcgaagagaagaaaagcatgtgcagaggaatcaaattacactgttggaggcaggaagatgggatagggaagtgggcagtagttgtgatagtttaggggggaaagcccagttggtaaaatacttgtatatcttgctaaggaatattttggaaacagttattattttgtatggaggttcaagtagaagggatctagagctatattttttcctaagattgaaaaaacgagtttctgacttgtttatgggttctgccccgtgatagtggctgagttctttggggatgaagaggagacttgtcctaggactctgaaaattatttttactcatgtgaatcatctagtgcattccctggcacataaaggtcttaagtatctggtgcccatttctaaattcacatttaatgttatacaactaataggtttcagaaaactcgtattccagtgctctttcattactaaaacttcggggacaggttttattttcactttttagggtgagtttttcattgttgcttaagtgattttcttaattcatttgattgtcacgttatccgcattagcagatgagatgatagagcttaagtagtctaaaaaacatgtatatttgcctttggaacgtttttttgtttgtttttggatacagggctttcctctgtcatccaggctggagtacagtggcgcaatcgtagctcactaacctggaactcctgggctcaagccatcctcccttcttgttctcccaaaacgttgggattacaggcatgagccactgcgtcctgacctgaaatagatgttttaaccttagtatttaaaaataggtatgttctggtcacttcaaaatcactaaatacttttgcttggcatctttctaaaaggcattataatctggtaacttttttgctaaataccttacaagcttccaccagtctgcagaagaatttctttgtctgacattttgagagaaagtagtgtggccccaagctttttttcctgtttagtccactgttcacatgctgaaatatttctgttcttgtttttatgctctcttgatttgtagtacttcaccttcctccacatcatcacatagctaaatctttctcacacttaagaccagttcatcctgcaggcctctgatagcaaagaaaaaaaaagttcaagtagtacctttttttttttaagccttgttgatttatccccagctggaacaaatctctgtcctccaaattcccatatcactttatctcttaggattccagtataggtttttagtccattactaaacttaaagactctttgaagtttgaatcttcgtcagagatttctttttatttttaaaaccttcagaacagtgtctggcacatggtacataattagtggagagaagtgcattagaaagctccaatccagaaatctgtaggatgatggggaagctggacagccctttgttgtagtctagtctttcatcaagcgtctatcaggacccacttgttgagttgtgaaagaaattgagtgagccaatgctgggaatttttaaataatagaatagaaaatatctgccaggcatgatgatggctcacgactgtaatcccagcactttgggaagccgaagtgggagaatcctttgagctcaggagtttgagaccagcctgggtagcatagggagaccccctctcttaaaagaaaaaaaagaatagaaaataccaaagtgcatcttgtgttgtataaaggtaaatgctgtttcatgaaactttcatttcagttacatgctttatacatgtgtgcactgagttgtgataatgaaatgtgtttcttactaagggttgtggtcaaaaaagttaaaaagctactgttctaggctttgcctggtagtgattatcaactgtgataatcctatggcttttcatatgcttacactagttgagtttctgaagaggttttagctttggagtttgtgtaggtccacatagaatgggttcctagtaagtggttggctaagtctcagcttttgcaccttggaatagtggggcaaagagaattgcactgagaagagaatgcactaggaagagaattttcatgctagccagaataaacacttattatttgtttctctctctttgaggaaaaaccattcaaaactttgtgttaagagcaagagctagacagactaaatctggcttagtttgtcataatcttgggcaaagaggcactttgggaaagactatcgaattgtattgcagtcttgctaactgaagctcacagtagtaggaacatatgactttactgaagccagttgcttatagcattaaccattaacagtatcaatatcatgatacaggctaaatcactctgtcattaatgtgagagagaattgctgctagatttgaagctgctcttcaaatcttgatactcttcaaagtataaatttaaatattgctaaattggttcatttgtattaccagaataaactagttaagaagaaaatctgtacgttacatatattagtcattatgtgcttcaagttatatttagtcttgtaaagatgtaaacttctggatattagtcaaggaaaaaatctcatataagaaggaaatttggagttggggaggcgttgaaacctaaaagacattcctttcatgatccttattttttaaaatcaatttattgagagatactttagaaacaaagtataataattttaaatgtgtattttgatgagttttgacaaatttgtacacctgtgcaactgctaccacaatgaagatataaaacattttcatcaccctacaatgttcctaaggctccatgccagtcaacctccctctttcctgtctccctgtattctccactcccaaggaaccactgatccattttctgtctctagattactgatgtcttttggagattttatataaatggaatcatatatattcgtttacatcataaccttaattttattagtttatagccataaatgtattgtgtattagagacaagatagaatttagggaagcctgttagtgcccctaacagactcacagtctggctgaaaacctgattttctattctatacccagaatctctgaggagcagacttagtcaaccaattccaaagagactggtgtaaaaatcagaaaaccggtttgtcatgttgctgattatatttgctccctgttggccaatctatatgtaaatccaaattatagctagaaatttacctagcgagcattccattagatcaagggcagtgctttggagaaccatatggccacaagtcctcttgctgtgatgacatagcctgttatttatggctcatagattcttatgttgtatccattttggttatgagtaatggggttgattaatttttattttgattaaattttgttatatttttcctaacattccaacattcatttgggaaataagaatttctcaaaattcttattctagaaataagaattttcaagtgtgcagtgaaatcaaaggaatttgaaaataaacacctgtatacctgccagttagggtctattaacatcttactataattgccttaccagatatttctccacccattcatccattttttgatgcatttcaaagtaaattttagatatcaatacacttctttctaagtacttggacatatagttgcacatattttggtttcttctttcacactgtattgagacaccttgcaaatgattaattccaccagcatgtgtggatttatggagagtggtactgtactttgccacgataatgagcagctcagttaggtcacgtcattttattattcagatgttggaatttatgagggcctagtgaaaaatcagagagaaagacctatctacatttttgtttatatatctgtcctccctcccatatttccaagatgaattgccgattgctaacttatatcattttaattttttaatgaagtctttattaaaggttctcagatatcattcagtttatctaattgtatccttatttttaaaagtggatcttcaactcttaaagtctatgagaagggtaaattttgcctaccatatgtagtggacctgagtaacatgtttggtgggaagcaattacgtgttacaacttaaagaagctttattctctaaagtatatgtgcaaacctgaaaatcagtgttaggtatgccttgtatcaaagtgatgtagcttaacgagtatctcttaggtgcaagtattgctctgacagtattgaaaggtaaggttgccagtatactgaaagcattttagaaacgtgaaaatagcattatgttgttatgattgtgccatgtaatcccagttaaaaatgatactgaatataagcatttcctattctcctatcctgttttcttgcaaataaagtacagtgataaattatccaggttaattgtctggtaaggcctttattgacaatctcactttagtttctttccccacctttctaacaggagtgtacctcacagccttctaggatctccagagtggacaggaatctcacttggagggaccatggagcagtatacagcaaacagcaatagttcgacagagcagattgttgtccaggcaggacagattcagcagcaggtatggaagcaaaactgctttaaacattacagcaatgaaactgataacagcaccactcaattggttggtctattgccctggggaattatttgaaagataccagatcttgtgagatattgggtctgatggcttgtgctgaaatgccatgtctagcccatgaccacttagaatctactcttcatgggtgcctggttatagtaaattgcctcttttatctcattttaagtaaaaacatctagtctggttttcagatggaaatttggactttaaaatttttctggattctatttggtctttttctcttcttgtttgagctaacttgtgatttagtaagtctttggccacaacagacaaaccaacatagcttccaataaatcttctgttttttgatttggtctgccacattttttattcagaaaagctctggtttaacattaggataatatttagacagccattcttatggataagacatactagaaaggaattccctgctgctggtttattcctaattaatagattgctttcttgaatttatacacaggttacattttctgatgctttatgcttgggtttattatagtaaaatttcacttttttccccaccccagaagaaaaaaatgtattatgtttctatttgaccttaggccaagattgatattttggaaatactttgttttcaaaatggaatttagctaatatagaaaagtagtagggaagggaaaggtagtattgatgatgagtttttcccgtctaatgatcaaagacgaactcccctgatagctttcccttccatacagctgctgtggctctggcagtttccttcaactgcctttttagaggaagggattccacaaagggccctccattcacaccagtgccctggagggtgggtttttattctttcagaatttgccattagtggatgtaaaaataaggttgaatcattgaaaacatggctcttaaagcagtccagttgggtagaaataatcttagttttgaagctgggcatggtgctgcatgcctgtaatcccagctactctggaggctgagacaggaaggttggcttaagcccaggaattcaagaccagcctgggcaaaacagcaagaccccatctcaaaataagtacataaataaagtttaaaaaaaaaagaatcttagttttgggacatgagagcattgacgtcatgaagatgatttcggttcatagtgattaattactcctcctttcttggtgattgcatttaagcccagaattttttatggtagtttcagggctattaaaacctaatcatttttttcttgtgaactcatctgaggagataaaaagggcattaaacaattgtgtaagtagaagtgtcagattcctgtttctggagggaaagattgcattacaaatctttgtgttaatgatgacaactgttttgagtttttgagtcaaatttttgaggtccactctggagacaaagggctaatatctttaatcctactaccttcaacaaaacagcttcaatatagggagtctgtacattttgaaagtccttcaggcttccgtctctctcctccaagaggtaaggtgatctgtgtcttgaactacacatttccttcctgacatatttcaagctcttcctgttcctgttctcagcagcagggtggtgtcactgctgtgcagttgcagactgaggcccaggtggcatccgcctcaggccagcaagtccagaccctccaggtagtggtaccctctctgattctctgtgagcactgcatgaacttctcctctcctcatgtctggtgctgtttgtgttaggatctccagtaggaatggcaaagtcagttgcatgtctttgatgctgctaacttgtctttgaggcttataagatgccagtttcctaatatttcatgccaagtcatatagagaccccgtatcaactttctgagaattggatttgactagcatgtttctttgagaatgcctggaaaagaaatggtataagtgacaggaagaaattcttataagtgacattagaatttattcagggctcggccgggcgcggtggctcacgcctgtaatcccagcactttgggaggccgaggcaggcggatcacgaggtcaggagatcgagaccatcctggcaaacatggtgaaaccctgtctctactaaaaatacaaaaaaattagccgggcatggtggcgggcacctgtagtcccagctacttgggaggctggagcaggagaatggcgtgaacccaggaggcagagcttgcagtgagcagagattgcgccactgcactccagcctgggtgacagagcgagactccgtctcaaaaaaaaaaaaaagaatttattcagggctcacactctgatccaattaattgcatggtaaaaattttgtgtatttgtgttacaatggagaaggaaatatatacatatacagacacacataaactaggctaggctgtgctttatttttattcaaggggcaactcaactgaaaaataatcattgcacttggcaaggtttatctaagcactgaatcttgttaatctcttgttaactgctattgtttccactacctttcctgggggaatagtgacctgtcttattactagatctgcaaagattaccccagatacctcttggttaggcagaagcaggatgtgctttctgtaagtcttaggtgttaaagccactgtgataattcttggttaatcaatacagttctttagcatcgtgtatggctaagtatcctaaattgggttctaatttggccagttcctataaaacacaggagtagcagcactagtctactctgtgtatgtaggttacttttattaaaataactctatttttgagaaattggcaagatttgggtaccctactttttccctccattgaattagaaatgattcaaagtagaatctagaatgtagaactggcatctcactttattgctagtgctgctaagcatccagcagataactacctcttattgtcatcactttatcctttcaatcccacccctacccctgccaccaatagtgtttggtaatgatgtacagccaactttgaacataaattaagccgaaagaaactgagcttgtaggcattccaaaattgtgttcaaatctcacagtccaacagcttgttaatgtttttcatgcttgcttcatcttactcatatataaaacagtattttggattgtcattaaccccttgtggaataggaatgtaacatgctcttaactgtatggcttcttgtttgatgcatgtgtctttgtaacatttttctgttgtaaatacagtgagctctttggagtctcaaatcatttatcatgtgcacgaatagcacatcaattggggaggaaattaagatgatgaatagatagaaaattattaatagctgtatcttaaaacttgtgtttcctacttacatagattttatttaaaagaagtggaaacactttatggaaataatagaaacctttcctctagggatctgattattttgggagaattttaaatagttattttggttattcttgctatatgtattctgagaaatctttcttgatacagaatatgcaagcatttggtgtagcaaaggggatttgatttggaatggggaaataagggaaagagatagcatgagagagtcaggctgtaaagtccttaaaaaagtaaagtaaaggttctcaatggacagtttaacaaaacttaggatttcaatgttcctggtgattctaatacattagtggtggtggcagtggcggcggtggtggtggtgattgtaggaggaccttactatctaacctactcatctaggacagaatgatctgttaactaattgctgttacttgcacatactttcattaagtgtgaatatttcagtcatgaatattctgttctaagtaatttctgtcaaagatagagtctgaaaatgaaaattttggactattccatggatcattacagtttacttctaaagcacttttaaagtgcttccagaaagcattctattaggtatttttgtattgggacttaagatgtgacagagcacttgtagtgacctggctcctacagtagtctgtttactcataggagcttgaaatttgtacacttgactgctctgtgtaatttcaatatttgttgttgcttctgataaagctaaaataaccatgtggatattatagaggccagtgaggaattccaccatggagactgcaaactgaccagaaagtgcttttaagaaatctttagtagtgagtttaaacaacaaacatatctagaattcacagagtaaaatgagcaggataaaggtatacatttgacatttcattttagcttgagagactgtagggaaaaaagggtcatcctctacataagcttccagagctgcttgctacccagcctcctagagtcattgctgggtacagtttgatttaccttcttcactttatttagaatttgtactcaaccaccatcaccaccatcacctttccctctcattgccttctctccagccttcactacagaccattcctggattggtttaaacaggcaactaaccttgccattatgattaaatgtttgtcatggatttagcccgtgtttggtgacaaatgccttatatctattgagacttctcaaagactctggatattctccattatgtctgaccttaaagtattgagcttggcatttagtaacaggattcatagatatttaaagataacttgaggacttgagacatatattttcttagtcttttctaccttttccttttctagcaaggcagcagaatagttccagtgattgtcttttggtaaaaaccattttgtgtcttatgttatttcattgttcttattttatttcattctaggtccaagggcagccattaatggtgcaggtcagtggaggccagctaatcacatcaactggccaacccatcatggtccaggctgtccctggtggacaaggtcaaaccatcatgcaagtacctgtttctggaacacagggtttgcagcaagtgagtaatatttaaaaatattgagcagtatatcagaggagaggtttcaaagaatagattattacaacctatttgataattgatattgcatttaactgcttcctaacccacattttgcattcagttgattttctgcctttatagtaccagtgatataaactagaactatgcagaaattggacagctccagtaatgactaagatattaggcatgatcttgaattgctgtaaagtatatgaagaggttagaatctagtttatagtatattttattttaaaagaaacaaaaatgagtatttagaaagttagaaaaataacaaaacgagcaaaaagtgggtccaaattaattaagtagaaaactgacgtatagaaaggataaataaaatctagattgtttaagcagaccaataaaacaggtaaatccagttgaaacactgattgagaaacagaaaacaaaagtaagcaaagatgtagaagagattaaaggaaggccaggcgcagtggctcatgcctgtgatcccagcacttggggaggccaaggcaggtggatcacttgaggccaggagttcaagaccagcctggccaacatgacaaaaccccatctctactaaaaataaaaaattagccgggcgtggtggcacgcacctgtaatcccagctacttggggggttgaggcataagatatcttgaacccaggaggcggaggttgcagtaagccaagattgtgccactgcactccaggctgggcaccagagcaagattctgtctcaaaaaaaaagaagagattaacagaaatatgtagaaatgttacatacaactctgtggcatcatattttaaaattagatatttctcatcgagatggcaaaaaaaaacaaaaagtcattatatccactgttaggatggatgtggagaaaaagaattaatcattatttttggtaatttaaaactgtagagttattttggaaaggcacctcactatctgttaaatacaatgaatatttgagctagcagtcccacttctgagaatctgtcctataggaagaaaagcatcaatagtagggggaaattacaaagacacttttcatagcattgtactagcaaaaaataaaattgcaatctgagtgtccattaataagaataaggaaatggttggaataaatcataatatattcatagggaatattgcatcatcattaaaagaaatgaactgttgacttggggtgggttaatattgaaatatttttagtggaaataatttgcagagaaatagtgtgtgatctcatctttgtaattcataaccaaccccccatgagtatatgtttatagtcatggaaaagagagtatgagataactattagttactctatctaaatgtttatattgtttcaacagttacagcagtcatattaatgtcttagttttctggaggaatttaagttgaaaaaagcagccatgatcccactgctcataaatcaaacttgtactttttgtgtattcttttgtgtttttatgcataatttttgggcataattgtaccatgcatgtggggttgtgttttcattttttttttttaattctttcataatgttcagtcaacttgatgaatcagaatttctaatttataaaatatagttaaggattttggttttcatttgcctttgtaggtaaacatttgggcacgatagttttatttttcaactgaattctcaggataatttctttggattggggattgcttgggtaaagggtaagagtatatttgagcccactggcatatttttgccaagatagaattgtacttgggattaaaaatagttttcacatttctctttgcataaatatatgaggctttaaatatcttttcagcatgtgctttccttgattccctattgctatatcctttctgttcttctctctttgcttcctctccagtcccccttgctgcgccttctccactgttgagtagagacaatgtggtatagttaggaacagtatactgtgagtgtagtggtccaagctttcattaccaggtctgccattaaataagcattctgatcttggccaagttatttaattgtcggtttgctcatccaaaaataaaatttatatgagatgatatctagggttcattctagctctaaattctgtgatttttatggggttttattttgctataaggaaccttcaaatagttatttccctgcttccaagtagggctataactaaccaagctgaaaaaaatatattctgttacgtaaataaagctctctaggtgagattccatagcctcccttacaatacttaaggctttaatcccctttgtataggagttttttttctcattagtgttgagtagccattttttaaagaagactacttcttaaccttttttgaattgtattctctattttagaatcctagtaaagcttgcaccctctaagaaaaagtagagatgtccagtctcatgaaaaattctgcatataattttagattaaaatccttggcctgagaaagatactggaaccagagagacagccaagaaatagatagaagaatattggaagttggcatataataaaagtggtataaacatatcaatgaagaaatggctgaagaatgatacagaaaagaaactgatttctaattcatactgtattttaaaaaatatttgctaggtggattaaagatctaaatgtagaaaagtaaacttggaaaattcaaaagaaaatataagaatttttatgctatagagaaggatatttttaaaaacaaattgactaaaacataatatgcattgaaatacatcaaataaaagtaaacaaggtgaaaacttggaaaagatatttttaatacatacaaccgagtttgtattcagaatatgtataaataacgtttatgtatttatacaaaaataggaaaatgggcgaagaatatgaatagatggaagaggaaatcctaacagccaatataaacttagaaatgaagttggttcacataaccagataaatttgtttacttatttatttgccaatactttctgaatgccaattatgagctgagtatttggaaaaaataattcagaagacctaggcaatctatcccctaacaaagtaggatccatgaatgtctctaagacatggaacccattgacctgtttttttcaccttccttccatcagtagtcctttttcctatcagctggtagactttgtgataacttaaggttctaggcatgttcttctttccagaccaaggtggtcccaagttgaaattatggatggaaagtgacctggctataaaaatctatctttctgaaagtatcctccttccagactgccatctatgttgaagcaatgctcaaataaaaaaagtttgttgatggaattaatggtcaaagaagcaaagagaaggttacttagtactagccatgtattctggcttttaagtttgggaggtattcttgaatataaaatacaagacattttgagctatggggctctcctcactgctttctcttttgcacttaaaaaaaaaagtgttcactagttatatgaaaataggattttgtacacccaacatttaaagggttgtattgcagttttttagttccaaaatttagagaaatatttttcaagcttcttgtcaggtttctgataacactcctaataaagtggctatagccattaaaaaaaagaaagaagatagatttggatagcacacgatcccttgctttccataattgctttataaggtttagctatccaatcctaggaccaaataggagatacaaattaaatcaacaaaaatttgacaaacattaatgacagtagtgagtattggtaattggaaactaataggaggaatataatctgtcacattgccttaattatctattaccatataacaaattatcctagaagttagcagcttaaaacaacaaacatttggccggtgcggtggcccacacctgtaatcccagcactttgggtggccgaggcgggtggatcacaaggtcaggagatcgagaccatcctggttaacacagtgaaaccccgtctctactaaaaagacaaaaaaaaaattaagccaggcgtgatggcggacgcctgtagtcccagctactcgggaggctgaggcaggagaatggcatgaacccaggaggcggagcttgcagtgagccaagatcacaccactgcactccagcctgagccacagagcgacactccgtctccaaaaaaaaaaaaaaaaaaaaaatttattttatagtttctgtgagttaggaatcctgacacagctgtgttggattctttcaaggtcctctcaaggcccttatcaaggtgttgtcctgggctgcagtcacatttgactagagtagaatacattttgggttttttctttgtttgtttttttgagacagttactcgctctgttgcctaggctggaatgcagtggtgcggatcttggctcactgcaacctctgcctcccaggctcaaatgatcctcccacctcagttccccaagtagctgggaccacaggcatgtcctaccatgcctggataatttttgtatttttcagtagatacagggttttgccatgttgcccaggctggtctcgaactcctgacctaatctgctcgcctcagcctcctgaagtgctgggattatgggcataagccattgtacccggctttcagcatttttaatatatatagtatttcctctgtaaaaaagtacttcatcattcaccaaaatggcaagattaaaaaataataataaagcactttagagtgtattttatttttttatttttttgagacggaatctcgctctgtcgcccaggctggagtgcagtggcgtgatctcggctcactgcaacctccgcctccggttcaagtgattttccggcctcagtctcccaagtagctgggattacaggcatgcaccaccatgcccggctaatctttgtatttttagtagagacagggtttcatcatgttggccaggctggtctcgaactcctgacctcaagtgatccacccacctcggccttccaaagtgcaaggattacaggcgtgagccaccacacccagcccagagtgtattttaaatatgcatgcttttcaatatatataatcataccactgctatctttcataaaaaccgacattgatttgttaatatcaggtatccagacagtgtcgaaattccctatttgtttcataaatggaaaataagttgtgtctacttcataatggagggcagagcaggacttcttttttcctcttcagaacattttctgctttctagagaaatgtggataactctcggggaccaaaggagaccagtgtcagtagagtacaatcctttttttatgttcttttctgcagatacagttggtcccacctggacagatccagatccagggtggacaggctgtgcaggtgcagggccagcagggccagacccagcagatcatcatccagcagccccagacggctgtcactgctggccagactcaggtaattccactagctctgtcacacaggagcaaaactgatttggaagagtcagataactgagtcagatatttcatgtatagcatgtatagtagaaaaggggatgaaaaccataaaaaaatatatttttggccgggcgcggtggctcatgcctgtaatcccagcactttgagaggccgaggcaagctgatcacaaggtcaagagatcaagaacatcctggccaacatggtgaagccccgtcaaaatacaaaaattaggtgggcatggtggcgcatgcctgtaatcccagctactcgggaggctgaggcagagaatcgcttgaacccaggaggcggaggttgcagtgagctgagattgcgccactgcactgcactccagcctggcgacagagtgagactctgtctcaaaaaaataatttttttttttaaggactacatcgttctttgttagtatctttgggatctgttgaattgtgtcattacttatttcctccagacacagcagcagattgctgtccagggacagcaagtggcacagactgctgaagggcagaccatcgtctatcaaccagttaatgcagatggcaccattctccagcaaggtaagtgtacccataagcttccctaggactttttggggcaacttttttgtcccttagacaactgacatctttagaatttgagtggtgaacttgacactacatattttttggacaaaaaaaaaaaagatttcctctagctctccattgattgttggtttcttgtcaccatctgtgaccaacagtgattccatgtgtagcagtttctatagtggttgctaatctagggattgtgtaagcttttagggaagaagtgtttctaaacagaagaatagaaatagggagttcattggtaaagagagaaatagatcaaaaatcaagttggctttagagtgctattgctgcttatgtttttttctgggtcattccattactttaaatgactattatgtatacagcacttttactaagaagggtcctcaaagagcctctagtctagtaagaaagacgtgaacaaataaatacaatgcagggccctcatggaagtatgttctaggaatagataacataaataatagatgtttggtctgggaggaggagtgcagaaactgaacttgaaggcttttggaagcacctgttagtcaaatagttaaatcaaaaaaggacatctttgttagattccatgactttgtgattgcaaatttgcaatatacaggatccagagagtgcactaactgtgtgctcttgtattactccagggaggccctgaactggattgagcccaggcaagagctcaaacagaatggtgaacaaatcctcaagtgctgctattgatagtctggggacttggaatgcttggtttaattttaagttttaatactacaactgactcattgtcagtttgagataaacaaagtataagttttaaaatctctgtcctgaagcagattgctcattatgtacaagagcagtaggtatagctgtagtcagactgacctgtagaagaggaggcctccaaaccttttcaccttttgaaaactgctaaggatagagttactcaaaactgggacctagacagttaatagaatttcaaagattgtgattacttagattatatatagcacaccacagtgggagagtactttttctccccttgtgtttttcagtgtgttttgccaggatcggtgagtgtataccagatagaagagggactaactatgttcccttctttctgttctgtgtgcctgttttttgtttgttttatgttttgttttcttaaagttacagtccctgtttcaggcatgatcactatcccagcagccagtttggcaggagcacagattgttcaaacaggagccaataccaacacaaccagcagtgggcaagggactgtcactgtgacactaccagtggcaggcaatgtggtcaattcaggagggatggtcatggtaagaaaatgtatttttcagctttgtctttgaaattttcttgaacatgcaacttgatgcctcctaaaatttattatgttgacctcttgggattgagatcgatccttaaggcactgtcggtaatctactttgacaataacattatgacaaaccataattcattctgagcacctactatgtgccagggactattcaccagggactattctagatgctggagataaagcaatggataaatagtgattttatggaattcttttcagaattcaaataacgaagggaattatatactaatctttgagaagtggaaagtagtattgcccatgatggacaaaataagaaataagctaaaaattagaaagattgtaattgatagagaaaccaaaaaaaaagtgtcatgtaaatgtattgggaagataggaagatttgggtggtgtaactgaaagctaaatcctcatatgtcaaaataggatgttaaaatgcataaattaagaatgagtaacagaagtctgcacagaggtggaggaagctatgaaaagaaacagaaccaaccctggctcagtggcatgcacctgtagtcctagctacttgggaggctaatccaggaggatggcttaagtccaggagtttgagctcagcctgggcaatgtagagagacctcgtttctacgaattgaatgaaaaataaataatttttataaaagattcaatacagttattcaaagcggttgtatttgggaaagagctgtggggtacaggactctgttacttgtttttacctacatttagtacagtgttttggtgttttttaagaaaaattaggattgaattataagttaactattatttttataaatataggcatttagtagcacttggtctatctatttttgtgctgtttttttgtcttatgactactgttcctgaccattagatggcagcagaaatatctagagccatgggtggacatgaattagggcatggttatatagtttctcagagtggcacctgaatctcctatgacacagtcatctggggtgtttgtttaaagtgcagatctttagtataaatttctccagggatccgcatttacccaagtaccctataaaaattactttttgtggcatttacaaaaaaaatggatgaagaggaaccaagaaactgtttctatgtccatacttcatgccaccaataagctctggtttcctgttcacacagatggttcctggggctggctctgtgcctgctatccaaagaatccctctacctggagcagagatgcttgaagaagagcctctctacgtgaatgccaaacaataccaccgtattcttaagaggaggcaagcccgagctaaactagaggcagaagggaaaattccaaaggagagaagggtatgtataacattgggaaggatataggaaaggagaatagcagggttctacttttgaaattatcttttatatggcttgttttctcacgtaccttccaaacaattgacgttagatacttgttgtctcttttgtaagagttagcatttgttattactaatatgcagctgcagttataataacgaaaacaaacagtggcttaaataagatgttattccttttcatacataaaagtagtccagagataaattatcctggactggtagcacattttcacagttctcaagacctgtttcactgctttaatattgctagtgtgctgttcatggtccaagattcctgcttaggctccagcctaggaagaaagggaacaagaaaggtaccctttcttttttttttttttcctgagactcagtcttgctctgtcatccaggccggagtgcagtggcacaatctcagctcactgcaacctgcaccttccatgttcaagtgattctcctgcctcagcctcctgagtagctgggattacaggtgtgcgccaccacgcccagcttatttttgtgtttttagtagagacggggtttcaccatgttggccaggctggtctcgaactcctgacctcaggtgatccacctgcctgggcctcccaaagtgccgggattataggcgtgagccaccatacccggccaggtaccctttctttcaaggaaactttgaagaagttgtgtaccttccactagccggaatttagttacctgatcacacctaacatgcagataaggctaggaaagtccagcctggtgtggtggcaaatgcctgtagtcctacttggaaggcagaggcaggaggatcacatgagccgaggaattcaaggctgcagtgattcatgatcatgccactgcagtccaacagcaagggtgtcagagtgaaaccctgtttctagaaaataataataataaactttaatgctaggaaagtctttttactgaacactcatttgctcaaacgaaatttggcctgttattaaagcagaggaaagtgtatatattgtgaagtgtaggtggtagtctgttattttttttaaaaaaaattcatactataagcattcacagtcttacagtagttatatatggttagctatattacttactaggtgttttctccaaagcttccatcgtcattctaagtcataattgtcccttgtgactttgatcccagctgtcttaaactttggagaatggaatttgtgcactagataactgtgctggttctggatagtattaatagttaaatggttttatttctcgttttagaaatacctgcatgagtctcggcaccgtcatgccatggcacggaagcgtggtgaaggtggacgatttttctctccaaaggaaaaggatagtccccatatgcaggtaggaagacatatacattttattcttctctttattaccttgtattgacttgagttgaagccttcagcagtgtcctcttgctattttcctactctgggactactcacattctctaaactggatgcaatcttatgtctctttagattatcttttatcttaaaaccactaggccagacttggtggctcatgcctgtaatcccaacactttgggaggctgaggtgggaagcccaggatttcaagaccagcctgggcaacatggcaaaactccatctctacaaaaaaatacaaaaactagccaggcctggtgatgcatgcctgtagtcccagctacttggagggttgagatgctcttcgtctttgtcacttattactattcattctttcttgaaaatcacacttttcttaattttcaaggaacaagttttatttttattgaacaggttttattaccccatcacaaatataatttgaatgtttacttttttcccttctaactgatgtgagcctggtctaatcctctcttctttggcttagatttataaaatagctgcttaatttggtttcccttcttccacttttgttcccctctagcctactctccacatcctagtgtgatctttttaaaatgtttatcctatcaagtccctgttctgctcaagctccttcaacccctaccctttcccatttgcacttagactgacatccaaagtgcttactactatgcccagcaaagccttacatgctccagctcctgtctacctctaactgcatttctacttcttggtctctatgctgctgtttactgttcattggtctacttcctgccacgggtctttgtccttagaattttcagtctgtatgccctttatctttttcatgcatgtctatctccctatctgttaggtctgggtttaattaaataccctatctagaatagatctcttctctctcagtatgttcttacaacatcttttctttttttggaggcagtggtgtgattatggctcactttagtcttgacctcccagctcaagtgatcctcccactttaggctcccgagtagctgggactatagccacgcaccaccatgcccagctaatttttaaattttttgtagaaatggagtctcactttgttgcccaggcaggtctcaaactcctaggctcaagcgatcctctcgccttggcctcccaaagtgctaggattacaggcgcacaccattgcacttggcccttttctttacagtgtaataatatttaagttgttgaatttttcaagattgtttccttcactagactgtaagttgtatagagggtagaggattgtttcgttctctgttatatttattggacttaattctatttaagtaagttgtatttaagtactgacttagatgtatttgttgggtttagtatccagttctgaaccaagcaatcagtgtttcttgaattaatagattcctcccatttgctgatactccattctatattaacatcacattccacttgcactattgcaatatccatcaaattaatctccagtctcctctaattggccttatatagtacttatacagtacatggttaaagtgttttttttaacctgccagtccccaggtcaaggatgcatgctattaatagttctcatttcttaactgcatcaaatctcaaactatttctgtataacatctaagcaactttgccttatcaccccctcaacaatcaaactaggtttcctcagtgtccccacacatgaacactaacaactctttcagtgctattaatcctcacctgtagtgtgagagcccctcctttctcattgctattcattcataacggtgtatgaatgtgggcctgacagctattgtggcaggagggcattgtgccaggaactctcctcattctgtgtgctaacaatatgatcttggtcaattcagcctcttttatttttatctgtaaagtggaatactgttgatacttcacagcaatgttgtagggatttcattcagtaatccacattaggcatctgtgtagcaccatacctagtgcatggtgagttcagtaaatgctagttgtttttgctcattgttcaagacccagttccagtcttccatctccagaaggctttcagctttttctcagatcctgcctaccaaggcttcagagccttggtatgggggaactaaaggtggttcttgcggagtgttgcaaaaagcttccaaggatttatccttgtgttaacacggtaggtcttaagtgagaaacagcatatagagtttagtggaaagaagatgaaatgggagtcaggagatttgggagttagcccttgctggactcctaactttctgaccctgaccctagtccacgcaaatcactttacccatctggccttcagatttatctgtaaaacgagtacattaaagtgtatagattctaatgattctttctagccctgctaagtactcagtatttaaatgatgatcaaaaaacagtgacaaaaatacagcatgacatggtttctctgggtcttttccttagacacctgaatctgaatactcttaacccttaagtatagagaacaacacaaggttcttaggaaagagatacactaacagccctgcagtgtttcaccatggagtgcaggccagactttaaattattttaagaataaggtttattgtctcttctttcctaatggggctacactttaagccatgtatgcagacttaagatgtattacaagcctttgatttacttggtaaagttatgtgtattctcttggggggataagtagtgagagccatgagttcctgttgcttttgcaaaggactttaatcatcatgtcatctttgtctctaggatccaaaccaagccgatgaagaagcaatgacacagatcatccgagtgtcctaaccccacgccatgtgatggagctgatcaaggtcatgtttctcactgttccaggaaattgatcaactcttccaatgggacattgatgatcacattctgccctttactacaggacagaaaccacttagtttttaataagtggctcagtattacaattgcagcgatgcctggcaaattgaagttgcaagcctttgtcttactctttcagtcaggacctatttcagactgttgatgacattgacatttcatggattcggatgatgcaaggagacacatgccaccccagcagtacacaaagcacttaccttgactggtgaagtcagccagccatctcagcagggaagaacaaccttctcaaccaaaactgcaatcaggaaagcagcagcccactccttcccatggaatctagacagcatttatccctctggtgggggaatctcacactgactaactgaatggacgctttgtattcagagatggcttccaggcaaggaagttctatcttgtgatacggaaacaataaattcctgagatacattcttccaatctgtggtaataataagaattcctctctgcccagatggtaggttgatatttctggactctagccaagaaaaagctaattctggggatagaatgataaaagactcaagcactaaaaatatacattgccgaatctctttttctagctttgaaaagttgtggcctgcttgtccctctgttgactggtcatctggaccatcgtacttgctgtggctacttctaagacaatgtagagggttattaaaccttgaaactgcctttcctaagtagagaacaagactattcaacaacttctttgctgaagcactgaggagatttgtaatactcctaaaggaagggccaaactagagattttcaatcatagactttgtgacagcatttggggaactaaaagattcatgtgtttcagcctagtgggagagagtgggggagaggaagagagagagagagcatgtatacccgtatgttatcatagagcacgattctccagtggatggatacctggaatggatcattaagatgaagagagtaattcacatttactctagaacctttaacaagcactgaaaggaagaagcctgagatttgatccttgacaatttctggaaagcactggtcagtcacactgtcctggacagagtccaagttacccactaaagcttgaggtggatgttggcttcactcctgcagcacaatgctggccctagaaagcgagcattttcattcttcccatggcagctgattctttggtgccagttttcatgttttctccataggccttgtgcagaaaggttttctcattgcatccatactgtgagaataaactgcagactgaaagaaacatgcctgcagggtcaggaactgggccactgttcccagaacgggttgtgcctcagaaatctatttctcttttagatgttgaaccctgagagaactaagatgatatttcagaagagttggctgccttctctggaaacaaggaaaacccaataattccgaggaacattgggggttaaataccaagaataaaaattggttcttctttgacttcagcttaactgtattaagacagaaattaagccctctaaaaacaccacaaagagagatgattgtaatgatagaaatagaggtacagagctatgcaaaggaaacaggaagtgaaatattcctagtcccagggatctggtaatcgctcctggcttccagatgtcaaaggactgatcctttggtaagctcactagaaacttctagctctacaagagtttgggatattaatgttattcagtaagtcccaagtttttcagagaatagattactaacaatgaggaatttatattccttggttaatttaggagtctaagatgcagagttcagaaagaaattactcagacctaactttgagtgcttaagctgccaacagttagaagatgctatttatttgtgtctgtaagtttgtacatagtaatgccagccttgttgctgaattttttatttggggggagatgactttgaattttgtttgaaatgcttcagttgtcattttgtcattgcatttcaaatagctcatgacccttttcttgtggtcactttggcacaccatagtagcccacaaagtgggggcagggtattgacatttggattttttctttgatactagttcttttattcatttttatttgtgactgtagtgataactttacagatggagaaagagtgaatggatgaatgaataattggtttaatgcctagttatgcaacttgagtgcttttttttttttttgcaggataattttaagtgtatatattttaactgcactggtacattgaacatgtcagtgtcgatgccactggaccaacagagcattttgtggctatagggtgcctgataataatgtcttgatttttctttgggattcaactatatcgaaggtttttcccccagcagtatgggggcgtacaggtgatcgatcattaatgtcattgcaattgttattttttaaaataaatttataaaaataaccgaaaagtaatgtgacttttgaggaatctgcaactcctgggttctagtttgtgtttccagtgttgaaattttgatctcccccgacaagacttgtctgcatggacggtgtctctgtaaacagtatcaaacttgtaatgtctgagcctcttagctttatctccccttaatttcttcccttttggcccttccaccctgttgaggagattttttctgtcacctgcaggctgatcatacatttgatgctactactgaaagtgtttatcaaaatgtgatgaagtaattccatgaggaaaattagccgttatcacaaaaacagccttaagtattgtagaatttcaggtagtgaagatgtactatttacgttttgttagattttgttttggcagaagaccaaaacaaaagtacttttctgattgttaaaaatccacagcatgctcaccttgttactgttttaccttacggtcgctgggaatctaagcaacaaagactagaagcctccgatatgccattatcaacacacaagagacaaacagcccgaggaagcactcaatgatgagagcagtagacctgccctggcagatgagagaggagaaactctccacaatgaaggaaaagcactgacagtatttgatagctttagtcaaactgtgcttgagtttggcttagatttatgccagtggaacctgtccttaccaaattcagagatgacccaagattctactctgtggtatgagggaaagacctctcgatatttatctcacaccaacggctttatcgtaggagcgtcttcgcctcccccgtttccagtagaaaagacagctttgctcctttgaaagcgcagaccgccgcacctccagccccttctccccggggaagtaggccccgctaagaatgtgggaaggtggtggggcggcgactgaagtcgcttccgattggcgttgtcccaaggaagcctgcgcggattgatcggcggcaggcctccaatagagcctgctaggcggattggctgctacgcggctgggccctgtttccggtacctaggcgggcagccatggtgaccggcgagcggcatgcgacgccgcctctgtggcctgtggaggcccgcttggcggcgctgcttcccgacctactggtctttcggaagcctcggggatgggaacccgagctcgccacggcccagggcgtcctcctaggcgtccatgtgacgggtgagggcgacggccggcacttgcacttaagtctcctggcctgcgggagaggcggccgttgggtctaagcccctggaggcctcgacggttacaggcctagcctcccgcgagctaaggcacagtttaacttcgtgctgcggcttccttaggaaactttgagtatcttcgttttagcgtgggaggacatcttttgggatgaaccggctcagtccttgagctcaccccaaagatgatgaaattgaaactcagaggaaaggatttttacaggaccacgccccgggctttgaacccgtttttcccaaccccgagcattttctattaagcgttctgtttcaattattttattcgttcagttaattcgttcttggcgtcataagtatatgcccgccgttgttctggccgtagctatctagcagccactccgcgagtcgttcatttaacaaatacttactctgtgtcagggatatgaagatgggtaataccaggtgcctgtcctcactgtgtgagtggttctctagccagacatgaggagggatcctattgtttcccatagctaggcagcctaagagagtaggggaaagagctggctccagatgaaaagggcaccatctccagctcttggaagcagagagggtggtcctttggattcccagtggcagcagcaaccaacctggcccttagtagtttctaagttacaccatgttaatggataaaggaattactcagcttgaagggatctgtttcctttacactggcctgatgtgtggggagaaaggggccaaaaagtttaggatttggagttaacatcgtaatttctgctttgttggtcagggtttacagcattaatggacaggttcaccctgacctacaagtcggaacgtgacatggacaaactggcccatatcttcagttattacattagtgacatcgtggagcgtgagtgatcattgtagggtaacaaggtgtggtgctgggctcctgggggtttataaaagaagggggccagaagtactttaaaacaggtaccaaagggtcattcctttagcatcattcatctttggtttcttcaagttgccactgaaaagctagacctttgcctattatctgctaatctacccagtctcacattctattgactcattgttcaaagggggggcaggaggagctaatttcctttgcacatttgtattttatttcaaaataaagtattctcttctaacaataacgtatctcaagtgtgtattcagacaaaatttataaaacatctttttattattatattttgatcctgtgaggaaggaataggtgttttcttattttctgccatgtattaagcttttagatatttgccagatatccagtatctggaaaaaactcatttatgtagtacccatgttttgagtacctaccctgtgacatggactgtaataggtgcaggcagggcaagaacccactcttgaactttttagttaggcctacccaacagaaattactctgaccttataccttttagtacttacgtaacattctcatcctttactgacagtgccctgtatgcttccgtccatcattctgagattcaccagaataattactttgaggcatctccgttaagaatttgattatttgacttacctcttatccttaaggaacacatggaaggtcgtttgctttttcttataggtttggatgaaggggaagataaacattctatatcgtgtatgtactctaataccagcaacttctgggtactagaactacaggggaaagtaagacagagtaccctcgtggagtttccattttagtgggacagacaataaacacaataattgtagcttatatattctatcaaggaaataaacatagtatagtggtaaaaaaaaaacacaaaaaataattttagggtaggggagtatatgagacagggtggtcataggctcctctgaggaggtattatttaagctgacacttgaaggatgaggggaacagcttgtgaagaactaggggtaaagcatttcagacagaataccaagtgcaaaggtcctgagacaggagaaagctcggcatgctctaggagctaaaagaaggccagtgcaggccaaaacgtagctcgcagggtgaagagtggtttgaggcaaggttgggggatggtagctatgagaccaccacgctctgtagtccatagtgaagagttggaattatatatttctgtataaaggaaaactgtggaaaggtctagcaggggagtaatatgatctgattaacactttaaagctgattttggctaccttgtggagattgaatgctggtggaaagtgaatttaagaatagaagctggaagaggcaattgtcctggaaagatgttggagatttggtctagagcagtggttctcaacctcagctgtggttgcctgaggagctttttaattgttttttcttttttctttttttttttttgtaagagactggggtctcagtatgttgccaagtttgtcttgaactctagagcttaaaagattcttctgcctcaacctctcaaatagctaggactgcaggtaccataccaccttgtctaacaaaaaatcttaatgcctaagcttcaccccaggccatttaaatcggactttcttaaggttggcccaggaataagaccttttaaagtttcataggcaattccaatgtgcggtcaagactgaagattgttggtgtagaggtatggcaggggagctgtgtggggtagattaacctgaaatatattttgcaggttcaacagacaggagttgctaatacgttgaatttcagtgggaagtggtgagaaaaaggactcagttttttggctttcataaatgaattgatcgtgtcatttaccaagacaggaaagactgaacattgagaaagaaaatcaagagttctgttttgagtatgttgagtttgagatgccaataagtcattcaagtggagaatgactccattcaagtggagaatccagctatgattgagcctggagctcagagaagagatccctgttagagatgaaaatgtgagttgatggcataaagtgggacttaaagttaagaaccgattgagttcatgttgggagagcataaataaagagaaagagcctttggctgaggcttgaggaactccaggggaggattatgataagggagaaagaacctgaaaaagagactacaaacagccagtgaggtaggatattgtggtgttcctgaagccaaaggagaggtagtgtctctagaagaaagctgcagctagctgggttgaaaatgacagctgtcaagtacagtgaggtcagagaggtattgaatttagcaagattaatgctgttgatgaccttgataatttgaagtggtggaggtagaagtcagagtggagtaagctgagaaaaagaatgacagagaaaacatttaagaggaagagtaaatgggagatgaggaaaatatatatagccaacttttttgagatttgggggttttgtttgttgtgaatgtagcaggaaaaaaaatggagctaataggcagaagataaggtagaaccaagaatatgtgggttatttttgtgtgttttggttttgttttttaagctattgatgagaatatttcagtagagagattaggaacggtgtgaagttcttgagaaggtaaaaggggataagattcctatcacaaatggggtggctttgaagagagcaggaattcttccattttagaaacgatgtatgtaggtgcagatagatttggggagaaaatgaaaagaaggaagaaggagcctgagtcttggagtgagcaaatggacaagaatgatgtcaggataaactcagtaggccattcttttgaccatatatgattctgccctgatctggtttatatctgattttgactcattttcctctctcttccttacttgatttcagatgttctctgttttggaggggatatcctaaatatcacaggtatttttttagtttttctgaatacttaaaagactgagtgaggaggactatatttaggtggaattcagcatattggtttattcagcattgtttgattaataggtactggaccctggggatacaaagatgaggaagacatagtctgtgcctcaaaggatcccccagtctaatggaaaagctttgcccaaattaaactctcacatgctttgcatttttgtttagattgaaggacagcaaaataagtgccaataaagcgttcttgagaaaactaatgagaaatttggtcattaatagcagaagctaagcatgagatggggaggagttaagcatgtcctatctggagaactcaggatcactaacagctgtatgccccggagttggcctgtcttcttatttaaacataataaaaccagccatcaaattagatatgaacttgaacccacattttatgaatcttttgctagtacctctcctcctctgttagtatactggtggaaggaagattaccaaaaatatccttaggatcatttaaacttctacctagttacgtttttactgaatgattttgaggatctgaagcagtattttaacctagcataatgtatacagccaagaaaccttgcctgataacttacttgatatccacactgggtcaagttgatcttctgcattactgggactttgccctggaccaagtaagtctagatatttggtccccatcagcctatcctgtgtgtctgcagggaacatgctcctggcactctggagagtagaacaaaatcaactgagtgacatcattaccttggtggcaaaatgcagtctggagatacaggagaaatttgggatctatcataccagggaaggccaggacctgcagttaaagataggtagtacctcctaaaagagtgatccagttgggcaagggggaacccactataaaaacctcaaaagataaatgataaactgggaaaaaatgtttgcaattcatatagacaaagggtgaattgctctactagggaaagagcacttagaaatcaagaaaacaatagtactcttaagagaaaaattggacaaaggacatgagtaaattgtatatagacaaggaaatgcatgtcttttaacacgtaaaaagatgatcaacattcataataagaaaaatgccaattggaagtacactgactacctgtcttacctatagataggcaaaacttcagatgctggacaatgtactctttggtgagtctgaggaatgagctttttcttactgtgagtgaacaacggtataaggtgatttggcaatctttatttatttttattgtctattgtattttttatgtcaacaaaaactaaaccatataaaaatatatattaaaaagtcttgttttcacttatataccatctatactatttactcttacaagtgcatttattccttaacctagcaatccttctggacatctataggtatacgttcacacatctgaaatgttgcatgtgcaaggttattgattgtaatatggtttgtaattttaaaacattgaaaactatttataggagactggttaagtaaataatatgtatactcaataagattacctgcaacttaaaaaaaataagatgtcttgatatggcagtatctccaagatacagttaagtgaaaaaaagtaagatacaaaacagcatgtttagtatgctaccatttgtgtaaggaggaaaataagaatttttcttatttgtttatatctttttttttttttgagatggagtcttgctctgtcacccaggctggagtgcagtggcgccatctcagctcactgcaagctccacctcccgggatcacaccattctcctgcctcagcctcctactgagtagctgggactacaggagcctgccaccacgcctggctaatttttttgtatttttagtagagacagggtttcaccgtgttagccaggatgttctcgatctcctgacctcgtgttccgcccgcctcggcctcccaaagtgctggaattacagacttgagccaccgcacctggcctatttgtttatatcttgtataaagaaacactggaaaaaatatataagaaactaataaaattactaatatcaggaaaatagtaaagatggtcatgtaggtagaagcaagattttaaaatacatattctttcatatagtttagtttttgaactatgttattgcttgacagaatcaaaaatataatacaatataataaaaattaaaaagctacatacaggggccaaagtttcaccaatggcagagtcaggattggaggcgaagctcaatatacaaagctccttcacaagggttcagaaaactcctcaagggcaaaagttggctccagctattcttttatgttttgaggagcagtggtaaaggattatattctgtcttatatggcatctcttttgtcctgccgtcttttttgtttcttttggtttttgttgtattaaggataattgatactatacattggcatatttatacacttttgaaaccatcaccacaataaagatagtgaacatacttatcactcaaaaagtctcctcgtgcccctttgtacattcttccactactctccttcaccatctccagacagacaaaatgtccatctccaggtgtattatataagagaaggaaatctgggggaagaattttttttttttttttttgagatggagtctcactctgttgcccaggctggcatgcagtggcacggtcttggctcactgcaacctccgcctccagggttcaagcaattcttctgcctaagcctcctgagtagctgggattataggtgtgcaccaccacgcctggctaatttttttttttttttttgtatttttagtagagacagggtttcaccatgttggtcaggctagtctcgagttcccaacctcaggtcatctgcccgtctcagcctcccaaagtgctgggattacaggcgtgagccaccgtgcctggccgtaaggtattatttttaaaggttagctcacctaagacttccgcagctgagggcagtaacaagataggcatgatgcacagagccatgtggggattccagacccctcctgttgcatagtttcccagttgaatttgactcttctccatttatctcatttttttctggataggtctacctgcaagtcggatttcccaggttattgttggagatgagcggcagcaatacctcttggtgattgggcaggttgtagtgatgtccagttagctcagcgtttggctcaggcgaatgaaattgtcctatcctggaactgctggatgctttgcaagcagtatatgtttgaagtggcaatcatgagggaggatgaagctgtgaaggtaggaggctagcttcctgtactgccattctgaaaaggccttcctagtacacagcgcaatgctctggtagtgttcacatattgcctggccaaaccaatgaccattggaactcaatttaggagggaggctgggaatattctcctatgaagatagatgaggtagaacagtgaggctgaggagataaaaggcaaacaagggcaatagaatcctcagcctttcttgtgtgggggcacagaattaaacagtttcctttctgtagttaagagatatgtggatc

SEQ ID NO: 645 - DNA, 415 bp, Homo Sapiens
  misc_feature (337)..(337): n is a, c, g, or t
  misc_feature (363)..(363): n is a, c, g, or t
  misc_feature (376)..(376): n is a, c, g, or t
  misc_feature (384)..(384): n is a, c, g, or t
  misc_feature (393)..(393): n is a, c, g, or t
  misc_feature (399)..(399): n is a, c, g, or t
  misc_feature (405)..(405): n is a, c, g, or t
  misc_feature (411)..(411): n is a, c, g, or t
gtggtgaaagcctataccacacgtgtgggcatcggggccttccccaccgagcagatcaacgagattggaggcctgctgcagacccgcggccacgagtggggagtgaccacaggcaggaagaggcgctgcggctggctcgacctgatgattctaagatatgctcacatggtcaacggattcactgcgctggccctgacgaagctggacatcctgggacgtactgggtgaggttaaagtcggtgtctcatacaagctgaacggggaaaaggattccctatttcccagctaaccagggagatgctttcagaaggttcgaagtttgagtattgaaacgttncctggggttggaaaagcagacaaccncagggcgccaggnagttgggnaggactttncccccnaaaggnccccanattt

SEQ ID NO: 646 - DNA, 523 bp, Homo Sapiens
ggcacgagttttttttatttttggcagtctgaatttttaaaacccatttaaatttttttccttacctttttatttgcatgtggatcaaccatcgctttattggctgagatatgaacatattgttgaaaggtaatttgagagaaatatgaagaactgaggaggaaaaaaaaaaaaaagaaaagaaccaacaacctcaactgcctactccaaaatgttggtcattttatgttaagggaagaattccagggtatggccatggagtgtacaagtatgtgggcagattttcagcaaactcttttcccactgtttaaggagttagtggattactgccattcacttcataatccagtaggatccagtgatccttacaagttagaaaacataatcttctgccttctcatgatccaactaatgccttactcttcttgaaatttttaacctatgatattttctgtgcctgaatatttgttatgtagataacaagacctcagtccttcctgtttttcacattttccttttcaaa

SEQ ID NO: 647 - DNA, 558 bp, Homo Sapiens
  misc_feature (481)..(481): n is a, c, g, or t
  misc_feature (551)..(551): n is a, c, g, or t
gggagaaacgttctcactcgctctctgctcgctgcgggcgctccccgccctctgctgccagaaccttggggatgtgcctagacccggcgcagcacacgtccgggccaaccgcgagcagaacaaacctttggcgggcggccaggaggctccctcccagccaccgcccccctccagcgcctttttttccccccatacaatacaagatcttccttcctcagttcccttaaagcacagcccagggaaacctcctcacagttttcatccagccacgggccagcatgtctgggggcaaatacgtagactcggagggacatctctacaccgttcccatccgggaacagggcaacatctacaagcccaacaacaaggccatggcagacgagctgagcgagaagcaagtgtacgacgcgcacaccaaggagatcgacctggtcaaccgcgaccctaaacacctcaacgatgacgtggtcaagattgactntgaagatgtgattgcagaaccagaagggacacacagttttgacggcatttggaaggccagcttcaccacnctttcac

SEQ ID NO: 648 - DNA, 636 bp, Homo Sapiens
ttctgtgttcattacatcgtccacggcggcccgcactgtccgcagcgtgattctcgcctcgccgcagcccagccctgcgcgccttgcccggcggcccccgcccggccgctccgggcccctggccccgcggagcgatgctgctgctggctgccgccttcctcgtggccttcgtgctgctgctgtacatggtgtctccgctcatcagccccaagcccctcgccctgcccggggcgcatgtggtggttacaggaggttccagtggcatcgggaagtgcattgctatcgagtgctataaacaaggagcttttataactctggttgcacgaaatgaggataagctgctgcaggcaaagaaagaaattgaaatgcactctattaatgacaaacaggtggtactttgcatatcagttgatgtatctcaagactataaccaagtagagaatgtcataaaacaagcacaggagaaactgggtccagtggacatgctggtaaattgtgcaggaatggcagtgtcaggcaaaatttgaagatcttgaagttagtacctttgaaaggttaatgagcatcaattacctgggcagcgtgtaccccagccgggccgtgatcaccaccatgaaggagcgccgggtgggcagg

SEQ ID NO: 649 - DNA, 1770 bp, Homo Sapiens
gaggagtggattacatattccaacagttgttattacattggtaaggaaagaagaacttgggaagaaagagtttgctggcctgtgcttcgaagaactctgatctgctttctatagataatgaggaagaaatggtatgtgtggggacttcccagttggctgtaagttgccatttgaactaaacgaaatagatcaggaactgaggacatatctaaattttctagttttatagaaggcttttatccacaagaatcaagatcttccctctctgagcaggaatcctttgtgcattgaagactttagattcctctctgcggtagacgtgcacttataagtatttgatggggtggattcgtggtcggaggtctcgacacagctgggagatgagtgaatttcataattataacttggatctgaagaagagtgatttttcaacacgatggcaaaagcaaagatgtccagtagtcaaaagcaaatgtagagaaaatgcatctccattttttttctgctgcttcatcgctgtagccatgggaatccgtttcattattatggtagcaatatggagtgctgtattcctaaactcattattcaaccaagaagttcaaattcccttgaccgaaagttactgtggcccatgtcctaaaaactggatatgttacaaaaataactgctaccaattttttgatgagagtaaaaactggtatgagagccaggcttcttgtatgtctcaaaatgccagccttctgaaagtatacagcaaagaggaccaggatttacttaaactggtgaagtcatatcattggatgggactagtacacattccaacaaatggatcttggcagtgggaagatggctccattctctcacccaacctactaacaataattgaaatgcagaagggagactgtgcactctatgcctcgagctttaaaggctatatagaaaactgttcaactccaaatacatacatctgcatgcaaaggactgtgtaaagatgatcaaccatctcaataaaagccaggaacagagaagagattacaccagcggtaacactgccaaccgagactaaaggaaacaaacaaaaacaggacaaaatgaccaaagactgtcagatttcttagactccacaggaccaaaccatagaacaatttcactgcaaacatgcatgattctccaagacaaaagaagagagatcctaaaggcaattcagatatccccaaggctgcctctcccaccacaagcccagagtggatgggctgggggaggggtgctgttttaatttctaaaggtaggaccaacacccaggggatcagtgaaggaagagaaggccagcagatcagtgagagtgcaaccccaccctccacaggaaattgcctcatgggcagggccacagcagagagacacagcatgggcagtgccttccctgcctgtgggggtcatgctgccacttttaatgggtcctccacccaacggggtcagggaggtggtgctgccccagtgggccatgattatcttaaaggcattattctccagccttaagatcttaggacgtttcctttgctatgatttgtacttgcttgagtcccatgactgtttctcttcctctctttcttccttttggaatagtaatatccatcctatgtttgtcccactattgtattttggaagcacataacttgtttggtttcacaggttcacagttaagaaggaattttgcctctgaataaatagaatcttgagtctcatgcaaaaaaaaaaaaaaaaaaaaaaaaa

SEQ ID NO: 650 - DNA, 415 bp, Homo Sapiens
caccctccaccttgggctgcgtggaaatgagaaagctttttacccaaaaaaaaaaaaaaaaagagttcctaatgcataatctgcccaacaccaagttctgaagggtgggtgagggacgtcccctctagtttccatgactgctgtagacccgcatcatctctagccctcatcggggcagtcccagagcccgcttttttactgcccatattattcaaccaataccaggtgcactctgtctcccctcggccatccttcccttgcttcagacctaatgacaagtgtggcacatatgtccactttcaggcctcacatctgccaccttagcaagacatcacctcatccccttgtcactaggaagagggcttcttccccacatggtcgtcatagtgctcacctctgggctgaaggggaaagc

SEQ ID NO: 651 - DNA, 264 bp, Homo Sapiens
tttaactttctagttaaggccttggtcacttgcaccctggcattatttttaatttttattctgtgaaagataccatgattataagagaccatcataacgatacattcaagagcaaaaaagtaacacaaagcaaaattatcacctttaaaaaaccaaggaaattttgaatacttaagatggttttttacttaaaaatattctggatatttgcttaagatgtcaaatactttgaatttttttatatttaacagttcgtggggttgg

SEQ ID NO: 652 - DNA, 9588 bp, Homo Sapiens
ccgaccaacaccaacacccagctccgacgcagctcctctgcgcccttgccgccctccgagccacagctttcctcccgctcctgcccccggcccgtcgccgtctccgcgctcgcagcggcctcgggagggcccaggtagcgagcagcgacctcgcgagccttccgcactcccgcccggttccccggccgtccgcctatccttggccccctccgctttctccgcgccggcccgcctcgcttatgcctcggcgctgagccgctctcccgattgcccgccgacatgagctgcaacggaggctcccacccgcggatcaacactctgggccgcatgatccgcgccgagtctggcccggacctgcgctacgaggtgaccagcggcggcgggggcaccagcaggatgtactattctcggcgcggcgtgatcaccgaccagaactcggacggctactgtcaaaccggcacgatgtccaggcaccagaaccagaacaccatccaggagctgctgcagaactgctccgactgcttgatgcgagcagagctcatcgtgcagcctgaattgaagtatggagatggaatacaactgactcggagtcgagaattggatgagtgttttgcccaggccaatgaccaaatggaaatcctcgacagcttgatcagagagatgcggcagatgggccagccctgtgatgcttaccagaaaaggcttcttcagctccaagagcaaatgcgagccctttataaagccatcagtgtccctcgagtccgcagggccagctccaagggtggtggaggctacacttgtcagagtggctctggctgggatgagttcaccaaacatgtcaccagtgaatgtttggggtggatgaggcagcaaagggcggagatggacatggtggcctggggtgtggacctggcctcagtggagcagcacattaacagccaccggggcatccacaactccatcggcgactatcgctggcagctggacaaaatcaaagccgacctgcgcgagaaatctgcgatctaccagttggaggaggagtatgaaaacctgctgaaagcgtcctttgagaggatggatcacctgcgacagctgcagaacatcattcaggccacgtccagggagatcatgtggatcaatgactgcgaggaggaggagctgctgtacgactggagcgacaagaacaccaacatcgctcagaaacaggaggccttctccatacgcatgagtcaactggaagttaaagaaaaagagctcaataagctgaaacaagaaagtgaccaacttgtcctcaatcagcatccagcttcagacaaaattgaggcctatatggacactctgcagacgcagtggagttggattcttcagatcaccaagtgcattgatgttcatctgaaagaaaatgctgcctactttcagttttttgaagaggcgcagtctactgaagcatacctgaaggggctccaggactccatcaggaagaagtacccctgcgacaagaacatgcccctgcagcacctgctggaacagatcaaggagctggagaaagaacgagagaaaatccttgaatacaagcgtcaggtgcagaacttggtaaacaagtctaagaagattgtacagctgaagcctcgtaacccagactacagaagcaataaacccattattctcagagctctctgtgactacaaacaagatcagaaaatcgtgcataagggggatgagtgtatcctgaaggacaacaacgagcgcagcaagtggtacgtgacgggcccgggaggcgttgacatgcttgttccctctgtggggctgatcatccctcctccgaacccactggccgtggacctctcttgcaagattgagcagtactacgaagccatcttggctctgtggaaccagctctacatcaacatgaagagcctggtgtcctggcactactgcatgattgacatagagaagatcagggccatgacaatcgccaagctgaaaacaatgcggcaggaagattacatgaagacgatagccgaccttgagttacattaccaagagttcatcagaaatagccaaggctcagagatgtttggagatgatgacaagcggaaaatacagtctcagttcaccgatgcccagaagcattaccagaccctggtcattcagctccctggctatccccagcaccagacagtgaccacaactgaaatcactcatcatggaacctgccaagatgtcaaccataataaagtaattgaaaccaacagagaaaatgacaagcaagaaacatggatgctgatggagctgcagaagattcgcaggcagatagagcactgcgagggcaggatgactctcaaaaacctccctctagcagaccaggggtcttctcaccacatcacagtgaaaattaacgagcttaagagtgtgcagaatgattcacaagcaattgctgaggttctcaaccagcttaaagatatgcttgccaacttcagaggttctgaaaagtactgctatttacagaatgaagtatttggactatttcagaaactggaaaatatcaatggtgttacagatggctacttaaatagcttatgcacagtaagggcactgctccaggctattctccaaacagaagacatgttaaaggtttatgaagccaggctcactgaggaggaaactgtctgcctggacctggataaagtggaagcttaccgctgtggactgaagaaaataaaaaatgacttgaacttgaagaagtcgttgttggccactatgaagacagaactacagaaagcccagcagatccactctcagacttcacagcagtatccactttatgatctggacttgggcaagttcggtgaaaaagtcacacagctgacagaccgctggcaaaggatagataaacagatcgactttagattatgggacctggagaaacaaatcaagcaattgaggaattatcgtgataactatcaggctttctgcaagtggctctatgatcgtaaacgccgccaggattccttagaatccatgaaatttggagattccaacacagtcatgcggtttttgaatgagcagaagaacttgcacagtgaaatatctggcaaacgagacaaatcagaggaagtacaaaaaattgctgaactttgcgccaattcaattaaggattatgagctccagctggcctcatacacctcaggactggaaactctgctgaacatacctatcaagaggaccatgattcagtccccttctggggtgattctgcaagaggctgcagatgttcatgctcggtacattgaactacttacaagatctggagactattacaggttcttaagtgagatgctgaagagtttggaagatctgaagctgaaaaataccaagatcgaagttttggaagaggagctcagactggcccgagatgccaactcggaaaactgtaataagaacaaattcctggatcagaacctgcagaaataccaggcagagtgttcccagttcaaagcgaagcttgcgagcctggaggagctgaagagacaggctgagctggatgggaagtcggctaagcaaaatctagacaagtgctacggccaaataaaagaactcaatgagaagatcacccgactgacttatgagattgaagatgaaaagagaagaagaaaatctgtggaagacagatttgaccaacagaagaatgactatgaccaactgcagaaagcaaggcaatgtgaaaaggagaaccttggttggcagaaattagagtctgagaaagccatcaaggagaaggagtacgagattgaaaggttgagggttctactgcaggaagaaggcacccggaagagagaatatgaaaatgagctggcaaaggtaagaaaccactataatgaggagatgagtaatttaaggaacaagtatgaaacagagattaacattacgaagaccaccatcaaggagatatccatgcaaaaagaggatgattccaaaaatcttagaaaccagcttgatagactttcaagggaaaatcgagatctgaaggatgaaattgtcaggctcaatgacagcatcttgcaggccactgagcagcgaaggcgagctgaagaaaacgcccttcagcaaaaggcctgtggctctgagataatgcagaagaagcagcatctggagatagaactgaagcaggtcatgcagcagcgctctgaggacaatgcccggcacaagcagtccctggaggaggctgccaagaccattcaggacaaaaataaggagatcgagagactcaaagctgagtttcaggaggaggccaagcgccgctgggaatatgaaaatgaactgagtaaggtaagaaacaattatgatgaggagatcattagcttaaaaaatcagtttgagaccgagatcaacatcaccaagaccaccatccaccagctcaccatgcagaaggaagaggataccagtggctaccgggctcagatagacaatctcacccgagaaaacaggagcttatctgaagaaataaagaggctgaagaacactctaacccagaccacagagaatctcaggagggtggaagaagacatccaacagcaaaaggccactggctctgaggtgtctcagaggaaacagcagctggaggttgagctgagacaagtcactcagatgcgaacagaggagagcgtaagatataagcaatctcttgatgatgctgccaaaaccatccaggataaaaacaaggagatagaaaggttaaaacaactgatcgacaaagaaacaaatgaccggaaatgcctggaagatgaaaacgcgagattacaaagggtccagtatgacctgcagaaagcaaacagtagtgcgacggagacaataaacaaactgaaggttcaggagcaagaactgacacgcctgaggatcgactatgaaagggtttcccaggagaggactgtgaaggaccaggatatcacgcggttccagaactctctgaaagagctgcagctgcagaagcagaaggtggaagaggagctgaatcggctgaagaggaccgcgtcagaagactcctgcaagaggaagaagctggaggaagagctggaaggcatgaggaggtcgctgaaggagcaagccatcaaaatcaccaacctgacccagcagctggagcaggcatccattgttaagaagaggagtgaggatgacctccggcagcagagggacgtgctggatggccacctgagggaaaagcagaggacccaggaagagctgaggaggctctcttctgaggtcgaggccctgaggcggcagttactccaggaacaggaaagtgtcaaacaagctcacttgaggaatgagcatttccagaaggcgatagaagataaaagcagaagcttaaatgaaagcaaaatagaaattgagaggctgcagtctctcacagagaacctgaccaaggagcacttgatgttagaagaagaactgcggaacctgaggctggagtacgatgacctgaggagaggacgaagcgaagcggacagtgataaaaatgcaaccatcttggaactaaggagccagctgcagatcagcaacaaccggaccctggaactgcaggggctgattaatgatttacagagagagagggaaaatttgagacaggaaattgagaaattccaaaagcaggctttagaggcatctaataggattcaggaatcaaagaatcagtgtactcaggtggtacaggaaagagagagccttctggtgaaaatcaaagtcctggagcaagacaaggcaaggctgcagaggctggaggatgagctgaatcgtgcaaaatcaactctagaggcagaaaccagggtgaaacagcgcctggagtgtgagaaacagcaaattcagaatgacctgaatcagtggaagactcaatattcccgcaaggaggaggctattaggaagatagaatcggaaagagaaaagagtgagagagagaagaacagtcttaggagtgagatcgaaagactccaagcagagatcaagagaattgaagagaggtgcaggcgtaagctggaggattctaccagggagacacagtcacagttagaaacagaacgctcccgatatcagagggagattgataaactcagacagcgcccatatgggtcccatcgagagacccagactgagtgtgagtggaccgttgacacctccaagctggtgtttgatgggctgaggaagaaggtgacagcaatgcagctctatgagtgtcagctgatcgacaaaacaaccttggacaaactattgaaggggaagaagtcagtggaagaagttgcttctgaaatccagccattccttcggggtgcaggatctatcgctggagcatctgcttctcctaaggaaaaatactctttggtagaggccaagagaaagaaattaatcagcccagaatccacagtcatgcttctggaggcccaggcagctacaggtggtataattgatccccatcggaatgagaagctgactgtcgacagtgccatagctcgggacctcattgacttcgatgaccgtcagcagatatatgcagcagaaaaagctatcactggttttgatgatccattttcaggcaagacagtatctgtttcagaagccatcaagaaaaatttgattgatagagaaaccggaatgcgcctgctggaagcccagattgcttcagggggtgtagtagaccctgtgaacagtgtctttttgccaaaagatgtcgccttggcccgggggctgattgatagagatttgtatcgatccctgaatgatccccgagatagtcagaaaaactttgtggatccagtcaccaaaaagaaggtcagttacgtgcagctgaaggaacggtgcagaatcgaaccacatactggtctgctcttgctttcagtacagaagagaagcatgtccttccaaggaatcagacaacctgtgaccgtcactgagctagtagattctggtatattgagaccgtccactgtcaatgaactggaatctggtcagatttcttatgacgaggttggtgagagaattaaggacttcctccagggttcaagctgcatagcaggcatatacaatgagaccacaaaacagaagcttggcatttatgaggccatgaaaattggcttagtccgacctggtactgctctggagttgctggaagcccaagcagctactggctttatagtggatcctgttagcaacttgaggttaccagtggaggaagcctacaagagaggtctggtgggcattgagttcaaagagaagctcctgtctgcagaacgagctgtcactgggtataatgatcctgaaacaggaaacatcatctctttgttccaagccatgaataaggaactcatcgaaaagggccacggtattcgcttattagaagcacagatcgcaaccggggggatcattgacccaaaggagagccatcgtttaccagttgacatagcatataagaggggctatttcaatgaggaactcagtgagattctctcagatccaagtgatgataccaaaggattttttgaccccaacactgaagaaaatcttacctatctgcaactaaaagaaagatgcattaaggatgaggaaacagggctctgtcttctgcctctgaaagaaaagaagaaacaggtgcagacatcacaaaagaataccctcaggaagcgtagagtggtcatagttgacccagaaaccaataaagaaatgtctgttcaggaggcctacaagaagggcctaattgattatgaaaccttcaaagaactgtgtgagcaggaatgtgaatgggaagaaataaccatcacgggatcagatggctccaccagggtggtcctggtagatagaaagacaggcagtcagtatgatattcaagatgctattgacaagggccttgttgacaggaagttctttgatcagtaccgatccggcagcctcagcctcactcaatttgctgacatgatctccttgaaaaatggtgtcggcaccagcagcagcatgggcagtggtgtcagcgatgatgtttttagcagctcccgacatgaatcagtaagtaagatttccaccatatccagcgtcaggaatttaaccataaggagcagctctttttcagacaccctggaagaatcgagccccattgcagccatctttgacacagaaaacctggagaaaatctccattacagaaggtatagagcggggcatcgttgacagcatcacgggtcagaggcttctggaggctcaggcctgcacaggtggcatcatccacccaaccacgggccagaagctgtcacttcaggacgcagtctcccagggtgtgattgaccaagacatggccaccagcgtgaagcctgctcagaaagccttcataggcttcgagggtgtgaagggaaagaagaagatgtcagcagcagaggcagtgaaagaaaaatggctcccgtatgaggctggccagcgcttcctggagttccagtacctcacgggaggtcttgttgacccggaagtgcatgggaggataagcaccgaagaagccatccggaaggggttcatagatggccgcgccgcacagaggctgcaagacaccagcagctatgccaaaatcctgacctgccccaaaaccaaattaaaaatatcctataaggatgccataaatcgctccatggtagaagatatcactgggctgcgccttctggaagccgcctccgtgtcgtccaagggcttacccagcccttacaacatgtcttcggctccggggtcccgctccggctcccgctcgggatctcgctccggatctcgctccgggtcccgcagtgggtcccggagaggaagctttgacgccacagggaattcttcctactcttattcctactcatttagcagtagttctattgggcactagtagtcagttgggagtggttgctataccttgacttcatttatatgaatttccactttattaaataatagaaaagaaaatcccggtgcttgcagtagagtgataggacattctatgcttacagaaaatatagccatgattgaaatcaaatagtaaaggctgttctggctttttatcttcttagctcatcttaaataagcagtacacttggatgcagtgcgtctgaagtgctaatcagttgtaacaatagcacaaatcgaacttaggatttgtttcttctcttctgtgtttcgatttttgatcaattctttaattttggaagcctataatacagttttctattcttggagataaaaattaaatggatcactgatattttagtcattctgcttctcatctaaatatttccatattctgtattaggagaaaattaccctcccagcaccagcccccctctcaaacccccaacccaaaaccaagcattttggaatgagtctcctttagtttcagagtgtggattgtataacccatatactcttcgatgtacttgtttggtttggtattaatttgactgtgcatgacagcggcaatcttttctttggtcaaagttttctgtttattttgcttgtcatattcgatgtactttaaggtgtctttatgaagtttgctattctggcaataaacttttagactttt

SEQ ID NO: 653 - DNA, 2913 bp, Homo Sapiens
gggggagcccctgcaagtttcccgggccgcgcgccgcgctcgctcgcctcccagcccgcggcccgagccgccgccgcgcccgccatgccctcggccaaacaaaggggctccaagggcggccacggcgccgcgagcccctcggagaagggtgcccacccgtcgggcggcgcggatgacgtggcgaagaagccgccgccggcgccgcagcagccgccgccgccgcccgcgccgcacccgcagcagcacccgcagcagcacccgcagaaccaggcgcacggcaagggcggccaccgcggcggcggcggcggcggcggcaagtcctcctcctcctcctccgcctccgccgccgctgccgccgccgccgcctcgtcctcggcgtcctgctcgcgcaggctcggcagggcgctcaactttctcttctacctcgccctggtggcggcggccgctttctcgggctggtgcgtccaccacgtcctggaggaggtccagcaggtccggcgcagccaccaggacttctcccggcagagggaggagctgggccagggcttgcagggcgtcgagcagaaggtgcagtctttgcaagccacatttggaacttttgagtccatcttgagaagctcccaacataaacaagacctcacagagaaagctgtgaagcaaggggagagtgaggtcagccggatcagcgaagtgctgcagaaactccagaatgagattctcaaagacctctcggatgggatccatgtggtgaaggacgcccgggagcgggacttcacgtccctggagaacacggtggaggagcggctgacggagctcaccaaatccatcaacgacaacatcgccatcttcacagaagtccagaagaggagccagaaggagatcaatgacatgaaggcaaaggttgcctccctggaagaatctgaggggaacaagcaggatttgaaagccttaaaggaagctgtgaaggagatacagacctcagccaagtccagagagtgggacatggaggccctgagaagtacccttcagactatggagtctgacatctacaccgaggttcgcgagctggtgagcctcaagcaggagcagcaggctttcaaggaggcggccgacacggagcggctcgccctgcaggccctcacggagaagcttctcaggtctgaggagtccgtctcccgcctcccggaggagatccggagactggaggaagagctccgccagctgaagtccgattcccacgggccgaaggaggacggaggcttcagacactcggaagcctttgaggcactccagcaaaagagtcagggactggactccaggctccagcacgtggaggatggggtgctctccatgcaggtggcttctgcgcgccagaccgagagcctggagtccctcctgtccaagagccaggagcacgagcagcgcctggccgccctgcaggggcgcctggaaggcctcgggtcctcagaggcagaccaggatggcctggccagcacggtgaggagcctgggcgagacccagctggtgctctacggtgacgtggaggagctgaagaggagtgtgggcgagctccccagcaccgtggaatcactccagaaggtgcaggagcaggtgcacacgctgctcagtcaggaccaagcccaggccgcccgtctgcctcctcaggacttcctggacagactttcttctctagacaacctgaaagcctcagtcagccaagtggaggcggacttgaaaatgctcaggactgctgtggacagtttggttgcatactcggtcaaaatagaaaccaacgagaacaatctggaatcagccaagggtttactagatgacctgaggaatgatctggataggttgtttgtgaaagtggagaagattcacgaaaaggtctaaatgaattgcgtgtgcagggcgcggatttaaagtccaatttctcatgaccaaaaaatgtgtggttttttcccatgtgtcccctaccccccaatttcttgtcccctcttaaagagcagttgtcaccacctgaacaccaaggcattgtattttcatgcccagttaacttatttacaatatttaagttctctgcttctgcatttggttggtttcctgaagcgcagcccctgtgaataacaggtggcttttcatggatgtctctagtcagagaaaaatgataaaggcttaaattgaggattaacagaagcagattaacctcagaaatcctgtctggctggcagatttcaagtaaaaaaaaaaaaaaggtgggttggggggacccttttctttctagttgtctttaaggaaaattaattttacttttttttttgttctggccgaaatttttatgagatatctctcacttgtcttccactttgaaccggttaaagctcatagctgtcagctctgaatgaggaggggagaagcccctgggtctttctttgaaaggaatccgctgcttgagggctgcctccctcatggtgtgcgtgtcgttctcttcctgacgcatctgtgatatcagaggtaactatgcaaagcatccaggcggttctgaatgtgaagcactacacccagcagagtcccggtgccctctgtccccactgccggcccatgtcctctctccggaggtcaccaaggaatgcacaggtttcgactaccagaaaggggagtccttgggttctttcaaaaaattcgtgaggagagctgtctacagtggaatagggggtctccctggggaatgcaggccaagtccttttattttaacatgatgtccatgaagaggtttgccgtctgggcagccctgtcggcaaggagcgtgcatactgcgtttgtgtaattgtttgctgtatctcccttccctctgagctgtattgttctttaatggctgtcttgcccttccaaaaaaaattgaaaaaaaaaaaa

SEQ ID NO: 654 - DNA, 4079 bp, Homo Sapiens
ggagcggcgggcgggcgggagggctggcggggcgaacgtctgggagacgtctgaaagaccaacgagactttggagaccagagacgcgcctggggggacctggggcttggggcgtgcgagatttcccttgcattcgctgggagctcgcgcagggatcgtcccatggccggggctcggagccgcgacccttggggggcctccgggatttgctacctttttggctccctgctcgtcgaactgctcttctcacgggctgtcgccttcaatctggacgtgatgggtgccttgcgcaaggagggcgagccaggcagcctcttcggcttctctgtggccctgcaccggcagttgcagccccgaccccagagctggctgctggtgggtgctccccaggccctggctcttcctgggcagcaggcgaatcgcactggaggcctcttcgcttgcccgttgagcctggaggagactgactgctacagagtggacatcgaccagggagctgatatgcaaaaggaaagcaaggagaaccagtggttgggagtcagtgttcggagccaggggcctgggggcaagattgttacctgtgcacaccgatatgaggcaaggcagcgagtggaccagatcctggagacgcgggatatgattggtcgctgctttgtgctcagccaggacctggccatccgggatgagttggatggtggggaatggaagttctgtgagggacgcccccaaggccatgaacaatttgggttctgccagcagggcacagctgccgccttctcccctgatagccactacctcctctttggggccccaggaacctataattggaaggggttgctttttgtgaccaacattgatagctcagaccccgaccagctggtgtataaaactttggaccctgctgaccggctcccaggaccagccggagacttggccctcaatagctacttaggcttctctattgactcggggaaaggtctggtgcgtgcagaagagctgagctttgtggctggagccccccgcgccaaccacaagggtgctgtggttatcctgcgcaaggacagcgccagtcgcctggtgcccgaggttatgctgtctggggagcgcctgacctccggctttggctactcactggctgtggctgacctcaacagtgatggctggccagacctgatagtgggtgccccctacttctttgagcgccaagaagagctggggggtgctgtgtatgtgtacttgaaccaggggggtcactgggctgggatctcccctctccggctctgcggctcccctgactccatgttcgggatcagcctggctgtcctgggggacctcaaccaagatggctttccagatattgcagtgggtgccccctttgatggtgatgggaaagtcttcatctaccatgggagcagcctgggggttgtcgccaaaccttcacaggtgctggagggcgaggctgtgggcatcaagagcttcggctactccctgtcaggcagcttggatatggatgggaaccaataccctgacctgctggtgggctccctggctgacaccgcagtgctcttcagggccagacccatcctccatgtctcccatgaggtctctattgctccacgaagcatcgacctggagcagcccaactgtgctggcggccactcggtctgtgtggacctaagggtctgtttcagctacattgcagtccccagcagctatagccctactgtggccctggactatgtgttagatgcggacacagaccggaggctccggggccaggttccccgtgtgacgttcctgagccgtaacctggaagaacccaagcaccaggcctcgggcaccgtgtggctgaagcaccagcatgaccgagtctgtggagacgccatgttccagctccaggaaaatgtcaaagacaagcttcgggccattgtagtgaccttgtcctacagtctccagacccctcggctccggcgacaggctcctggccaggggctgcctccagtggcccccatcctcaatgcccaccagcccagcacccagcgggcagagatccacttcctgaagcaaggctgtggtgaagacaagatctgccagagcaatctgcagctggtccacgcccgcttctgtacccgggtcagcgacacggaattccaacctctgcccatggatgtggatggaacaacagccctgtttgcactgagtgggcagccagtcattggcctggagctgatggtcaccaacctgccatcggacccagcccagccccaggctgatggggatgatgcccatgaagcccagctcctggtcatgcttcctgactcactgcactactcaggggtccgggccctggaccctgcggagaagccactctgcctgtccaatgagaatgcctcccatgttgagtgtgagctggggaaccccatgaagagaggtgcccaggtcaccttctacctcatccttagcacctccgggatcagcattgagaccacggaactggaggtagagctgctgttggccacgatcagtgagcaggagctgcatccagtctctgcacgagcccgtgtcttcattgagctgccactgtccattgcaggaatggccattccccagcaactcttcttctctggtgtggtgaggggcgagagagccatgcagtctgagcgggatgtgggcagcaaggtcaagtatgaggtcacggtttccaaccaaggccagtcgctcagaaccctgggctctgccttcctcaacatcatgtggcctcatgagattgccaatgggaagtggttgctgtacccaatgcaggttgagctggagggcgggcaggggcctgggcagaaagggctttgctctcccaggcccaacatcctccacctggatgtggacagtagggataggaggcggcgggagctggagccacctgagcagcaggagcctggtgagcggcaggagcccagcatgtcctggtggccagtgtcctctgctgagaagaagaaaaacatcaccctggactgcgcccggggcacggccaactgtgtggtgttcagctgcccactctacagctttgaccgcgcggctgtgctgcatgtctggggccgtctctggaacagcacctttctggaggagtactcagctgtgaagtccctggaagtgattgtccgggccaacatcacagtgaagtcctccataaagaacttgatgctccgagatgcctccacagtgatcccagtgatggtatacttggaccccatggctgtggtggcagaaggagtgccctggtgggtcatcctcctggctgtactggctgggctgctggtgctagcactgctggtgctgctcctgtggaagatgggattcttcaaacgggcgaagcaccccgaggccaccgtgccccagtaccatgcggtgaagattcctcgggaagaccgacagcagttcaaggaggagaagacgggcaccatcctgaggaacaactggggcagcccccggcgggagggcccggatgcacaccccatcctggctgctgacgggcatcccgagctgggccccgatgggcatccagggccaggcaccgcctaggttcccatgtcccagcctggcctgtggctgccctccatcccttccccagagatggctccttgggatgaagagggtagagtgggctgctggtgtcgcatcaagatttggcaggatcggcttcctcaggggcacagacctctcccacccacaagaactcctcccacccaacttccccttagagtgctgtgagatgagagtgggtaaatcagggacagggccatggggtagggtgagaagggcaggggtgtcctgatgcaaaggtggggagaagggatcctaatcccttcctctcccattcaccctgtgtaacaggaccccaaggacctgcctccccggaagtgccttaacctagagggtcggggaggaggttgtgtcactgactcaggctgctccttctctagtttcccctctcatctgaccttagtttgctgccatcagtctagtggtttcgtggtttcgtctatttattaaaaaatatttgagaacaaaaaaaaaaaaaaaaaa

SEQ ID NO: 655 - DNA, 837 bp, Homo Sapiens
  misc_feature (344)..(344): n is a, c, g, or t
  misc_feature (512)..(512): n is a, c, g, or t
  misc_feature (780)..(780): n is a, c, g, or t
  misc_feature (791)..(791): n is a, c, g, or t
gtagttgtaaaacagatttcattgtgttatacatcacttataaagaagcatagttcccattcttccacatgatgctttttgcagcattgtaccacagaataatgactccctaataactcagctgaaaaatatttagatctacttgctctaagaataaggtcaacattaaacattctcagatgaaaagcttgctggatgaaatagtgcaccatcagaataaagcatgcaatatatttacagtcagatgaaacaagtgtgtccataaatcaaccaaaagaccatctcctcctttaggaaatacatgtattgcttagccagtaccaataagttaacgtcgtgtgaantaatttgggtattctggccttcctgaatctcatacagccaaaccaaccagaaggcttccccttctggtttgtggtggcttatcatttggcatctggaaacttctcttattttgctggataattgctggctagtggtgggctactgacttgcctagaaaaaataagtcnatcattcagattaatcttggaggcgtatctaaaatccgatttatttagatagcttgattggggggctagtagctcatttctaaagaaaaactctactgtggaggaaaaccctgtggggcctccttttgtggtgtttttttcccaaaaaaaaaaaatccggcgcgcgcgtcccatggagagatacactaccccacaatttttttttttgtgttaaaaaataaacggaatagggggccgtgggttttctcccgcctttttcgggggcctnaaaaaaagggncttgcggttttaagactacctggttggaaccccgttttttggcacc

SEQ ID NO: 656 - DNA, 460 bp, Homo Sapiens
gaaaggcggttgttgtgatagccgtccatgtaccacacccggttatcgcctacaggggcgagagggtatagtcatccagggtccgaaactcgagccggaggtcttgcaagtcacggggtcactgatgcccggaaacttcccgcaagctagtatatgcatgcatggccggagcctttcttcaagattggacactctgctctgaagtccatcgtagtaataggcgccaatttcctcttgcagctcgtaaagcactgacgtcagattctggacctcctctttaaactgcaataccaatatggcatacgccttgtaatctaccaacacaggtatcaaaggcctaagttcatccatattcgcttttatcgccttaaactgcctggccaggtgttgcttatgactctcctccaccagtttgaacttgggctccagtcctttcatttggttccattgcaacacggtc

SEQ ID NO: 657 - DNA, 663 bp, Homo Sapiens
  misc_feature (536)..(536): n is a, c, g, or t
  misc_feature (547)..(547): n is a, c, g, or t
  misc_feature (559)..(559): n is a, c, g, or t
  misc_feature (567)..(567): n is a, c, g, or t
  misc_feature (589)..(589): n is a, c, g, or t
  misc_feature (598)..(598): n is a, c, g, or t
  misc_feature (618)..(618): n is a, c, g, or t
  misc_feature (625)..(625): n is a, c, g, or t
  misc_feature (648)..(648): n is a, c, g, or t
  misc_feature (663)..(663): n is a, c, g, or t
aaaagccagattttatttctatttaaaaacaatgctcaggagacttagttccaaagacgaagatgccagggttcaatgtacaactacagcgaggtgctagcgattattgagtgagtcatggaaggctctgtagttccttggagacttccgctttttcgtatcactcctagtcttagcctcgtggttttctgcaagttctcgtcgactgtaaccgtacacagggctgtcactccagtgaggacaacaaaaaaagcacctatggctatcattgttaatccagtagagaaaaccacagagtcagaggggtcctgtagaacaacaatgagtcccagaatcacagtcgataaccctaagcaggtgacaagcagacattcagagcaagacaagcatcggaactcccgtcttctggatagattcatccatggataagtttggataggttggtacatggtgattttttgctggtacagagggcaactttttagtccaaataaggtcaggaatagtttccccaaacagccagacaccctcctggntggctttcagntgaccatttcanttgggtcnctgctgagattcggtacgatgntactgtgangcaggacgacagacgacttntagccanggtcctcgtgccgattcttggcnccagggcaaattccn

SEQ ID NO: 658 - DNA, 511 bp, Homo Sapiens
ctatagtacccttcagctaagcacacggccgccggcctccctcctctcctcatccagcactagcccccagctgtctctttcctcccggtgcccacgatcgcaccgcccagaccaccctactctccctgccccggaagttacacactgccgacaccgggacgtaacttccgggaagggcttacttccaagacagacacggaagtgctgggaggcgccgggagcccgttcggttgcgggtgtctctggccctgcggtcagccctgggaacgtcccggagagctagattcctagaggcccgattccgctagcccggaacagacaaagccagcgctcccggccgctccgcgacttaggatccgatgccggcagcgttcttggggccccggtaacgggttgggaacaataagcttgttgaacgggcttcgtttcctcgcggggggttccgttcagttcaggaaggcagggttaaaaacttcccaaaaagatcccgaatttgaattacggctgaggt

SEQ ID NO: 659 - DNA, 402 bp, Homo Sapiens
gactgtctcattttttaattcattgtcagtcatgcttggaacagcatttccactagagaatccagcgttctggcagtagcaagagtacacatctggagcatgagggactctagcatgactcgtcagatgcacaccccaagagacaagaatgtgtagtttaatgaccggcgtggaccatacgaaattgagattctaactttcctgcaggagtgctcatgagcccagaatgtgattgggataaggccatttgcccacaaatttagctttcatgtaactcctagtgtgttatatcataatgtattttgttcttcctttttaatgtaagttttgctttgggtcaatttgaattaaaaaaatcaaatctgatttaaaacatgaaaaaaaaaaaaaaaaaaaaaaaag

SEQ ID NO: 660 - DNA, 409 bp, Homo Sapiens
aatttgaagcaacagcatttctaaacaattcttaaaataaacttgttagccacatcagcgttgtgcattaaatttcacaactcatggagaggaagaaaaaaagtcttgcttaactctaaacatacaagttttagaagaattttaatgaagtgcggctcccagaacaggaaaagccttatgttaaaacaattcagtccttgagtccttggctaacaactagattgaactacctacctgacttggaagtgaagtgtcctggaaaacatattttaaaaattttaacacttttctccccttgtagaaaactttaaatttaaagtctagactatacagaccaaattcaagttaatgactatataaccaaactaagtggcagacagtgcaaaggtgaagaactgaggatttacat

SEQ ID NO: 661 - DNA, 423 bp, Homo Sapiens
  misc_feature (8)..(8): n is a, c, g, or t
  misc_feature (77)..(77): n is a, c, g, or t
  misc_feature (290)..(290): n is a, c, g, or t
  misc_feature (304)..(304): n is a, c, g, or t
  misc_feature (318)..(318): n is a, c, g, or t
  misc_feature (339)..(339): n is a, c, g, or t
  misc_feature (365)..(365): n is a, c, g, or t
  misc_feature (385)..(385): n is a, c, g, or t
  misc_feature (418)..(418): n is a, c, g, or t
tttttttnttttttgtctctttaaaatcatttttaaaaagttacaaaacaatatcattcatcatatattcttatttncctttttttaaaaaattaaagtaataaaaaagtcactttataaaataatataaaagggcttgatgggtggggccggtgggtgctgtctgagctggtgggactgaggaatccagtgcttctcttctgggctaccccctcgttgtcagggaagggacccccagggccacagatgggggatgacagcagggtcccttggtctctgggctggggctntgggggagaggggngcaggggaaagccngggggcagggagggggcagtnggggcaggaccccagtacaggggggngacgggcttgggggcccctnttccccaaaggagaccggggaaggggcccgctnggttg

SEQ ID NO: 662 - DNA, 2306 bp, Homo Sapiens
ggtttcatatgaactctcccgccacccgggaacagctggctgccaccgtttgtgttttccgagtttgtattcttgcaggtgaccaagatggagttttctggaagaaagcggaggaagctgaggttggcaggtgaccagaggaatgcttcctaccctcattgccttcagttttacttgcagccaccttctgaaaacatatctttaacagaatttgaaaacttggctattgatagagttaaattgttaaaatcagttgaaaatcttggagtgagctatgtgaaaggaactgaacaataccagagtaagttggagagtgagcttcggaagctcaagttttcctacagagagaagctagaagatgaatatgaaccacgaagaagagatcatatttctcattttattttgcggcttgcttattgccagtctgaagaacttagacgctggttcattcaacaagaaatggatctccttcgatttagatttagtattttacccaaggataaaattcaggatttcttaaaggatagccaattgcagtttgaggctataagtgatgaagagaagactcttcgagaacaggagattgttgcctcatcaccaagtttaagtggacttaagttggggttcgagtccatttataagatcccttttgctgatgctctggatttgtttcgaggaaggaaagtctatttggaagatggctttgcttacgtaccacttaaggacattgtggcaatcatcctgaatgaatttagagccaaactgtccaaggctttggcattaacagccaggtccttgcctgctgtgcagtctgatgaaagacttcagcctctgctcaatcacctcagtcattcctacactggccaagattacagtacccagggaaatgttgggaagatttctttagatcagattgatttgctttctaccaaatccttcccaccttgcatgcgtcagttacataaagccttgcgggaaaatcaccatcttcgtcatggaggccgaatgcagtatggcctatttctgaagggcattggtttaactttggaacaggcattgcagttctggaagcaagaatttatcaaaggaaagatggatccagacaagtttgataaaggttactcttacaacatccgtcacagctttggaaaggaaggcaagaggacagactatacacctttcagttgcctgaagattattctgtccaatccaccaagccaaggggattatcatgggtgcccattccgtcacagtgatccagagctgctgaagcaaaagttgcagtcatacaagatctctcctggagggataagccagattttggatttagtaaaggggacacattaccaggtagcctgtcaaaaatactttgagatgatacacaatgtggatgattgtggcttttctttgaatcatcctaatcagttcttttgtgagagccaacgtattctaaatggtggtaaagacataaagaaggaacctatccaaccagaaactcctcaacccaaaccaagtgtccagaaaaccaaggatgcatcatctgctctggcctctttaaattcctctctggaaatggatatggaaggactagaagattactttagtgaagattcttaggcagttttataaccctttttcctcaatagcctgtttcctgtttttaagattttgcctttgttgttgaaaaagggtttcactgtcaccaaggcttagtgcagtgacacaattacagctgattgcagccttgaccttcccagctcaagtgatcctcctacctcagcctcccaagtagttaggacacacaggtgtgcacctcatatccagataatttttttcaatttttttttgtagaggtggggggtctccctatgttgcccaggcagatctcagactcctgggctcaagcgatcctcacacctcagcgtcccagagtgctgggattacagttgtgagccactgtgcctggcctttttttttttttaaccttttcgtttaacttctctcttcactgcatcccaatccatctacaggcatgcacacttattaggaaaggaggtttgaggtaacaacagagactttcactatattttgctttgacagaaggaaagaggaggagtttctattaaaatctgtcacttgagtgatgtcatttaagtcctattttaggagataaaaacagctttggggactggttaaagtcccccagaaactacaataaagaacaacttttgttttaactcttaatcactttgtaattttgactcaatccttttctggaccatttttgttaataaatatcaaagtgt

SEQ ID NO: 663 - DNA, 412 bp, Homo Sapiens
tttttttttttttttttcgtcgcttggagactagctctaaatattattggtaaagacttttgcaaacttcctgcaaagctcctaccgtaccactagaacttttaaaaagtttttcgtagctttctttcctccagatctatacaaggtccattcccccgccctccccaccctccccaggttttctctgtacaaaaatagtcccccaaaaagaagtccaggatctctctcataaaagttttcttgtcggcatcgcggtttttgcgtgagtgtggatgggattggtgttctcttttgcagctgtcatttgctgtgggtgatgggatttttttttttcctttttctttttgagcgtaccgggttttctccatgctgtttcttactctcctcttttgcacccccctcgtgccgaatt

SEQ ID NO: 664 - DNA, 414 bp, Homo Sapiens
gaactttttttttttttttcattaaggtacattatatttgcatttggatcttcatcagaagtagcattgccaagcgatgaggaactttttatataagagcagaattcagagacatcatatttatcatagccttgatgcatatgcaaatctgggtcatgacgcaaaagatcctttcttttcactggatttttaggaggcttcacttcttccagtttgccatttgaactgaaataacctgaacccagtcttcggatgctcggaatggaaggtgtcatctcagggacttcaggcagctcgggaataggactgaggaggggcttcttagaagcaatgtctctttccccatataaagatttctgaacacttttctttccctttcctttcttctttctgcaactttttaaaacctgactc

SEQ ID NO: 665 - DNA, 613 bp, Homo Sapiens
ggtgatctagaggatcccaggagatagaggactgaaagatgtcttagaatctggaggcagcccctgggtcagctgctccgttttatagatggggacacacatgggccagagttggcaggtgacttgcctagggattcatgccccatcgaacaggatcttgccggtcacgcagggtgagatgtggctgctctgctgaccatggcacagaacaagtgttgcggtcagttttgtgaggtttcagctcttcatatggcaagaaaatatgggcatagtcaggtaagttctgttgtcaggaaaacatttccagaatgttctccaaacaaaaggaaactttcgtggaacttatatttttattttttatgttttgagacagggtctcactctgtcacccaggctggagtgtaatggcatgatcatagctcactgcagcctcaaactcctgggctcaagcgatcctccccgcctcaggctcctgaatagctgggaatacaggcgtgtgcaaccacacccagctaattcttgtatttttggtagagacggagtttgctgtgttgcccaagctggtcttgaactcttgggctcaagcgattctcctgcttatctcgggtaccga

SEQ ID NO: 666 - DNA, 464 bp, Homo Sapiens
gtggcggcggtggcgctgggagctcctgtcaccgctggggccgggccgggcgggagtgcaggggacgtgagggcgcaagggccgggacatggggcccgccagccccgctgctcgcggtctaagtcgccgcccgggccagccgccgctgccgctgctgctgccactattgctgctgcttctgcgcgcgcagcccgccatcgggagcctggccggtgggagccccggcgcggccgaggccccggggtcggcccaggtggctggactatgcgggcgcctaacccttcaccgggacctgcgcaccggccgctgggaaccagacccacagcgctctcgacgctgtctccgggacccgcagcgcgtgctggagtactgcagacagatgtacccggagctgcagattgcacgtgtggagcaggctacgcaggccatccccatggagcgctggtgcgggggttcccggagcg

SEQ ID NO: 667 - DNA, 435 bp, Homo Sapiens
  misc_feature (104)..(104): n is a, c, g, or t
  misc_feature (194)..(194): n is a, c, g, or t
  misc_feature (279)..(279): n is a, c, g, or t
  misc_feature (360)..(360): n is a, c, g, or t
  misc_feature (404)..(404): n is a, c, g, or t
tttttttttttttttcaccctgaagctgatttactctcattcagaactgctttcatgaaatacaaatagaacaatgtgggctggatgcggtggctcacacctanaatcccagcactttgggaggccaaggtgggcagatcgcttgagctcaggagtttgagaccagcctgggcaacacggtgaaacccatctcnccttaaaattttaaaacagaaaaatcaaaaacaaacaaaagcaaatagaacaaggtggacaaaaatctaccattagagtcaccanggataaaacctcccaggatgccgtggacactttagacgctggctctcaactcttgcagtgatgtcactctcagcccaaggngtcttcctggcatccatcagatccgcagccctggtttggaagtntgtggagggctaggaaggatacctaattttc

SEQ ID NO: 668 - DNA, 695 bp, Homo Sapiens
aggattgcacttcgacggtgttctgtcatgggccatgggttgtatggcagccttactgaggccaagcagcttatgggatgttctttattgtgtgtgatggtattggttgtttggtagataagtgggaggaaaagtactgttgctacactattacaggcatgtttgatactagcagctaacactggtcactccaaagcactgtttctataggaacattgaagctattaagatgttttgattatcctaattacataatgaccgatttgagatagaggcctttaaatacattccatgccctccccagaaaatagtctgtgggagtcagttgccttggtgccaggtatgtgttctgatgtaggtcatgagtctttctacttaatgggaagggaagaacatttgtttccaggatgactttctggccagaataccggaaagcttttaggaagcttcgttcacatgctatttaaatgcacaaaatagacagtaaggatttatctgttcagtttttcttcccagtgaattaatttcagcttatatgggtgtcttcatttgaacatgaggaatattaggttatattttcagcagtggttttttcctttgccctttaaggagtggggataatgtccacggtggcccagcctcttgctgatggaacttcctgcattgtgcctccgatgatgtgtctttctgtgctg

SEQ ID NO: 669 - DNA, 640 bp, Homo Sapiens
tacggctaggtagcgaggctgggtgttgctctgttgtctcggtagaaggccagagtcacacacggtcctaagagctgggcaccaggaagcgaaggctgatctgaagaagacacttgaatcatgggtgacgttaaaaattttctgtatgcctggtgtggcaaaaggaagatgaccccatcctatgaaattagagcagtggggaacaaaaacaggcagaaattcatgtgtgaggttcaggtggaaggttataattacactggcatgggaaattccaccaataaaaaagatgcacaaagcaatgctgccagagacttgttaactatttggttcgaataaatgaaataaagagtgaagaagttccagcttttggggtagcatctccgcccccacttactgatactcctgacactacagcaaatgctgaaggagatttaccaacaaccatgggaggacctcttcctccacatctggctctcaaagcagaaaataattctgaggtaggggcctctggctatggtgttcctgggcccacctgggaccgaggagccaacttgaaggattactactcaagaaaggaagaacaagaagtgcaagcgactctagaatcagaagaagtggatttaaatgctgggcttcatgg

SEQ ID NO: 670 - DNA, 4040 bp, Homo Sapiens
tcgacctggacctgggcaccgccagccgcctgggcacgggactgggcgggggcgctgacctcggcctaggaggcccaggatcccggagacgcccgcgccctcaggaccctgcgggtcgcacgccctccccagcttctgctgctcgccgctcttcggcagggcgaggtcaggtgcccccttctcgcctctcttctcttctcttcctcctccacttctgtgcccgcggagactccggccgccccttccgcaggggtgtagtaatctgcggagctgacagcagccccgcagccaccctgcccgaagtctccggaagcggcacgagctcaggccgccgcagccccggcgacccactgttggacctgaggagccagccctcctcccgcacccaaacttggagcacttgacctttggctgttggagggggcaggctcgcgggtggctggacagctgcggacgcgcgagggcatcttgcctggagaccgtcggctgcactcccgggctcctggctttgctctgggatcccgaggtgtccacatcagacgcatgttgactgagacctagagtcatggatgtatgcgtccgtcttgccctgtggctcctctgggggctcctcctgcaccagggccagagcctcagccatagtcacagtgagaaggcgacaggaaccagctcgggggccaactctgaggagtccactgcagcagagttttgccgaattgacaagcccctgtgtcacagtgaggatgagaaactcagcttcgaggcagtccgtaacatccacaaactgatggacgatgatgccaatggtgatgtggatgtggaagaaagtgatgagttcctgagggaagacctcaattaccatgacccaacagtgaaacacagcaccttccatggtgaggataagctcatcagcgtggaggacctgtggaaggcatggaagtcatcagaagtatacaattggaccgtggatgaggtggtacagtggctgatcacatatgtggagctgcctcagtatgaggagaccttccggaagctgcagctcagtggccatgccatgccaaggctggctgtcaccaacaccaccatgacagggactgtgctgaagatgacagaccggagtcatcggcagaagctgcagctgaaggctctggatacagtgctctttgggcctcctctcttgactcgccataatcacctcaaggacttcatgctggtggtgtctatcgttattggtgtgggcggctgctggtttgcctatatccagaaccgttactccaaggagcacatgaagaagatgatgaaggacttggaggggttacaccgagctgagcagagtctgcatgaccttcaggaaaggctgcacaaggcccaggaggagcaccgcacagtggaggtggagaaggtccatctggaaaagaagctgcgcgatgagatcaaccttgctaagcaggaagcccagcggctgaaggagctgcgggagggtactgagaatgagcggagccgccaaaaatatgctgaggaggagttggagcaggttcgggaggccttgaggaaagcagagaaggagctagaatctcacagctcatggtatgctccagaggcccttcagaagtggctgcagctgacacatgaggtggaggtgcaatattacaacatcaagaagcaaaatgctgagaagcagctgctggtggccaaggagggggctgagaagataaaaaagaagagaaacacactctttggcaccttccacgtggcccacagctcttccctggatgatgtagatcataaaattctaacagctaagcaagcactgagcgaggtgacagcagcattgcgggagcgcctgcaccgctggcaacagatcgagatcctctgtggcttccagattgtcaacaaccctggcatccactcactggtggctgccctcaacatagaccccagctggatgggcagtacacgccccaaccctgctcacttcatcatgactgacgacgtggatgacatggatgaggagattgtgtctcccttgtccatgcagtcccctagcctgcagagcagtgttcggcagcgcctgacggagccacagcatggcctgggatctcagagggatttgacccattccgattcggagtcctccctccacatgagtgaccgccagcgtgtggcccccaaacctcctcagatgagccgtgctgcagacgaggctctcaatgccatgacttccaatggacgccaccggctgatcgagggggtccacccagggtctctggtggagaaactgcctgacagccctgccctggccaagaaggcattactggcgctgaaccatgggctggacaaggcccacagcctgatggagctgagcccctcagccccacctggtggctctccacatttggattcttcccgttctcacagccccagctccccagacccagacacaccatctccagttggggacagccgagccctgcaagccagccgaaacacacgcattccccacctggctggcaagaaggctgtggctgaggaggataatggctctattggcgaggaaacagactccagcccaggccggaagaagtttcctctcaaaatctttaagaagcctcttaagaagtaggcaggatggggtggcagtaaagggacagcttgtccttccctgggtgttctgtctctccttccctcccttccttcaagataactggccccaagagtggggcatgggaagggctggtccaggggtctgggcactgtacatacctgccccctcatccttgggtccttcattattatttattaactgaccaccatggcctgcctgccctgcctccgtcccaaccatgggctgctgctgtcactccctctccacttcagtgcatgtcttagttgctgttccctcagctcccagctccacctctggggttcagcttctgtctctgctgtcccagttttgaggtttggtttcttgtttctgtctcttgctttcaggctcctccctcccaccactccccaacttcccctagcagttgcagggaagataggacgagtagcttctgacatgtgtgcctcagatctgttccacccactcacagtggttctgtttgctccagactggggctagggctaatctttgaagtttgttctttggtattgatgtgggtcagaaggaggcctcatcctaatctcactcaggcctccagggatccatgggggagtgaaaccaattctcagagaacaacccaccagagacttttaaagagaggccaggcttgggaatgggttgggagaggcatctgttcattggagcatgagtggatgccagaactgtaggttataaggcagtcactttttctctctactcccacccacacctgcctccctcttacccctgctccccacactgcaggaggatttgtctctaagaggtgctgccccaaagctccccaagcatcaatactcctagggctcaggacaagtggctcccctggccaggagagccacagccatgatacaggcctcttatggagccctggagttgttgggcaaggatgctgtcattttttgaaccaaaagacaaacaggttaaaaggaaaaaaagtaatctgaatttcccaagtgcctacgctgcatattccccttgttagatcccattttcatgttactttgtagccttggcccagaggctcaaaaaggacacaaccagtttggggaaggggtggctaaggaagatggtataggtgaaggcggctgtgtgaccactttcccccacccttcccaccctctagacaactctctcccttacctgtttttgctatggctgtaaaggtatttttcctctgccccactccctgccatacctttatcctgggatcctattttgggcctggggtgggtatacctggggctggtcttaggagggtgctaggctgcagactgccttgtactccctggacaccctcaaatgggggtttctgtgttatttcataaaattctttgaagtccaataaagcatgtaggagattttaaccacaaaaaaa

SEQ ID NO: 671 - DNA, 2344 bp, Homo Sapiens
cctccctgactgggaactcgcttggccgcaatgacctggctgatggtgtgaactcgggccagggcctgggcatcgagatcatcgggaccctccagctggtgctatgcgtgctggctactaccgaccggaggcgccgtgaccttggtggctcagccccccttgccatcggcctctctgtagcccttggacacctcctggctattgactacactggctgtgggattaaccctgctcggtcctttggctccgcggtgatcacacacaacttcagcaaccactggattttctgggtggggccattcatcgggggagccctggctgtactcatctacgacttcatcctggccccacgcagcagtgacctcacagaccgcgtgaaggtgtggaccagcggccaggtggaggagtatgacctggatgccgacgacatcaactccagggtggagatgaagcccaaatagaaggggtctggcccgggcatccacgtagggggcaggggcaggggcgggcggagggaggggaggggtgaaatccatactgtagacactctgacaagctggccaaagtcacttccccaagatctgccagacctgcatggtcaagcctcttatgggggtgtttctatctctttctttctctttctgtttcctggcctcagagcttcctggggaccaagatttaccaattcacccactcccttgaagttgtggaggaggtgaaagaaagggacccacctgctagtcgcccctcagagcatgatgggaggtgtgccagaaagtcccccctcgccccaaagttgctcaccgactcacctgcgcaagtgcctgggattctaccgtaattgctttgtgcctttgggcaggccctccttcttttcctaacatgcaccttgctcccaatggtgcttggagggggaagagatcccaggaggtgcagtggagggggcaagctttgctccttcagttctgcttgctcccaagcccctgacccgctcggacttcctgcctgaccttggaatcgtccctatatcagggcctgagtgacctccttctgcaaagtggcagggaccggcagagctctacaggcctgcagcccctaagtgcaaacacagcatgggtccagaagacgtggtctagaccagggctgctctttccacttgccctgtgttctttccccaggggcatgactgtcgccacacgcctctgtgtacatgtgtgcagagcagacaggctacaaagcagagatcgacagacagccaggtagttggaactttctgttccctctggagaggcttccctacacagggcctgctattgcagaatgaagccatttagagggtgaaggagaaatacccatgttacttctctgacttttagttggtctttccatctatcactgcattatcttgctcattcttcagttctctactccctcttgtcagtgtagacacaggtcaccattatgctggtgtatgtttatcaaagagcacttgagctgtctgaagcccaaagcctgaggacagaaagaccctgatgcaggtcagcccatggaggcagatgcccttcctgggcctgggggttttccaagccctcagctggtcctgaccaggatggagcaagctcttcccttgctcatgagctcctgatcagaggcatttgagcagctgataacctgcacaggcttgctgtatgacccctggccacagccttccctctgcattgacctggaggggagaggtcagccttgacctaatgaggtagctatagttgcagcccaaggacagttcagagatcaggatcagctttgaaggctggattctatctacataagtcctttcaattccaccagggccagagcagctccaccactgtgcacttagccatgatggcaacagaaaccaagagacacaattacgcaggtatttagaaggagagggcaaccagaaggcccttaactatcaccagtgcatcacatctgcagcactctcttctctattccctagcaggaacttctagctcatttaacagataaagaaactgaggcccacggtttcagctagacaatgatttgccaggcctagtaaccaaggccctgtctctggctactccctggaccacgaggctgattcctctcatttccagcttctcagtttctgcctgggcaatgccaggggccaggagtggggagagttgtgatggaggggagaggggtcacacccaccccctgcctggttctaggctgctgcacaccaaggccctgcatctgtctgctctgcatatatgtctctttggagttggaatttcattatatgttaagaaaataaaggaaaatgacttgtaaggtc

SEQ ID NO: 672 - DNA, 6378 bp, Homo Sapiens
cccattactgttggagctacagggagagaaacaggaggagactgcaagagatcatttgggaaggccgtgggcacgctctttactccatgtgtgggacattcattgcggaataacatcggaggagaagtttcccagagctatggggacttcccatccggcgttcctggtcttaggctgtcttctcacagggctgagcctaatcctctgccagctttcattaccctctatccttccaaatgaaaatgaaaaggttgtgcagctgaattcatccttttctctgagatgctttggggagagtgaagtgagctggcagtaccccatgtctgaagaagagagctccgatgtggaaatcagaaatgaagaaaacaacagcggcctttttgtgacggtcttggaagtgagcagtgcctcggcggcccacacagggttgtacacttgctattacaaccacactcagacagaagagaatgagcttgaaggcaggcacatttacatctatgtgccagacccagatgtagcctttgtacctctaggaatgacggattatttagtcatcgtggaggatgatgattctgccattataccttgtcgcacaactgatcccgagactcctgtaaccttacacaacagtgagggggtggtacctgcctcctacgacagcagacagggctttaatgggaccttcactgtagggccctatatctgtgaggccaccgtcaaaggaaagaagttccagaccatcccatttaatgtttatgctttaaaagcaacatcagagctggatctagaaatggaagctcttaaaaccgtgtataagtcaggggaaacgattgtggtcacctgtgctgtttttaacaatgaggtggttgaccttcaatggacttaccctggagaagtgaaaggcaaaggcatcacaatgctggaagaaatcaaagtcccatccatcaaattggtgtacactttgacggtccccgaggccacggtgaaagacagtggagattacgaatgtgctgcccgccaggctaccagggaggtcaaagaaatgaagaaagtcactatttctgtccatgagaaaggtttcattgaaatcaaacccaccttcagccagttggaagctgtcaacctgcatgaagtcaaacattttgttgtagaggtgcgggcctacccacctcccaggatatcctggctgaaaaacaatctgactctgattgaaaatctcactgagatcaccactgatgtggaaaagattcaggaaataaggtatcgaagcaaattaaagctgatccgtgctaaggaagaagacagtggccattatactattgtagctcaaaatgaagatgctgtgaagagctatacttttgaactgttaactcaagttccttcatccattctggacttggtcgatgatcaccatggctcaactgggggacagacggtgaggtgcacagctgaaggcacgccgcttcctgatattgagtggatgatatgcaaagatattaagaaatgtaataatgaaacttcctggactattttggccaacaatgtctcaaacatcatcacggagatccactcccgagacaggagtaccgtggagggccgtgtgactttcgccaaagtggaggagaccatcgccgtgcgatgcctggctaagaatctccttggagctgagaaccgagagctgaagctggtggctcccaccctgcgttctgaactcacggtggctgctgcagtcctggtgctgttggtgattgtgatcatctcacttattgtcctggttgtcatttggaaacagaaaccgaggtatgaaattcgctggagggtcattgaatcaatcagcccggatggacatgaatatatttatgtggacccgatgcagctgccttatgactcaagatgggagtttccaagagatggactagtgcttggtcgggtcttggggtctggagcgtttgggaaggtggttgaaggaacagcctatggattaagccggtcccaacctgtcatgaaagttgcagtgaagatgctaaaacccacggccagatccagtgaaaaacaagctctcatgtctgaactgaagataatgactcacctggggccacatttgaacattgtaaacttgctgggagcctgcaccaagtcaggccccatttacatcatcacagagtattgcttctatggagatttggtcaactatttgcataagaatagggatagcttcctgagccaccacccagagaagccaaagaaagagctggatatctttggattgaaccctgctgatgaaagcacacggagctatgttattttatcttttgaaaacaatggtgactacatggacatgaagcaggctgatactacacagtatgtccccatgctagaaaggaaagaggtttctaaatattccgacatccagagatcactctatgatcgtccagcctcatataagaagaaatctatgttagactcagaagtcaaaaacctcctttcagatgataactcagaaggccttactttattggatttgttgagcttcacctatcaagttgcccgaggaatggagtttttggcttcaaaaaattgtgtccaccgtgatctggctgctcgcaacgtcctcctggcacaaggaaaaattgtgaagatctgtgactttggcctggccagagacatcatgcatgattcgaactatgtgtcgaaaggcagtacctttctgcccgtgaagtggatggctcctgagagcatctttgacaacctctacaccacactgagtgatgtctggtcttatggcattctgctctgggagatcttttcccttggtggcaccccttaccccggcatgatggtggattctactttctacaataagatcaagagtgggtaccggatggccaagcctgaccacgctaccagtgaagtctacgagatcatggtgaaatgctggaacagtgagccggagaagagaccctccttttaccacctgagtgagattgtggagaatctgctgcctggacaatataaaaagagttatgaaaaaattcacctggacttcctgaagagtgaccatcctgctgtggcacgcatgcgtgtggactcagacaatgcatacattggtgtcacctacaaaaacgaggaagacaagctgaaggactgggagggtggtctggatgagcagagactgagcgctgacagtggctacatcattcctctgcctgacattgaccctgtccctgaggaggaggacctgggcaagaggaacagacacagctcgcagacctctgaagagagtgccattgagacgggttccagcagttccaccttcatcaagagagaggacgagaccattgaagacatcgacatgatggacgacatcggcatagactcttcagacctggtggaagacagcttcctgtaactggcggattcgaggggttccttccacttctggggccacctctggatcccgttcagaaaaccactttattgcaatgcggaggttgagaggaggacttggttgatgtttaaagagaagttcccagccaagggcctcggggagcgttctaaatatgaatgaatgggatattttgaaatgaactttgtcagtgttgcctctcgcaatgcctcagtagcatctcagtggtgtgtgaagtttggagatagatggataagggaataataggccacagaaggtgaactttgtgcttcaaggacattggtgagagtccaacagacacaatttatactgcgacagaacttcagcattgtaattatgtaaataactctaaccaaggctgtgtttagattgtattaactatcttctttggacttctgaagagaccactcaatccatccatgtacttccctcttgaaacctgatgtcagctgctgttgaactttttaaagaagtgcatgaaaaaccatttttgaaccttaaaaggtactggtactatagcattttgctatcttttttagtgttaagagataaagaataataattaaccaaccttgtttaatagatttgggtcatttagaagcctgacaactcattttcatattgtaatctatgtttataatactactactgttatcagtaatgctaaatgtgtaataatgtaacatgatttccctccagagaaagcacaatttaaaacaatccttactaagtaggtgatgagtttgacagtttttgacatttatattaaataacatgtttctctataaagtatggtaatagctttagtgaattaaatttagttgagcatagagaacaaagtaaaagtagtgttgtccaggaagtcagaatttttaactgtactgaataggttccccaatccatcgtattaaaaaacaattaactgccctctgaaataatgggattagaaacaaacaaaactcttaagtcctaaaagttctcaatgtagaggcataaacctgtgctgaacataacttctcatgtatattacccaatggaaaatataatgatcagcaaaaagactggatttgcagaagttttttttttttttcttcatgcctgatgaaagctttggcaaccccaatatatgtattttttgaatctatgaacctgaaaagggtcagaaggatgcccagacatcagcctccttctttcaccccttaccccaaagagaaagagtttgaaactcgagaccataaagatattctttagtggaggctggatgtgcattagcctggatcctcagttctcaaatgtgtgtggcagccaggatgactagatcctgggtttccatccttgagattctgaagtatgaagtctgagggaaaccagagtctgtatttttctaaactccctggctgttctgatcggccagttttcggaaacactgacttaggtttcaggaagttgccatgggaaacaaataatttgaactttggaacagggttggaattcaaccacgcaggaagcctactatttaaatccttggcttcaggttagtgacatttaatgccatctagctagcaattgcgaccttaatttaactttccagtcttagctgaggctgagaaagctaaagtttggttttgacaggttttccaaaagtaaagatgctacttcccactgtatgggggagattgaactttccccgtctcccgtcttctgcctcccactccataccccgccaaggaaaggcatgtacaaaaattatgcaattcagtgttccaagtctctgtgtaaccagctcagtgttttggtggaaaaaacattttaagttttactgataatttgaggttagatgggaggatgaattgtcacatctatccacactgtcaaacaggttggtgtgggttcattggcattctttgcaatactgcttaattgctgataccatatgaatgaaacatgggctgtgattactgcaatcactgtgctatcggcagatgatgctttggaagatgcagaagcaataataaagtacttgactacctactggtgtaatctcaatgcaagccccaactttcttatccaactttttcatagtaagtgcgaagactgagccagattggccaattaaaaacgaaaacctgactaggttctgtagagccaattagacttgaaatacgtttgtgtttctagaatcacagctcaagcattctgtttatcgctcactctcccttgtacagccttattttgttggtgctttgcattttgatattgctgtgagccttgcatgacatcatgaggccggatgaaacttctcagtccagcagtttccagtcctaacaaatgctcccacctgaatttgtatatgactgcatttgtgggtgtgtgtgtgttttcagcaaattccagatttgtttccttttggcctcctgcaaagtctccagaagaaaatttgccaatctttcctactttctatttttatgatgacaatcaaagccggcctgagaaacactatttgtgactttttaaacgattagtgatgtccttaaaatgtggtctgccaatctgtacaaaatggtcctatttttgtgaagagggacataagataaaatgatgttatacatcaatatgtatatatgtatttctatatagacttggagaatactgccaaaacatttatgacaagctgtatcactgccttcgtttatatttttttaactgtgataatccccacaggcacattaactgttgcacttttgaatgtccaaaatttatattttagaaataataaaaagaaagatacttacatgttcccaaaacaatggtgtggtgaatgtgtgagaaaaactaacttgatagggtctaccaatacaaaatgtattacgaatgcccctgttcatgtttttgttttaaaacgtgtaaatgaagatctttatatttcaataaatgatatataatttaaagtt

SEQ ID NO: 673 - DNA, 416 bp, Homo Sapiens
ctagctagcattctctaaacaggtggttagaagcggtggataccaggcttctgacgatcaaattgtaaaaaaaggggtcaggtgttatctccagactgtggaattagattgtagtagaatatattttacctacaaacattttgacctcacccaagagtaaggctctcttttttttcttttttaatgaaaaaagaaaggagaatatttgctatcttatcttaaaaaaatagatccttaggtgattacaattttaaaataagaattgagagcccttactatgcacagtcctttaagttcataaagcttgatcccaactctgggagatggggcaggacaggtgttaatgtccctgcctttagcagatggaagaaaccaggctctgagaggagaagctacttgcccaaggccttgaaggc

SEQ ID NO: 674 - DNA, 388 bp, Homo Sapiens
  misc_feature (362)..(362): n is a, c, g, or t
  misc_feature (371)..(371): n is a, c, g, or t
  misc_feature (382)..(382): n is a, c, g, or t
ggagcgggtgcgcgcgcagcgggccggcagtggcggcggagatggaggagggaggccgggacaaggcgccggtgcagccccagcagtctccagcggcggcccccggtggcacggacgagaagccgagcggcaaggagcggcgggatgccggggacaaggacaaagaacaggagctgtctgaagaggataaacagcttcaagatgaactggagatgctcgtggaacgactaggggagaaggatacatccctgtatcgaccagcgctggaggaattgcgaaggcagattcgttcttctacaacttccatgacttcagtgcccaagcctctcaaatttctgcgtccacactatggcaaactgaangaaatctangagaacatggnccctgg

SEQ ID NO: 675 - DNA, 148497 bp, Homo Sapiens
gatccagggtgcctctctctgttggtgatcacaccaattcttcccaggttggcacctccagtcaccatacacaggttaccagtgtcgaacctgatgaagtcagtaatcttgccagtctccaaatcaatctgaatggtgtcattcaccttgatgaggggatcagggtagcagatggtacgagcatcatgagtcaccagatgagggattccttttgtgcgcacaaatattttttctcacttttcacaacttgtacttggcctcctcaggtgtaatacgatgtacagcaaagtgacccttggtgtcacagatcagacagaaattctctcccatcttgtcaatgctgatgacatccatgaatccagcagggtaggttatatcagtgcggaccttgccatcgatcttaatgaaccgctgcatgcaaatcttctttacttcctctcctgtcagggcatacttaagtctgttccttatgaaaatgatgagggggagacactctctcaacttgtggggactggtggatggatgaggagcaaacacaccagtcaatttatccagcatccaatgctttggagctgctacctgctttagatgcttcttgggaccacgagccatggctacgttaggcacagaaaaagaaaaaataacaattttaaaaattagccaggcatagtggcacaagcctgtagtcctaactactcaggaggctgaggcaggaggattacttgaacccaggagtttgaggctgtagtgagctatgactgcaccactgcactccagcctggacaacagagatagaccctgtctctaaaaaaataaaaaagaaaataatgaggatatagaagaattgaacaacaccttcaaccaacaggatctaacagaacaaacaaccctataacagcagaatacatgtgcttttcaagtgcctagggagcattcaccaagattaaccatgtcctggattttaaaccaatctcaacaaatgctaaaaaaaaataataaaactagaaatccctaatcactgccctcttttccaagctgcctgtgactcttacccagatgttctcaatacataagctttcaacaggggagaatgatagaaattactggagaacccccattccaggtcactgaggcacatgaccttctactaaagaaataatttccagtaaaaggatacaataaagggaatagatgttcccactaggcctggattaatgagtactctatcttggagaaaagtgattatttccagagctgcctctggcattcttcctccacccagaagtgatgctgtgagaagtgaaattacttataaatcagtagtgcccaaagcactttataaaggaggtcccacatgtaagctccaccaagtataaataataacactaataacacctccctcatcttgtctttatatctgggtcttggaggatcaaagccatccgagaggtacagcttcaaaggcgtctccttcccagatccaggaatgggcgcactccaacaggcccctacatccttggcttccacatttcacaactgttagaggctccaaagcatttacagtggttgatagagtctttctgaatatgatacctcttttataaaattaatggcactatttccggtggtggcatcagcaaagaaactccttttcaagggcagcgtgtccctcccattgtttgattttctgccatccctttaagtgccttaatggaatgcttgtacgaataaagttgactgccaacaaattttgctttgaatatcttttacatttcaaggcacccctggaaataatcggagactatgggagacatggaattagggagctgtgggaaagcagggttgacagtgtcatctcaagatttggtggacttcattattcagtggccagaagtagggaggaggggagtctggggcctgagaagagggttgccctgatgggctggtactggctctggagtcactgactgtgccagggaccagatgcctgcagaagcatggttcagcgttatacctgcagggagacgaatcacccaagagtgtctaaaaccatcctcatagggatttgtggaacttcaaacttgagagagatgatttcgggtatctggtggaagaaatttctaagcagcaaagcattcaagaggaagcagagcatggaaatttggaaaatttgcagcctgaacatggaatagaaaagaaaaacccattttctggggagaaatttaagcctgctgcagaaatttgcataagtaacgaggagccaaattttaacctccaaaacaatggggtaaggtctccacggtatgtcaaaaaccttcatggcagcccctcccatcacaggtccagaggcctaggagggagaaatggtttcctgggctgggctcagggacccctgctgtgtgcaaaatagggacttggtgccctgcatcccagctgcttcagctgtggctaaaaggggccagagtacagctcagtctgtagctttagagggtgtaagcccaagccttggcagcttccacatagtgttgagcctgcaggtacacagaagtcaagaattgaggtttgggaacctctgcctagatttcagaggatgtatggaaatgccaggatgttcaggcagaagtttgctgcagtggtggagtcctcatggagaacctctgctagggtagtgagggagggaaatgtggggtcagagcctccacacagagtccttaatagggcactgtctagtggagctgtgagaagagagccaccatcatccagactccagaatggtagatccaccaacagcttgcaccatgtacctggaaaagccacagaaatgcagtgccagtttgtgaaaacagccaggagtaggggacagtaccctgcaaagccacagaggtggagctgcccaaggctgtgggaacttacctcttgcatcagtgtgacctggatgtgagacatggagtcaaaggagatcatttgggagctttaaggtttaatgactgccctattggatttcagatttgcatggtgtctgtagccccttagttttggccaattcctctcatttggaatgggtatatttacccagtgcctgtacccccattgtatctaggatgtaactaacttgttttgattttacaggctcataggaggaagaaacttgccttgtctcagatgagactttggatttggacttttgggttaattctggaaaaagctaagactttagggtactgttggaaaggcatgattgtgttttaaaatgtgaggacataagatttgggaggggccaggggtggaatgatatggtttggctttgtccccactcaaatctcatcttgaatagtagttcccataatccccatgtgttgtgggagggatgcagtgagaggtaatcgaatcatcggggtggtttctcccatgctgttcttgtgatagtaagtgagttctcacaagatctagtggttttataaggaccatcccttgtaagggttttccccctttgttcagcacttctccttcgtgcctcatgtgaagaaggatatgtttgcttccccatccaccatgatcgtaagcttcctgaggtctccccagccctgcagagccatgagacaattaaacctctttcttttataataataataataataaaaccatcctcatagggttaacaagaatttagatgccaggtttggggcagaaatatagttataattaagcattaatcaggctgcactctggcccacttccttaaactgaaagtcatgcagctcaagatactgactgtttaaatcccattttccccatagataggacttctgatgttagaatcattaggcttttgtttaagaattgctcaagatattcttcatatcctgaattccatcaggaaaggctgatgccaatgagtttgaagaccccacgaggaaccaaatcagcatgagaatgcagtttcttcatctccctgtcctatgacttcaccctgcactcttccaccaatcaacaatccccacatctcagccctttccaaagcccttaatatccgtagctccaaattccttaggttggtggatttgaggtttcttcccacctcctcatttagctctcctatgattattagactttttctctgcagcaatcccccttgtcttgttatattgacttgccaggcattgggcaaacgatcctgttacatatccactgagccatatgtggaagcctcggccagtgccagtcaatatcaaggaatttggtccatttctagataagaatttggggttgttgattagttgggataaggggaaggaaatcatcaggatgtggaaactgcattctttggtgactcagctcctgtgaggtccttaagaccagctggcatcagtagtttcattggtatgcagaaactgaaagagtatctcaaatggaaaagttaatgttttataatgttgaagttgttatctatagagcagctaaggggaaggatcatctcgtaacagggttcatgtaatcctgagtcgataggccccagacagctgtgaggaagtggatcagagagcaagcggacctcatggtcaatgctgagtgtgctgcaagcttggtttatcttcatttctcccccttccttctttcctgattaattttataaagtctatagggacagtttcaccacttagatgttcccatccctcctctgctgtcatctctctaggctggaaccccattgtgcatgggctcagcataccctttggccagataatgggaatggtggtctgttcccacctgctcccacctctgtagcgacttttctctagcaattaacccctctctttcctgtgccatcaactgtccccataaaccaactcctccccagcattcaaacatctcccccatcttaaaaaaacaaaactgatcttgattcccattctggaagcggccccttcccctcctccccaaataactaaacttacttaagagtgccctgcatccagcctgcattccctcctcacccagcagagctgcacctgtggaaagcaggctgcagctctcgtgttccaccgcaccctgctgcggccctgtccacagaccatctgattggcacccgacagtgtacataccccaggactcattaccctcctccttgaaacttcctctgctgcgttcgttgctgccatgttttgtgttcttcctgcctctctggtttcttcttcagatgcatggctggtttcctctctgcgcatgagcttcagtcctgctctctctctcttttcttttgctccttagcagtactttatccctgggttccaagtgtcaccaatgtgctgacaaccactgggcttaaatttccagtgcagccaatcccctgagctctgaacgcatcctgccgactgcctgcctcgcatcttccactggaaaatggcacttctctccacgtgagtgtgaacctacactcctaccttccctcacccctgcacccaaaccctcagcaacccctgcacctgctccctctgaaatctcctctgccagcggcttctccttacatccactgtcactactcatgtccagagcaccggcatctctccctcgacctccacaagcctcccagcttccactcctgccttctccaaaccccacacagcccttgagccacccatggtcatcatgtctctttcttgcccgaagtcttcagtggatttccactggctttcactgagagctctaagtcctgaacatgacctccgaggcctggcatctgctgccatgggccccctttcttgctgttctcatgtccttacccctttgtcactgtgtccagccacactgacctcctttcaattccctgaactcacagagccctttctcctggtcaggacggtgctccctctgctccctctgcttggagcagcctccctcccattctctggccagctcacaccaactcctctctaggtcagtgccataaatacccatccccagggaggccttccctccaccccagcatgcatctcaccttccattgtgatctcttgtcacacctcagcttctccctctcagcatgtattacattttgcattctgaaatgttcatttgtgtgaatcattgtttaatatctatttcttccacttaacaacaacctaagggcaggggtgatcctgtctgttttcaccatgactataaccccctagctttcagaatagaaataggcacagagtaggggttcaataaatttttttgaatgagtactaagtattctgcagtaacagataaacacacagacacacagatgcttattaaatacaaaagcctgattgcctgttgtagctgttggtgacccacccaatctctttcactgttctggagtccgcatcctcccagctgctgtgtgtatcggcttcaaatgtctcacagctgccctgcttctttggggagctgccctcagcagaggagagctgcctggctggcaaccctcagcgccatggatggcaggcctgccccttgcctcccggtagggtcagcaggacagggaaggggaaggcagccctgcagtgctgttcatgctccagggttccctatcagtaggctgacgctagacatgcctaagcccacttctctccctctcgtgctcccataaccagtatttcttgagagttctcccaccgtaagccacttgaacaagaaactctgaagtggggcatggtggctcgtgcctgtaatcccagcaatttgggaggctgagatcatttgagtggatcgtttgagcccaagagttggagaccagcctaggcaacatagtgagacccctgtctctacaaaaaaaattttaaaaattaggtgggcatagtggcacatgcttgtagtcccagctacttgggaggttgaggtgggggatcacttaagcccagaaggtcaaagctgcagtgaaccatgatcatgccactgtacgtcagcctgcaacagagtgagactctttattaaaagaaagagagagaagagagacacagagagagagaatcaagaaagcaagagagaaagaagagaagagaagagaaaagaagggagggagagaggaaggaaggaaggaaggaaaaagaaactatgtcccaggttctgcttctaggaagtccagtaaaaaacacttataatggggaagaaaatatatgtggcatcagggatgagagggagaaattaaacgaaacaaaatgagagaaaagtcttgtaccagcgcatgtgcctaagaattgaggtgaatgagtcaaatctcgcatcttttatccttccttggaattattgaattaataaatgggagaagagaaagaaggagtggaagagaggagagcagagtggaggacagcagaggatttctcttttagtgcccctaggaggtcatgatgtgtcccatgaagccagaaggggtctgctggtccccaatcccttaatggaatctcagccgcttctaaaggaggaaaaatgaacattagttccctaagcctcctttgccttggagccaaccagcatgccctgtgttctacaacataatcctttgctaatcactagctagggcactaggtaaagcagtttttcaaatcctggctggagctcatggcatttgagatatacaaatatgttgccatggtgacacactgacagattaattactgaaacctccaggagtaaagctgctttaatggtgtaaccttagtggataggagcttgtgggggggtgggggggtgggggcgtgtagtgattcacagccctctcagcacaaagttggggccagcagatctggggctagaggtaggtggagcagccacaacccttacctcacaccaacatttcctggagccctgggcttcctgagtctgtcctgcctctagaaatggaatctctaaccccaaagcttgtccttgaaaaatacctgcatcatccttttatccacgcctttgccagtcattatgcagcctgcatctctgcatgattaatgagcaaatcctcacagccactcccacttcccccaccactaagctcttcttagctggaaaatcctctgaagctattggctagcagggctctgcccaacaagagtattaatgttaggcatatgattcctcaaaggaagagagaagaaaaatattcggggacaaacacaatggatgcagatctcatcagggaacccaaggtagaatctagcccacatttttaagttaacaagattagaaaattatgtaattctcacaaataagcttgtcccttaaaatccacaatagacttttacaaattcaggtgggttctttggcccaggctggagtgaaatggcataatcttggctcactgcaacctccacccactgggttcaaacgattctcctgcctcagcctcccgggtagctgtgattacaggcatgcaccaccatgcccagctaatttttgtatttttagtagagatggggttttgccatgttggccagactggtctctaacacctgacctcaggtgatccgcctgcctcggcctcctgaagtgctgggattacaggcatgagccaccttgcctggcctcaggtgggttcttatatgagccttggtggctctcatttctcccaaatgatgagctgagatgaaggcatatatatctttgactggttatggagttgagatattcacagtaagtttgcaataataacagaagcgactattaccacacctcagtggaaacggagttttccaaaaagccacaatttcagataaacctgactctaagtgggaaaagaaataagacattaaaggagatatttcgaagctttagaaaggcattcgaaaagtttttgagcccatctaacaagcatctctttgtgttttgtctcctttctctaatatttaaatgtaattttgatgtctgccagattaaattatccattgaccaatttatgtcattaaacttaaatgctataattatccttaataagtataactactagcctgtttttgcttaatggttgtaaagttttatgccttttaataatcctcctacaggtttgaagtttgtgtttctcagatagctgaaattctgctctgcatagtgtcaaaccagatcaaagagtctcgctttgttcacgagaacaatatgagcttgaaaatgcggggttggaagaaaaaacacaccagaaaatgatgttctttcaagaaaactggcaaaccaagaaaatcctacacaaattttgcaaaaagaaggctaatctagaatacgtttttctctacatacacagttcaagtgcaattaaaaaaagaatttttttcagcattaagtttatataaaatgggccctctttttattccatgtgcttcataatcttctttctcagggatatttagagttggatttttgcagatgatgccctgttctcttcatgtcacagcatgcgtttttgttttttgttttgagagccagggtctgcccaggcgcggtgattcatgtctgtaatcccagcactttgggagtccaaggtgggtggattgcttaagctcaggagttcaagaccagcctgggcaacatggcaaaacctcatctctactaaaaatccaaaaattagccaggcatggtggtgcacgcctcccagctactctggtggctgaggcaggagaattgtttgaatccgggaggtggaggctacagtgagccaagatcgcaccatttcaccccagcctgagcaacagagtgagaccctgtctcaaaaaataaataaaataaaatagggagttggggtctggctctgtcacccaggccagagtacagtaatgcaatcatagctcacagcagcctcaaattcctgggctcaagcaatcttcctgcctcagcctctcctgtagcttgcattacaggcatgagccatctcacccagaaaacaacatacacttttcattccagattttacatctctccactctgggttatttttttgctttggttctatctattgaggtgtcttattttcaactaagtgttgtgtttaggaacttctttttgtgggtgaatgtttatactaactcccatccttaacccagagtgggattaagacttttttcttcttttttttccccttacttatatggcatcaaaaacaaaagcaaaaataaatcttggagtagtacagagaaacctgattccaaaaggtcatcataccagcctgggtaacacagcaaagctctgcctccacgacaaatacaaaaattagctaggtgtggaggtacacacctgtagtcctagctctctgggaggctgaggtgggagaatcgtttgagtctaggagtttgagggtgcagtgagctatgatcagaccactgcactccagcctaggcaacagagtaagaccctgtctcatacaaaaacaaaaaagattattgtaaaggtgaaggaaactggctattacaataggaagaactctctaaccataagatctgcaaatgtctcaagagttaagcaaaaaggggttttcttttatagggaagagaaaatgaggctagaaagtggggtaaatggaagtgtcatgatcagaaaacagatcagcagccgggcacggtgggtggctcacgcttataatcccagcagtttgggaggccaaggcaggcagatcacttgaggccaggagtttgagactagcctgaccaacatggtgaaaccctgtctctactaagaatacaaaaaaattagccggccatggtgatgggcctctgtaatcccagctacttcagaggctgaggcaggagaatcgcttgaatccgggaggtggaggctgcagtgagccaagatcatgccactgcactccagcctggacgacacagtgagactccatctcaaaaaaaaaaaaaaaaaaaaaggaaaagaaagaaaagaaaaaagagagtagatcagagaaggttgcaccccaggtgggcctaggctcaggaggggctgctgaggaagagcttgttctggcccaggctgagagtgggccaagttcagggccctggggaaaggagattttgattaagaagggttttgttttgtttgatcaatagggacctgctgctcagccaatcatttatgaggtaaagaacaggaatttggcaggttcgtatctggctttttctaggtaaacaagggcaggggtcccaagcccctgggccacggaccagtaccagtctgtggcctgttaggaaccgggccccacagcaggaggtgagcagcgggccagccagcactaccaccgagctccacctcctgtcaggactttaacttctcacaggaccacgagccctattgtgaactgtgcatgggagggatctaggttgcacactccttatgagaatctaactaatgcctgatgacctgaggtagagcagtttcatctggaaaccactgcccccacccatctgtggaaaagttttcttccatgaaactggtccctggtgccaaaaaggttgagaactgttgaactaaggggcatccatgactcttatctatgttatatgtggaaggggggggggttcatcttcgcagtacatgccttttgtttcccagaacacaaaagtagggggatttcttaaccctcactcttttccaagagttacagggtactcttaggtaaggtttagtgttgtcagtgaccacattcaagaccagacttcaagaggcccagaacacattatgtgatggtttgctggtctagaagcaaaagagagcatctatgttggcagaaagagtgaacagggttgtcctatctggggcatcagcctttactcatgcctcttctgcctcctccgtagttccacagaagcaacaatgagctacctgtgaactggagaaaactgacaatctagattctttccattctgcagcctactttctataaccttattagttcataacacaataatctcattttagaatttcatttatctctcattagtcactgctttcagaaaatagcaatttacctgtctataaaaataatgcatttttatcattgactatgtagacataatgggaaggataacatcagcaagatggccaagtaggaagccctggactctccttctcccagtggacacagctcaacaacggtgcatggacaaattcccttttcgaggaattcagaaactcattgagaagctcctgcgccctgcatgaacatgaaaccagccgcattgaagccagtaggaaaattcaaaacacactctcattgtaatccctaccccaacacatcaccataccatcagaaggaaaccatctgttcccagcttctccctaggagaagagttgaagcaggtacccagccttccaacttttccaggggctgctcaagggatagatttctgtctcttctgtcttagagcactgatgagacctagtaaaatcaagatgctttgggggcctctaagaacaaagcacaaaggtttgagaggcccccaaaatctctgggcagactgactgatgaggatttcctcctgcataagttcagtcgtgaaggtagggaaaggtggctgcattttctaatgcatagatactgacacaaaaactcaaggaaaatgaagaaacagggaaatatattcggaacaaagcaacaggataaatctccggaaacagtctcaatacgatggagattcaagcacgcctcattttattgcactttattgcattttgcagacactgtgtgtgttttttgtttgttcgtttgtttacaaattgaaaaaaaaaaaaagactctgcattaagcaagtctagcaatgccattttcccaacagcatgtgctcacataatgtctctgtgtcacattttggtaattcttacactatttcaaacattgtcattattcttatgtttttcatggtgatctgtgagtgataatctttgatgttactgttgtaattgttttggggtaccacaaaccatacccacataagatggcaagtttaattgataaatattgtgtgtgttctgactgctccactgaccagccattctcccatctatctccctctactggggcgtccctactccctgagacacaacaatattgaaattaggccaattaataatcctacaatggcctctaaatgtccaagtgaaaggaagagtcccacatttctcactttaagtcaaaatctagaaatgatcaagcttagtgaggaaaggatgacaaaaaccaagacaggctgaaagctaggcctcttgtgccaaacagtcagccaagttgtgaatgtacaggaaaagttcttaaagcatattaaaagtgctactccggtaaatatataaatgataataaagcaaagcagccttattgctgatatggtgaacgtttgagtggtccagatagaagatcaaagcaggaaaaacattcccttaagccacagcctaatctagagcaaaatccaaactctcttgaattctttgcaggttcagagaggtaaggaagttgcagaagaaaagttggaagctaacagaggttggttaatgaggtttaagtaggaaaactgtctctgtaacataaaagtgcaaggtgaaacagtaagtgttgatgtagaagctgcctcaagttatccagaagataattaagataattgatgaagatggctacactaaacaacagattttcaatgtagatgaaaaagctttctattggaagaagataccatctaggactttaacagctaaagaggagaaagccaatgcctggcttcaaagtttcaaaggatgggctggactcttgttatggactaatgcagctagcgactataagttgaaagcaatgcttatttactattctgaaactcctagagcccttaagaattatgccaaatctactctgcctgtgctctaaaaatggaacagcaaagactggatgacagcacgtctgtttacagcatggtttactgaatatttaagcccacagttgagacgtactattcagaaaaagagattgttttaagtattactcctcagtggcaatgttcctggtcaaccaagagctctgatacagatgtacaaagaaagtaatgttgttttcatcctgctaacacaacattcattcttcagcccatggatcaaggagcaatttcaactttcaagacttattatttaagaaacatattttgtaagactatagctgccatagatattgattcctctaatggatctgtgcgaactaaatagaaaatcttctggaaagaattcaccattctagatgccattaagaagatttgtgatttatgggagaaaatcaaaatagcaacattaactggagtttggtaggatttgattccaaccctcatggatgactttgagtgtatatctgtcctttcccacattgctgtaaagaaatacctgagactgggtagtttataaagagatttaattggcttatgattctaaaggctgtacaggaagcatagtggcttctgcttcttcaggaggactcaggaagcttccaatcatggtggaaggcaaagggggagtgaggcagttcatatggctggagtaggaggaagagagaaagtggggaggtgccacatgcttttaaacaaccagatctcatgagaactctatcatgaggacagtactagggggatggtgctaaaccattagaaaccatccccatgattcaatcacctcccatgagtccccacctcccatcaggcctcacctccagcatttggggattatatttcaatatgaaatttgggtggggacacagattcaaactgtatcattctgcccctggcccctcccaagtctcatgtccttttcacatttcaaaacacaatcatctcttctcaacagtcccctaaagtcttaactcattccagcattaactcaaaagtccatagtccaaagtctcatctgagacaaggctagcctcttccacctataagcctgtaaaataaaaacaagttagttacttccaagatacagtggtgatataggcactgggtaaatactccattccaaaagacttgcccccatgattcaattacctcccaccaggtccctcccacaacatgtgggaattcaagatgagatttgggttgggacacagccaaaccatattgttcactcctgacccctcccaaatctcatgccctcacatttcaaaactaatcatgccttcccaacagtccccccaaatcttaactcatttcagcattaactcaaaagtccacagtccaaagtctcatccgagacaaggcaactcccttctgcctatgagcttgtaaaatcgaagcaagttagttacttcctagatgcaatgaggttacaggcattgggtgaatacagccattccaaataaaagaaaatggcccaaagcccccatacaagcccaaaacccagcagggcagtcataaaatcttaaagctccaaaataatctccttttactccatgtctcatgtccagagcactctgatgcaaggggtgggttctcaaggccttgggaagctccacccctctggatttctaggggtcagctcctgcgactgctctcatgggctggcgttgcatgcctgtggctttttcaggttcagggtgtaagctaagattggatctaccattctggggtctagaggatagtggccctcttctcacagctccactaggcagtgccccagtggggactttgtgtggaagctccaaccccacatttcccctctgcactgccctagcagatgttatccatgagggctccacccctgcagcaggcttctgcttggacatccaggtttttccatacatcctctgaagtctaggtggaggctcccaagcctcaactcttgcactctgagcacccacaggcttaacaccacatggaaggtgccaagacttatggcttgcactctctgaagcagcagcccaagctgtacctgggccactttaagccatggttagaggtggggcaattgggacacagggagcagtgtcccaaggctgcaaggggtggcagggcccaggcttggctcacaaaaccatttttcccttctagacctctgggcctgtgatgggagcagctgcacaaagttctctgaaatgccttggaggacttttttaaattgtcttggatattagcacttggatcctctttacttatgcaaatttctgcagcctgcttgaattccttccctgaaaaaaatgggcttttcttttctaccacacggccaggctgcaaattttccaaatttttatgctctggtttcccttttaaatacacacgtggttgtgcatgcctgtaatcccagctatgcaggagcctgaggcgggagaatcacgtgaacccaggaggtggtggttgcagtgaaccgagatcatgccactgcactccagcctggcaacagaatgagaccccatctcaaaaaaagaaaaaaaaaaaaaagaagaagtgtagcctgaaaatgtgactaaattgctgcaacctcatgatcaaacttgaatagatgaggagttacttcttacagataagcaaagaaagcagtcaatccacactaagacatattctatagatgctcattgagttatgatggggttacatcctgataaatccatcagaagttgaaaatatcaccagtcaaaaatgcatttattgctggaaacactgcagacagtctttgattatgatggctcaacttatgattttttgatgagccagagcaattacttagtcaagaaaaagaaacaaaaggcacccaaaactatctctgaaaataatatgacttttttttttcttcagatagagtcttgctctgtcatccaggctggagtgcagtggtgtaatctcggctcattgcaacgtctgcctcccaggttcaagcggttctgctgcctcagcctcctgagtagctgggattacaggtgcatgccacgaagctcagataatttttgtatttctagtagagacagggtttggccgagttggccagtctggtcttgaactcctgacttcagatgattcgcccaccttggcctcccaaagtgctgggattacaggcatgagccaccacacctggcaacatgatcttatatatagaaaactctaatgcgtccatgaaaaaaactcttagaataaaccaattcagtaaagttgcagggtataaaatcaacatgtaaaaatcaattgtatttctgtacactaacaataaactacctgaaaaggaaaccaaaaaaaatcccatttatagtagcatcaaaaagataaattacttatgaataaccttaacaaaagaggtgaaagacttgtacactgactattgcaatacactgatgaaataaattaatgaagacacaaatagatgaaaagacattctgtgtttataaagtgaaagaattagtattgttgagattcccacagtacacaaatgatctacagattcaatgcaatttctttcaaaatcccaatggcattttttatagttgaagaaaaaaaaatcctgaaattggtatggaaccacaaagaaccccaaatagccagtacaatcttgagcaaaaagaaaagagctagagacatcacaacctcctggtttcaaaatacattgcaaagctacagtaattaaaacagtatggtactggcataaagacagacatatagatcaataaaacagaatagagaacccagaaataaatgcaggcatatatggtcaactgatctttgacagggtgccaagaatacacagtagagaaagaatagtcagttcaacaaatggtattgtgaaaaccagatatccttgtgcaaaaaaaaaaagaaactggacccttatcttacaccacacacaaaatcagctaaaatgaattaaatacctgaaattttaaaatttctagaataaaacatatagaaaaagctttatgatatagttctggcaatgatttattggttatgacatcaaaggtgcaggcaacaaaagcaaaaatagataattgggactatatcaaactaaaaagcttttgcaaagcaaaggaaataactgggtgaaaagacaacctatgggataagaaaaaatatttgcaaaccatatctgataaggagtttaaaactataatacaattgacccttgaaaaatatggctttgaactgtgtgggtccacttatacgcagatttttttcaaccaaatgtggataaaaaatacaatatttgggggaagcaaaacctgtgtatacagagggatgacttttcatatacatgagttccacagggccaaatgcagaacttgagtatgcatgaattttagtatacacaggggatcctagagccaactccctgcacataccaatgacaaccatacataaggaatttctacaactcaatagcaaaaaaaaaaaaaaaaaaaaaaaaaagacgtgatttaaaaatgggcaaaggacttgaatagacatttctccaaagaagacatagaaatggcaggtatatgaaaagatgctcaacattactttagggaatctttaggaaaatgcaaatcaaaaccacaatgaggtatcacctcacacctgttagaatggctacgatcaaaaagtcaaaagatcgcaagtgttggtgaggatgtagagaaattggaacccttgtactctgttgacaggaatgtaaactggtacagtcattatggaaaacagtttggagattcttcaaaaaattaaaaatagaactgcttctaagtatatatccaatcaattgaaaaccagattgcaaagagatatctgcactcccatgtattattcataatagccaagaaagagaaacaatgtaagtatccattagcagatgaatggataaagaaaatgtgatatatacagtacctacaatggaatattattcagcctttaaaaaggaagaaattgggcctggagcagtggctcatgcctgtaatcccagcactttgggaggccaaggtgggtggatcacttgaggtcaggagtttgagaccagcctggccaacacggtgaaaccccatctctactaaaaatccaaaaaaaaaaaaattagctgtgcctggcggtgggcgcctgtaatcccagctactcaggggtaatgtggtgttgctattcaatgggtataaagttcagttatgcaagatgaataagttttagagatctgctgtacaacattgtgcatatagttaacaatactgtattgtacgctaagaatctgttaagagggtagacctcatgttaaacattctaaccacaataaaaagaaaaaagaatttagaaattcaaaaaagtaatctaagttccacaaagtagaaggtaaccaaagttaacatttagataccttttctcttaagactttttcaaatgcacaaatctgtatgtgtacttttttcattgtatatttcttactagttatcacagtatattttattgatgttttgttgttgttgctactgttgctactatttgcatatgtggtttttgtttctgtttttgttttttgagacaagatctcactctgtcacccaggctgaagtgcagtggtgccatctcagctcactgcagcctcgagctcctgggctcaagtggttctcctgtttcaaccctctgagtagctgggactacaggcacacactaccatgctcagctaatttttgtggagacagggtctcactatgttgcccaggctggtctcaaactcctgggctcaagtgatccacttgccttggcctcccaaagtgttgggattggaggcatgagccactgtgcccggctgcgaatgtgtttcttaatagccacctgtcaatgcctatcagttaaagacctccaaggagttgaacaaattgggtttgctgctcattgtaatcaagaaaaatacacacctcagggaactctagggtgtcttagtaggaggatgttataaaagaattagaggattggggcttgtattagctgattttgagaagggttccagggagcaaggctgtgctctgaattggctactgtctggaaacaggggcagctctatgattgggtatctgaatcgctggtatttagaattagaaggcaggaagaataaagtgaagtaaagaagcagaatcacaactcagcctggacaaggcacgtttggtcacttttaatgtcttcttttgggttcagacatgattacagagaaatttgggttttgtcctgatccatcagtgagataaagtggccttgattgatgtttgtgttctgcttaagtgtttatgttcaacaggagatgacagcagcccggtggtaatgcctgttctcagctgtcaggggccacttctcatgccttactgaactctcttagtttgtaattgattctcttggacttctagttatgattttttaaaaatatgtcacaaattttatataatttctctcttttctctattcctcttattcttctataattttatactggaatttctagaacactatcaaagtataaaaatggtagaaggccttgatcctatttcttactttaattggaatgcctgtagtatttttatcattaaatatcagattggctgtttgggacgataatgatgtctgaagaggcttttcttcagtatactaaataaagatccttcctgttagtgtattcagaaatgactgttcaatttttttcaaatgttgttttgtatctatgaagataatcatatgcttttctccttttctattctgatgtgatgaaccatactaatggatttcctattattcaaatatccttgcactttcggaatgccaatttgaatttttcctgaatgagcatctgagtctgaagtactgcatttattcacaagtgagacttgtttctaaattttgtgatgtcaacttggctgtgttttagcatcagtgcacctctagtttcacaaaacaaattgggagattcacagcatttttatgcacctggaaacaagttacacagaataagaactgcctatccctttaaagcaacactgacccatagaactttctgaagtgacagaaatgctctatatctctcttctccaatatggcaaccactagccatatgtggttactgagcacttcaaaagtggctagtgaaactgaagaagagaattttccattttatttaattttaattaatgcaataacctatgaaaccatgtgtccaacatctttcttgatgtaatttcctaacaactgtttccatttcttctatggttattattctgactttctttttttttcttttctttttcagacaaggtcttgctctgttgcccaggctggagtgcagtggcacgatcttggatcactgcaacctccacctcccaggctcaagcaatcctcccacctcagcctccagcgtagctgggactacaggtgggcaccacgcctggctactttttgtatttttagtaaaatgaggtttcaccatgttgcccaggctggtctcaaactcctgggctcaagtgatctgctcaccttggcctcccaaagtgctgatattacagatgtgaaccaccatgaccagcctctgtttcttttgaaacaattttggcaattgataattgtcttagggaaaaaatttcctctgaattttcaaattcttaagcttagagttgtgtatcatttttcttacatggttttaatctcattctccataatatcctctttcttatgaatgttacataattgcattttctcaagtaagcttatcagaggcttgtctctcttgagggatctcaaacttaaatgcctacattgccaggcaactaagcatttgattttgagaccctcaaaaagttcccgtgctccttctgaaggcctatccctatacctacctacccctggataccacccctacccaccttctcaggagcctcatgtgattacatagccccttccccttgttgtacctccaacctttctctttgtctattgaattcttccactagcatttaaacatgccctaatctctagatttcccctgtttttccagctactccctaatctcccttctagttccttctacttcatgactgtattagttatctattgctccataacaaattacctcaaaattcagcactttaaagcaacaaatactgaggatctctctaggaatccaggagtggcttagctgaataggtctggctcagggcatctcactatgtcagctgaggctagagtcatatgaaggcttgccatggtgggaggtcagagggctcagttcctccccacatggacctctccaaagagctactcatgacatggtgacttcattcctccagaaaaagtaatccaagagaaagaaccaccaagacagagctacagcgtctttacaacctaatctcaaaagtgatagactattgcttctgccatatgctattagtcacacagacctaccctaatccaatgtgaatacctgcaagtggggaccttgggagccatcttggagggtgggcacattttaaaaattatttttccctggtgctaggtttttcttcaggtcaagaaaagtttcttctattttaccccctgatttctctgaatgttgcatcccatcgctatcaccatttatctgatgttgggcctccttcctctcttctcaatgtttactactttttcctgtcttgcatttcatcctgtacctttctcgctctattctgggaagctttctcaagttttctctccacatcactaatctaattttaaataggttttattcagcttcattattttttgaagatttaaattctataacaaaactctgcctattttttaacccccatttaagatagctcatcagccacctaccttgtcacttctgctgtattatcattcaccattagtctcatttcaagatcatatcttaagaatattgagaacacttcacaggcattttctaaaacttactccttcttttaaaaaaattttttaatatcaatagctttaggggtataagtggttttggttacaaggatgaattgtatataacagtgaagtctagaattttagtgcgcttgtcatccgagtagtgtacagtgtacccaataggtagtttttcatccctcacccccttgaccctccccacttctgagtctccattatccattatactattctgcatgcctttgcatacccatagcttagcttccacttataagtgagaacatgcagtatttggtttttgattcctgagttacttcatttagaataatggcttccagttccatccaagttgctgcaaaagacattattttcttcctttttaaggctgaattgtattccatggtgcatatatatacacacacacaaatatatatataacattttctttatccactcatcagttgatgggcacttagattgattccatatctttacaattgtgaattgtgctgccataaacacatatgcagatatctttttgacataaggacttattttccttgggtagatacccagtggtgggatggctggatcaaatggtagatctacttttagttgtttgagaaatatctgtactgttttccacagaggttgtattcatctgcattcccaccagcagcgtataagttttcttttttccctacatccacaccaacatcttttttttttttaactttttaataatgaccattctggctgggataaggtagtatctcatcgtggttttaatttgcatttccaacatgattagtgatgtggggcattttttcttacattttttggccatttttatattttcttttgagaaatatctattcatgtcctttgcccaccttttaatgggattatctggtgaggtttttgctgatttgtttgattccttgtaggcttcggatattggtcctttgtcagatgcataatttgcaaatgttgtctctcattctataggttgtctgtttactctgatgattatttcttttgctgtgcagaagctttttagtttaattaggtcccatttatttatttttgtttttgttgtatttgcttttggggtcttagccataaattctttacctaggctaatctccttcttgaataaattttttttccaaataattctccccttctatatctcaattctccatctcttaactataaattattttcttagctgtcatattagtattttctttttactaatttttgaacaaagaaaagtcaatccaatccaggtgtttaggatgtggataagtaaaacgtttttcctcactgtgagcctctctgttattagtatcttcctcttacttcttaggctggagggccagttgatataaacttgcaattctagttgtacaatccaacaacctgccaagggagaagagggaagaagattcatgcactcccctgcaagggagctttatttttgctcttctctgttgggcaaaaccactatcccatgaattaactctgtttctaacttactgtgtagctgtgtagtgaagagtttggtcctgccccaattgacgtctggcctttgccttaggcttctaggaggtaagctatgccatatctaataggagtgcctttgtttaaggatggggctggccgcactgggttaaaggcttaggatagaagctggccatgacagaaagcctaatcatgtgacttaggatgggggctttggagcatgaagtatcaattgacctgaagactaagttcaacaacaaggcaatcaattgatcaatcatgagcacataacaaagccccaaataagaattctagataccgaaactttggtgagcgtctctgattagcaatactttgtgagtattgtcacatatcaataccagaagggtgacatgtcctgattccatggggaaggaacagaagcctcacgtttggagcactcccagactctgccctatgtatctcttcctttggctgattttattattttattagttacttagtttagttaattagttgaacagcctccctctgtcacccaagctggagtgcagtagcacaatcacagctcactgtagcctcaaattcctgggctcaagtgatcctcctgcctcagcctcccaaaacaatgggattacaggtaacagtcactgtacctagtcttttggctgattttaatctgtatcgtttcccttaataaaccataacagtgagtataatagctttcagtgagtcctatgaggtttctagtgaattatcaaaactaaaagcgttttgggggagccctcaaacttatagttggcatcagaacagagggtgttcttgtgtggaaactgtgtcctcaaagtttgcagtttggctaatgccaggtactgaactatgccaaggtccagccaagaccatacactacctcttacctaaggctgctgttttatgttggctgaagccaaccctgtaaatgctgggcaaaaggcagtccaagtattgaaagtctcccacgtgtccctagctcccttacctctgtacctcatcacttaagttagagggtcccatctgggtcccatctacttactgagagagagagagaccagaaagcctactgtcaacctcttcttcagtgttgtcctgtatatgccacattcagtacacactccttgaaatccctgacatggattatttttctccacttatcatattcagttggtcttttttttttttttttttttttttttttgagacgaagtctcattctattgcccaggctggagtgcaatggcacaatcttggcttgctgcaacctccgcctcgtgggttcaagcgattctcctgcctcagcctcccaagtagctgggattacaggtgcgctcccacgcccagctaatttttgtatttttagtagagatggggttttgccatgttggctaggctgttcttgaactcctgacctcgggtgatgatccaccagcctcagcctcccaaagtgctgggattataggcgtgagcccccgtgccagtggtgagttggtcattttaagagataccgtggattgtgaggtggtgagaagggagtcagttggtggagtgagttatattgctctcttaacaggaaaagatgaaatagacctaaaacaagatttgagctaacttaacatgtaatattttgttggggagggaaaccattggaaaagtacgtatttattttaatctttaccccatctatctctccttgccatacctgcatgatatggtttgagtatatccctcaaaaagttcatgtgttgggaccttaattcctaaatgtagcagtgttgggagggggtgcctaatgggaagtgtttgggtcatggggctccagcctcatgaagggattaatgcagttctttatgtgtgtgtgtgtgtgtgtgtgtgtgtgtgtgtgtgtgtgtgtatatatatatatatatatatttgttttatttatatatatatttatatttatatatttatattatatatattatatatatttatatatttatattatatatattatatatatatttatgtatatatatatttgttttattatactttaagttctagggtacatgtgcacaacgtgcaggtttgttacatacgtatacatgtgccatgttggtgtgctgcacccattaactcgtcattaggtatatctcctaatgctatccctccccgctccccctacctcacaacaggccccagtgtgtgatgttccccttcctgtgtccaagtgttctcattgttcaattcccagtgcagttcttaagaaactgggttagttctccagagagtaggttgttataaagtgggtcagcccacttcatttctcttcttctcacaggcactggcttcaccttccacttttccaccatgctgtgacacaccatgaggttctcaccatatgtggccatctgatcttggacttcctagcctccagaattgtaaacgaaataaatctctcttctttataaattacgcagtcttgagtattctgttctagaagcagaaaaccaactaagacagtgccctccaccttcattgaaatattaagtaagccactgccagtcttgtttcttgcctttataaagttctagctttaattgtgagctcaccatagataccagagttatgaacaatagaaaatatcatatccatgacaaccaggaagcccaaggcagtggctgatttcaaccatctggttctaacctccttctttatgtatctcttttcctcgtgggcttcccttacttacataaagggcaggcactgctacacagacaggcaggaaaatgtccacagtgtctgctggaggaggtgatccaagtatctgcatatggtagataccatgtgaacaattgagaagagaggaaacaactactgctaaagatattagaaaggcttcctggtttcctcatttgagctcagccttcaggatggcaagtgagttttgctggaggaggtcatacaagtaagcattctaggaagaacattaccagcatgcaaaaggtgcagagaagggaaaaaggaaaacgatgctcataaaatgatgatggactcacagtggatttgtttaggggagtagggagataagaacaaaaaatggcttagcaacacattgtggaaatttttgaatggtcagctgaagatactagactcttttcagaatcttttgctttttagtatagtacttggaatactttgtctccttgaattgcatgcttacctctcctgaatggcacagatggtctttttttgtgctacatcatttaacacagtgccttgcctagtgatggtcccaaaacagttgttgatttctattgaaagtgctgactaggtaataagaagtcattactacctaactatataaaagaaaccagaacctacaacagttcctattgccttttcaccatccctcctttctctacttttcaggcttaaattttatgattcacgtgtataatcactcacttaacacacaccctcaactctctggtcctcactcacctggctaaaccccaaccctggtttaatgcaactctaacctgctgattaacatttcattgcttacatgagaggaggcagaagacagagcctttgcctaaaaaaataggttagggcttgggcactaactcgttcaccacccactggggttcaacctgaggagcagacacacagatttctctagtcttacggtaaagagttattcatccattcaagcacctttaaaaaaaacacacaaacaagctcctagacgtaaagagctgctaagtcatcatacctatgtataccagaaaaagctggacaaattgaagataatagactcttcttggaaccatcagagactgaggtcacagggcaaaccactaccctgagctctggagagacagatgcatccacagagctattgctcctgagatctacttacctagaataaaagccattagaatcagtaagctggtgggaacacttaaattattactttgctgaattgcaggaggctgagtgcagacttgtatgagagtgagaaactctggtgagggcctgcagccataagaggggcttgacacttacatggactgtcactccagaagccccactaggttcccatggggataatctgagaaagagccccttcgggtcaagatgggagaagagaagagtaggcatctgaaaacctgcccagactatcattcctagcaaaggcttagtccccaggtagaaagaacacctggcctgcagaggaataggattacagtgaacttctcatcagaaaccatgcaagcaagaagaaagtgcagcaaaacccttaaagtgttaaaagaaattgccaatctaaaattttatatccagagaaattatccttcagaaaaggaggagaaataaacactttctcagacaaaaactgagggaattcattatcagcatggaatgttaaagttcttcaggcagaaagaaaattatttaggtcagaaaccttgatctacgtaaagaaaggaacaccatcaaaggctaaacaaagataatacacaattgtttaaaattcttaattgttctaaaagaaaacttgaaaatggtaattaacagtgtattgtatgcttggacttcccagcctccagaactgcaagctattagatatttaaaaatatctaatatggataagtgaaataaatgatagtaatgtcacaagggatgggaaaaagaggttgggaatgctgtattatgaggtacctatactagatatgaagtggtatagtattatttgaatgcgggcttaggttatttttaagtgcagattgtaaaaactctaaaacaaccactaaaaaggttttaatagtataaatgatactccaggataaaagataaaacggaatcatataacataattaaaacaagagaatgcagaaggaaggagtgaaaagaaacaaaaaacaaatgaaaacaaaaatagttatgaagatggtgaagatggtagtttttcattcaactatatccataatcactttaaatatgatgtaaatactccagttaaaagacagagataatcaagttgaatgaaatttaaaaaagaaaaaagcaagacctaaccatattatagaaaccactttagatatagaggcccaggtagaaagtgaggaaatgtactgctaacataaggataaatacataggtcaatggaatagaattgagagtccagaaataaaccctcatatttatggtcaatcggttttcaaaaagagcgtaagacaattcagtggggaaaattggctttttaataagtggtacgtacttgggcaactggatatacacatgctaaagaatgatttggacccctacttcaaattatacacacacaaaaaaactgaaaatggatcatagacctaacttcaagagctaaattgcataaaatttctagaagaacatactggagaaatctttgtgacatcaggttaggcattggttgtctggatacaacacaaaatacgcacacacagaaaaaataggtaagttgactgcatcaaaatgtaaaacttttgtgctttaaaggacatcatcaaaaaagtaaaaagacaacccacagagtgtgagaaaatatttgaaaatcatatatctgataaggggctggtattcagaatatataaataaatcttacaactcaacaacaaaaagataaataactcaatcaaaagtgggcaaagcctttgaatagacacttctccaaagaagaaatacaaatggccgacaaacaaaggaaaagacgttcaacgtcataagtcactagggaaatacagatgaaaactacaatgattgctgtcaggcctctgagcccaagccaagccatcgcatcccctgtgacctgcacgtatacatccagatggcctgaagtaactgaagatccacaaaagaagtaaaaatagccttaactgatgacattccaccattgtgatttgtttctgccccaccctaactgatcaatgtactttgtaatctcccccacccttaagaaggttctttgtagttctcctcacccttgagaatgtactttgtgagatccacccctgccggcaaaacgttgctcttaacttcaccgcctatcccaaaacctataagaactaatgacaatccaccacccttcgctgactcttttttcggactcagcccgcctgcacccaggtgaaataaacagccatgttgctcacacaaagcctgtttggcggtctcttcacacggacgcacatgaaaattgccacttcacattcactaagagggctgaaattaaaaagacagacaataacaagtgcttgtgaggccatggataaattagaatcctcatacattgctgatcctaatgtaaaatggtacaatcactttggaaaacagtcctgcagttcctcaaaatgttaaacatggagtcatcatatgatccagcaatcgcacttttaaatataatgaaagagaaataaaaacacatgcctacacaaaaacttgtacatgaatattcataacagcattattaatattagccaaaaagtgaaaacatgtccatgagctggtgaagaaataagatgtgggtatccacacaatggaatattatccagcaataataaagaacgaagtgggccaggcacagtggttcatgcctgtaatcacagcactttgggaggccgacgggggcagattggttgagcccaggagtttgagaccagctgggcaatatggcgaaaccttgtctctacaaaaatacacaggttagctgggcatggtgacgcatgcctgtggtcccagctactcaggaggctgaggctggagggtcacctgagcctgagaggcagaggctgcagtgagcccagatcatgccactgcactccaagctaggcgacagaacaagatcctgtctcaaaaaaaaaaaaagtgctgagacataccaaccgtggatgaaccttgacttattatgctaagtgaaagaagctagtgtcaacgaagagtcaaactctgtaaaatatttgaaggaatttattctgagccaaatatgagtgaccgtggtctgtgacaaagccctcaggaggtcctgagcacatgtgcacaaggtggttggggtgcagatttgttttatacattttagggaggcatgagacatcaatcaaatacatttaagaaatacattggtttggtccagaaaggtgagacaactcagggggactggggagggagggagggagggcgggggagggggttgcttccagctgaaagtttctctcccgggcctgcaagcttaagggaatgaataactcctccttcctcaggcccagtcccaaggtgcaaggccacctgcaccagcaacctgcatcggtgagatagcagaggcaggaagagagctggccggaagacacgtactccctgaagaccgagagaggccaccggggtaccgcgtagccgttacatcagactgagacacttcctgtttacaggagactataaaacccctgccccgtcctcatctggtgctgacaccattttaggtctcagcccacctgcacccaggtgctcattgaaacaacgtgttgctccaaaccaccttgtggtgtttgtcggcgcgctctcgggtttggaaccaatacaagagccttgcacctgcaggctgtaggtaatataggtaaatttatacattttctggttgacaattggttgagtttaagacctgggatctctagaaaggaaaatgttcaggttagataacagactgtggagatcaagtttcttttttgttgttgttgtttttttttttttgagacggagtctcgctctgtcgcccaggctggagtgcagtggcccgatctcggctcactgcaagctccgccttccgggttcacgccattctcctgcctcagcctcccgagtagctgggactacaggcgcccaccaccaggcccagctaattttttgtatcagataattttttgtatttttagtagagacggggtttcaccatggtcttgatctcctgacctcttgatccgcccacctcccaaagtgctgggattaaaggcgtgagctaccgcgcctggcccaagtttcttttgaagtcttatagtgactacccttggagacaatagatgagaaatgtttcctattcagatctttaaaaggcactagactcttaattaatctctttgggattgggagggcctggaagaaaaagatctagctatgcaaatagagattctttacaggtgcacattttcccccacaaaggacagctttgcagggccgtttccagaaacatgttttgggataaaatatttttattttctttcttgcctcataatgttttccaacttgccagagtcaggttggaaagtaagtcacgatatatagggctaaataaaacccatctgatgaaaatttatggtttgtagggcatgactccccagaccccttagataggaatttgggcaagataaaaaatcaaagcttagtcctcaccagtcacaaaagactacacactggatgatttgatttatattaaatgtctataaaaggcaaatccacagagacagaaggcaggttagcggttgcctggggatggggtggagcaagggatagcatgaataaggaatggctgctcatgtgcaaggggtttcttcctggcgtggtcaagagttctcaaattaaatgtggtgattgcttcacaactccatgaatatactaaaaccactgagacagacactgtaaaggggtaaatcttacagtgcatgaaatatacctcagtaaaactatgtttaaaagtgaggggtaactatattaataaaaccatgggtgtccaatcttctggcttccctgggccacattggaagaagaagaattgccttgagccacacataaaatacactaacactaacaatagctgatgagctaaaagaaaactacacacgaaaaaagtttcataatgttttaagaaagtttatgaatttgtgttgagcctcattcaaagccatcctgggctggtctcaaactcttgagctcaagcaatcctccagcctcgtcctcccaaggtgctgggatgacaggtgtgagccactgcgtctggccacctggacttctatggagtgcagaagtccatggtaatgacctgaacttagcatttcatcagacttggtgatgaagccaggaaacaggacaagcactgggccctgacagacagcttcccatggtgagggcagaggaggaatatactcagcaggacggtgcatgctgcagggagcagtggctcctgtcactgtgagactgtgctgggaaagcctctgtaaatcagccccatggggcatcacacaccctgggagagagatccatgtcgtaaaaccaaagggttgtatccccaaggcccaaacctcacagtgctccaggaaggctggctagtacaaccaaaataatggaatcattagaggcccaggtggctctgatgggagcccaactttggtgacaaaaagaaaataacattttaaaaaatatttataaatgtagtgcatttttgttacatgaatatgttgcatagcgatgaagcctggacttttagtgtaaccatcacccgaataatgtaaatggtatccaacaggtactttttcatccctcaacccccttccaccctcccaccttgtggagtctccagtgtctattattccactctgtatgtccatgtgtacacattgtttagctcccacttataagtgagaatgtggtatttgactctctgtttctgaattattttaggtaggatcatggcctccagttccatccatattggtgcaaaagacattctttctttcttttttatggttgagtagtattccatggtgtatgtataccacattttctttaccccatcatctgctgatggacacttaggttaattccatgactttgttattgtaaataatgctgcaataaacgtacgagtgcaggtatctttgtcatataacgattcatttccctttgggtagatacccagtagtgggagtgctaggtcaaatggtagctctagttttagttctttcagaaatctccatactgttttccatggaggttgtaccaatttacattcccaccaatagcgtatgtgttcccttttctctgcatcctcaccaacatctgttgccttttgactttttaataatacattgacctagggaaagaatttatgacaaagacctcaaaagccatgcaacagacagggtgcagtagctcatgcctgtattcccagcactttgggaggcagaggcgggtggatcgcttaaggccaggagttcgagaccagcctggtcaatgtggtgaaatcttgtctctactaaaaatacaaaaattagccgggcgtggtggcacacatctgtagtcccagctactcaggaggctgaggcactgaggtgaaatttttcccttgacccccttcatgggcaggaactggagtcgctcatctcattcaccctgcagttcatggatggctaagtgttaacaacttggtgaagggtcagggtgacagcctcctgcacctgccctttttgacacccaagttcttgtttggtgtccaggaagaatcaggtcatatgaactatttgaagggtagtatgtgaaggattttactgggcagtaaaagtggctctcagcaggacagggaattggaagggagatggtgcgggaaggtgatctttccctgaagccacaccatctgaagttaactatgtctatccgtagtcgccgacgctcagccgcatgtatccctgatactcagcagcttgcagccctgaccacttgcatcagccgcttgtgttgttctttcagctgaagtctttttatgggcacagcataggggcgtggcaggccaaaaaggcaatcatttgggcagaaaaatggggtcagctgttttcacgcagggccgaggttccaggcttgagggtggagtttagctgggaacccagacctgcagggtcagctgctttcacttagggccaaggttccaggcttgagggtagggtttagctggaacccagccattctgtatcagcaggagaatcacttgaacctaggaggtggaggttgcagtaagccaagatgaagccactgcactccagcctgggcaacagaacaagactctttctcaaaaaagagctcctcctggagggaggagctgtggtgctggaactctggaaacaactctttctgtgtgtattagcatctgtgcatcagggctggtcccagcagatccgtcctgtgactctctttcccctgtggcctcccctccctaggagggagatggggttcccagctggctcctgggccctcgtgttggcctgtcctgccacgctatcctaactggtcaggcccatggtttgagttcaagcagcaatcccagacacatgctcccagggttcttggatgtcactaacaaccctcacttcttttacatcattcaattgggctgcattcacagactgtttctcaatttctcctctaaacaggtatgagtttcttataatcccatttccaggatgagggaggctgtcctttgggcactgatgtggaggataaacttgcaaagctctcccagataaagagaaaaatgataaagtgatgaaaaatgagagagaagatgatagatataaaagtatagaaaccagagatcaacccaagaacagagggtgttcctgagtaagaagcaacaaccattagactagaacaaataatcaaaggcataattaagaaaaaccgaaactgccattgcaaaattataactgaaacagtgacagagttctgagctaacccactccatcttgcttctaacctccaagctgcccttgttcattcctgggtgtaggctgagctaactttaggaggaatttagtttatagtttattgtttgaaacaaagatagcatccctttcaaaacaaacccccttcttgcctggggactagactgcctttgtattataggactaacaaattagtcaaaaaattagaaattatggtttaagagtcatgcagctggagacagattctgaccctccccaaattgctcctggggataatatcactattgtaaaacctaagatcagtgcttaggatatttcgcagttcctgcatttggtgaatcagctggcaccacccagattggtaactggctcgtctgatcttgtggtccccactcaggaactgactcagcgcaagaagacatcttcgacttcctatgattttatctctgacccaaccaatgagcactcctaactcattgccccccaccaccaaattatccttaaaaactctgaccccagaatacttgaggagactgatttgagaaatgataaaactcgggtctcccgtacagccagttctgcgtgaattactctttctctattgcaattcccctatcttgatgaatcatctctgtctaggcagtgggcaaggtgaaccctattgggcagttacaaaactgtcccaagaatgaaaagattaaatctgaatatttaaattcaaagaactctttacattgcaggaaacatctgtgaaaagaagagctctgtacccaggacatcctggcagaattcgatttactttattaaaaagaaaattaacttttccattatgaaaagaataaagaatatacaaatatattctaagaaaatacagattagcaaaaggaaggaataaaaatcatccattgcactaccacccagaaaaatactctgttaatgttttggcacatctcttttagtcctattaatatacatattattttttacataattgcaatttacacaatatcaaaaatttaaattttctatcatttaaaaacacttttaaaattataaaattaatacatgctaatgaaaaggtttaaaattggagggaaaatacgaagaaaaaggttgcccagaatccacttacccagaattaaccacagttaatactggggtgcatttcttcatagccttatctgcacttttgtacataatctaatctaattcttttttttttttttttttttttttgagacagagtttcactcttgttgcataggctggagtgcagttgcacaatctcggctcactgcaacctctgcctccctggttcaagcaattctcctgcctcagcctgcccactagctgggattacaggcgtgcgccagcacgcctggctaatttttgtatttttagtagagacagggttttaccatgttggccaggctggtctcgaactcctgacctcaggtgatccactgcctcggcctcccaaagtgctggtattacaggcgtgggccagcgcgcccggctaatctaatctaattcttaaacattgttaatatggagcatttcagagactccagacagtaaatgatgtaaaggcttatggaggggataaaaggttagccacaaggtgatttaatagtctttcattttaaataaagcctaaatactcaagataattcaaaatgagtttcaaacatgcaaaaacccatacaaaacatgtagtaactcttctattaatacctgaggtttaagtggcttagccacgataagcagcattggaacgtgacagcacacacttgtttaagttccgtgaagtagtgaggctttcatgacaagcctgttttctggttctaggagagccatacaagtaggaaaggaggaagcagaagggccaggcctcattactaccacagaccccacatcatcccattagaatttggactttggggcccaagctgaataaattcttttgtactgcaacagtttcatgggggaagagaggcaagagctgtgctcaaagggaaacacatcgccttaaatgctctcattgtgacatgaggagaaatggaaaaattaacccagcactcaacacagtaacataaagaagactgaaagaagaatgtaataaaaataacaactaagtgtgagggagaaaatgaaaaatctgtaaattgatcaatccacccaagagccagtttctgggctgtgggtcaattcaccagaaaacaatttgctgacagtcaaatgctccctctccctctgcctttgcacactagggccatcttctcattgtgtcctcacatggcctttcctgggtgcacacatgtggaaagagagtcctctgtcttcctgctcttttttttttttttgagatggagtttccctcttgttgcccaggctggagtgcagtggcgccatctcagctcactgcgacctccgcctcctgggttcaagcgattctccagcctcagcctcccgagtagctgggattacaggcacctgccaccacactcgaccaatttttgtatttttagtagagacgggctttcgccctcttggccaggctggtctcgaattcctgagctcgtgatctgcccacctcagcctcccaaagtgctgtgattacagccataagccaccacacccggcctgtcttcctcttcttacaagggcactagtcccatcaggggttctagttacttcccaaagtccccacctccaaataccatcatattgggggttagggcctcaacatatgaaggggcggcagtcaggggcagtggagggagaacacaaacattcagtccatagaagatacaattctaaaagactgaatttatcatctgatgaattgactgggcctgcatgggtacatttttaaaataagctaggaagggggaaagccttcttaagcatgaacatgaaacctggaagccacaaaggacatgataaatgaatgtgactaacaatattaaatttattaatttttttttatttgagacagtctcactctgtcacccaggctggtgtgtagtggcacaatcttggctcactgcaacctctccctctggggttcaagcgattatcccgcctcagcctcctgagtagctggtactatgggcatgtaccaccacaccttcctaattttttaaatttttagtagagaggggttttgccatgttgcccaggctggtctgaaactcctgacctcaagtgactgcccacctcggcctcccaaagtgctgggatttataggcataagcgcctggccacaattttacatttctacactgtaaaggtatgtttgtgcttgtgtgtgtgtgtgtgtgtgtgtgtgtgtgtgtgtgtgtgtgtcttaaatgaaatcaaaagaaaatatctgtaatgaaaaagaccaaaattaatttcccacttatcaaaaagtttgcataaatcagtagtgagaaaaaccaccttattaaaaaaattagagaagtatgtgaacagacttattacagggcaaaaaatacaaatgatcaatacacatgaaaagatgtccaaccttccaataacataaatttgaatcactaaatataactttttaatgtatccaagtaccaaaatgtaaaagattgataataagttatgttggcaacagcgtggagaacacatgtgttctgataccaggaatgcaaatgggtgtccttttttgttgagaaatctggcaatatctatgaaaattttaagcatgcccacttatggaatgtgtcttacagaaatcacttgcacaaggaggcaaagataatgtacaaagatattgtatatagaagcataaattcttggtgttggaaaggaacctgtggggtacccagtccaagctttgaggtccactccagtgccaggatgccctgggctacatccctgactctctctgcctgggtgtcccttagatcttatatggttggtgactgtataatctagtaacatataggcctttcaaaccatgagcagaatatcttcaggaacttgtgtgagcatcagacacctactctcctccgagtgcccaatggtccttcactgggagcacttaaggcagcgtttctcaaacttcaatgtacaaacaaattatctgaggctcttgccaaaatgcaaatactgatttggtctgggatgggcctgagattctgcctttctaaccagctcccaggttagatgatgcggatgctgctggtccagggaccacagtctgagtagcaaggtcatgagacgtactctattttctacctttggtcttcttgttttcacacctgggttttccatcaagtatgtaggcatcagtcccgtgactctcatgtcctacagataggccccatgacttggtcatgcccttagcattgacctcgtacactcatgctccactccactattttcaccatctgttctcctgtagagcagggtagtaggtgatggctgtggccaccacagactcctaactcagacaccagaccgtatgtccttcctgctcaaggtcatcccagctgctcctcaatatgccaggcagaccgcatctctggcaccagcacttgttgccccctgtgcccagaattccactctcccagacatccacggagcttgactctcatttccttctagtatctactcaaataggagaaagcagggctagagatgcaaatttgggtgtcaccagcaaacagatattgtttaaaaccatgagaccagaggagatcactcggagagtatagacagaggcaaatgggagccttggctgaagtcctgtggcagcacccacgtacaggatgaggaggaggaagagggggaggcagcaacaagaggagtgccagtgggagacaagggaaccaggtatggggcactcaagaagccaagagaagagcatggctggagaaggatggcgtgatcagcactcctgtgtaaaagcagcagcttgaacactcatgaaaataccgtgggcggtgagcacagggagaatgggggaggagatgcagcaagggcactttggagaggtcactaaggtcgctgatccctggagtcgaatgctgggttggcagtgaggaagccaaaggcctgccctatttttaccattgaatccccaaaaggctgattaattggtgacacctggcccctctggacatgaagatggaggaaaaggctgaagtaatgagaactggaaaaaagctgtttaaggaattgtcagatccccagatctccccaactctgtttagccagatcactgactttctgccctcccctgcagaaagccagagattcatttcaagagggtgaatacaggatctggttaggagacactgaactcagtggaaagcaaggagtcacactgagaacaggagaactacatgagtgtgggcactgcggatgctggggcagccctatcccatcccccagcctcattcctcatgcggttcccagaacgccagccaccatcccaacaggaagcagagaggtttccagtcaaagggcccagacagttgaagctgccaagccccacctgtgcactcggagcatccaatcagctgtgaagggctcacccttccacacgagcagattgccagatggctgaggaagaaaggtacaggaaagataaatcccaaaccaatacaaaataatcaactggaagacactggaactatacaaggagaagaacacttcaaaaaaaatcatgagggccgggcgcggtggctcacgcctgtaatcccagcactttgggaggccgaggcgggcggatcacgaggtcaggagatcgagaccatcctggctaacacagtgaaaccccgtctctactaaaaaatacaaaaaattagccgggcgtggtggcgggcgcctgtagtcccagctacgcgggaggctgaggcaggagaatggcgtgaacccgggaggcggagcttgcagtgagccgagatcgcgccgctgcactccagcctgggcgacagagcgagactccgtctcaaaaaaaaaaaaaaaaaaaaaaaaaaaaaaaaaaaaaaatcatgaacacttttacagccaagaaatactatccaggaaatgagataatggagcagtgcctactaactctgagttacattgtatgacacttagttgatgtctaccagagaattggggttttttttggtgggaagaaatcccacatgtcagtgaccagaggtgaagtattgtatagtgagtgtgagtagaaaatttgtttaaagtttgggtgctttttaaaaaatatttcttacaactatatttagatggtagaagaaaacaaatccagaaagattgcacagcagatgtgatatttgaatgtggagctggaagtataccaaggatttcacccaggtggacaaagatagggagaatattcaaagcagagacaacaattgatacaaaaaaaaaagatgaaaggggccaggcgtggtggcctgtaatcccagcactttgggaggctgaggtgggcagatcacctgaggtcaggagtttgagaccagcctggccaatgtggtgaaactccatctctactaaaaatacaaaaattagccaggtgtggtggcgggcacctgtagccctagctactcctcaggaggctgaggcatgagaattgtttgaacctgggaggtgaaggttgcagttagctgagattgcgccactgcactccatcctgggccacagagcgagactctgtctcaaaaaaaaaagatgaaagggtaagcgtggtatgagatagcacatcaacccaaaatggattggcattcaacaccaaataattgattttcactcatgcatcctcaggttgcctgggattgggccaacatagactgagtttggcaggcttggatctcaattgcaggttggatccaggagtatttcatcctctttggaccaacagctgtctaaggcaggctcttttcatgatggaggcagaagaacaagaaaacaagcacatttcaagcctctggacccaccgcgtccactaacatgccattggccagcataatttacatggacaagctcaacactaatgggttggataagtatattcctcactcacaaaagcttaaactttattcctgaacaataaactctagccaggtggggtggggagcacctgtagttccagctactcaggaaactgaggcagaaggattgctggaccccaggagtttgagaccagctgggcaacacagtgagactatatctcaataaagaaataaataaataaaacaataataaaagccaactctttaaagtgtgtttggggaataacatgaacatatgtaacttctgtttttcagttaactttctgtatgcatttcccttatttccatccttccttccttcctccctctctctccctctttctctttctccctttctctctttctctttctctctttctctttctccccttccttccttctctttctttctttcgttctttctttctttcttgagatggagtctcactctgttgcccaggctggagcgcaatggtgcgatcttggctcactgcaacttccgcctctcgggttcaagcaattctcccatctcagcctccccagtagctgggattacaggcactcaccaccatgcccagctaatttttgtatttttagtagagactgggtttcaccacactggccaggctggtcttgaattcctcccaaagtgctgggattacaagcatgagccaccatgtctggcccccttgattcttttatgagatgagcatgtgcagctacaaaaggaaacacaggagaggctcaggaaaaaacaaagtctcttgtactcacaggtcccagagaccggaggcatggcaagccatgaagggccacatgggagagacaccagagtggtcaggaagcaaaagacaggaggagaaagccgaggctagagccttcattggggtttcagtgggaaaagcagaacagggcagggtaaacagtttaggactggttcgtttgcataatttggttgatctttggcctatagtagtgatctctagttgcctagtacctggccctgggatgattaaggcagaggaatattgcttcctgagctgcatgggccagatagggaaggtctggtttaggactggtttgttttcatatcaaaggcacgttcctggctgggtccttcgttatctctaagaattggctggcccaggggggaacagtctctctccagctaaaaaggtttttcaggatcaaagtatacagacaacttaaaaaaaaacaagagtaaaagttatttgaccaacatcagccatgtgtggctaatgaacacttaaaatgtgacaggtgtgattgaggaattaaattttagttttatttaaatgttttaatgtaaatttaaagagcacatgtggcttatagctatggaacatgcagctgtgaacactatagttaaaactgacattttgatctgaggattccttttatttaatcagttctgaaactatagttttctacatttatatatttgttctattgtgaattttaggatttattttgatgatgtactttttctttgtgaagtttagaaatgaccatgggggtcatgtgggccaaattaactcaattcctggacaaaaactatttccccgaccaccccaagcttcttgccaatgtgcgcccttgggacaagaaaggctaggagaagctgtggacaaattaagataaacctggcaatatcattagacaaataacccaaagtgaatccctcttctgatggtcaacatcagatggtcacacagaaatgttattttcctatgagtaattttgcattattgttacatatgatttccacttacaaatgccacaaatattatgcaagtacctctctactgggaaggaatataacaattctaacaaataaacataaaagcagtgtgtacataagaatgcctctatacaattttttgagcatcaaaatcttagaaagttgaaaaataccaatgaaatatagcattcttattctttctcatttcttttatctgttctttagagaaaaaaagatggagcagaaagcaagaaaattgtccaacagaattattgcaactgacttagtttcttataaacaaagaatgcattgaaagagaaaaccttgcctcagcaaagtatattacacaataagaaagaagaatttcaaagataatagagataatttctcacagatgtctgaccagaaagaaattctcaactttctaaacttttctatcataatttcacatatttctctggttcatttataaagggaaaataacttgagaatattccaagatgaatacatcagcactcacataggtaaccagaaacatggggtgttaaatcaattacaggagcagctgggttccttatccagataagacagcgaaaaaagaccaagaagccagtagccggtgactttaaaaattgttcgaatatgcttcctcctcactttgtctcttgaggttctttgtaaaagccagggtttcacaattaactttacagcaatcaaaaagctttaatcagtcactaaaacaaatgctattttcacttatcaaattggtaataattaggaaaaaagtgataatatcatgctgggatattcagagcacgcttttgtgggaatctaaattggtgcaaccactttggctgcatgcctcaaaagcttaaaaatatgcccatcttttctgcaccttctactcctgacaacttatttaactacagggatgttcttcccagctatgtgatatacagccattaaatggctgaatactatgcagccattaaaatattgttgcagaatatattgtgatatggggtggaggtggagcctagctcaaaaattatgattgtatttgggtaaggaaaaattatatgtatacataaaagtaatatgaaggggatagacttatgaatattttataaatattttagatattttcttcattttcttttattcttttctttagtcttatctatattttctaatatgtctatttgatatgtattgcttttacaagaaaaaataacttcaatgatcctataaaaggaggagagagtggggagcaagtgttttaaatactgcgacatgaggctgtgaaagctctcagaatcaaaatgaagtcacctatgttaaaaatcccaacaaacagagccagacgagaccttgaagagagggttgtcatgtacaaaaactattgcaagactgcaaaaatcacaaccttgcacaaagtccatctcaaccttacgcaaaaaaatacctctacaaggacatctgcccagcaactgcctgtccaacctcagactggtgctaccctcgttattgaaccttgtagtcaaggataattaacccaaaacagttatgtaaccctccttatttttcctctaaaaacccttgtcttcctttacctccctgaataggtacatagtgtattatagtacatgcatttccatcgcaatgcctattcccaaataaatatcattttcttttcaaaatgtttgttatttaggttgacaaggcctggctgcccactccgtggtggttgccatctgttgctttattataacaaacttcatttaactcaagccaggctgagtggctttctttatcttgctatcgatgctccctaatactctaaccccaactttgtatcatctggaatccggagatattttttagccaaacaagaaacccacatgttgatttgtaacatttcagcagcaccacctgcatcaccaaagactttgagacttatggaaataaattcaaatcctcaacatctggaatggttgagacacatgtataaagaacagaaatttatttctcacagtcctggaggctgggaagtccaaaatcaagactctggcatgtttggtgtctggtgagggctgctctttgcttccaagatggcaccttgatgctgcatcgtctagcggggaggaacagtgtgtcctcacatggcacgaggcagaagggcaagagggccagacgctgctgtgtgaagcctcttttaaaagggcctgaatcccattcacaaggaaagaatccttgtgactgaatcacctcttaaagcctccacttcctaatactgtcccatgggccattaagtttcaatgcctgggccgggtgtggtggctcacacctgtaatcccaacactttgggaggctgaggcgggcagatcacctgaggtcaggagtttgaaaccagcctggccaacatggcaaaaacactgtctctactaaaaaatacaaaaattagccgggtgtgttggcacgtgcctataatcccagctacttggggggctgaggcaggagagtcacttgaacccgggaggcagaggttgcagtgagacaagatcatgccactgcactccagcctggggaacagagcgaaactccgtctaaaaaaaaaaagtttcaatgcctggatcttggaggggacacattcaaaccgtagcaccattttatattatttgtggattagggttaatactttgtcatctcagacaaaccatttctaagaaggtagaggtttgcgtgtgaggcttgagccacaggtatgacactccattgtcatgcacaaattgttacttccttaagatatgatccaacagacctggagacctgaatgcatttaacacaaatgaaagtttctgcctcctccctcagcccatttgagcttccatttccctctgacccagtgcgcattctaccctttgcagtctcaagatgcttctccctggcagaaaaatcaaaagcaaaatatgaacaagtataagccagaattttcagagtaactttccagattgcttcaaatggcagcatttccaatcctggtttgtctcatttgctttattcaataaaagaacaagaacaagaacaagaaaaaaagaacactactgtgtatgagctttgacatcacttctgaccatttttactttcatgttgttaattttgccatttgattttgtttccattacatgctattaacttctgttcagatgtcactcatttaaaaatgtgggggtatttcccattgttgtcccagtcaggcaattataacttaacctaaagacagccctgctctcaggtcagccttgccataaagtccgattcaaagaaataacagtccatcagaaaaatgaaaaccattaaaatctttgtgtgtctctcaagaaaataccacaggatgagtaaacaaagctgaaaacaagatagagaatagagtctctcaagaaaataccacaggatgagtaaacaaagctgaaaacaagatagaggatagaagttgatagagagttagaattttaacatgtgacacgccattagtaagtgttttgaacaccaagggtttggagggaaagaactgtgtggtcaggacagcaagcctggaagctgaccctggctggcaacactcaaagtaacaagacaaagatctagctgagggaggaggctcagagggcctcaggatgctgccatcctaatgaagaacaatcacacggagggtgaaggcagtgttcaccctctgtgtgaacacatcctcctaagaggatgcactgccctcctcctagaacactgtgtgagggatcccagctacccaaggtccaggagccacatgaaagctgcttgaagatgtcccttgcaaacctagcatctgagaatatggacccacaaaatacattcattaaggagaggcccattttatataatgtacatttacaaagttaatacacttttgacatattttcacacttttatttcaaaaacatcttgaattacctgcaaactttcaggaactcatcaccaacaaggtccattcatgatgtagtgggaaataaccactgtgtaatgatagcataagcaaattcagttttaatgagaggaaataggggaagaaagttgaagataaaacatgcttcctttataaatccttctttattttattgtccccactcccaaccaacccccaaggccaagtaaagagctgggagtaaaaagttagggcactgaagatagattcgggagacgtctgggttcctcacctgctaatgcaggacccagtttcctacaaaacagcgtctgcctgtccaaggattgtggaaatacaggtgtatgttcctgcatgtgtatccaggaagaacaagtccctttctcaggctcgagcccctggagccaggccctcttcataggccaccccacagtcaccaccgtggaggttctggaagcctcaggatgccccagggacttcccacccccaagccaggtagtgccccaagcataagtgaaaacacccttttcactcctttgtttccctagaaatccagcagcttctaaggttcatgtgctacaactctttccatttttaatatccacacatgtgcaggtgtggtaatggatcaactactgtgagcaactggggcttcaccccccacagaacattctacgagatagagggtggtagcacacttcaggtcatccagctgcaagagtgaggagttggagcatttatccacagactcccatctcccactggggagaactgccctgggacccctgacaccacacactttgggggtgcttctagggggagtagggcaagttcagatgatgccagaaaaagtcctcaggcagagaagagagaggcaggcatcagggtgggaaggcatcagcattctggaagccttagttacaggtgaactcagatgggccaaggggacacaggacaaggtatcgacagcatctgccacaactctcttgggaggtacacaaaaccaactgagtaaacatttgtattatttcctggatataggagcaatacattttacataaagatgatgattcttcacaaatttattcttaagtgcaatgccatttcaataaaaaaacccaaccataggtatcatggaatttgacaagattacaaaattaatctggaaagagaaataagcaagaatatcgggctgggcacagtggctcatgcctgtaatcccagcactttgggaggctgaggcgggcagatcacttgaggtcaggagttcgagaccagcctgggcaatacggtgaaacccagtctctactaaaaacacaaaaattagctaggcatagtggtgcatgactgtaatcccagctagttaggaggctgaggcaggagaatcgcttgaacccaggaggtggaggttgcagtgagattgtgccactgcactccagcctgggtgacagagcgagactccatctaagaaaaaaaaaatcagaaaatattctgaaacaaagagaaagtaatgggtgatatgagtcctaccaggcattgaagtgcattataaagcctttacctacctcatggatctaataaagcaagaaaggaaaagcctctcctcacgtggcatcccctcccttggttgtgtcaatttgaatcacactgatatgccttatgcggaatctacataaaaagaaaccttttaggcacacaccgaggaaggggctgaatgagggtagctgcggatcattcactggtatcagggacaagaaaattaccatggcctcaggaactgccagtaaagacacaggaaggttctggttcccagaaaaataaagtcagaagccaagcccagggtgggaacaaagaagatcagaaaaaatcagaccatttcataaaagctgtgatgcagaagaagtccagtggaggagggcccaagtgccacacaggttccaggtgatgctgaaattgtctcgggtaactgagatacctcagacccgcctagacagttagaaatggctagaaagagaaaaggaaatttttttctagacaccaaggagaaaataggaagaaaagcaatatgagtggatgggagaggttgccccatattcaggataccatttaactgattttcccgggcaaagcactaggagtcatctcccaaggaatttatagtccagttaaagaccaaaagggctttaaataataattttttttttttgagatggagtcttgctctgtcacccaggctggagtgcagtggcacaatcttggctcactgcaacctccgcctcctgggttcaagcgattctcctgcctcagcctccttagtagctgggactacaggcatgcaccaccacgcccagctaatttttgtatttttagtagagacagggtttcaccatgttggccaggctgttcttgaactcttgaccttaggtgatccacccgcctcggcctcccaaagtgctgggactataggcgtgagccacttcaccaggccaataataaatttttaaataataaagcagtttaaaatgggactggatgatacaagccagttgctgctggagctagaaggaaggaggctgacttctgatgggaagatatggaaggatttcagagaaaaggatgcatcagagccagaactccacagaagagaagcagggtcaagaaattcagggctgagagaactactcaagcagaccttcagcaaggcaattaaaggaggacaagtggtcctgcagggcttcgcccagggaaatgcaaagagaaagagagagagagagaaagaggcatcactggaaatgtttcacagataccttgactgtaaacattaactgcaggcactgaaatctagccattaaggaagcattgaatgcttttaaagggtggggagacaggaaccattctgcagcaactgtgcaatagtttctccttaaattcatgattcacatctttagagaaaatgttcctaacgcctaagagaagaccatacaaacagattagctgttttcttcctctgtctgaagtgctatgccatgtgatgcctcaaattgctacagctgtcaacaccagcttgggtagggcagagtggaaacagggaagaaacgaggtctgtgaagatataaatataccattgaatgtaccctgacccgaagaggatcctccagtattcaaaacaccctttccagcgcccaccctctcctccagctcctgcccactcctctgctccccgcagggtaaaactcagaaatgttgtcgctactccctcaccttccattccctcttcaatttgcttctgcccccattaatccattgaaactgctctcctcaagtccccaaaaacctccacgtcaccaaatccagtgagcactatcctgtcttcacatgacttggcctctcagtagctggctctgccttcttgaaacaccctcctctcagcttccagaaccctcttatttcactggctgtcccttttcagtctcttcctctggttcaaagtgtggtctctggcccagcagcatcagcatcacctaggcacttgttagaaatgcaggttcctggaccccatcccagacctgctgaatcaaatctctggtccgggaggggcgaggcagcaatctgtgttttagccaagtcttccaggtgatgcacactagagactgagaaggactaatccgaaactgtgggcattcctcattacgaaatcctgattcctttctcttccctggctacattttctcccatgatgatgtcatctaagcccgtgactggaaatcatctatactctgacagcttctaaatgtgtatcttcagcacccatctggggattacacagccatctcaaattcaacatgtccaaatggaaggaaggaactccagatgttccctctaaaatctggtcgccatccatttttttccatttaagaaaatagctccaccattcccccagctgtttattaaaaaaacttaagtcatccacgagtcctccttttccccaactccttaccctattagcaatagtatatctagagggtctatctctaaattgtcatgaatctgtcctctattaccactataggccaagccacaattttctctccccagcccactgcaaaagcctccagccaggtactgctcatgcccacaaaacaaccagagtggacttttaagaaggtaaatcaggctaagcatggtggctcacacctgtgatcccagcaatttgagaggccgagataagcagattgcttgagctcaagagttcaaaaccaacctggacaacatagtgagacccccgtctctaaaacaaatacaaaaatcagccaggcatggtggctcacgcctgtggtcccagctactcagaagactgaggtaagaggatagcttaagcccaggaggcagaggttgtagtgagccgagatcaccccacggcactccagcctgggcaacagagtgagaccctatctaaaaaaaaagaagaaggtaaatcatgtcgcatcattccccttcttaaatcttcaagggcttcctatcatatttaattattaaaacccaaacatctgtcatgggctgtcaggccctatggtcactgtctgtatggcttcctgtatcctctttgaggtctgaagtcagagactgtaactatttaattcacactaagtgctcaataaagtggaggaaataattctccttttgtgagaagatgaatttagagtctaacttctttagtttctccttacttgctgaggaggatctatatgatgtggtcaaatcactttcagccaggacacaggagatgggaagggagacttccaaagaatgacttgatgatgctgtgaacctcagcacaatagggctctgtgggcaaacacagtagggtttgacctccaaggacaaaccctacaccccactccccacccagtccggaaaacgactttcactgtttatagtgagatatgggtggttgtggtcatgggagaggcaatgggagtgagtttggaatgaggaattatgcagggccatttgaatagccacttcctgtgggttgcccacccttggagtggttcataaggtcaataaaaacctctaagaatccataggccagaccatcaaccccattgtggcagcttttaaaactggcaacaaggtctttgatactcttcccattgaggagtgggctccatgtcctctgtccttgaatctgggggctatatgactttttttttttcttttctgagacagagtctcgctctgtcgcccaggctgaagtgcaatggtgccatcttggctcactgcaacctctgcctcccgggttcaagcgattctcctgcctcaccctcctgagtagctgagattacaggtgcgcatcaccatgcctggctaatttttgtatttttaatggagacggggtttcaccatgttgcccaggctggtcttgaactcctgacctcaagtaatccatgggcctcggcctcccaaagtgctgggattacaggcatgagccaccgcgcccggcaatggggctatataactgttacgtcaacagcatacagtggaagtgatgctacctgactactgagcccaggcaggaagtggcattgcagcttcttgtttgctgaaactctcacacttggagtcctgagccaacatgtaagaagttcatccaagccgagaccaccagaccatgaggaaaccaggccacacagagaagccgcagctaggcaccgcaatcagcacatctgatcttcaagtcctcctagcccaggtgccactcaggcaagtgcataggcttcagatgactgcaacccccggctatcaaggtacccctagacttagagtcttctcaactgacaccccaaacataatggggcagaatcaagtccccgctgtgcctgtccagctccctggcttaaacaatccattggcataataaaatggtagttgttttaaaccacctaagttgtggggtatttgcagcacatcagtaataaccagaataggtcataagtcaatcccctttggttccctagttctttccctccaagaaatcccaggccatttgagccctttcctgatgggaggaaagcagtcgaccagaaaatacaattcttttgaggaaaagatgggttttagcgtcttggaaccaagcttcacagagcgccttctgccagtgggcagccagccccttgcctaggctgatctggtcacctacttccagccccaccccagctctgtcctcccacccagctctgtcctccctgcaggccctgagcctctaggagactcaaagagacactgtgctgcccgctgaattcatctcccagtgagccatctctgaggaaaggaggtaaggctctgaatgcgatgtcaacctaagcattacataacactgataggttgtaaaatggcctcgctgcctagtgctcattctaactggccacaatccagtcctccctgttgcactgagtcagctccctccaaaggcggcgctttccaggcctcctggttgccctttcccagcagacctttcaagtgctcacccacactcacataaacatggcccaggcactgtttacagcagctctcctctgtgcattctcctggcttctcctgtctctcgccatttgtacccctcccctgcaacttgagtgacagtgattggtcctgagatgcaaatatttgatgcacatatgtttacaatgcagcctcagcttttttttttttttttgtaaagagacaaagagtgagacagggtcttggcctatagccctgtggcccaggctggagtgcagtggcacaattaaagctcactgcagcctctacctcctgggctcaagcaatcctcccatctcagcctccccagtagctgggactacaggactgtgccaccgttcccagcaattttttttattttttgtagaaatggggtctcactatgttgctcactctggtctcaaactcctgagctcaagcaatcttcctgccttggcctctgaaagtgctgggattacaggcctgagccactgcacctggctgtcaacattcttaaatctctttccttacatgcttcctaaacctctcacccaaaactaggagactagatgtcctattttccccagggcatgcctggtttacgcccatttcactttaaaagtgcccaatttgggtaataatttataagatccccctccctctaaatcctgtccttctatcacttcatccttcgctctcctttaaaatgagacagttgtcagcaggaatcctgcgcaagaacacaccaccctgtttcatagaagatatctcaggtaatgtgcaaacacgggtttttaaacggagcgcatttttctcatttgttaatatcaccacctaaatcatctcttgcctaaaacaaggagtagaaagtgaatgaaggaaggaacaggtgatggtcagtgtcctttctacgcctcaaaatttaagagtttatgtgaaaattcataaatattaatctcaatccaggttaagcaaaattttttgctctcctctttagaaatttctggttgccaaagttccagaaattgcttcctcattcctgagcctttcattttctcgatttctccattatgtaacggggagctggagctttgggccgaatttccaattaaagatgatttttacagtcaatgagccacgtcagggagcgatggcacccgcaggcggtatcaactgatgcaagtgttcaagcgaatctcaactcgttttttccggtgactcattcccggccctgcttggcagcgctgcaccctttaacttaaacctcggccggccgcccgccgggggcacagagtgtgcgccgggccgcgcggcaattggtccccgcgccgacctccgcccgcgagcgccgccgcttcccttccccgccccgcgtccctccccctcggccccgcgcgtcgcctgtcctccgagccagtcgctgacagccgcggcgccgcgagcttctcctctcctcacgaccgaggcaggtaaacgcccggggtgggaggaacgcgggcgggggcaggggagccgcgggggccgagtgaggaccccgggcctcgggtcccaggcgcaagggtgcccggccgggcggggtcgggaccccagtgaggaggggccgggggctgccccgcgggcgcgtgacgcgtctcgggcctgcccggctgcgctggtctccgctcgggtgaggcggcttggcttcgcttttcaggttaggaaagctccctttactgcgcgttggggggctgggggagctggcggagccccgttagggaggtcggtggcgccggggtgtctcagcgccccctgcaccccgcgcgggtccggcccagcgggcgatcgctggcgcccagggaactccgggagggccgccagcgggctccgcagggcgcggggcggggaggggcgcctgggggccgcggggctcgcgctccccgcccgttggccgcccctcggaggccgagatcggggcccagaacgccccttggcaaggcctggcgcttccgcgatgcccagagggtgcttggggggatggagagaggggcgcccgccgggggagttccgggagcctcggtgcctcccgccgcagctgcagcgttcctcccgggaggcggcccagcccttcatcctcgccgcctgagcttctccgaggggggctgcagccttgcggccgttgccaccgcctggagaagcggcccacgcggactgacgggcgggggcggggcctcgggcctcggcgggggcggggtccggggaggccccaccctctgttctccaggggcggggagagaggagctgcaggtctgcggcctggccccaggtgcgatggcggaccccagcttggccagtcacattcctcccagtccccctggagggagaacgctggccatggggggctccaaggaacaaccagcctcggatgacgacccttgggtcaccggtctccccacctgtgcggcaggcgccttcacgtttcattattaaacaatggggagaaatccatgtttactgtcctttttaaggaattttttgctcttctctttgaggtggctgtaggaaatagattttttttttaacctcgcaattccaccacggtcacatccatcctcgccatcgcagagccacagctctccgtttttgtttcctagcctccagattctcacacaacacagtgcagtttcactgctgtaatgatgaggatcttcatggccgcgttattttcttgttctgagagcatcacggtttaattagcagttccccatatgatttgaagtgtttcccgtttccttagggaaaactcctggtagaataggattaaggatttttacaaatataattatcaaaaacataggaacagggaattggataaatatgttaaacttctggaaaaatcaacaacgctcttagatttgtagaagaaaggaaaaaatcaccagtggaaaggagcaattttacttacacaaacacagagaaggtcttacagtgaaaaaaagctaaccagtaaggggaaaagcaggcagaggggtaggatgtgatttgtatgttatttatatctaacacaagtcttccacaccgaaaggaaaatattaagattataatagataaatggcaaaatgatgagtcatttacacaataaaatgcaaattagagcatgtttgggttatcattttacatctattaaaataaccaaaataattaatagtaacagcaacccttgctggaaggttgcccaaaacttggcattttcaagtgtctggggaggtggcagggctttggggtcacaaagatggttctgcagtcaattttgtgaccttggacaggctacctaatttcctgatcctccttttgtccattcatagaatggaggaaatgatagctactttctgcgtctgtatgtatgagttattgggggcatttcgaaccagtgacaaacattttgttaagcaatctggtgatgcattaagaagctggaagctgtgacccagaaaccccactcctgagaacttacctgcaatggaagaaacaaacaaacaaaaacaggcatgtattcctagcagaatgatctaaaattagaacacctggaaaagagcctaaatgtataacaccagggcagtagctaagaaaattatgacacattaactgaaatgaacattatgtaaccactaaaaatcatgattttggagcctgtgatatgtggggaaaaactgacaagtaaaaaagtgggttattaactgcacctgcttactctaacgtgaacgcatatgtgaaaaatctgaaaggaaaagcacagaaaatggacgttttcattgaaattgtcggtgatcttaattttcctttggtgaatatattgctctcactaagggcgtttaaaaaatagttcacaggttttaattttttagatgaaatggacccacagttttctgtaagagaaaggagagattgttatatttgctacttagaataaaagatttttagccaacgttgtttcctttttcaaatatttttccatttttttagttgattaatgatttagtaatttgtgtattgggtttttttaagaatcagttcttagattcatttatcaattctagttttttgttgttgtttttaaggactcctgaatatttttcaaaactgaacaatttcagccatgtctgagctttccgtcttcctggaggcacaaatctagtttagctgaaccacaacagattgtacatatcctgcagaacctctgtggtcttaggaaggttgaaagtcaccaaatgtcacagaaaatgagggtcaggaaaggctgtgatcacaagctcttgatccagaggccactcgggtgcatctgtgtgactgacacctcattgcatcatcatttcttgtaaaatcagcttaattttgcagagaaatggccacagatttttagaattatgctgaattatgtaagggagcagccattttaaaaataatgtaatcaaataacaataataacataacagaagtttctgcaccacactgacactgaacatggctgtcaaccaactagccaaaccaaggtgaaagattctctgaacttcagttttaacttacttcgtccattctcccttttcagatcttatttcttcttccaaggcaactatatccactgtgaactgctgcatattaaacattcaaaacatgtctgtatctaacccagtgatggctacagcattataaaataactcctaagtgaatagtgtgtgcagcaattctcacagctaggagaattttttttgtcgatgtgttaaccattcctttttctccaactgcattctacttaaactgttacagtattgtgtgatcactttaagggaggtaatccttcagtgaaaagcattataaatgttgaagattagacccctgaggacctagcactgaagcctgatcacgggtgccaattccctgagaagcttttatagattcccaaatcccatcgctaggcactctctgactggcttgtgatgggttccagcaatgttgttttttaaaagctcctcaggtaattctgatcatggaccaggttggggaccctttgctctgttcagtttgtggtttctaggtgccagtgagaaacccctacccccaatttttgtgcaaaatttttttcagcttacatcaagttctttatgaacctcagaaaattaaaatataacaagggaatttacttagctcagaagagacaagggacattatggggtgaaggtcgggggttgtttgacatttgccccttcccgatgtaactaattaagcttcaagttgtaatgtgttttatgggctagaaggctttagtgcctatatttggatctcagctccaacaccttggactcttacaaccttgggataagttcttactagctctgactctcactccccatctataaatgggaataagatgaacggggtaatttatagattttttagtaccctctctctagttccgctgttttgccattctgctcatgcaccaatgccatgtgatcttattgtagctttgcactctgacacctggcaggtcaagtgcacccttgattatcttctcattaaaaattttcttcagtcttttaagttttgagtataatttcataatgtcttttaaaatctcttttgaattctttttcaaatttatttattttttctttgacagataagattatatgtattgtgtacaaaattagaaagagatcttttcctctaagatctgaaacaagacaagaatgctcacacgcactagttctattcaacatatggtactgcaagtcctagccaggacagttagacaagagaaagaaataaaaagcatccaaatttgaaaggaaaaagttaaattgttcctatttggagacgacatgattttacacttataaaaccctaaagactccaccagaaaaccattagaactaataaattcagtaaagttgcaggatacaaaattaacatacaaaaatcagtagtgtttctatatgccaacagtgaactatcaggaaagaaataaaaagaaagtgccatttacaatagctacaaaataaatatttcagaataaatttagccaagaaggtgaaagatctctacactgaaaactataaaacactgatgaaagaaattcaaggagacacaaatagaaagatagcctgtgctcatggggggataattaatgttgttaaaatgtccatactacccaaagtgacctacagattccatagaatccctatcaaaataccaatgacattcttcacagaaatagaaaaaacaatcctaaaattgggtgaaggtggcatctttgtctcgtttcagatctaagaggaaaagctctcaatttttcaccattaagtatgatgttagctgtgaccttgtcatatgtggcctttattgtgttgaggtacaatgcttctacacctaattcattgagagtttttatcatgaaagaatgttgaattttgtcaaacgctttttctgcatctattgaaatgatcgtatggttattgtctcactctgttactgtgatgtatcacacttattgatttgtgtatgttgaaccatccttgcagccctgggatgaatcccactgtatcatagtaaatgatctttttaatgagctgttgaatttgcttcgctagaattttgttaagaatttttgcacctatgttcatcagggatattggcctatactgccattttcttgtgtgtttttgtgggactttgacatcaggataatgctggtttctcctgttattaatttctagttttataccatcatgcttagaaaaaaaacttgatacgatttcagtctaattaagtttgttaagacttgttttatggcctaacatatgatctgtcttggagcatgctccatgtgctgttgagaagaatgtgtattctgcagctgttggatggaatgtcctgtatttgtctgtttggatccatttggtctaagtgaagtgtaagtctgatgcctccttatttattttctttctaaatctcccgtccaaaaatctaagagatccaaagcaaacagggggttataaaattacctttgaattctgactgaaattgtgtttactttgtagattatttgctggtgacttggtatctttcaatattggtttcccaaacaaaaaacattgtatgtctttctctttttccagtcttcttttatgtctcagtaaaattttgtagcttgcctactacttattttcaggttaaatcctagatattttcaattcttactgccattatgaatgaatgtttttccccatgaaatgtttaactacagctgatttagggactcactgagttttgatttgttgatttgaaaaactaccaccctgttgagctcatgtatttattctaagacattttttgagattttccaggtaaaaaaattatacctagatgaatttatagaacaacctaatagcataaaagcaatagattattgttcaccacattaatgggaatgcctttcctcttaaaattatgatatcttgggctttgtgtttgtgacagcatttctttatgatggaaagagactatccttccagttctatagaaacgttttaaaaatagcttacatttttaaaaatttaggaatgatattgattttcattgaaaacttttcaacatctgaagaaaatcttttcttcctaacctattaatagagctcctgattttcaaccattcttgtattcctaaaataatccatattggtcataatgtattcttcttttactaaactgttaaaataagttgggtgctgtttttttagattttggcacctgtgtgagaggagggtgccatggcagggtggctaagtgtgcccacctgtgtactagcattgaattttgaccctttatcccattggctctaaacactacatctcaggtgaagacgcccaaatgtttatctctactgagttacagattcctataacaattgcttaaattgatactcccacttgaatgtctcataggtgtggcaaagtttacatgtctatactgaaactcttggttttctctcccaggcatgaccctccaccagtttgtcctatttcagtagatggcatcaccgccatctccctggttatggaagtcccagacccgggcaactctcactcctccatccactcaaccagcaggtcttattggctctttctgtaaaatatgtctcatttattcacagcctgctagctgcatggactccatcccaggccacgccaccatcttcctgcagcagtttcttaactggcctctccattccctttcttgtcccactaaattttcttctatttaagaaaaaatgttttgtagacatggggtttcaccatgttgcccaggctggtctcaaactcctgggctcaagcaatcctcctgcctgagcttcccaaagtgctgggattataggcttgagctgagcttttgaaaaaacattctatgatgttactgtcctactaagaccctttaatggctccccactgctttcagaggaaaatagaaatttctctctgtggaccatgaggccctcatgatctgaccctcaccacctccctagtcttagcagtccacctgccactgtctcatggggctccacagatttgatctcctttttggtccttaagcccaccaagctaagtatcttattcaaaactgtgtcctcagcccctagcacaattcttgacccttagaattctgacacttgaaatgtgtgttaagctaatcaataaattattgtgccaggcttggtggcacaataatgtgttgtgggtcacctatatatagctgtggctcacacctataatcccagcactttgggaggctgaggcctgcagattggttgagcccaggaatttgagaccagcctgggcaacatggcaagaccccatcactattaaaaatacaaaaaaaaaaaaaaccaggcgtggtgttgcatacctgtggtcccagctactcaggaggatcacttgagcccactgggtggaggttgcagagagctgagatcatgccactacactttggcctgggtaagaccctgtctcaagaaaaaaaaaaaaaggttatggtactgtaaatattatattacagtgtataatttttgacagctttttttctccatttcttctatggttattggtcagttctagccttctatttttttttttaagctgacacatactggctgggcatggtggctcacacctgtaatctcagcactttgggaggccaagacaggaagatctcttgagcccagaagtttgaggcgagcctgggcaacatagcaagaccccatctctaccagaaaagaaacaacaacaaaaagaaactggcacatactagttattccataaatatttcttaaatgaattaattctaaagttgatttttataatttacatcttaatagaaagacaatccatctcagagatatttttattcattaaggaaagttgcataaagtaatttattaaccttttaaagcattctctaagcctatttccccttatagagatatgttttctagtgatgtgtgtatgttacattttcaaataactcttaattttatttagaaattccacatttttgtgggttttatttattaaattcgattttcatctctattattaatttatgacagtttattttgaagttttctgttttcttccttttgagttgaataatcatttactttattttacttcttctattcagttgtattatccatgttcctctgatagccatgcaggttccaaatcctcacatttttcaacttctttaaaagattttttttgtgctatcctgataagcgttaagtgttatatcattttttttcatttttattatattcttaatgattttgattctctttttctatccttttggttttctttcttaggtaaatgatcagttatatcttttggccatttttttctgttggaattactgtctcttactgctctgtaagaattccttgcaagttctagaaatgaatcctctgttgattttaagtactaaagtcccctttaccattgtgtactctttctattaactttgtccagagtcagctttatcgtgctgaacaagaatctttacattttaatttttttttttaatttttaagttcaagggtacaagtgcaggtttgttccataggtaaactcgtgtcatgggggtttgtcatacagattatttcatcactcaggtactaagcctagtacccattagttatttttcctgatcctctccctcccttagccctccgataggccctagtatgtgttgttcctctgcatgcgtccatgtgttcttatcatttaggtcccacttataaatgagaacatgtagaattgggttttctgttcctgtgtcagtttgcatatccctgcaaagaacatgatctcgttcttttctggggctgcatagtattcgatagcatatatgtaccacactttcattatcccagctatcactgatgggcatttaggttgattccatgtctttgctattgtggatagttttgcaatgaacatacacgtgcatgtgtctttgtaataggatgatttatattcctttgggtatatacctagtaatgggattgctgagtcgaatgatatttccgtctttaggtttttgaggatgtaatcaaattcatcaattatttgccttatggtttgtgctttttgtttaaaaagttcttcccccattcctcctccaggtcacaaagacatttcccaatattttcctcttctagcgccaaacttgtacctttcacatgtaagtcttggatccatctagagttcacttttgtatgtagttagggatctagttttctttttcttgtttcccagaagcatgaaaccttcctcctttattggttcgtggtgcccatgtcagcacacatcaagtccctgttaaagtgtatctacgtgggtttctctctcaacttgcttttctgtttcctttggtctctccgtctattcctgagctttaccgtccagtcttcgtcactgtggttttgtagtgatttcatgtctgctttggcagattccctcctctttacactttttttttaaggttgaccttattattcatggacattttcttccccatagaagtttactgaacttctcaaaaaattgagattacctggaattttaactggcattttattgcaactaccagttcatttaggataatggacatctttataatactgagttatcgccatcaagaccatggaatgcctctccatttttttcagaccatcttctgtgttctctgtataatgtgtcacccatcagaagtcttttcttagttaagtcaattcctagacgctttacagtttggttgttactttgaatatctgtattttcttctggtcagttattgctactgtagaggaatgccgttggttttcgtaggctgaccttcagtcccacaaccttgcactctagcgttggttctcatgttatccctgttattctgttggattttctatgtgcatgatcacactaattgcaaatagtgtcagctagagcactttccttgccattcttacacctgttacttctttgcatatggccttggacagcaccttgagtcccatgacaatggatgtccctgttgtatttctgagtgtattcttagcattcttcttagtaataaacaggtattgaccattaccatatacttaataggatatcttgaaatatgccagaggactaggccactacttgactggtgacagagagtatcttagatgtataggcccccagacatgccagtgtcctctctcaccacccatctccactccaaagttgtctggcctcacccaccttctgtgcctggttcttctcctctgtgcttctctcactatgccatgtcctcgcctgttcaggtgtctctaagagctcatagatccttaactcttacagctttaaatgaggcacattcaaagcccgactcagtgtcattccctgcagtctcctcttcctcccatcttacccatttcaggtaatatctccagccagccagagtctactgcagtagctggcacatgaaataaatgtttatttaactgaattgaaaatgttagctggccattgtcaaaaatactattttgtaaatttataaatatggttctctttgtatatccattataaatatttagtatttagtttgattattccttatgctttataacatgtgttttcccattcattcatttatccagcatttattttgcatgtctatgggtcaagcgctctgtctaggaacactgctgtgaacaaaaccaaactcccgccctaaaggagcctgcactcccgtggagaacatgaataataagcacagaggaaataacataatatctcaagtagctgtaactgctccagagaataatgaagccaggaaagggggtgggctagggggtgctgttttaggtagagtgatgggaacagccccactgagcaaactttagccacatgagtagctggaagaaaagccttctaggaccagggaacagcaagtgcaacagccctgagacaggatgggcttgtcagtttgaggagcagtgggaggcctgaaccaggttacatggggcccagccagtatggccacgactttgtgttttatccagagtacaaaggagcctcactgagggacaagggaagtggcatgatgtgacccgcatattaagaggagagcgctcaatggcagccaggggaggagcagggaggctggttgggaggctgttgaagaaatcaggtgagaagtgatggaagcaccgaataagatggtcatgttggaaaaattgagaagctgaggtgcttagcattgattttcaaggtagagctactgagatttgctgatagatccaatgtatgctgggagagaaaattcagtcactctagagcattggctggatttgtcacccattgcagcgaatggagaaggtgctgacataaaagccctttagactgaaagctactgactgaggggatggtgccctagtttgatttcctggggtgtatgagtagcagggaggccaagagctgggcctcacgagattgtggggactacatcagggaagcaggcctgcaaagaacctgcaccacagacccccacctaaaagagcctccaaaaaccctaactggcatgacctgagtactttaactctgcttgtaactttcaaatatattttgatttgcttatgaccaccaaggcaaaacttcccatttcaataatgttagtagaaacataaacaggatgttaatttatttatttggtaattctttttatgaatattatccagtttaatcattagctctgaaggagatgaaaaataattttctaatttttagaaaaatttgcagctaattgggtgataaaggtaaggggtttctgagttcacaaaaatgttctaaaattggcaacagtttcggttgcacgtttcattaaatgtactaaaaaccattgaactgtacatggtatatggtgaattatatggtatgtgaattatatctcaacaagctgggtattgtttttttaaaaaataaaaataaaaaaggagaaagagagagagaaaaacaattgcagatcatcccagcactgaggacaagactaacttcagtgttccagtatatgccattataggttttacggcacacagtgatgatttggagcctatgatttgacctagggtacagcaggtactgtttagcaatcattttactattgtcataggtctctgctcttggagctaagtgcccagggtaaatgagatctttaatttgaaaagagatttttgatttgatgaatgtacattctccaaagggtcataaattgtcattctggatgtttgatctgtttgttgttttggtacaaaaattagaagaaaataattcactcataaaatgttaaataatgaactaaaagtcattcatcaagtccataacttagggtcacatttgtccttggagcaggagaaagagttgtgttcacccttttcttacttttgcttttgtcctaagtgcttcagagaagtacagggtggcaacagtgtttctactgagcagctgataccattgctatgcactcattcattatgcaggaaacatttagtaatttcaacataaatatgggactctgacgttctcctcttcattttgcagagcagtcattatggcgaaccttggctgctggatgctggttctctttgtggccacatggagtgacctgggcctctgcaagaagcgcccgaagcctggaggatggaacactgggggcagccgatacccggggcagggcagccctggaggcaaccgctacccacctcagggcggtggtggctgggggcagcctcatggtggtggctgggggcagcctcatggtggtggctgggggcagccccatggtggtggctggggacagcctcatggtggtggctggggtcaaggaggtggcacccacagtcagtggaacaagccgagtaagccaaaaaccaacatgaagcacatggctggtgctgcagcagctggggcagtggtggggggccttggcggctacatgctgggaagtgccatgagcaggcccatcatacatttcggcagtgactatgaggaccgttactatcgtgaaaacatgcaccgttaccccaaccaagtgtactacaggcccatggatgagtacagcaaccagaacaactttgtgcacgactgcgtcaatatcacaatcaagcagcacacggtcaccacaaccaccaagggggagaacttcaccgagaccgacgttaagatgatggagcgcgtggttgagcagatgtgtatcacccagtacgagagggaatctcaggcctattaccagagaggatcgagcatggtcctcttctcctctccacctgtgatcctcctgatctctttcctcatcttcctgatagtgggatgaggaaggtcttcctgttttcaccatctttctaatctttttccagcttgagggaggcggtatccacctgcagcccttttagtggtggtgtctcactctttcttctctctttgtcccggataggctaatcaatacccttggcactgatgggcactggaaaacatagagtagacctgagatgctggtcaagccccctttgattgagttcatcatgagccgttgctaatgccaggccagtaaaagtataacagcaaataaccattggttaatctggacttatttttggacttagtgcaacaggttgaggctaaaacaaatctcagaacagtctgaaatacctttgcctggatacctctggctccttcagcagctagagctcagtatactaatgccctatcttagtagagatttcatagctatttagagatattttccattttaagaaaacccgacaacatttctgccaggtttgttaggaggccacatgatacttattcaaaaaaatcctagagattcttagctcttgggatgcaggctcagcccgctggagcatgagctctgtgtgtaccgagaactggggtgatgttttacttttcacagtatgggctacacagcagctgttcaacaagagtaaatattgtcacaacactgaacctctggctagaggacatattcacagtgaacataactgtaacatatatgaaaggcttctgggacttgaaatcaaatgtttgggaatggtgcccttggaggcaacctcccattttagatgtttaaaggaccctatatgtggcattcctttctttaaactataggtaattaaggcagctgaaaagtaaattgccttctagacactgaaggcaaatctcctttgtccatttacctggaaaccagaatgattttgacatacaggagagctgcagttgtgaaagcaccatcatcatagaggatgatgtaattaaaaaatggtcagtgtgcaaagaaaagaactgcttgcatttctttatttctgtctcataattgtcaaaaaccagaattaggtcaagttcatagtttctgtaattggcttttgaatcaaagaatagggagacaatctaaaaaatatcttaggttggagatgacagaaatatgattgatttgaagtggaaaaagaaattctgttaatgttaattaaagtaaaattattccctgaattgtttgatattgtcacctagcagatatgtattacttttctgcaatgttattattggcttgcactttgtgagtattctatgtaaaaatatatatgtatataaaatatatattgcataggacagacttaggagttttgtttagagcagttaacatctgaagtgtctaatgcattaacttttgtaaggtactgaatacttaatatgtgggaaacccttttgcgtggtccttaggcttacaatgtgcactgaatcgtttcatgtaagaatccaaagtggacaccattaacaggtctttgaaatatgcatgtactttatattttctatatttgtaactttgcatgttcttgttttgttatataaaaaaattgtaaatgtttaatatctgactgaaattaaacgagcgaagatgagcaccacctcccgtgtctgcagttgtatttcctggtgcttgccctgtgttggggactgttttgggggttaatctgagccaagtggcgctttctgtcctcccttctcaagtgatggccgatggttcacgcacttccccctgttcctgcccttgtcctcacttcccagtcacccactagttcatctctgcggcttttgcattttctccacaagcatctaagtgggcttagcactggtaaactgcaaaggcactattgcagcaggaggaacagtctgggagcttttttcagtcctggatttagaaatagattttcttgattaaaatgaaaattaacaagctctaaagaactgttgacccttgaactacacagggattagaggcactgacctgccgcacagtcgaaaatctgcagagaagttttttttgttttgttttgttttttttgagacggagtctcgctctgtcgcccaggctggagtgcagtggcgggatctcggctcactgcaacctccgcctcccgggttcaggcgattctcctgcctcagcctcctgagtagctgggactacaggcatatgccaccatgcccggctaatttttgtatttttagtagagatggagtttcaccatattggccaggctgttctcaaactcggcctcaagtgatctgctcgcctcagccacccaaagtgctaggattacaagcatgagccaccgcgcccggcctgcatagaacttttaactcccccaaaacttaattgctaatagattaattgcctgctgttggctggaagccttaccaataacgtaaacagttggttagcacatatttcacatgtcatatatactatatactgtattcttaccataaagtaagttagagaaaatgttgttaaaacaatgaggaaggaaaagtatatttactattcactgactggaagtggatcatcataaagatcttcatctcatcttcctcacattgaggaaggctgaggaggaaggggaggggttggtcttgctgtctcctgggtggcagaggcagaagaaaatctgtgtctcgtggactcagttccaacccgtggtgttcaagggtcacctgtgcctgctttatgcaccccaaatcaggctctaaaatagtctcaggtcctgtgagccttagtgacacactcttctcagattcaatacctttgatctgaaaggtgactttgatttgtcataatcttccaactcattctctacatgtttcgacgcaccagcactgtgatgttcttggttatccttggcagaagttttctcctgcaactaatttgctaaaggcagggggtaatcagaagtgacagtggttgaaatcacaggccaatatcttagcaaacgtctgtgttgtaaatggggaagtgcctctggtggggtcttcaaggatcactccagcctggctagggaaactctaggggagaggcacttgaaattattgtactcataggtcctagagagggaggcatgtcatgccaagcagggggctggattggaggcgtgcccagggattgggtgcaactcagcgtgtatgagacagaaagagagagaactcctgggcaagtgcctttactgggagccaggatggaggacacaagcacaaggtgtaaggggatctcactggtgtgtttgaatgtcactaagtcacagtcaggggaagacaagaagtggaacttgtggcagggaccagccttattacactggcacctggttacctggacagggtgcccactgcctatttgtaggatgtcaaggtatcaggaaaatatgaagtttttaaaaatttacaatataatgccaacctcctacggtgatcagaggatcagctttgtattaaagatggaaagataccaatcatcacccacaaaactactaaaacagaaagaatgacaaatacaattctcggccaggcacagttgctcacgcctgtaatccctgcactttgggaggccgaggcaggcagatcacttgaggtcaggagttcaagaccagcctggccaacatggtgaaacccccattccctactaaaattacaaaaaattagctgggtgtggtcgcacgtgcctgtaatcccagctactcaggaggctgaggcaggagaatcgcttataaccgggaggcagaggctgcagtgagccgagatcccgccattgcactccagcctggcggtaagagcgaaactccgtctcaaaaaaataaaataaaataaacttttcattacctgcctataataatttctcaaaaagagtcaactgaggagacttaaagtgttcgaagcatagctacttgtaggaccagagtgaataatatccacctgtatctttcccaggcctcatgtttcctttgttatttcaaacgtgtgagtcatgcaaaaggaatttttactaaaaaggaaaagaaaaaaatttaaaatgaccagcataaacataattgagttcaatcccccagaaagggttattcggagaacagccaggcgctgcccttgtttttccccctccccatctggggctaagaccaaaaggggtctgtctttggagggaaatctgggtctgtacagcttcccactctaaggggagccttaatcccagccggaacctgagcttctccaggcaaggcctgaccttgccgactgatctaagcattctgcgcttcattttcaccccagaaaggtgacttcctcctggctggggggctcctcccctaggactcagctcatcctgaactaataaccgcgttatgtccatcctttgttccgttctttgagtcccacccatgttcttcaggaaagctgcagctggtccacgtgccttgcctgtgcttctgtagaactacccctcccttctctgcctgcagcagggctcctggaacttgaatgtgcacttgaatctgcaggtcctgactgtaggtctgtgtttctaacatgctgctgggtgacgctgtgcccgtcctgtggtcggcattgtaacaaggctccgcgggttcccacgccggagtctgcgtcagaaacctctggagggcttgttatacacagatggctgaaccccatccccagagtttctgattccctagtaccagggtggggtctgagaatttgcatttctaacaaattcccaggtgatactgatgctgctggtgcggagaggtcacatggaaaccactgctcggcagatgcaaaagaagcagaagccgccccaaccctgaaatactcacaaagctgctgtggagaccagacacctgccgggggaatgagagcctggggatcctgcctgggaggaagagagagctgggagctctatgggtgaatgccaatggaggtgcaaggaggtgactaactcctgccgtctgaaaatagtgaagcacagccgaggcctgaagcccacccttagtgagagatatagttaaacttggaaatggtgcccagtcacttgaaaacagcacttctcagattcagatgtacacatgaaccacctgaggatcttattaaaatgtgggttctgaggctgtagctctgaggtgagctcagagattctgcagttctagaagcttccaggtgatgcaatgctgctggtgcaaggaccgctctctgagaaacaaggacctagaggtccaggtcatcttggagagctgttctaaccctggccaagagcttcgggaggcactggggctcaggcacccggcaggggagtcttcactttccttgtctgaactctaagtgctgcctctcacacacaattcccttgtctggacccagacaacagaatcagtgcagcggcttatctcagaactaaagacagttgactgcccctggggaagggagggctctctctgaggaagtctcaaacaccctgctgcaaaattttcaccctcaggatccccaatttccctgaaccttaacagacttgcttgttctgtagaaattgcctgtaatttccaagataaaaggactagaaaggtggccttttcacctatgtggcttctcttttttttttttcttttgagataggatcttgctatattgcccaggctggtctcaaattcctgggctcaagcaatcctcccatctcagcctcccaagtggctgagatgacaggcacgtgccactatgtctggccctatgtggcttctccaaggtgaatatgggccttgtggggctccaggtggcacatgtaaggtgtgtatagtagttttgtgttcagacttaaatgagactcaaaattatactggggaattctcaggggcagacccctccaaaatcaaagacctgtggggcaaagccccagcatcctgccccaatgagctggggctgactccgacagctgctgcttctgggtctatcatctcctgatgctttgacaggccaaagcattagcctcaggttagcctctgaggcctgtcctgtcctatgcagtcccaggcagtactgctccctgtgcctgagacactggcttctccacatagacctcagacacagaactggggccactgccctcactgtgcactttaaagggtcctcctccaggcctccactcagagcctactgtcccgctcttcctaaaccacattccaggtgcccagggtgttggaattatctgcctcagggcccctgttgtcctcctatctgtcctcctacgagtggaccacaccaccagtatacacagctcaatgtccaagaggcagccacgacatcactgtttgggtctggtggctaagaagaaacttggacatgtaggctgggagtccacatccatgaactcaaggcccccaggaggcacacgatgaattcgagtgggaagagaagggggtaggccacgggacagaggcctccctctggagtcttcctctaaccgctgcaaatgttagaggcagttctacccccaaagcttctaggggaaaggagtgaaggatttggcaataaagtccttagtttttgcaaatgtctgcaagtcataaaagtgcttttaagttctccacaggtcaggactggtcatgttaggttcttacacctctcccatagtccctccacccctagacattgggagactcccagtcaattcaccacccaggatggctgcccctcaccttcttcccagggccccacatccaattaatccaaatacacccatgtattcaagcacctttctgatgaacctctagaaagtagccagtgctgcagaaatttcttgtagcatgtgctgaaatttctaggatcctaccagtcaaagaacaacagtctccttgcttccaccagggaatttgctaacacttgcttctaagatctgacctctcagagccactgtggtccatcaatcaattcaaaaattatagtggcctggggttgtgtgggtgaggtggctgcttgggaggctgaggtgggaggatggcttaagcccagtagtgcaaggctgttgcaagctgtgaccgcaccactgcactcctgcctgtgcaacagagcaagacaccatctttataaaaacaaaccagcagccagacgcggtggctgacacctgtaatcccaacactttgggaggccgaggtgggcggatcacgaggtgaggagtttgagaccagcctggccaatatggtgaaaccctgtctctcccaaaaacacaaaaactatctgggtgtggtggtgtgtgcctgtagtcccagccactcgggaggctgaggcagaagaatcgcttgaacccaggaggcggaggctgcagtgagccgagatcgcgccactgcactccagcctgggtgacagagtgagactctgtctcaaaacaaaacaaaacaaaacaaaacaaaacaccagcaaacaaacattgtgaactacaattaaatttatttaatcacagtactaaatgctacacagcaactgtgtagaatactgcatagcaatgaaaagccatgctttaaaagagttgtgccttacatgaggaagtgtgcataatataattttaattgaaaatcagattggcaggataatcattttttataaaacaacaacaacaaaaaaacaatgtccgggcgcggtggctcacacctgtaatcccagcactttgggaggccgaggcgggcagatcaggaggtcaggagctcgagaccatcctggctaacacggtgaaaccccgtctctactaaaaatacaaaaaattagccgggcgtggtggcgggcgcctgtagtcccagctactcgggaggctgaggcaggagaatggcgtgaacccgggaggcggagcttgcagtgagccgagattgtgccactgcactccaacctgggtgacagagcgagactccgtctcaaaaataaagtatatatatatatactgtacaaatacacaggaaaaaaaataacagaaatcttcaggccttactgttaacagtggttattgctgggtggtggataacaggtgatttttttatttccttctgtgttgtttttatattttccaaaaaatttacagtgtatcaagttgactggatcaaggggtatgtgtttgcgtgtgagtgtgtctattctgagtgtgtctatgagggtgtttctggataaggttagcatttgaatcagtaacctgagtgatgaaaattgttctcacccatgtgggtgggcaccacccgatcttctgaggtctgaatagaacaaaaaggcagaggaaggaggagttcaccccttgttgcctcctgcctgcctgcttcagctgatgcatccgtctcctcatgcccttggactgggatttacactgccactaccctggttctcaggcctttggacttaggatggaaacacaaccccagctttcctgagtctccagcttgaagacagcagcaggtcatggtacttcagagcctccataattgcatgagtgagttcttcctgtatacatgtccttctggttctgtttctccgagaggtctggctgatacatacctgaccaaatattgcttttacaatgagaaaaagattggtaactattatttttaatcagtaaatggtatgcaccaaacctggccggtctgccttcaggggggcctctctgtagcattttctcagacataagtacaacttttgagagtgtaacatgccaggctctgtgcccaacatttggcacatatagccttacctgatcttcacaacgctgtccattttaggaagctcacattcagaaacgtttattctctcacttacccagggtacacagtatgctccccaaaagtatattatggaaacacatggccattgatttgtgatgatatttaagagtttggtatagaggtcctgagcccggagtgctatgggcacaactcatgacctatgtgaatggtgcctcctggacttgtgcagggcaccagcttcaagggactctgctgactcccagcagtacctgggggaattgtcagcaatcctaaaagcaagctcagcctgcaaggctgcctaccccggacagatgatgccccctccaattgagccatgatcccatagagccgtagaaaatgggtcacctcctgcaggaagccaccagggtgcttgcatggctgggaactcttttttctctaactgtcccagaccatctgctgctttcctccctgcttccaaaaaaaaaaaaaaaaaaaaaaaaaaaaaaaaagtcattctctaaatttttatggtgggcaaagttatcagttttcagtaagcccattccttagctcccctatttgatccatcctcttctggaaaccttccaggaccccatcttcattgccttccttgctggttacaccatctggatcagttttctagggctgccataaccaagtaccacagattgggtggtacaacagaattctatttcttcacagttctggaggctggaagtccaacatcaaagtgtcagcaggtgtactttcttctgaggcctctctcctgagcatgtagatggctctcgcctctttatatcttctcatggtcttccctctgggtgtgtctgtgccctaagcccctcttcttacaaggacaccagtcatattggattagggcccaccccaataacttcacttagtgtaactacctttttaaaaaccctatctccaaatatagtcataaggtgttagggcttcaatatacacatggtggggggtgggaagatgcaatgcagcctatgacatcatctttctagaagtgtcataagagtatgtctgtcactctcaacacagttcaaaggcactctcaggactgtgagggccttgtggggaccccacattcacacactccccatgcttctcacaatgaagatgccaccgtcggagtcgccgtattcctctgcacagactgggtcaggacccaccgctcaccttaggatcaccaagggtgcctacctcatagcgcccatggcagagcaaatcgccgtgtttccattctggatatagctcctaaaatccagccaccacacccccaagtctggcacaaagtgaagagtttcatgatcaaccaacgtggtttagtttggctcagacctaggaagatctaaaactttacgccggatcatgttcctcccacacacaaatacactgcaaacacacctggcttggagttatgctgattagaagttaattaacataaagcagggagtgttggctgtaattcagtggctgctgcagcaaggctggcaaggtccccttcctgcatgttgcccaattccaaatgctgagcgtgcccaccaccctgcgtaccgcggctacccacacatgcaatgtgtccactcaggtttcttcatggccaaggctcaccttcctgaggcccccaagtctaaggtcaggggaagcaccacagagaggatcagaggatctcaaaggcccaagtccttccaaatgggtgaccactagccctgcccactgtccagactcacagactgcagaatccaatgagaagcctgtaattttgattttcttcttttccctgaatgactctgaatctccttttaccccaacccctggaggaggccttttctcaccagccaatctgaaaacccctttctctacaccgcctttcagtggaggaatgacaggtgctggggttgctatttctgccacacagatagtagggcatttattgtggaccagacttgtcccaaaggagggtttccagtctccaattggggtcatccaagcatggctgtttcctgaagaaatagctctggacctttgatgaacagaaaaaagaatgaaggaatgattccatgtgcaatcaagctcagattccccacataaagtctgtcaaaggccattcttagcttgagaattttaagagtaagatttttctctgccccccaaggaaaaggtccattgtggttctgctacacatttgatttcttttttttttttttttttttgaggctgggtctcactctgtcactccagccggagtgcagtggttcgatcatagctcactgcagccttgacctctctggctcaagcgatcttaccacatcagccttcctagtagctgggaccacaagcatgtgtctccatgccaggctattttttaaaaattttttgtagagatggggtctcaccatgtttcccaggtctcgaactcctgggctcaagtagttctcccaccttggcctcccaaaatgctgggattacaggtataagccaccacacccagcccacatttgattttgaccagccacattcgagttgccacattcccccaggctgccaggacatggagatgaatccaacaaacaaaccaggatgggctgtttggttctgtcccaccaattgtggaaaatgcgagcaaaaaaaccaccatcttgctcctgacataatcaccccgaagagtaagtaattggacaaaaaaaacattgttaaattaggcttctcccagttcccaaaagtaaaaccacaatataaaatggcagagtatttgtgtcctccaaggtgaggggcaaccttcattataaaaccacaccgaccagacaatattattcagtaataaaaaggtataaaggaccgttacatgctacaacatggatgaaccctgaaaacattatgctgagtgaaagaaaccagtcacaaaagaccacataggatgtggtttcatttatgtaaaatgtccagaaagggcaaatctgtagaagcaaactgtggattagtggttgccgggggttggagggaggtggaggatgggaactgcctactagtgggtacagggtttctgtctggtgtgataaaatgtgctggaattaaatggtagcaaatcaatgaataactttctgactattccaaatatccctgagtgtacaccttgaaatggcgaatctcatgttacgggaattaccccaatggtgctatttttttcagttttatttttgtttctatttgtttatttatttattttgagacagagtttcactctgttgcccaggctggagtgccgtggcacgatctcggctcactgcaacctctgcctcccgggttcaagcgattctcctgtctaagcctcctgagtagttgggagtacaggcttgtgccactacgcccagctaatttttgtattttagtagagacagggtttcaccatgttggccaggctggtctcaaactcctgatctctggtggtccacccgcctcggcctcccaaagtgttgggattacaggtgtgagcctctgcacctggccgatgatgctcttttttttttttaaagcacagaattgcctacctaagcacagaggtgatgagagggtagggggaggtttaggtagttgattaaggtttaatctgttgtaagaacatttctgcccacttgtttttctcacgagtgttccagaaaacagtctatagagaagcactaatagctttaggtctagcacatttctagacacttggtcctaagccttttctggttacaaaatcaaaggctaaatcaatgaaagctgaaaaatgaaatacaacattctcgacctttaagaaggtaagaaaagtgaaaaggaacacagtaatgtttaattatggagcagctgagtttaaaacctgcttgcccctgctgtgatatgtaatttacaaggcctgctggtatcaagagctgatgggattgttaccaggcgaataggccctttgcccatacgcggcagaaatgtggtcccctttattctacctaaagtactaaagtttcctcaagaaaaacctctggacctttggtgaactaataaatgctcagggtctgggaagtggcttcatgcacccgtttttgtgacaagtttagtgactgccttttctactaggttataaattacttctcatatagactatttcttttttttattttttgttattttactttaagttctgggatacatgtgcagaatgtgcaggtttgttacataggtatacatgccccatggtggtttgccgcacccatcaacccgtcatctaggtcttaagccccacataccttatgtatttgtcctaatgctctccctccccttgcctcccacccccaaacaggcccctgtgtgtgatgttcccctccctgtgtccgtgggttctcattgttcaactcccacttgtgagtgagaacatgcggtgtttggttttctgttcccgtgttagtttggtgaggatgatgccttccagcttcattcgtgtccctgcaaaggacatgatctcattcttcatggctgcatagtattccatggtgtatatgtgccacattttctttgtccagtctacttctcatacagactatttctacgcctttcattcacctggtggaaactctatcctttttcctgaagttggcatttctcctgacatctcaatctgcccagttgctccttctctacctcacaggaaagttatgctgatgagtaaggacacacccttctcacacactgagctgttttggcaagactaggtggtgtgaatatcaggccttgtgacggggcgggggaccttgctggagcctcagcttcttcactgcccacattgcgtctctgtcttactcacttgacctgttggctctgttcagaggtcttgcttgatcctttaagacccagatgtcccttctgagtcatcgtgtggcatttggccttgtcttccccggcctgcatttacacccaatcctccttccctgtgtgtcatcacacacctgcgtagcacttgcagttggagtcgggagagcagagaagatggaagagaggcattggttcatgtccagttggaaaatcagtaatgtttccatgtggcagctgaagtggaggggagagaacactcagtcaacccttcaaatcaaggacctccatggtggaggtgggtgtggtctacaaagaagcatgcccctgtgctgaagggatcactcccctcctgccccgcagtaattaccattatccagggatggaaaggagaacgtgtggttgaggaaatgttagctcttttcctccttttcctggaccacaaagctaagctggatagaaaagcttgcagggcagaaacagttgtaaaagacatccatggggacaccctagatgtcagctgttcccattctgttccttcctccccaccccactctctttggcaagccagtcctccactggggcacctgtaatgagttactccctgctgcacggcctcacttctctccaagaactagcctcatcattcggactcatcatgaatccataccttagagcctcttgagccacctctagggtgcttaacaatcctctgtttatgttgttccctccacctagaacatctttcctgctccctatctccaagtggcaaactcttaatgtatacatcaagacccagcaggggccaggcatggtggctcatgtctgtaatcccagcactttgggaggccgaggctggtggatcacctgaggtcaggagttcgagaccagcctggccaacatggtgaaaccctgtctctactaaaaatagaaaaattagccaggtgtggtggcacatgcctgtaatcccagctacttgggaggttgagacaggagaatggctggaaccagggagacggaggtagcagtgagccaagatcgtgccactgcactccagcctaggcgacagagagagattccatctcaaaaaaaaaagaaaaaaagacccaactgaaatctgaaatgtcagtctgatgaagcctatgaatcctgctcagtataatgttttaaatgcataaaataagatacatgggttataaaataaactgattaaactaaaatatagttatcaaaatatgttaatactcattaaacttaaatatctaaaaactcactgaataagatctagtggtgagcctaataacaaacataatttaacagtgatatgtgtaaaggacattttgagatttgttacacctggaattaggttgaccaacttgtcctggcttgtaccatactttcccagtttagcactgaaaatcctgtgtcctggaaattccctctgtccctggcaaactggcacttgagaaccctgtgtcctggagaacccctcagtccctggcgaactggggcagttggtcaccctacctgtaatgtggcatgaaagcatctgtgattgttagtggtgttataatcacaggtacagctaatgctactgtgagttgctacctgcattcttcatggaggaaaagctctatttcaggtagaggtgagtgaaaataaagatgtgttggtttttcccatccaagttcatgtattttccaatttctctccgtggacagcccccttccagttaagaacccctgcaattggtaggacagagttaggtctactctcccctaatattcatactttgttcttagctctacaataatttaccaaacgctgtaattgtttgtttaaacaacacaacaaaaattctccattaagcacctttcttacagggttgtgggagaattaaaagaaatgtatacaggagagctggcatgaagcaggtcattgtgatacaaccagagccctcttgcatggttgaatctaaattggttgaaaaattttggaaaactggcaggttctactaaagctgaacatgcccctatcctatcacccagcattttgactactgagtatttccccaacaaaaatgagagcttatagtcatcaagagacatgcctaagaattttcctagcaactgtattccaatagccccaaacaaaggataaccccagtgtccatgagagaagaacagatcaagaagttgtgatctatttaaacaaccatataccatacaggaatgagaattcacaaataatatctcagccaggtttggtggcacacacttgtaatctagcactttgggaggctgaggctggaggatcccttgaggctagaagttcaagactagcctaggcagcatgacaagatctcgcttctaccaaatgaaaaaaaaattagccaccatggtggtgtgtgcctgtagtcatagctatttgggaggccgaggcaggaggatcacttgagcccaggaatttgaggctgcagtgagccatgatggcaccactgcactccagtctgggtaagagaacgagaccctgtctctaaaaattaaaaagcaatttaaaaaacaataataacatatctagggaacaatattaataaatctcacaagcataattttgaacaaaattacagttacaaaacaatgcatattgcatgattccatttgtataaaagaagggtgaaacaccagcctggaagctagaagtcaaggtagtggttactgctgaagggggtgggaatattctgctggttacctaagggtattgagttcgtgaaatctactgaatggtgtacttatggcacgtgcatttttctatattatgttatacttcaacaaaagcattcaatatgttgggtcctcattcccacctcttgccagatcccacctgcagccaccaccaccaagaagtgacctctccctgcattttccacttgggttggctctgcgacttggcaaagacttttccctgctgaatccatccctctctccacagtgctttgaacttcctcctggacaagggcaaccacagcctctggcactaacctcttaagttgccttcacaaccatcaatgcttcattagtatttctggcaggctggtaattaacatgttagcacatacctgtgtattcaaagcagcttttgggcccgagcttactatcctttacactatttcagggaaggatttgtattgaattctgtggtttcaactgtgccaagcagcaattgataatctttcatccgcagcagctgtaacaatgatgggagcagcaggcatgatacccctgcacagatgagaaaactcatcctcagtgtgaacttatgtcaccccaaagatgcccagcaaatataccatttattgtctgaggtggaaatcaccctccatgagagagaaggccaaagctcccctgtaatcgatgatgactaagccctgcaaagccgagaatggcaggctggggattagaactcatgtctttggctcatgtccactctctgtgcagcgccctgccctcacccccctcccccgagaacgaacaccacccctgggcaacccaggtgtccccactctgacacagtaaaagctggaccgtcatctggtccaggtagcctcgtcctgggggaggcctttctccatttggacattttcctgtgtatttagggagagtgacaaactgcagaccaacttatcaggttaattatgcttttaaaaacatcgcagacgaggagcaaagtgatggggaggctaaatgaggaactcggtggtggctgagtctggcattctttgcccttctttgggtctgcaggtgggagtttctgccctttcctgggcctctcctttctggacaacccgagagacagatcaccttaaaacacagccttcatcctgtacctgccctaagccttcagtggctccccatcttctaccttctcacctacaaacatcctgtcccacatacactgggtgattcccgcacgagaggaagaactgcttcagtggtcccggctgagccagaaggaccactgctcttcctcatctcccacccttcctcacctccctcccatcctccccatactccaccccaatccctgccctgagtcaattgctcacagccaagttccaaacactaactgcactctgaccgggaagggcagagaactgcaggggaaatgatccatggattagcacagcatttgcttctccaagctgtggccaccctctgggctcattttctgcttctaaacaactctataccacagaatctcaactaccaccatgacgggtcttcaacatgctgcccttgatttaaaagacaaccgcaacaactgtaaaactgtctcccttatccctgtaaaatttgctcttgctgcttttgtgtattccaaccaactgcgatgtggaccgtcaccgatcaacaagggataaagggaatctagatgcatctagattccaggcactgtgctaggtgccaggcaaacacatgtgaatgaaacacagtccttcaacttctatgagctcagcagaatgtgtgaatgggaggctccggtgactacagtaataggctctgtgccaagtggcaaaggaaccacatggagactcgcggctgggtttgggagcagaagagtgggcaaaccgtaaaggagggtgaatttaagattttaaaaaagccatagtccaaattctaaaatagtaaaagctgaaaaataggcatattctatgacccagcaaatctactcctgagtatatattcaacagaaatatgggcaccaagaagaacatgcaggaatattcatgacaacactattcataagatcccaaatgagaaaccgcccaaatgtccatcaacagggaaatggataagtaggttgtggaatattcttacaatggaatgaatgatctataactacacacaatgtgggtgaacctcaaatacgtaattcgagcaaaacacagacacagaagattatattctatataattctatgtatatgaaatacaaaaccaggcaaaactaatctatggcatgggactcagaaaagtggtcagcataggggagggaattgtggcgtgaagaggccatgaggagcttggagtgtgctgtcatgctcagtttcctaatctaggtgcaggttacaatggtgtatttggtttgtaaaaatacataatgctgggccgggtgtggtggctcatgcctgtaatcccagcactttgggaggccgaggcgggtggatcacgagatcaggagatccagaccatcctggctaacacggtgaaaccccatctctactaaaaatacaaaaaattggccgagtgtggtagcccatgcctgtggtctcagctactcgggaggctgaggcaggagaatcgcttgaacctggaagccgggggttgcagtgagccgagatggcgccaccgcactccagcctgggtgacagagtgagactccatctaaaaaaaaaaaaaaaccataatgctggacattgcaaatatgtgcacctttgtgtggatctcagacttgaataaaaagaaaaaattaagtatgtctattgtcttagtccattcaggttgctataataaaatatcataaactgggtggcttataaacaccacacatttatttctcactgttctggaggctggcaagtccaagatcaaggtgccagcagattgggtgtctggtgagaacccactttgtggttcatagatggccatctttcactgtgtgcccacatggcagaagggacaagggagtactctcaggcctctattataagggcactaatcccaatcataagggcttcacccatatgacctaatcacctcccaaagatccacctccattaccattacctcgggggtgagaatttcaacatatgagttgttgagggacacaagcattcagactgtaacagctgtttaggtagctacacagctaaataagtattattttccaaatcacatttcagcgatttctctaccattaggccatgggccagcaatggaacctggcttatccttcttgtgttcttcttttcctggcacaaatatggttggtaatcttgccaaacagtaatctccctggtatagttaatttggcctgctaggttatatccaaacgatcactgtattcacctataaatgctctcaaactggtccaaggtctaatcaaagctggaaattgatcaaataatgacccattcatgcattctagaattcagccattccctgttgcgtttttagaaactggcataattttctattatttacgcgatctagagaactatgtcatagacccctgcatcatagaacacccagatctgtggtctccatctcattcttcctgctttctcaaagatgatctacacacagttctatttcccagactatataatataatccactttatgtaacatagtgtaattcacttggccctggtctctcagttcttttgaagaaatgaatgttctcacactaattccttggtctgtttgtcgatctttacaggcagggagggaggatgcgaggcagcattgggtcggctccacattctccacatctgcttattgttttcttgccttgtttgcagcttccagagctcctccctgcttctgtagcaatttcagtcttccccattcctctgtgcctttgtaaacagccttttgttcactaacaagaggaatctgctgccacgtcagctctaaaccaacctcccaccattctctgggtaaagtcctgcttagaaagggaataggaagaagaggggtggagggggttggagatgattgtgtctagtgggaacaggcagggggatagtgcacagagttcacaatgggacaacgagcctgccgaggctgcactgccggcctggctgggtgaccttgagcctatctgggcctgtgagctcaccatgcaaaggagctggaccacagaattctgagtcctttctagctctaaacactgtggccctaagtatctatatgtgaaacaaaattgtcctgacatttgtctctgggtactgaactattaggagattttgattttttcatctccattttgcaaacagtctgtactaagattacactactgtgtttctgttttgtgtgtattcagaagcacaaaaagtctgtggttctagaaaggaaatagaaaagttcttaaaaaaaaaaaagtggggaagtgaaacaaatgttaaagtcagaggagaaagaaaggcccaaccggaggccccaaatccacccagagcccagaagcccgggtttcccaccgaccggctgcggtctttgtcagctctctggcgctatctgctgtccttctcgataacaaccgtttaatttggtttgcaaaattgctctgacgcaaatccaccgtgaacactgacggggtcacattcagcataaaaatcgcattctgtttacaggaaaatctggccccatacttgctcccatattcacttttgactttgccttgcagtactaactgtaacagggacacctgagcaagtcccttctgtataaggcccaaaatggtcacccaataccaatgagtctcttgctttggaaagcccaggaatgcacctccagccccttctgcgcagcgctcggacaccatgtagaggagaaggcactctgcagaactcgccctcagcccgcaccacctgtccaggggactggctgcgtgtcaatgtgtctctgctcccggggttcccgcagatctttaacttattggcctttgggctaattcagtccttcaagcattcctcgcccaacatgccaggaagtcttctcacgtgtcttccaccccatacctaccagttctgttttcccactacccgatgaaagtgtaaccgccccccggcgccccccccccccaccaccacacacacaccctgttggtcccatcctcagggcgtggtggtccaggtgaacgcttgccctctttttgagctgaacctccccacagaggctgtcagcaaagactgctttgctgtccaaggccggcctttaggtacaggacactatgcatgtccagcgaggcttgttgaagccacatctgtcatagatattgatgggaaaagcattttccttctaacacatctcattccaattctaaaaggcacctctgaagccttgctgaacttcatcaagattttcacgtggtttccttagtaaagtgtgatgagaaggtccatccttctcaggatgaaggagtggtccaggaagccctgattggtctgccggggagggaagggctgccttatttggagacctgcaggaatgccacctcccccggcagctcctatatagctgggcggacctggctgccaagagggtgtgctgggggactgtgcagctcgaggctccagaggcacactccagagagagccaaggtacgtggggggccacttctgtggtcaggactgctggtttcttatcaaggctcgatcccagattgaaaatcatgcaatgatttctttactcccacacctggggatgggtcccaagttcagggtagacttgcgaggatacccagtcatcactgggcttgcctttctctaagttggtgctataataaaatgctactttagggtttgtgggttgggattttgttttgcctttaagcttctgcctatgaaaactaatctctttctcaagaatgctgtgcttttattttttttatttgactcacctgaaatgatctattatgccattaatcttatttaagatttctccttaaaaaaggaatgatgtggagtatggccctatttaggagactaatgaatatttgcttcatgcttggatctctttggagaaagtcagtctgagttcactgtgctcaggaggcagagagagtggggtgagggggtccagatgctcatagccaccctgggacaaagacgaggcgatgtctacaagcaaggaaaggtcagtgaggcctctttgcaggcttctagagatgactggatgtgcttctagagatcacttcagctgtgttttgccttttttttttaatataaggagcaatgtggcatcagagttgaacattttatcagaggaacattagccacttttagggaagctgcagcagggtggtggagggtgtgtgaggggcgaaacaagctccctgtcagcctcctccagctctggggccccatggcctcacagtaagtctttgcctaggagacagcttaggcaagctccggtatgggaactccttccatttccctaatccacacaggcaaagacccaggtgctagaatgccctgacagtcggccttgggaagtggatttccttgatggctattgtagattcaggagccgaatgtgacaggcaaccttaaggtgtggggtgaggggcttttccatgacatcagtggcagcccttcggatgtcccagggccaccttgacccgggaccctcctggtgttcccccaggccctcctgtcttccctttcatctcgttttctccgaaattcctcaagggccctgccctttgccctttgcccagctcagggggcatcatacccagtgagtgaaaagcacagtgtgtgagcactgtcttctcctgaaacccagatgggcagtggggcatggctagtggacacatgcagtgcagcattagacagagcccagtgcaggtctgccacctccccgctgtgcagccttgggcaaattacttaacttctctgaatcccaggacaacatttataacatggggataataatgtacctactctatgtgagaattaagttaggcaatgtcagagaagagcttaacacggtggcaggcatgaagaaagtatgcaataaaaagccagtaggataagcagatggtcacactgtcccccaggggtgagattggaaaggatgcctggagcacacttgacccctggacataggggaggcaggggtccctttgctacgtttccatctttcccttccttcctcctcctctctctctcattactgcaaagccctttaggatcagcagccagtgaattcctcagaatggatggcagaatgcccccaagacagtgccagctcagagcaataaagaacaaagaggggagattgaaagtacaatctaaagtcggcacagtggctcgtgcctgtaatctcagcactttgggaggctgaggtgggaggatcacttgagcctgggcaacatagtgagaccccgtttctacaacatgtatttaaaaattagctgggtgtggtagtgtgtgcctgtagtcccagctactccggaggctgaggcaagaggattgcttgagcccaggagttcagggctgcaatgagctatgatcatgccactgcactccagcctgggcaacagagtgagatcctgtctctaaaatatgtgtgtgtgtgtgtgtgtgtgtgtgtgtgtgtgtgtatgtgtgtgtgtctgtacatatacgtatatatatatgtgtgtatatatacatatatgtgtgtatatatgtatatatgtgtgtgtatatacgtgtatatatacatatatatgtgtatatatatacgtgtatacacacacacacacacacacacatatagtccatgcccaccagcatttgattccaactcttctattgtattttcctcccagggatttcttgatttgaaagacttgggagtatcaaagaaaacctacatgtattaagtcaccactcctttattttcccatgcgtattcaaagccactataattgccctttgccattcttacctgtctcggaaaccgggaccagagccctgagtgaatgtaatcctagcaatagcaaaggagctcggtgtttgagttaaccctgcacaacccaaacatggggaaacaattatgcttttgagaccacataaatagcacaaggatgcgattccttccttaaaatctcctgcacttgggagggggcaggggagcccaggcaggcctggtggggagctgacccaccgccgtttctctggcaggttctgacgcgatgaggaagcacctgagctggtggtggctggccactgtctgcatgctgctcttcagccacctctctgcggtccagacgaggggcatcaagcacagaatcaagtggaaccggaaggccctgcccagcactgcccagatcactgaggcccaggtggctgagaaccgcccgggagccttcatcaagcaaggccgcaagctcgacattgacttcggagccgagggcaacaggtactacgaggccaactactggcagttccccgatggcatccactacaacggctgctctgaggctaatgtgaccaaggaggcatttgtcaccggctgcatcaatgccacccaggcggcgaaccagggggagttccagaagccagacaacaagctccaccagcaggtgctctggcggctggtccaggagctctgctccctcaagcattgcgagttttggttggagaggggcgcaggacttcgggtcaccatgcaccagccagtgctcctctgccttctggctttgatctggctcacggtgaaataagcttgccaggaggctggcagtacagagtgcagcagcgagcaaatcctggcaagtgacccagctcttctcccccaaacccacgcgtgttctgaaggtgcccaggagcggcgatgcactcgcactgcaaatgccgctctcacgtatgcgccctggtatgtgcctgcgttctgatagatgggggactgtggcttctccgtcactccattctcagcccctagcagagcgtctggcacactagattagtagtaaatgcttgatgagaagaacacatcaggcactgcgccacctgcttcacagtacttcccaacaactcttagaggtaggtgtattcccgttttacagataaggaaactgaggcccagagagctgaagtactgcacccagcatcaccagctagaaagtggcagagccaggattcaaccctggcttgtctaaccccaggttttctgctctgtccaattccagagctgtctggtgatcactttatgtctcacagggacccacatccaaacatgtatctctaatgaaattgtgaaagctccatgtttagaaataaatgaaaacacctgagctggtggctgtgtactttgactggtacatggaggctattttaatccttctaactaaactaaaatagattaaaggaattaaactaaaatacaagtaaagctagacaaaggcccagaaatcatactgtaaggaaatgttattggaagctgattcccagagcagaccacatatacagcaggatgtgcctgtggcatgaagattttctttctcttttttttttttttttagatggagttttactcttgttgcccaggctggagtgcaacggcatgattttggctcactgcagcctctgcctcccaggctcaagcacttttcctgtctcagccttccgagtagctgggattacaggtgtgtgccatcatgcctgactaattttgtatttttagtagagacagggtttcaccatgttggccaggctggtcttgaactcctgacctcaggtgatccacccacctgggcctcccatagtgctgggattcaattttttttttttttttttcaaaagaagggtaagtgcttgctgttcccatccctgaaacattgcatgtatttaagaaaaacaaaatgttagtggcatatttgcttctaatgttcccctaaccctacatgcatgttttatgtgcactcatatgagtatctttaaatataatccctttacatctgtgttctatgcaaagtctctcatttctttcaagacagcctaatgaaggccatcatctctgtaaaccacttgtcactacaaaaatacaattactcaccaaaaagctttaaaaaataaagctgtgtctttagggagacccaataaagaatgcaatccatgccataagcaggagttgatacaccaccttattagctaaaaatatatataacacaatatgagtaatgtttaagatctgttttaaatttaaaacaatgaattgaatgctctaagaggctcctacaggcgctccaggccactctcagagactcccaggagttgttgaactatatttggagaaaacagccactgaatattatcatttctcctttaaagagagtttgtaaggggggaacatgcattttatcagacaatttatccaaagcattgcagaacatgagtgctgatgagggcacctcttgtgctgagtcccctcagctatcagtgttcttctcaaggacacatttggaaggttttaacattgaaagtgagcggaggacttgggggcagagcagcacaaagaaacagccttacactgggcacatggaggagacgtccaccctgcagccaggactggggttcacgtcactgccagagctacactcgccttctgcttccacggtcctgttaattctagatcagagagcaagaaaaaagtacagaacatatcctctacggttatttcctgctttctaattaaaaaaataataaccatggcaagagagaaagaaagagaaagtactcagaggctgacactgacatttcacttcctcgctctcctaagtttaattacaacagcacgtgcagccacgtcagccaaatgacttcatttctgatgtgaaaacgcttaggccatgatgtcgttcattttctgtaattgctgccttttctcattctgttaatagtcccggcaaccagatttcagtggggcatgacgtgaatgtgtatatggtgattcaaatgcaaaatttgtttatggggcttttaatcgaacgcgtgtgtgcctgaacattcttgctcaagttgatgaatcatggggtggaataaaggctgagtttagtttttcactttagcaaaggggcaatggggtgcctactatgtgcgagacattgggaggggcttctgaattattctggatatcgtcattttgcagtgtgcataattttgccaaccgttgctttcgtagcccctgctaagtgttgactttttaaaatataagtttattgtaaaagtgacatgaaaattacaacagatattccagaccaaaataatacaacaatcccagcatctgattgagtcagtgtttgctgtttcccctgcactttcctagttcttaagcatttgcgtatgtaaacattcatatttgcaataaaaaagtgagcttttatattctaaatttttacttaacttaattcaatgctttctactcatttttctatacttttttttttgaggcagagtctcattctgttgcccaggctggagtgcagtggcgtgatcttggctcactacaacctccaccttccaggcttaagcgattctcatgcctcatcctcccaagtaggtgggattacaggtgcccaccaccaagccctgcaaatttttttgtatttttagtagagacagtgttttgccatgttggccaggctggtctcgaactcctgacatcaggtgatccacctgcctcggcctcccaaagtgctgggattacaggtgtgagccaccacgccctgcctactctttgttttctttcctccccacccattttcccccgtcctgtcccctccttccagcctgagatgtaggctccaccttaactgtgctcagatacacaagtgagggctttttaacttgattatgccttttaaaaatactatgtatgtaaaatatttattcatctgcaatttggcttccctaacttaacattgcatcatgaaactctttggaacaacagctatctagatagctgactcattcttttggattgctacgtaatctcacttaatacagatgtatcatgattgattgaatcattgccttgttgatgggccttcagattatttccagttttttgccactgcaaacaataaacatccttgtacatactacattgcagtctggtacttctgtttctgtggaatagattcacacgtgcaaaatttctggaacaaagcctgtgtgtaatttaaattttaccagccatgaccgggctatgctcgcacatagctggagcaaatcctattcccaccagctgtttacggcattaatttggaagagtttctgtcatttaactatgagaagccaccttttctacaaatgttgcctacacatcttctctcttttgcaaacggcacacctaaagctctctaaaactttcggccatgaggaccatttgaaaatcctcctaaaactgttagcaattctcattctaaacctggtccttggcccaaaacatctgcatgagaagcctggaaaacaggcagtgagtgtgtaggcttccaactcagagggtggtgtgtctgcacagctccacacaccccagcaactgggaaggcttgaggtgaggttatgccctggcctttttactgacttttactaaaattacacatgcaagtatttgcattccagccagaataccctctagatccaaaagctcaaaaggagcagagaattgagaacactattaaagtagcccatgctgttcctcccctccaggctctggcagacaaccagcatttccctggtgcccctcacaccctaccttgcttaggatatgcctgacaatgtctagaaacttcaccctctggtcctaatagggtgtcccaggcagtgaccttaagtttgtcttgagccgcccacacgctctacctcaagttttctgacaacaagtgactggattggggtggtggctgattgggtcaaggaccccaggccctacatcgtacctatggtgtggtcacatctttttcctgcacccaagacttttttgtcatggctgtagatggatggacacgtgcaccctaagctgtctctgtgttgctgcatgacacatcctgagtctaccagagtctctactgaaatgtgacagcagggcccatgtgccttcatgtaaccagcactgtcacagaccacacctgccaggcgagtgatcaagacttacacagacatggcatcatgaccagtttcagtttttctggctcagacaccactctgttgaggaacagacttcttggtgagcctggctcaggccagaggctaagagtttgctgtctccccagaggccacgagtcagagaagagcgagggcttcctcttcccttatcctcagtgctggcagaagaccccatttcagtgggcacccagcttccccagtggaagaaaaaggagcccaaccctcatgcctctgggaatgcatccctacaaaatgggaataactcagatattccctgcaaaatgagactaaaatactatgactttgagaaatctcaaagcacattccagatcatccaaagactgccccggaaaaacagactcagctttggcaaatgggagccttcccctgggcccgtggctttagggagcctcactttggagcaggagcatgcacggggaagcgaccgagattccacccccagagcactaaagccccgaggcctccctcccacagtgagccccagaccccaaacagagggtggagaatgtgctcctctggcattggatgagaggccttagactgaaatgagccccatgcactgaccatgccccttctaaagggatcttcctggtcagcacaaagctgaccccccaaaagagctcatcctccaatactcaagtgtcatccctgttccctggactgaactgtaatgggcacacaaattccctggaatcttggtgaaatgtaccttctgcttcagcaggtttggggtggaccagattgtacgttccttttcttttcttttttctttttttttttttttgagtcagagtttcagtcttgttgcccaggctggagtgcaatggtgtcatctcggctcaccacaacctctgcctcccagattcaagcgattctactgccccagcctcctgagtagctgggattataggcatgcaccaccacgccaggctaattttgtatttttagtagagacaggggtctgtccatgttggtcagcctagtctcgaactccggacctcaggtgacccgcctgcctcggcctcccaaaggctgggatcacaggcgtgagccaccccgctgagtcccagattctacatttctagcaagtgtcactgcctcctccaagatgccctgtaccctaaactgaacttcatccctccatccgcccctcccgccctcccatccgtcctggggattcccagatcttgttttaatgcaaacccttttgtgagaaagcattgctttcttaaacaatgcaaattgttttgactccaacaggtttggctataatctgtcgaaggaaattggcagaaggccagagaggaactagaggaagctggaagcaggcagttcaaggccacatgaactcacacagctgccctcccttgatggtgggaggtgggtggtggggagggagaggggaggtactggttgcggggaggagaccttccatacaccccgtgtccaagggagaattacatgcacaggcttatcagaggtgacaccagcatccagcagggaagggtgttttgcaaccaggggctccatgctcaaaaaaataacattcagcaccaaggagagggattttcaagaacgaagcagagggtaaggtgcaggcagggtcccggctaggtgcaagccatgtcggttgtggtgtgctggaatttcgaaatctgtaattaagattctaatttttttaattggctgttttggttcggggctacttagcaatcaagaacaaaatggaggcgcttatgacgtctcttaaatatcgtttattcctgtcgtgcccaagccaaatcatgtcatcacctctgatttcctggggcaaacaaatagaggaagcaggaagcaaagggctggtgggttttccttagctttgggcccacttgggatagccaaacagtggaagcctccacccaaagttaacgggctttctaggctcatttgcacaagagcagactccaagaagtttcttctggaatttcaaatgtgatgtggtctgcaaatctgctccctgtcagctaagaagatgttgacctgtgcagatggctgtttccagaagtcgagctgtcagactctttccaagggcaggacccaggcctcccccatctgtctgtggagccctcataagcagcatcctgccttagagatgggttttacttagaattacagaacatttttcctctgggcattatctcagctcctaacttatgtttaacatttgagccaatgtccttctttgcctcatcttgggcattttgtggatttgttcatgcttccactcgacaaacatgcattcaattcctgccatgagtctgtctgctccgtgcgggagctgtaatggtgggcaacagaggcaacgtgcctgctgttaggtgttttgttctggtggcacacgcatgcatgtataaccagaggtgtgctagtgtaccagctctatgcccgagtaggggtgagggagccctaatttgtactatttgccaatttctatgatgtaaatggtgacccagccaatttcaagttacccacactcactgaatgtggagttaatagagatgtgtatgttcatctctcagaagcctgtttgacctgctccagcacaattaatttaatttaactgtttactttgtaacctttacacatattaattcactcctataaacaatatcatagctcttccaaatcagagctgaagtcatctcaaccgggaggctattgatggattggcgatggtcctccaggtcgctctcccttccatgcagacacctaggtgaaagccaagccccaggtaggcacaggaagagccgaggccagagcggaagagaaatggcacatggagctgccactggagttgaggattatttagcagtaaatcttttttgattttctattgcatgcctggcagtccactggaatctgcagatgccacaatgaatgagtcactgccactgccttcaaggtgctcacagtctgatgcagaaaggataatggccatgcagtatggggaagtgttgtgttagacatgggaattagcaagaaaggtttgctagagaagggaagtctgaaaggatggatggaggcatccaggtggagaagatgggaaagatgtagaatcactgcaaaaaagaaaacaagactatgctgcattcaaggagctgcaagcggtccagtacagtggggatgtgggcacggatggaggagagcgacaagatgaggccagagaatgaaaggagcaagatctgcaaagatccctctggcttgccgtatgttctcttgggaagcacttcgcaaaccataacgggcacacaaattccctgggatcttggcaaaatgcagcttctgcttcgtcaggtttgggatggaccagattctacatttctaacaagctccctggttatgttgatgctgctggtccatggactatcgtttgtatagtaagggtgtaacgaagaggagggcactgaagggtgttaggaaggtggattccacgatcaggcttgcatttctaaagatgactctaggtgctgggggcaggatgggctgcaggcagccacagctgcaggagcaatggaagagaaaaagaaggttaagagttaagtctaggttaggtgcggtggctcatgcctcttatccaaacactttgggaggctaagacggaaggaccactttacccagcagttcgagaccagcctgggcaacatggcgagaccctgtctctacaagaaataaaaactcagccaggcgtggtgatatgcacctgtagtcccagctacttggaaagctgaaatgggaggatcgcttgagcccaggaggtcaaggctgcagtgagccatgatcctgctgttgcactccagcctgggcaacagagcaagacccttctcaaaaaaaaaagaatgagttaaatctggcatgttgatgagcttgagggatcccatttgggttccgctttttgtcaggcttcttgtcctcaccacctgtctcacttgtttctcctcccaaggtggatgtggagcccccaggattcttcctactccaggacatcttctcaggcctctgtgtgccagcttgtgcagcatgacttggctttacagaattgggcaaagtcatgcttaatgtcactcagtcctgttccagagtgaagtcatttattttaggggaagatctatttcagtagctttatttttttatgtagtaatttttattgtttttccttttcaataaaataaatacttgctatgcagtttctcctgaaattataaattaactgttcagggttagcaaagcatgagttattctattgaatctataaaacattcagctttaaaagaaacagatatatatttttttctcattacacattattatataacctttaaggataataaagctgtgttcagatttaaaatttgagaaatctagctataccaagtttttaaaagtgcattaatcaaggctaaattttaaatattgatatatacatatttcataatctgaatctgtttaacatgaacactagcctttctttctgttattttttttttttccctacaagatggcttgactttgcagaacagtggttctcaactactggtgactttgcctccctgggaatatttggaaatatctgatgtaatttttgttgtcatcggggcggaggagataatggcattcactgagtagaacctaaggatgctgctaaacatcctacaatgcatagaatggaaccccataacaaaggaatatgcagcccaaatgtcaaccatgccaaggttaagaaaccctgttgtaaagtgcaactcaattcccattttatgaatagcctctctgttcaatgtaattctgaaaacacagacttgactaatttgcatatactgcttaaaagaatgtttaacctaaccaatgtcattaccaaaagcaatggttgactttaagtatcaagtgatacttccagaatgattaaaccacaaagtcagcttagaaagatagaaattgggacatattatttatataccatttaattgttcttgaatctgctctaccagtctaatctattaatatggaaagttaattagaactgttttgagttagctaagcacatagtttcctttgaacacttttctgaactatgacaaaaattaaattatatataaagcacctgggaaatagaaaagcactctacaaatgttctcaaaatgtttgttgcaacatgtgaaaagtgaagagctttacctacttgtccaaacttgtcatgaacatgtgtttggacagttaaattagtttttatttgttctctcttttttacaatgatctcttatacatgacttttacaaatatcagtgcatatatatagtatgtgtgatacaagagaaagcaaatgtgtttttcacacatgtaaagtatcaagatggcatatgagtattctaattgggagccaactttttttcaaattattctaagttttgggggttttatggttttttgtttgtttgttttttattttttgagacggagtctcactctgtcgcccaggctggagttgcagtggcatgaccttggctcatagcaacctccgtctctcgggttcaagcaattctcctgcctcagcctcccaagtagctgggattacaggcacccgccaccatgcctggctaattttttgtatttttagagagacagggtttcaccatgttggccaggttggtctcgatctcctgacctcaggtgatccacccacctcggcctcccaaagtgctgggattatagtcatgagccgccatggccagtctttttttttttgacaggatctcattctatcatccaggctggagtgcagtggcatgatcatggttcaatgtagcctcgacctcccaggatcaagcgatcttcccgcgtcagcctcctgactaactgggaccacagacatgcaccaccatgcccagataattttttgtatttttagtaaagacagggtttcaccatgttgcccaggttggtctcgacctcctgggctcaagcgatccgcctgccccagccttccaaattactgggattacaaggcgtgagccactgtgcccagcctattctaaggttaagtagagaaagttttcagtactttattaatcatttatctccacatccacatcctatatatttttcatggtcaataaactgattcaaatgacttaagttatcccaccatttaaagagaaaagtctctataataacttgaaatcatggtgttattttaatttcaccaatgactacttttctcagaagttctagctcttcctttgacacacagaaaatagctttttatctcactgggatctgaattcgaagttatgttcttcctcacaaacaaaatataatcagttttatgttctccccagatgccatcagattggacttcgctgcaagttgatattagataataggtttcttctggaggagcctcttccatgggaattcctaattcagcttttagatgcctctgtgctactcaacttatgtcaatgacatcatttctctcaagcttgtctggattacttaatggatgactacaaccaagtattggtgaaactggctcgaaaggtaatttcagcatctgatctctgctgtcactgtagctcattttggtgttgagtaagaagacactaagagcttgatgcaataatccattcccaatgttttcattctcgtgacaattcttcttggtctcagttccaatattactgtcattttcatcaataagaatacacttctctgtggtgcacaatggttcacacctgtcatcccaacattttgagaggccaaagtgggaggatcgtttgaggccaggagtttgtgaccagcctgggcaacatagcgagatcctgtctctgcaaaaattttaaaaattcattgagtgtggtggtgcatgcctgtaatctcagctaatcaggaaactgaggcagaaggatcacttgagcccaggaggtcaaggctgcagtgaaccatgatcacaccactgcactctggcctgggtcacagggcaagaccctgactctaaaaaataaataaataatgaatttgtaaaaagaatacactggtctatgaggagttgaacttgttgctcttggagatgtccaatgcctgtctgaggcatggtcacaggatgtctgatctgccctaaaagacaggcctggcacaagggtggcatcagtgctgggctcaggtgtgccttgggagctttataaatggctgcccctggagtatatggtcaagacctaaagagtggccatgtgtgttttctaatcaagctttactgaattttagaggggaatcatgtataatgagattggcaaggggaattatgtataatgagatttgcaaaaatcctagaacgtcctgctctggaaagtccacagtctacagtgatagggaaacatcagaggtgcaaaaggaacttggggatttgctatggggactcaaaggcagacacatagctggtcctaggacattagaaatgagacttgggcagagtccaggaaaaagtgagagaatggagcagaaaaaggttccctgataaacctgcactgggctgtgtggcatgggaagaacttgttatctctttctagctctgtaagcccaaggctttctatgagcttttaggccttgatatttgtatcattttatgagtctattaggctcaaaaacgtctttgttaagcatttacaaaacatttgtttgaaaactattctgcgtgaaaacatgttgaattcggcgaaagaaaacagtacgtcatcaagtgttttggcacaaaccttacttttagcttttagggctggatatttgtatctttctgtgagtgcccactgggcccaaaaatgtcttttctgagcttctatgaaacgtgtgtttgaaactgttctacgtgaaaacatgttgaattcggtgaaagaaaacagaacatcatcaaggtttttggcagaaaccaggattttatcttttagggctggatatttgggcaacatagtgggacctcatctctacaaaaaataaaaatacattagctgggtgtggtggcatatgcctgtagtcccagctaatcagaaggctgaggcaggaggattgcttgagcccaggaatttgaggctgcagtgaactatgattgcaccactgcagtccacactgggttacagagcagaagaaaataagtgaagtctaacatcgagattgtaggccgggcgtggtggctcacatctgtaatcccagcactttgggaggccaaggttggtggatcacttgagggcaggagttcgagacaagcctgtccaacatggtgaaaccccataaaaatacaaaaatacaaaaaattagctgggtgtagtggcacacacctgtaatttcagctactccggaggctgaggcaggagaatcacttgaatctgggaggtggaggttgcagtgagccgagatcacaccactgcactccagcctgggcaacagagcaagtctcagtctcaattaaataaataaataaataagtaaataaataaataaataaataataaaaataaaatgaagattgtaaataaacttgatcaggtccaaagaaaatagagtcttccttcatcttcgcttatacttagatagcaggccgtctctatgtgagttactcattgcctgaggctggattcaccaagaactagatgccaagtcaaggattcatgtacaagtggtttattcgggaggtgatccctgcaaatgctgcaagtggggaatggaaaaagggaagggaaggtagcccaaaaaggctgtgttagcatgtttattgcatgggcaaccggagcttcactctgcttgggaggcccctggatgccagagtagaacatattcctcagggttatgctgcctgcagggcgagggagctggggaatttatacaccaagatctgtccatcattggttaaggacagctcccaaaggctatacttccctaatagttccaacctgctgagtgcataggctgagtgggcttccgagcatgctggtcccatctcctaatgatgagaggtggaggcacaggagaaggtaaacaaatggcaaagacacttaaatacatgagaaaatgagtccaacctgaactttgacttttctgggtggcccactcatcccactaactaccataacttcatttcgtctgctttttgcaaagaacagacaattccaaacagccaagcctaacaagtagctcatcttagcttgtggattcagagcactggtggcctctccacctccaattgacaccagaaaacatataaatacctctaaacatgccttgggtatttgtttttctaattgcaaatattataccataacttagtttgaaggctttgtaaagaatatgccagaaacatctaatattagccctaaaaactagggcaatcttttttttaacagaagagtgttcatataaacatcaaaagatgtgatgagagtagtttcaacttctaatcatagaaattatagggctatttcatgaaagaggtgctttatcagctcatcttgagtgaatgttaaagatgaagatatggctagtatctccagagtctactgtctcagagaggtagcccaaagttgtaagactgagtgccttgaggtagggaacaggaagcaacagggtctccaggttcactgaggagtactgacctgcaatgcgattcctacatcagcaaaggtcttccttccatcgttagaggactcctggatttgctatgcctatcctgatggcttcctacatgagaccatccattcacacttggcccttacccaggcctgaaattctccccagttgcactccacccacttatgtctatcacttagctcaaagccagtaaagctcatctctgaactagcaaagattccctttatcccatcaaaatgtccttaacatctatcttgaggtcatgcagcatgatcttactttgctggcattctttccttcttctgtggattcccaagcagagtacagatgtacagattccttgggggataagagctggaatttcagcttcttttttttttttttttttttgagacggagtctcgtctgttgccaggctggagtgcggtggtgcaatctctgctcactgcaacctccgactccctggttcaagctattctcctgcctcagcctcccaggcagctgaattacaggcacacaccaccacgcccagctaatttttgtatttttagtagagacagggtttcaccatgttggccaggacggtctcgatctcctgacctcatgatttacctgccttggcctcccaaagtgctgggattacaggcatgagccaccgcacccggcctcaccttcttttatatcccacacagcacccagcacagagcacaaagctaagcgcatcgatccagcgactgactgactgaataaatgaatacatgctatcttgcttgtagaagcccagattcctccttcttacgactcccacacccacttaggagattctattatgtcttaaaagaagttacatctccattagtgtcaaagcaacattatataagtggctcaacatgatcaggcatgaatttctttgttttcccactcacctgaaagcccaaaaacaatccaggtggtggtaaacacttctgatccttcaaagaaaacggaagaaagcgatccctaccgtctattttgaatctaccgttttttgtttttgagtgtcttttaaatctattcaaaatcctttaagggcatttcaccatgcatgggagaaggtcatggatcctcaacaaattgcaagaggcctttcacaggctagactctgccttgttctccaagctcaccttccataatcctgatgtgctccatattgccagactctttcaagtccttccccgccctgcggagaatccctactcacacctcaggaccagctcagacatggtctccaggagaccttttctaagatcctatgtgaggtaactagcccccttggcaccttgtgacataattattcacttccatgtacatgtcccgtagtgaactatgagcacctccagaccttaccctgcgtttggtcgccttgctctcctctctgcagctggcacccaatctttccaggctgtctctagggactcgagcccttgggatggggtcctcaatgcttttccacctgcctggcttctaaattccactaagatcctgtcccattctcttggaaacactagaacttactctgacatgccctatggaagttatttctccactgctgttcaaacccactcccagacctggccttccctgaggagagcgtctcagccaaatccaactgcctctagctcaagtttccttgcggggggcccgctggcctcatcctgttaggtcgtcttagagccacaggagaatcaatgttccagtgtcagcaggaagaatcaatgttccagtgtcagccagcagggggcagtgtgaaaatacacacaccaggcccttttttcaaagggtctcggcttccctgagggtgtctatctgtgcctctatgaagcatggcttgggtcattcctccagtcccatggccaggtggatccttcgtttacctttcatttctattaaatgagaacattctcaattcactaactggattgttggaaaggcagcaagctctgctagatagttctaaatatttgcatcaaatatggaccagaaattgtgaatctgtctttcaacgccctcggatctgagtcagcaaggctgccacgtgcaaaagtaggaacgttaaatacttgaagctgggagagaataagtgggtttctaatcctctctggtgcattcagttctagaaagtggttctttgtattctactggaacatttctatgtatggtttttttgttgtttgtttgtttgttttttgagacagagtctccctctgttgctcaggctggagcacagtggcacaatttcagctcaccacaacctctgtctcccgggttcaaggaattctcctgcctgagcctcccgagtagctgagattacaggcacgtgccaccacgcccagctaatttttgtatttttggtagaggcagggtttcactatgttggccaggctggtgtatgtatgttttaaacatgctttaaaacaaaatttctttttagagatgggatcttgctatgttgcccaggctggagtgcagtggctattcacaggtgtgatcatggcgcactgaagcctagaactactaggctcaagcaatcctcccaccctagcctcccacgtaattgagactacaggtatacaccaccatgcccggccttaaacatgcttttaaatgtgtcataaatcacatttctctgatgaataaaaagaattatctaatgttgagaaagagtcagtgtttaatcatttacctcacagtgcagatttcttaataaattctgttattgaatctacagaatttaacattatgttatttttggccctgaaggcataacttcaagccattctggatactgaatgtgttgctgacatacacattagcaaatcactcagaagcatatacactttattgcattatcagtaacatgaagaaatatttctatatcatgagaaagagcactttcttcttgatatgtgtgtaatcccttggtcttgggaagctaaggcacagcttacagagggattttgtataccccactcattacgtagcttaaatcaggctgggtaaacatgtaaaccaaatgcaaatcatcaatctacatatgtttaagaaataatatagacatactgctgaagcatgcctcccagggagttctggactttaaacagcatcttataaatcaccagcaagaacaatcaattaatattttggctgagggtctttaccagactcccaaataccactggagttaagcactgaaccaacacaggccagctgcaaataagattcattgctatggtttggatatttggcctcccctccaaagacaatatcatgttgaaatttcatccccaatgtcagaggtagggcccactgggaggtttgggtcatgggagtatatctctcatgaatggcttgctgccatcctcatgggagtgagttctcactcttagttccctcaagagctagttgttgaagagtgtagaacctcctcctccctcctcttgcctcctctctccccatgtgatctgcccacagtggttcacctttcccttccaccatgagtagaagcagccggaggccctcatcagaagcaggtattggtcctatgctttttgtacagtctgcagaaccatgaaccaagtaaacctattttctttatacattaccaagccttaagtattcttttataacaacacaagcaggctaagataaccccatctatggtcagtcaccaaggcctcttctctcatatgagttttgtaccttactctatttaataaagtttgttctcatggggatatgcattaacaattctgatacgtgcatactgaaatcgaaaattaattaaacaaatggcggatggtagaagccaggttgctcactgttggaatgcaagtttacagataagccaggggaggaggctagaatgatccacttggtaacagagcggagttggaggcatcagtatgaactcatgtctagcttaatacaggggcagaagattccatatagaaatatgtatagatatgtgatattcacaggttagtatacacatgaatatttccttgctctgtcatctgagaaggactaaaagaaacagcaccccagtagcaaaaagcatacctagcacccagaccttggtttctaataacactctccagtgaaaggtaccagggctccttggagaaatggccaattctatgcctctgacagaaatatgcaagaggagcctggagtattttgtagtgccagaaaataaggaggcactcaaaaacaatcaaaaaacaaatgcatattaatggagctacatcaaagaaacacaggagccaactgagagtgctcccaacggccaaagctggaacaatttgagcaacaaaataaagcagtgctggattatcattcaaagtataaaataaatacccctgagtcctcactattgcaaataaatgattgaataaattaataaatgggggaggagagacaagtcccttggactgataaatttcaaataatttatgcagatactctgcctcaagggggtgaggcataactcctgactcattaaatgtggagtaagcatagtgacttccttcctaagaggacagtatggaatgggggagaagagtaaccttagagtggaggaccctgacacatacgacctcagccaggtgatgaaggtcaacatcagtggtgatcaatcatgttgatcatatgtacttctgatgtgatgtgaggaaagcagcactttacttctgtggacttcctctcaaaaactcataaccccagtcaagtcaagagaaaaacattagacaaatttaataaataggcatttgggaaaatatctgagcggtacttctcaaaactatcaaggtcaccaaaaacaaggaaagtctaagaaactgtcacagctagaggagcccaaggagacacgatgatcatgtatcagtgctggttcattccttctaacaaatgtgccctactcgtgcaagatgttaacaaagggaacattggccatgggtatatgggaacaccctgtactatcttctcaatttttctgtaagtttgaaacagttctaaacaaaaaaaagtcttttaaaaatacaatcaaggccaggtgcagtgactcaggcctgtaatcccaacactgtgggaggaccacttgagcccaaggagttttaggccagcctgggcaatggggggagaccctgtctctacaaaaaattttaaaaattaatcaggtattgtggtgtatatctgtggtcccaactactcaggaggctgaggtgggaggattgctggggtccaggaggccaaggctgcagtgagccatgatcgtaccactgcactccagcctgggtaacagagcaagaccctgtctcaaaaacaaaaacaaagaatctataaataaatgaaaagattaatatccacaaaaggacaaatattgtatgattccatttatatgaggtagctcgaataggcaaattcttaaagacagtaaatagaatagaagttacaaggggctgggagggggaggaattagagcttattgtttaatgcactgcactccagcctgagccaaaaagtgagaccctatgtgaaaaaaataaataaatacataaaaatacaatcaacagaagaaaagaaagtatttacaatatataacagataacagattcctatatagactgtataaaaaacttccagaatcaatgaggaagagaaataacctgattttaaaaattggcaaaggatgtgaaaaggcaatacatggaagaaatacaagtgtccaaaaaacataagaaaaaatacttaatctcactaataattggagaaatgcacattccattaaaataccagtaagactgatttctcttctcactttaaaggtctggtgatatccaatgttagcaagggtgtgaagaaacaatgaaaatgtatccatacaatacttgtgtaattaagtataaattgacaagggtgaatttttaaggaaactaagagaaaaagaaaggcgtgatccctttgccccattgtaaaggaaactatgactcaaaagtaacgggtggctatctaaatgccaataagcacataagaaggtgcctaatctcactcatcatcagttaaatgcaaattaaaactatacccagatgctactatgtaccaggatgactgacaccaacattgatgaggatgtagcacaactacagctcccatgcactattggtgggattggcacagctcactttggaaaacaactgggcagtatctattcaaactaaacatgctcattttatggcccaccaattctacttctcagtaaatactcaacagacgtgagagcttatggctcccaaatgatacatgcaaaaatgttcatatccaccttattcacaatagctacaagtaactcaaatgtccatggatagaagagtagctaaatggtggcatagccatacaatggactactacacagcaaccaaaaagaagagactattaccacacacggcatgagtgaatctcatgggttgattgctaagcaaaaatgtcatgcaaaaaatgatatattgtacagctccatgtctatgaggtttaagggtaggcagagctaatctaaggtgatagaaactagaatagtggtttccttgggaaggaggtacaggcagatgatatggccttggaggaggcttgagagcccagtgggaagatgaaatattctatgtctgcatctggctggtggtcattcaggtatagacatgtgtcaaaacttagcaaccttctcacttgagatgtgtgcactttatatctgctctgtatcagttaacacatacgttaaaaagaggaaataggtgagtttttgaagatggaataattactacaaaatgagagtcattgattgtacctgctgcacgtgtggagaccagatttcaaaggggaacattaaaacaggaggatgataaacaaaatgtggtctatctatacaatggaatgttattcaggcataaagggaaatgaaaaatgggtaaatcttgaaagcattaagacaagtgaaaaaaaacagacacaaagaaccatatactggatgattccatttatataaaatgtccagaataagcaaatccatagagacagaaagtagcttagtggtttccaatctacttcccagagggaagagaggaattggagagggactgttaatagatatgggatttatttccagggtgatgaaaaaggtctggaatcagagagtgatgattgtacaactctgtgaatataccaaaaaccactgaattgcacactttatgagggtgaattttatagcatttgcattttattttattttattttattttattttattttattttattttattttattttattgagagaaggccccactctgtcacccagactggagtctgcaatcatgttttctacttattggtcaagacgccagtcccgctgactgctcagtccccaagttgttctatttaccacatccttttaggaagagaacatctagggcaccttctcctctcagtgaggcactgcaggttcccataagacctcagccacgcctggctaaggagagggcccagttgcccctgctgaaaagggctcactgcagctctgggagaggctccttctctgggcgtcttcctcagatgctgaacgatcaagtgggatctggagctgcccggagtcccctcccctgaccttcaccagtcaggagtctgggaggaacagctcattcaaatatgcacccaacgtggattctccctccacccactgacagaaatggctaatggagccccaaaatcctgcagagtttaattaccaacctgcaaagacaggctgtcagctccagtcctaggtaaagacctatgggaaagggtgttaggtcaacccaaagacagacaacaatgtccacagcaggtctgtcatcatagccgcgttttggaaacaaggtgaagtccatcaacagcaggctaaatgcataatttgtggcatagacactcaatggaacactccacaggaagaaaaggagtgaacagctgccccgtgcaatagcatggatgagcccacacatgatgccaaagaagccagacacaagggcatgcgctgtatgatttccatagggtgttgaatagcatctccccaaaactcacatccacctagaatctcagattgggactgtacttggaagtggggtctttgcagatgtaactaaattaagatgaggccaccctgaattaggatgtgtcctgaatctaatgaatggggttcttataacaagaggagaggacacagagaatgaggccatgtgataatggagacagatattggagaatgatttcactacaagtcaaggtacacccaggactgccaggagccaccaggagctaggaagaggcaggaaaggatcctcccctagacccttcaggggaagcacagccctgctgaccccttgatttcagacttccaaactccagaattctgaaagcatcagtttcggttgttttaagccacatgctttgtggttatgtgttacagtggccccagaaaaccaaaatttcattgaatgaaattcaagagaaggcaaagctaatccatagagatggaagctcaaatactggtagaggatggtcctcatctcggaagagaaacaaggaagacttcaagggtgttcaaaatgcatcctgttccaggtggtagctacctagtcatagacacatggaaaatttcactgaattatacagttaaaatgtgtgcgcttccttgcatggaagtgatacttcaataaaaatttaaaaagcaagaagcaggctgttccactggagctacaaactactttgctcttttttctttctttccttgtcttttgtagaaatggggtctcactatgttgcccagggtggtctcaaactcctgggttcaagggactcgcccgcctcagcctcccagtcagtgctgggattataggcatgagccactgtccccagccacgctttgttcattcttgaaggaaatctctatgatgttcaacttgttcttgtcactcaaaatgaccatcccctgccctctataactaccagtagaaacaagatctctagcagcacttttccaagattgggttttccccagaagcacagcctgagacaaggatttgaatgcaagtgctttgcatgggagcacatggggaagggagaagggagatgggaagtgtggggaggagcactgtgccacccaccctggggacccactgagacaccacaggacacacctcagaatctgcccaccaagtagcaagggagctggagcctttattgaccaacagccctgcctcacagggtaagggtggctccaagcacaccagagaaagaactcaggcagagagaggcaggagcctctgcactggcctccagcctgggctgaggccatatgggccgggaccttcgtctctaggtacaggccagggaaaggcaagacctggctggccttgagctctgccctcttgtttgggggatcgaagaaccagggatgcagtatactgagaatttcaagttcacgaactttcctcccctttcttagcacacaaggtccctctccatatggacacagggaaacctcaccccccaaggcacaactgccaacacctttccatgagagcaaagtgacttcagcaaaaacatcaggtgaggatgaagattgtccagaggaagccggccccaggctctccagggctccattgttctctgcatgtctcagagctgtccagggcatggtgcgggccagctgaaggaagctttggctccgggttttgtcctctcttcctgctggtgggaagaatgggagctggcaggaaaggaaactgactgaacaaagagaaggaggaaaatcagaggacccctggagagatgttacagctggcctgagagctcattgtgttggagtgggggaagaaagccattcccgggaatatgcctaaaaaatgcaagagactcccatgcccgtcaccatcaaaccaggcactagcccgagaatttgacttcccagatctcaaaggggacttaaaactttgggtccaaaagacaagattttttttccatttgctttaaaactcttgttgaaaagcagatgttaagtctggggaatcatgtgttaaccaagaaagaggtttcttaagtgcatcagccaccatccatagctgggagcaaagctaagcttgcaagttggggccaggaatatgtagacaaggactccgaaaggtttatgccatgagcctacacacgagagggactcaggggccttgagcatccaggtatccaagctctggtgccacagtactgggggccattgctcagaactgaaagccttgcaacggcaaactgcaacaccattcagatacctgaggcactcctctggggcatggccatgacagagactgtgccaggccccagaacactttgcttctcttaccagctgtgtgtgactttgagaaagtcacttatcctcgtggtctctctgtttcctgatctgtaaggtagagatcttgacctgcttcatggagttggtatgagaatgccaagtgtttaatgcagtgcttagaacatagtgagtgctccacaatatgagttactgcactgatgcagtatgtgtgctcacagtcaaatgccacatgcccaacccaccatctaccttcctttctctccattagatttccagggatggctttttgggggaaaggaattggtaactgacatagttttccatcacgctccaagccagaaatcttgagatcctatgatacccactcaaaaatgcattattaatccagttctcagcaacttctactcactaccatcatctttcatctggatgtctacgacagcctcctaactgatgttcctgcttccattcacaggaacagaaataatctattaaaagtctaaaatctgactcaccctctctccttaaaacttttcaaaaacttcccattgtacctaaatagaatccaaactcttgcactggcttcaaaagccctgtgcctttctacaaggtcactagacccctatttccctgacaaactctgtttcagccatgcagtttctctgtcagttcctgaaacacaacaagttccttctagcctcaggacctttgtctgtttccactcccttccctgcattacgtgacaagctccttctcaaacttcagatctcagcctaaatgtcagctcctcaccaggcttctccaggccattctctctaaagtaggctccttctgctactgcatcattatctgtttccagttcgccattctcttcttgtatcagtcagctatcgctgtgtaacaagccacctcaaaactccatggttaaaaacaacaggcattcattatcactcacaactgcaggttggctggggttcagctgggcacctgtgctcctcatggaagggctgtgggtcaggggaggccgttctgttccacatgtctctcaacctcctgctgggatgagactgggcccgtttttctcatggtaataacagaggaacaatagagcaagcagaaagatgtgaactctctcaaggcctaggctctctcaaggcctaggctcaaaacagacacaacatcctttctaccacattttatgggccaaagcatatccttgtgatcaagcccaaactcaaagagtggggaaatgccctccatccatagtgaggccaggcaggcctgtgtccacagggaggatggataaaaaaatgtgggcagtcattcaactgccacgatttgtgattcatgatgaatatttttgtttctccactctccactagaatgagcaagcaggaacctggtatccacagcacctagaacagtacctgacatgtgacagatgctcaacaagtcccttattatacttttgttttgttgtgttttttttagagacagagtctcactcttttactcaggctggagtgcactgccgcaaacacggcttactgaaaccttgaacttctgggctcaagcaatcctcctacctccacctctcaaactgctggcattacaggcatgagccaacatggttggggccctttattatacattgaatgaactcctagactggaagcccatgtgttacctctagatgacaattgtcctataaaaccatcatgacagcaattggcttttcagatatggctttttaatttttttattattattattttttagctctgttgcccaagctggagtgcagtggtgtgatctcggctcactgcaacatctgcctcctgagctcaagtgattcccctgcctcagcctcccaagtagctgggattacaggcgcccaccaccacacacagctgatttttgtatttttagtagagatggggtttcaccatgttggccaggctggtctcaaatttctgaacttaggtgatccgcccacttcggcctcccaaagcactgggattacaggcatgaaccactgcacctggactcagatatggcttttgttgaatatggactcagatatagacaaacttttgcttaacgatggagtcttttattaatcaatgggcaacttcacacctacttgttagcaattgcttggacatggtcctaaggactacaacagccacttcccaatccagggcagaagaaaaagcccatgaacatggccctgactgggacaaggaccatgtgaggcattctctactatggacacaacagaactgatgaaattcagagcaggacccagctccaaattccccttgtccaaaacctgcttattctttaagggggtgggggctgcagaaggtaaccagtggacaaggtgcaaaggttgttggggtccctcttcatacctccaagaagaatggggcagacaggaaagcagctgggagctgcctttggagtgaagagtcctggcttggccaatgagcaccagtgtaactttggacaaggctgttgacctctgaggtccttaccaacccaaagggcagtagagtaaatcaaaggagaggagcaaaaggaagcccacacctgtgctgaggctcgctggtcctcatccaggttcagaagcagtgttctccaaacttttcaggttggacacccactcagtgagcattctcaatatgtgctgatgcttatgtataacattacatacatgtacttttaaatatcattcattttaatggttcatcttctcaccctcttgcacttgtgtaacaggactatcttcatctttttttttttttttttttttttttgcactcacgcttaagcctcttaggatttttgtgacagttttagtctaagtaaaactgaaaaaaatactgaaaaaaataatcatttctgccacttgcatggtccccaccaaggcacttctctaaattattttagatgcatttagatcaggggcaatggctcacacctgaaatcccagcactttgggacactgaggcaggaggatcacctgatcccaggagttcaaggctgagcctaggagttcaaggctgagcccaggagttcaaggctgagcctaggagtccaaggctgcagtaaactatgatcactccactgcactccatcttgagtgacagagagagaccatgtctctcaaaataaaaataaaaataaaaatacacgcattttttaaattttcatttttccataagttattggggtattggggtacaggtggtgtttggttacacgaggaagtttttttttttgtttttttttttttgagacggagtctcactgtgtcacccaggctggagtgcagtggtgcgatctcggctcactgcaacctccgcctcccgggttcatgccattctcctgcctcagcctcctgagtagctgggactacaggtgcctgccaccacgcccagctaatttttgtatctttagtagagatggggtttcaccatgttggtcaggttggtctcgaaccctgacctcatgatccaccctccttgatttcccaaagtgctgggattacaggtgtgagccaccacacccggccattacatgattaagttttttagtggtgatttgtgagtggtgcaaccatcacgtgagcagtatacactgcaccatatttgtagccttttatccctcacccacctcccactcttccacccaagtcctcaaagtccattatattattcttttgccttttcgtcctcacagcttagctcccacatatcaatgagaacatacgatgtttgattttccattcctgagttacatcacttagaataatagtctccaatctcatccaggtcactgcaaatgctgttaattcattccttcttatggctgtgtagtattccatcatatatatgtactacggtttctttatccactcattgattaataggcatttgggttggttccacgattttgcaattgtgaattgtgctgctttaaaaatacgtgtacaagtatctgtttcgaagaatgacttcttttcctctgggtagatacccagtagtgggattgctggatcaaatggtagttctacttttagctctttaaggaatctccacactgttttccatagtggctgtactagtttacattcccaccagcagtgtagaagtgtttcctgatcgctgcattcacaccaacactactgtttttttgatttttttattatggccattcttgcaggagtaaggtggtattgctctgtggtttttatttgcatttccctgatcattagtgatattgagcatttttttacatgtttgctggccagttgtatatcttcttttgagaattgtctattcatgtccttggccatgtttttttcttactgatttgtttgagttcattgtagattctggatattagtcctttgtcagatgtatagattgttttttcccactctgtgggttgtctgtttactctgctgactgttccttttgctgtgcaaacgctctttagtttagttaggtcccagctatttatctctgtttttattgcatttgcttttgggttcttggtcatgaaatacttgcctaagccagtgtctagaagggtttttccaatgttatcttctagaatttttatagtttcagatcttaggtttaagtccttaatccatcttgagttgatttttgtataaagtgagagatagggatccagtttcattctcctacaaatggcttgccaattatcccaacaccatttgttgaaaagggtgtcctttccccactgcatgtttttgtttgctttgtcgacaaccagttggtgtaagtatttgggtttatttctgggttctttattctattctattggtctatgtgcctatttttatgccagtaccacgctgttttggtgactatggccttagagtatagtttgaaatcaggtagtgtgatgcctccagatttgttctttttgcttagtcttactttggctatgtgtgctcttttttggttccatatgaattttagaattgttttttctaattctgtgaagaatgatggtgctatttgatgccgattgagttgaatttgtagattacttctggtagtatggtcattttcacaatattgattctacccatctatgagcatggaatgtgtttccatttgtttgtgtcatctatgatttctctcagcagtgttttgtagttttccttgcagaggtcttttgagtcctatgttaggtatattcctaagtattttttttttttgcagctattgtaaaaggggtcaagttcttgatttgattatctgcttggtccctgttgatgtatagaagggctactgatttgtatacattaatcttgtatctggaaacgttgctaaattattttatcagttctaagagctttctagaggagtccttagggttttcaagataaacaatcatataattggcaaatagtgacagtttgacttcctctttaccagtctggatgccctttctttcttttctttctttctttctttctttctttctttctttctttctttctttctttctttctttctttctttttttcctctgagatggagttttcactcttgttgcccaggctggagtgcagtgacataatcttggctcactgcaacctccacctcctgggttcaagtgattctcctgcctcaggcccccaagtagctgcgattacaggggcctgccaccatgcccagctaatttttctatttttagtagagatggggtttcgctatgttggccaggctggtctcaaacttctgacctcaggtgaattgcccacctcagcctcccaaagtgttgggattacaggcgtgagacaccacgcccggcctggatgccctttgtttctttctcttgtccgattgctctggctaggatttccagtactcttgaagaggagtggcgagagtgggcatccttgtcttgttccagttctcaaagggaatgctttcaacttctccccattcagtattatgttggttgtgggtttgtcatagatggctttattacattaaggtatgtcccttgtatgccaattttcctgagagttttaatcataaagggatgctggattttgtagaatgctttgtctgcatctatcgagatgatcatgtgatttttgttcttaattctgtttatgtggttatcacatgtattgacttgcatatgttaaaccatttctgcatccctggtatgaaacccacttgattagggtggattatctttttgatatgttgttggattcgactagctagtactttgttaaggattttagcatctatgttcatcaaggatatcggtctgtagttttcttttttggttatgtcctttcctggttttggtattgggtgatgctggcctcatagaatgaattagggagggttccttctttctctatcttgtggaatcctttgaatgtctggtagaattctgccataaatctgtctggtcctggacttttctgttgtcggtaatttttaaattaacatttcaatctcactgcgtgttattcgtctattcagggtatctaactcttcctgatttaagctaggagggttgtattcttccaggaatttatccatcttttctaggttttctagtttatgtgcataaaggtgttcatagtaggcttgaatgttcttttgtatttcagtggtgtcagttgtaacatctcctgttttgtttcttagtgaacttgtttggattttctctcttcttttcttggttaatcttgttaatggtctatcagttttatttatcttttcaaagaaccagctttttgtttcatttatcttttgtattttttgtttgtttgtttcaatttcatttagttctgctctgatcttggttattttctttcttctgctgggtgtgggtttggtttgttcttgtctctctagttccttgaggtgtgaccttagattatctgtgctctttcagactttttgatttaggcatttaggactatgaatgttcctcttagtaccatctttgctgtatcccagaggttttgataggttgtgtcgttagtcattcagtttgatgaatttttaaatttccatcttgattttgcttttgatccaatgctcactcaggagcaggttatttaatttccatgtatttgcatggttttgaaggttccttttggagttgatttccagttttattccactgtggtctgacagagtgcttgatataatttcaattttcttaaatgtattgaggctcattttatggcctatcatatggtctatcttggagaaagttccatgcactgttgaatagaatgtgtattctgtgattgttggatgaaatgttctgtatatatctgttaagtccatttgttccaaggtatagtttaaatccattgtttatttgttgactttctgtcttgacctgtctagtgctgtcagtggagtattgaagtccctcactgctattgtgttgctgtctatctcatttcttaggtctattagtaattgttttataaatttgggacctccagtgttaggtgcatatatgtttaggactgtgatattttcctgttgaacaaggccttttactattatatactgttcctctttgtctcttttaatcactgtttctttaaagtttgttttgtctgacataagaatagctacccctgcttgcttttggtgtccatttgcaggaaatgtctttttccacccctttactttaagtttatgtaagtccttacgtgttaggtaagtctcctgaaagcagcagatggttggtgatttcttttttttttttttttttttttttgagacagagtcacactctgttgcccaggctggagtgcagtggtgcaatctcggctcactgcaacctccacctcctgggttcaagcagttcttgtgtctcagcctcccaagaagctgggactacaggtgcatgccaccatgcctggctaatttttttttttttttgtatttttagtagaaatagggttacatcatattggtcagactggtcttgaactcctaacctcaggtgatccaccctcctcggcctcccaaagtgctgtgattacaggcgtgggccaccgcgcccagccggttggtgagctcttatccattctgcggttctgtatcttttaagtggagcatttaggccgtttacattaaatgttagtattgaaatgtgagggaccattgctttcattgtgctctttgttgcctgtgtactttggtttttgtttttgctttttaacttgtatttttgttttataggtcctatgtgatttatgctttaaacaggttctgttttgatgtgtttccagaatttttttcaagatttagagctccttttagcagttcttgtagtggtggtttggtaatggcgaattctctcagcatttgtttgtctgaaaacaactgtatctttccttcatatatgatgcttagtttcgctggatacaaaattcttggctgataattgttttgtttgaggaggctgaagatagggccccaatccctactagcttgtagggtttctgctgagaaatctgctgttaatctgataggttttcctttataagttacctggtgcttctgtctcacagctcttaagattctttccttcctcttgactttggataacctgatgacaatgtgcctaggcaaagatctttttgcgatgaatttcccaggtgttctttgcgcttcttgtattgggatatctaggtccctcacaaggctggggaattgttcctcgattattcccccaaatatgttttccaggcttttagaattctcttcttaggtacaccgattattcttaggtttgattgtttaacataatcccagacttcttggaggctttgttcatattttcttgttcttttttctttgtctttgttagattggattaattcaaagacttgtccttgagctctgaatttctttcttctatttgttcaattctattgttgagaatttacagagcatttcacatttctaaaagtgtgtccaaagtttgctaaatttttattgtttttttcttttagctatctatttccatgaatatgtctcccttcacttcttgtatcattttttggatttccttgcattgggtctcgcctttctctggtccctccctgattagcttgataactaacctcctgaattattttgcaggtaaatcaggggtttcttcttggtttggatctattgctggtgaactagtgtgattttcgggaggtgttaaagagacttgttttgtcacattaccagagttggttttctggttccgtctcgtttgggtaggctctgtcatagggaaggtctagggctgaagactgttgttccgattctttcatcccactggctgtttctttaatgtagttctctatcccttttcctatggatgtggcttcctgtgagccgaactgcagtgatttttgtctcttttctgggcctagccacccagcgagtctacccagctctgggctggcactgggggttgtctgcacagagtcctgtgatgtgaactgtctatgggtctctcagccgtggataccagcacctgttccggtggaggtggcggagggtgcactggaagtcgtgagggtccttagctttggtggcttaatgctctatgtttgtgctggttggcctcctgccaggaggtggcgctttccagaaagcatcagctgtagtagcgtggagaggtaccggtgttgggtgagtccctagaactcccaagattatatgccctttgtcttccacccagggtagatagggaaggaccatctggtgggggtggggctaggcgtgtctgagctcagactctcctagggcgggtcttgctgtggctgctgtgggggatggaggtgagattcccaggtcactggagttgtgtacctaggaggattatggctgcctctgctgaatcctgcaggttgtcagggaagtgggggaaagccagcagtcacaggcctcacccagctcccacgcaaactaaagggcccgtctcactcccactgtgcccccaccaacagcccagtctgttttcaggctgcaggtgacaggcttgaaaacttgcccgaggctatccgcctcccagctgggagagaaaagggcttcagttcttcccctgcttgtgaagtctgcccgctggattcgcaccctccccaaagttctggccaggaggtttcttgccccattcaaattgttacaaaattcagctggggaattccttctccctgtggagttttatcccctgctcctctagccacccttctgatggatccctgttatgccaggcaggaatgggatgcttggggacccagcgagctcccagggcctttctgctacttcctgtacccctgtctttcggtcggctctctaacttgactcagctccaggtaaagtcagaaacttcccccacaaacagaacttcagcttctccactgggggtgtgtgttcacttcctcagttggggcactgacagtatttggggtgtctccccggccctgcaggagcgctctgcttccttcagaggatctgtgcgtcctcttgggagtgctggtttgttcttgtagtggatctggagctaaaattcacagtgtaagcccccacatgctgctctgtccagagctgcaatctagtcctgcctccagtccgccatgatcccttctaatctgcacttaaatattttaaagatgtttaatccctgaagcagtcccatgagatggatactaatattacgtccattaagcagatgaagaaatggaggcaggcagacagtatccaaggtctcactgcaggggagacaggatttgaacctggaagtctggttcagaaggcatcaaaacacaccaggtgtgtcaaaagctttaggtcccaaactactgagcccagggaaggtgtctcgtgatgcggggctgacacacaaaccaagtaaagacaccaagaccaaatgtcactatttttgagatttaaaaatgttaattatatcaagatagaagttatagtctttttcctcctcactttggcgccactgctaggaagagcgggggagcgggcgttgcaccgcgtccgggccacgagggggcgcgcggacaccacccaccccgccgggcaaggccaccctcccagacgcctggcagccggaagaaccgcacgaacgccttccgcagagctggtcctcgggagccctccagcccacccaggtctttcctagccccaaatccttcccagggacgtcctcgggacaggcaaacctgctgtaacattcagctgatataggaggtggaaccctcctacagtcacagagacagaaagtgccccgagggcgtcgctctggtcctggcggagatggtctctgatggtctgccttgatgacttatggggacacctgtcgggggttctgctagaaagaaagatgcagagcgcccctcacgcacgcaaactctagctctcacacccagacgtgctccaaacattccaaaggggccaaaaacgacgtctggcttttccgcggcgcctcctggccctggcggtgactccgaggtggcgctttcagggtgggcgcgagggagaggaaagcctctggcatcctcacccccggggccagagggacagcgggtgccctccgccccgagtcacctgcgtcttgaattctgtccctccaaggagagggcaatgcctgagcccacggaagttgggtcaggggcagcattggaagtcagagcctgcaatgctcacgtaaatgcaaaagatggttccttcagtgccagtaagaaggctgtcttgaacatgaggaatacagcagcaagcaagacagagaggtgcctgctttctggggagacaacaaacagataaataagcacaacactgtcctgccaagctaagtgacatcaatgaaacaaggcaaggtaataagaagaggctgggaaaaggcttagctgtgattttgctttctgcagtttgagttgcctatgttcaacagaggttcaaaaatattaaatggaacatttcagaaataaacaatcctaagtttaaattgcatgccattctgagcagcgtgatgatatcttgcgccatctctcccagtcctgccccggagatgaatcatccctttgtccagcgtgtccacacggtacatgctccaggcccgttagttacttagtagccatctcagtttttcggatgacgtcgaggtatggcagggtttgtgttcaaagtcacccttgttttacttaacaatagcttcaaagcacaagcatagtgatgctggcaatttggatatgccaaagagaagctacaaggtgctttaaggggaaaagtgaaagttgtggacttaatcagcaaccttagctgaggttgctaagatctgtgataacaaggaagctttgattcatgaaattctggagatggaaaaaagaaatatatgctagttttgctgtcacacctcggactgcaaagtaatggccatggtgcatgataagagcttagttaagatggaaaaggcattaactctgtggataaaaacatgaagagacatgtgttctgattgatggcaataaggatcagtattatccgtggtcccaggcatgcactggaggtgttggaatgtatcccccatggataaggggagactatcgtatccttgattggggcattgctacatggatgtatacgtttggccaaactctccaaactgaacacttaagataggtgtgtttcattgtacgcacatttttcaacaaaaatcttttctatataagaagaagaatagctgggaaaggaagacattaactagggtgatcaggatggtctctttgcaaaggggacatttgagctgagacctgaaaagtgagaatgaactagaaggagttagccatgccaggatcttgtctcttcctgccaagatgctgcaggcagaggaaacgctgcattggaagggcccccggtgagaatgcaatgagggcatggggagaccgttgtgagcaaagggagcaggagggcaggtacgcaagaggaggttgaggctgtagccaggggctgctgatgaggtacttgaagtctgtctaggtctaagttcattctaagtgcaattggaagtcactgggggaccacatggaggaaagatacaggtccccaacccgatcagccttgggaccacctccaggcagagtctaaagaaggatagccaggcacggtggatcacgcctataatcccagcattttgggaggctgaggcaggcagattgcttgagctcaggaattcgagaccagcctgggcaacatggtgaagccccatatctacaaaaaatacaaaaattagctgggcatagatatgcctgtagtcccaactactcaggtggctgaggcaggaggatagcctgagcccaggaggttaagtctgcagtgaaccgacattctgccactccactccagcctatatgacagagcaagaccctgtctcaaaaaggagaaaaaataaataaataaataaataaataaataaataaataaaatatagcctaaattccaaataccaaataccagagaccaaaattattggccttgttaagggaacatctcaatgtttgaaatgtcattgcatttttctttgtttgtagagacggggtctcgctatgttgcccaagctggcctcgaattcccaggctcaagcaatactcccaccccagcctcttgagtagctgatactacaggcaggctccaccgctcccagcttactagactgtgtaacgggtcattttctgtactagcttgttgtggttacaaaccagccaaatggcttacgtttgtatttattttctattccatacgtctccgcccaatgtttttcctctcaaaatcccttcctttaaaaaataaatctgttgcagatgtggggaaaaaaaaaaaaagagccagaagaaaagggacaaagccgagtgctatcagcaggaagggcattgcccagccactggcctgaattctgtgaatacccccacctcggggtccacaggatgggcctaaggaggtctggcattccagggaacagacacctggttggtccacacagggaaaactaggggtttctgtaatgtcagcaggtggctgaaaactccagagtgcctgcaaaatgctttccctcatactttctatctggcaggtaccttggagttgacagccatgtgctcagaggagaatgaagcaaaccaaccaaaagccaaccccaaacacccaatggcctgagctcctcagagcaagaaaagtcaagttgaatatctcagatggggccgtcagagaatggagatgacctcatccacagtgggacaagttggagcaaatcacttggatggaaagcaaggaaatagaggggcaatttcagcatgtccctcaggcttccacagaggaaggtttggccttccaaattcccaaagggcttctctcctgggacgcactgtctctgcagaggtgaaaacactctttcttgtctctctctgcctgggatcttaattgtttccagtgtcaaatgaaggactgaggaaagaaccaaagcttccccagttcactaactgctctgggatttacccagaattttgacagcattgagatttggagttggcttagaagaagagaagaagggaagtggaggtgctgagagctggtctggagttagccctgcttcagccacattcacttccctttgtctctcatgaccgggcaatgcagtaggcttcccatgttgtgtatcttcttgtctattaaacagggttatccagctgattgagggcatttcttttttttttttttttttccaacctcactttttccaaactagtttagatcttccagagtgtggtaggctgaaaaatgtcccccaaaaatatcaggtcctaatccctgaaacctatgaatattgtcttatatgggaaaagggtctttgcaaattgggttaagtcaaggatcttgagagagggaggttattttggattattaatatttaggtggaccttaaataaattccaagaatgtcatctggagtggaggaaaaaggtatttctttttaggatgtccaggaaattaaaagatgatgaaatgccaaaacaagttcacaaaagtgcagaatagtttaaatattgacatctaatatccactcaccatgtctgtgcacatatgcctctaatggccatcaactgtgtcccttggccttcaggcttttttggtcaccagagcctgctctgcttgtgtacactgcagatgtctcagggaattaatgcctctctggcccccaagagcagccttcaaccaatgcctaacggaagttggtatataaataccccaactccctcacccctaggtggagaaactctggggtaccttctacactggctcctagaggtctccactgggactgaactccagttgcccaccatcagaacttatttaatgacacacccaaataagcttccttcccctcctattagacttccccactccacttccactgttttctagaatcaagtcccaaataaactactagccctcaaatcctatttttgtttgtttgttgtgttttttgttttttgaaatggagtcttgctctcttgcccaggctggagtgcaatggcaccatctcagctcactgcaacctccgcctcccaggttcaagcgattctcctgcctcagcctcctgagtagctgggactacaggcgcgcaccaccactcccggctaatctttatatttttagtagagatggtgtttcatcatattggccaggctggtgtcaaactcctgaccttgtgatccgcccgcctcagcctcccaaagttttgggattacaggcgtgagccaccgcgcctggcccaattcctggccttaatgtctgcttctgaaggagcccaagctaagaccctattgcatctcatttagtgagaatgtcaaaagcatgtattaaaggcccttcatgaatttgatcctgagtcaaatggccctcctggccctctcatatcaggaggcaactggggcagagttggaaagctgacccaagccatggtgtagtttcagtggcttgaaggtgatggaatgcatagccatgtgtgcgaaaatgaccacatgggcctgtgggacaattgtgcagccaaatgcctgccagaccttgaggcaggtgtgctcccctgctgggacttcaggagagaggccctgctgcctccgcaccttccaggccccggggacatccagggtgttctgctgaggtggaagggttgtgccctatcagccaagggcatgcacctcacctgcagtggctggaatgatggagatgcaggagtaatgaactttatctcagggagggggcaaacctaggttccacaactagtatctgccccaaatgtcaagccccaagccaaacccctgtgactaaagaaaccttcaacaaatcttgtaaggccagcagctcccctccatttgtttttgggtggggaaacacatgtgttttcttctgtaatcttctaaacatatagacttctaaagtcttaataattttttttttttttttttgcgacagagtctcactctgttgcccaggctggagtgcagtggcacggtcttggctcactgcaacctctgcctcctgggttcaagcgattcccctgcctcagcctcctgagtagctgggactacaggcatgtgccaccgtgcctggctaatttttgtatttttagtaaagacggggttttgctgtgttggccaggctggtcgcaaactcctaacctcaagggatccgcctgcctcagcctcccaaactgctgggattacaggcatgagccaccgcgcctggcctaaagtcttaataatctcaaactatagagcaaaaggatataggcatggcctgggggaccagtttaactttagttagactgagttaactagagtagagataaccaagtggtggcctacaagccaatacaagtgacaatcttttcctgtctaccacagtttttaaaaaccagagattctgataataatctgggtttctgggtttctggattttcttgaaaaatcaggaattcctgaatcccatggaactttcacttctacagggcagcattgcctgagaagtcagaatttgcaatcctgctagtagcagaaagtcagtccaaaagaggaaggtgtggtttgcaggaaagaggaaataaagatggagagagtgtgtgtgtgtgctacatgaaccccaggagatgacgaagacagacccctgctgacaaccagcaccaggctgagagtcaccccggagacaggtcctcaaggagatacaatggatagaatgctgggggagactgaacatatgaaaggtttagagaatttgggacaaatatgggctgaattcatgaaaaatacattgaaaacctaagcaaacagaaggacaatttttaacttcaaggaaaacaaaaagttgtgctaaaaatggaaaaataagccaaatacagtatacattcagctttagagagcatgtttatacaattatacaacataaaggcagatgtgcgctaaccaaaaattatgattggcaggacggagacccaagaattggggagggaggtagagaaagataaggccccagatgagcaaatcaggaagagaaacaccaacatgctacttacagataagatggcaagtaccaaagaatcagctagaagaattgaaggccgtgggaaggaaggggaggtagagcatggtaggagcaaaagagagctggttttgtttgactttcttaaccatgtgcatgtctatcattgaagaaaagacaaactgtgttttgaaaaaagttaattgatcacaagtaaagccgccacccccagcccccatccttgcctcacgataacccttaacaattatatccttccaacggtttatatatatatatataaagaccgttggggtttagagtcatttaaagcaaatctgaagttttaagggtccttaaggaggtataaggcttaagatctggccgggtgcagtggtttacgcctgtaatcccagcactttgggaggccaaggtgggtggatcacctgaggtcaggagttcaagaccagcctggccaacatggtgaaaccccatctgtactaaaaacacaaaaaattagccaagcatggtggcagacaactgtaatcccagctactcaggaggctgaggcaggagaatcatttgaacctgggaggcagacattgcagtaagccgagatcacagcattgtactccagcctgggcaataagagcgaaactccatcttaaaaaaaaaaaaaaaaaaaaaaggcttaagatctcttagagtctattgagatctatgtatctattaatatatgtaaggattttatatatatacaaagatcaacttttgtgtgtgtatgatacataaatagtatcatcatgtatgtatctttcaccaactattttcacttaacattacgtcttggcatctactttcagctagtagaattggtggggtgacaggtctgtaggctttaatatccttcctctacaaattctgaatgaagaaattattacacagacccatctttattaccaggacttgaatctcatttatatagtccattgaaactaaaatgttatctttcaatatgtccccccaaaaaagacagtattctggatcttgaattttctgggagatgcatttttggagcatccttcttgaggggataaagcagtttaagtcattgtccctgagcataattcatttataatatcccacatgaattcttgtcctttaagtagctactcctgggactttgcccccctctttttcaacatgcttaatgtcacactggcctgaagagcaactttactgctgcaggggtaacttatatttcatctcataaagcaccaaatctgcattattttttacctcaattccggatgaattttggtgattaaaatgagaaaaacatggctcgtggtcctcaagtggatttttggatcccggttcaaaagtggaataaatctattttagaaatgtgagttcatattactttataataacatcctcaggtgatgggcatgcacgtgggcccagggtagggagtgccgtggtgaagagtctgatgatgtccatcaggagtttcagagttagcctcacagttcagtatctttttttttttttttgagatggagtcttgctctgtcgcccaggctggagtgcagtggcacaatctcagctcactgcaagctccgcctcccgggttcacgccattctcctgcctcagcctcccaagtagctgggactacaggcacccaccaccatgcccggctaattttttgtatttttagtagagacggggtttcactgtgttagtcaggatggtcttgatctcctgaccttgtgatccgcccacttcagcctcccaaagtgctaggattacaggcatgagccaccgcgcccagccacagttgagtatcttaataatgttttatcattatttagggtttagggtttaagattggagttattagagtttagagcccttgggatcatagtcaaagttacatttgggaacaagaaagtctcagcgtagtctctgtcactcttcttgtatcattgggattattagggtgaaggtatctgatcattaagaagagagatgtagggttcggattctggtcacgatgtatgtggatctgctccaacttcttcacagagtttagagctcaggatcatttgtttgtggtaattaggcctttagggttgtcattgtcaaggggttcagggtcaaacatccattaatttatcatcatttggaatttggggtcttctgttgcaacaccaacaggatccctaaatcaaggttaaagtccaagtatacaaacagagctctggtctttgggtaacagatgagtcattgaggtatggaataatgagggtcaggacaggtcactgacgaggtgtctgctccattgcctgttagggtttaggattgttgagtccttaatgtccagggcgttggagttagcattaatgttgttgaggctgagaaggttgggttcattagacttgggttcctttgcaactatttaaggccactttgggtttaggataattttggatcaattagaatagtttagaataatttgggtattttaggtgcaattatgatttcttggatcttttagagtcttttggactgttggggtgtagagtcatttccagcaagtttaaatttttaagggcccttagggaggtataaggcttaagatctcttagagtctatcgagatacttagggtcatttagagttgtttgggttagtttagggtcatgtgagataatctggggcttaaggttttaagcatcatttaagaaactttagcatgtttagagttgtttaggatttaggattgtctgggatctctgagggtgttttagaatttagggtagttttaattgacttaggatcctttgggtttatatagcttctagctttgctattccaagtgtggcctgtggatcagcagcatccacatcccctgggagttggtaggaaggcagtgtctcaaaccgcaccctaggtctgctaaatctgagtcaatgttctaacaagatcctctccagaatcacaaaacttgcatattcaagttctgtggtagtttacaggcatctgaggccacttctaggtattaggtctctaaggttgttagatacattaccatagggtcatttaaatgattggattctttagtgtgcttagactctaaagaatatcctgaaattattcattcaggatattttatgcatttagagttaggattgtttagggttcaaatgtcttgaaagtcttacagagatttttaaggtttaggttctattttgattgcttagagctttttaggggtggtttatgtcacttggcaccatttatagtcatggaagattatttagcatttaaagttgttttgagtaatttatacctcttcagaatctctaagagcgtctgaagtcttataccactttgggtagtttaggatcacaaaggatttaggaccatttgaggtgatttcgatagcatgggatcatgtaagttcattttaagaaggattacacttgttagtgagtttgggtcaggacttagaggctgttagcattggcacacttggtgtttgaggtcttcatgtttatggtacatttggatatttattcgttcactacacaaatattatcaaggtgttgtaaatcaaagaaaatgaccgagatgggtctcaatcattttaagaggtttatttgtcaaggttaaggacacaaccaggaaaagaacacagaagctcaggaaaaatctgtggtcctttgctttttccaaagggcatctggagacctcaatatttaaaggggaaaaaagcaactattgcgggaaaaaggaaggaactttacaaaagggtgggcaatgagaaaggcaagcagttgcattcttttgagtcttcttctatcagcgttcactgaatacacattatacatgcaagaaaagggtagaggaatagtcacttatgcattcgtctgatgctcagtgaatcagcatttttacataaggtaaaataaacttagggcagaggaagcagtcaggtggacagagagatgacttttacttctgtcctttgtcctatccgtgtgaaggtcagggtgaaattcaatagaactcttttaaggtaaagatcttgggacccacgaggaatttccttgtgggcacattgtgagggaagtatgtagctctttttatctttgcagctatctttttctgaacaaaatgggaagcaggtttgcatgacccatttcctaacttgacttttccctttgccttagtgagttgggggtcctgaggtttattttcctttcacagtgtctaccaagaatcaggtgctgctctaggtggttgggatgccttcacagagcttaggttctagtggaggagatacataagtcaacgaatacattcagactgaaaaaaagcacttagaagagtgtggaagcagaggatagctggcaggagagcagctgatttgggtgttcggggaaggccttgctaggaaggaagagttgagctgagacctgaatcaaaaaggaggcaagcatgtgatgagcttgggtgaagagtatcccaaaaagaccaagtggcaagtgcaagtcccagaagcaggacaggtctggacatgcttgaagagcagcaaggccagtgtagctgatcccaagaggaggcctgaggaagaccatgtaggtctgaaactgacccagttgtcccatagagctgatgtttatggtttctttgaataaacagagaaattgatcctcccagtcttaaaacctgagaaaatgacacttgtcttatctgagttcctttctcaggaaaccagctatcaggccttctagatagcatcaaggatctgacactcaccagatcattgtatctagacaatgagaggcaaaacccccttacccatcatgattgtctaagcaaccacctgcttcccgttaatcaactcttcttgcttaccccttgctaattcctgttttcccacacatggttacatttatttcctgctatataaactcctaattttagttgctcagggagatggatttgagactgatcttccgtcttcttagctgcagcacctgatgaaagccttcttccttggcaaggctcattgtctcagtgattggttttctgggaggcgagcagtaggacatagactgaacccctggttggttcagtagcaggtccaggtaggctagataaggacttgggattttttttaaaaaaaaggtttacagtcatttaggtcactgaatatcatttgggttctttgattttaaagttggctcattcaaggtttaggaacctctagggatgttaggagccaccaaagatcatttagaatatttttggctatttaggatcttttactattatttatgatttttgaaattcatttgggatgatttagggttattgttgttaaggatttggttttaaagtttttaggtttacagttggtaggaatgtggctggtcatgtagcatttgctgtcatttagacctttttattatatcttgacttcattaaggttatttaggacctttttcaattattacagcatttaaatttttttctagagtttatggtcactaaaagttatttagcttcttttagggtcctctgggatcatctagggttgattaatagcgtttaggaatcttagtgtcattttattgttgtcattttaattgtctatcacctttaaatgttttacaggggattgtgtttcattgttaaggattgtttagattcatttaggatcttttaaggttggtaaagtggtcctcaaattcagtgcatacaggagtcggagaggaggtttgtgtattagtccattttcacgctgctgatgaagacataaccgagactggacaatttacaaaagaaagaggtttaattggacttacagttccatgtagctggggaagcctcacaatcatggtggaaggcaaggtggagcaagccaagtcttacatggatggcagcaggcaaagagagcttgtgcaggggagctcctctttttaaaaccatcagatttcatgagacattcagtatcatgagaatagcttgggaaagacttgcccccatgattcaattacccgcccctccacaccaggtcactctcataacacgttaggattcaagatgagatttggggggggacacagccaaaccatatcagttagtaagaaagaggcaatattaaaaattctgctgccaatgccacagcccagaagaattgaaccacaatctcttggtatggaatatagacatcagtgttctaaaaaaactccccaggtgattgcagtgttccccttaggctcatttagaacagttagtgcaccagaaacatcagcatcacctgagaactttatattagagatgcagattctctgccctactccatctgctgaatcaggaactctggggttggggcccagcagtctgcgttttcacaggaaccctgggtgattctgatgcttcttagaggtcaaccccactagcatgacgtttacagggatcttcaggatccttgaggttttttagggtgggggaattctaagggcattttaagaaccttagagtcatttgggttattttagggttgtttattgtcaacttagtgtgtgtatcctgagaaggtaccagtaggcacctgagtgaactatttttaaattcagtttatttgatagtcatctgagtcagcccagaaatcatgctcactgccagtgtcctggcctctatgggaacgaaaggcagagcagctcctgagctcctggctcaggcctcaggcgcatggggtgggcggggtgggctgggggagcaggagtgtcccatgtgcccaggcgggacaaggcacacatttatccagaagacaccaagcaaagggcttggtttgtgaatcaggcactgcatctggtacccaattcctaatcaagagaacttcagaatataagaaactgaaagtagaactgtctaacagcacattctggctaacttcaggtttccaggatttatggtgtgtatttttctctccttttgaaaacttttgcatgtccagtttctgaaaggagaattgagagtacagattgaaaatgtgtttggtgtccagggtgactgactctaaacacagggaatttcccaattcctcacatgaggtctctaacctcaggctcccgcgtactcgagatggcatggcatggtgactggtttcctcaaaggccttggaactattgacgccatccttccattttgcctgtgtattacatatgtgtgtatttacattacatatatatatgatttttggtatatgggactgcatttccattgcataatgggcctcttattcttctaggaattctgaagtctagtgcttagaaaaactgaccctaccagggacacaaaggcctgactggctttaatcttctggccattgttgttttgttgttgttgttttgttttgttttgtatgtgtttatacgtttttggattctcaatatttttggagttactaagcaggaaattttaattttaaagccagtgtaatagaagcagtaagaaaatctaatagcaccaccccaacataacttttttcataagcctttacatgtaggcctgcaatcatattgaacatactattttatttactttacataacaatattttccatgtttctacataaactattatgtaatttcattctgagtctcactctgtcgcccaggctggagtgcagtggcacaatcttggctcactgcagcctccacctcccagttcaagtgattctcccgcttcagcctcttgagtagctgggattacaggcgcccaccaccacgcctggctaatttttgtatttttggtagagacagggtttcgccaagtcggccaggctggtctcaaactcctgacctcaggtgatctgcccgactcggcctcccaaagtgctaggattacaggtgtgagccaccacgcccagccttctacataaacttgataattacacttccagtagcagaataatattcatgcttacggtttttattttacctataccattatcacaaagaaggaggaaagcaaggaaaaaaatgtacttggctttttattgggattacttgaatgtttagataatttgggggagatctgttaaattttcaatccgtaaatgaggtatatcttcccattttttaattttattttttaatcttttattagattatacacctagaaatacatagaaatacatttttatgtatcttccttgttttagcaaccttgcaaaattcattttatatttctaataatttatctctagattattatgaccaacttgaattcaacttttatttgttggtttcttttagtgggtcatagatgtcatagttcgcttttttgcttagtgatttttgtgacaacttgtgttatagttaatatttggctaaggaactttaacgattgaagttgaacactacattacgaaacgggaacggttcccttttccctctcgcagggcgtgagatagggactgtggctcgcttcttcagtgccctgcggctcaaacctctgagggaccatacagacgggcaggctgtggggctccgaccccacaccagtgtccagagggtgaatgtttgcagctcctaagccccagcgggcatgtgttacagggtgctcttttagtttcgccgtccataagccgcttgtgttaagcagctcaattagaccctctaccttgtcgcaaggacagagggctttctgtatcccggtgttcttgccttgtgtaccggaaaaatcgcatcacgggtgagcttggagaatgagtgcaaggctttattgagtggaagtagctttcagcagatggggggaggggtgccagaagggagatgattttcacctggagtcaggccactcgaccccacgggctctcctccaactgccccagccaaactccatgcccttctgccagttcatggcctgccagcgtgccagtgcccgccgatgtgctcctccccacgtccagcccccaagtgttcctccgctgacgtgctcctctcgactttcagccgcttctgtccctgccttgctagggtctcgggtttttataggcataggatgggagcatgagaggccagggtggtcttgggaaatgcaacatttggacagcaaagcaaaaatgcctgtcctcacctaggtccgtgggggtagagccctagctagggaccacgccctcctctacccagcacttcacttccccacttctgtatcatttaaagggaccatgctcttcccttcccagcacgtctgtatcaattaagatctttccttgggatcattttggaatcaaggctctttgtagtcccagacattcaatatccacaatgtgtgggagttctaagtagtttgttcccaaaattataccctagacatctctgagacataattactttccatcagcaagacatacccatgctgtcatgttccatctgtcccagtgtttggcaccaactaccttctcagaacccctgggttgtcccagggaaggatgttgtaagataccccactctcggtgctgttgaccccatagatggctctgcaggtgagggtaggtggcatcaagggcagcttagaggggcttagtgactagcaggggacattcaaagtcatgaattattgagttgtggaaattccttatgtattttgaacgttaaccccttatcagatacatggtttgcaaatattttcttccattctacaggttgtcttttcatttcattgtttcctttgctgtgcagaagctttttagtttgatgtagtcccacttgtttatttttgcccttttttttctttgagatagtgtatctctctgtcacgcagactggagtgcatgtgattttggcccaccgcaaccgcagccttctgggctcaagcgatcctcctacctcagcctcccgagtaaccgggactacaggtgcatgccaccatgcccagctaattttggggggtatattttgtagagatggggttttgccgtgttgcccaggatggtctcaaactcctgtgctcgagcaatccacccaccttaccctttcaaaatgctaggattacaggcatgagccatcacacctggcctgtttttgcttttgttgcctgtgctttttgtgtcatatcctaaaaatcagagaacaaatgttcagtaacaaggtaagttctagggatctaatatacagtgctgtgactatagttaatagtactgtattgtttacttgtaattcactaagaaagtagatctttgacattttgggctggatgaagaaaaaaacagtagatctgaagtgtcctgacatcacacacacatacacacacacacacacacacacacaatggcaactgtgtgatgatggacgtgttaatgtgatgtggtaatcgtttcacaatgtatatgcgaaatgtgtatgtacaacaatcatcaggttgtacaccttgaatatatgtcatttttatttgccagttatgccacaataaaactgaaaaataaatactttttaaattaaaaaataataatattcatgtttatggcttatgaattagtaagtccaagcttaaaactccaattagaaaaatgtatcttgctctaatgcaagaacaattaaatcggggttaataaaacactgatacacaaaaatccatattatattctgcattatgtcaaaacacatgtttagatttcagtttttcctaaagtttaaacttaacacttaaattccaacttatggctgctgcttaaaaacttctcatcaaaattatgataagctgctctttggccaactcatagggtgatcatatttatcatccatactggatc

SEQ ID NO: 676 - DNA, 404 bp, Homo Sapiens
  misc_feature (328)..(328): n is a, c, g, or t
  misc_feature (371)..(371): n is a, c, g, or t
  misc_feature (395)..(395): n is a, c, g, or t
tcgttttaagactagtcaagtgcagtagtgagaaaggggaaagagtggaacaaggagttcgatctgtaacggactgaacaagcaacagagaaaactcactcccttggcaccagcacgagcacattcttgaagccaaactcatccatccgtactgggagatagatgatcatagaaacatcaagtgtgagtctggtttgagtttaaaacgaaaagtgctttagagttatggaaacttagcttcaaagaagaggcaccaaggatgccgcgcgaaaactcacgaggccacttaacacaggctgcgtgggaaacaggggctccgcgactggcntcagattaacggaaaaagacacccctctagagtccggcagcancgggcgggcaccggcgcctttctncacacagga

SEQ ID NO: 677 - DNA, 633 bp, Homo Sapiens
tgttcccttcacattttaaaatttgagtatacaatcatgtttgacaatatagaaatttaatttttagtgaaacaattctaaaccccttttccatagacacaagaaagatggcaaattgatgctattcctggaaaaatacattgaggcttatcaaataagcaagttcccacgttacttttgttttgcttcaagtaatacttctgccagttgtgttttatgaattaaacagggaacggcatgctgaacttgaaactagatttgttcctgcttttttcacaatgtgagtagttttgaaaagtcagatctggccatttgtctttcctagaatagcataactttgttcattgttttttttgttagactttctgacacagaaagactgatgatggtgtccactatgtattcttcaaaacatttggcacatgctgcactaacctagtctatctttactatcttggaatttgctcatacaaaccctatagcctagactagatcccttaccctctttccagttcctatcattcacccatttcactgtgcaagacaccttactagtcaccaatgatccagaaatgactttaaacaattcttgtcttaagggcttaacgtttggctattagtaacaccagttta

SEQ ID NO: 678 - DNA, 811 bp, Homo Sapiens
gattaggctaggtcgaggctgggtgttggcggggcggggcggcaccggttggtaggttgtaggaccggcgaggaataggaatcatggcggctgcgctgttcgtgctgctgggattcgcgctgctgggcacccacggagcctccggggctgccggcactagtcttcactaccgtagaagaccttggctccaagatactcctcacctgctccttgaatgacagcgccacagaggtcacagggcaccgctggctgaaggggggcgtggtgctgaaggaggacgcgctgcccggccagaaaacggagttcaaggtggactccgacgaccagtggggagagtactcctgcgtcttcctccccgagcccatgggcacggtcaacatccagctccacgggcctcccagagtgaaaggctgtagaagtcgtcatgaacacatcaacgagggggagacggccatgctggtctgcaagtcagagtccgtgccacctgtcactgactgggcctggtacaagatcactgactctgaggacaaggccctcatgaacggctccgagagcaggttcttcgtgagttcctcgcagggccggtcagagctacacattgagaacctgaacatggaggccgaccccggccagtaccggtgcaacggcaccagctccaagggctccgaccaggccatcatcacgctccgcgtgcgcagccacctggccgccctctggcccttcctgggcatcgtggctgaggtgctggtgctggtcaccatcatcttcatctacgagaagcgccggagccgaggacgtctggatgatgacg

SEQ ID NO: 679 - DNA, 589 bp, Homo Sapiens
  misc_feature (384)..(384): n is a, c, g, or t
  misc_feature (444)..(444): n is a, c, g, or t
  misc_feature (458)..(458): n is a, c, g, or t
  misc_feature (471)..(471): n is a, c, g, or t
  misc_feature (481)..(481): n is a, c, g, or t
  misc_feature (494)..(494): n is a, c, g, or t
  misc_feature (501)..(501): n is a, c, g, or t
  misc_feature (521)..(521): n is a, c, g, or t
  misc_feature (565)..(565): n is a, c, g, or t
  misc_feature (580)..(580): n is a, c, g, or t
ttgattaacaggacttttattggtagtaaactagagcaaacaatcagaataatacatatgcagtattcagtacacacaataaaagttaaagaaattcaaaacctgtataaaacaaactggagaaaaatcatacagcttaagagatacagtggtaaaggtcctctccatcctttgattacagcttgtactctgtactcaatagaacttaccgcacttactgaaataagaaataaacactttttagtactcagcgtatttaagattaagtacattttctaagaatcttgcaatgacaagttggtgaccctttagctgctaaagctaaagggaggaaagtgggaaaaggaaattaactaatactttgtaaccatttttaatatttcntattttccaaacactgcttttataacagaagtgttttacacttgcacaatattaattacnttattatacatggnagcctgcgggtangctgattacnccataagactgcnaccaccngtgggacctttctgacgtcngaagggtccttagctggacatcccccaagtccttaaacccctcngcttacctccagtcnttaaaaaaa

SEQ ID NO: 680 - DNA, 406 bp, Homo Sapiens
ggcgaaacgattgagacaccagctggacgtcacgcgccggagcatgtctgggagtcagagcgaggtggctccatccccgcagagtccgcggacgcccgagatgggacgggacttgcggcccgggtcccgcgtgctcctgctcctgcttctgctcctgctggtgtacctgactcagccaggcaatggcaacgagggcagcgtcactggaagttgttattgtggtaaaagaatttcttccgactccccgccatcggttcagttcatgaatcgtctccggaaacacctgagagcttaccatcggtgtctatactacacgaggttccaggctcctttcctggagcgtgtgtgggggcaacaaggacccatgggttcaggaattgatgagctgtcttgatctcaaagaatg

SEQ ID NO: 681 - DNA, 472 bp, Homo Sapiens
  misc_feature (261)..(261): n is a, c, g, or t
  misc_feature (458)..(458): n is a, c, g, or t
  misc_feature (463)..(463): n is a, c, g, or t
  misc_feature (472)..(472): n is a, c, g, or t
tttttttcggagagacaaaacaagaactagagttttaatgataataaaagcaataataataaaagcaataacaataaaaacaagatcagactctcactggggtaggcaagggactgaggaggtgaaaccaacccgtatggtgtcccagcacggcacctgctaaggagggagggtgggaaagcccaggccttcgttgcgggtacaggaggatgcaggagagggctgaggtgggggaggaacaactggtgtactgggagaganatttgggacgagggggaaccatcagcaaaaaatgaagccaggaatcacagtaagggcgcaagggctgaggccagttgtttccataaagaagactcaatcattacaaaaataatttttaagtagttaaaaaacacacatagggccaggcatggtggctcacaccttttaatccccagcactttggggaggcctgggtnggcanattcaccan

SEQ ID NO: 682 - DNA, 588 bp, Homo Sapiens
  misc_feature (542)..(542): n is a, c, g, or t
cccgggcattctggcgcggagcggagcggcggcgggcgcagctagcgggtcggccgcggagcggaggtgcagctcggcttcccccggcacccctccccctcgggcgccagccccacccctccgccggccgggccgaccccgccgtactatcccctgcggcgcgagcccggggcggctccaagcgccccccagcagacccccatcatgggcagccagagctccaaggctccccggggcgacgtgaccgccgaggaggcagcaggcgcttcccccgcgaaggccaacggccaggagaatggccacgtgaaaagcaatggagacttatcccccaagggtgaaggggagtcgccccctgtgaacggaacagatgaggcagccggggccactggcgatgccatcgagccagcaccccctagccagggtgctgaggccaagggggaggtcccccccaaggagacccccaagaagaagaagaaattctctttcaagaagcctttcaaattgagcggcctgtccttcaagagaaaatcggaagggagggntgggggtgattcttctgccttctcacccacagaggaagagcaggag

SEQ ID NO: 683 - DNA, 658 bp, Homo Sapiens
ctcggcacgagggcttcaagccaattatggagtccgtcagttgctccgctgctgctgtcaggaccggagacatggacgtccagcgggacctgagcctggtgcctgagcggcttcagagacgcgaacaagaacggcagctggaagttgaaatggcggaaacaaaagcggcagaaccaggaggtagagaaggagaacagccactttttcgtcgccacctttgctcgggagcgagcggccgtggaagagcttctggagcgcgcggagtcggtcgagcggctggaggaggcggcctctcggctccaggggctgcagaaactaatcaacgactcagtttttttcctagccgcttacgacctgcggcagggcacaagaggcgctggcgcggctgcaggcggccttggccgagcggcgccgggggctgctgcccaacgaagcgtttcgctttcaacgacccggggcaaacgcgatgctgcttcgctctaccaaagtagacgcggctcctggcatccccccggcagttgacacgcttacaggactccccgctgcccaagaagggcggaaggagacctcggccccagctgggtctgccggttctccaacctggagtcccaagtcttggagacgacgagccagcgagttgcaccagcgcgacgttctt

SEQ ID NO: 684 - DNA, 251 bp, Homo Sapiens
ggcacgaggctccgaacggtcttcttccgacagcttgctgcccgagaccagagttggtggctggacctcctgcgacttccgagttgcgatgctgtacttctctttgttttgggcggctcggcctctgcagagatgtgggcagctggtcaggatggccattcgggctcaacacagcaacgcagcccagactcatactggggaagcaaacaggggctggacaggccaggagagcctgtcggacagtgatcctg

SEQ ID NO: 685 - DNA, 480 bp, Homo Sapiens
  misc_feature (331)..(331): n is a, c, g, or t
cacagaaagagaagcatccgaaatcatgaagagcatcggtgaggccatccagtatctgcattcaatcaacattgcccatcgggatgtcaagcctgagaatctcttatacacctccaaaaggcccaacgccatcctgaaactcactgactttggctttgccaaggaaaccaccagccacaactctttgaccactccttgttatacaccgtactatgtggctccagaagtgctgggtccagagaagtatgacaagtcctgtgacatgtggtccctgggtgtcatcatgtacatcctgctgtgtgggtatccccccttctactccaaccacggncttgccatctctccgggcatgaagactcgcatccgaatgggccagtatgaatttcccaacccagaatggtcagaagtatcagaggaagtgaagatgctcattcggaatctgctgaaaacagagcccacccagagaatgaccatcactga

SEQ ID NO: 686 - DNA, 541 bp, Homo Sapiens
cacgaggtggtctgaggccggtacagctgcgcgtctgcgggaataggtgcagcgggcccttggcgggggactctgagggaggagctggggacggcgaccctaggagagttctttggggtgactttcaagatggactctactctaacagcaagtgaaatccggcagcgatttatagatttcttcaagaggaacgagcatacgtatgttcactcgtctgccaccatcccattggatgaccccactttgctctttgccaatgcaggcatgaaccagtttaaacccattttcctgaacacaattgacccatctcaccccatggcaaagctgagcagagctgccaatacccagaagtgcatccgggctgggggcaaacataatgacctggacgatgtgggcaaggatgtctatcatcacaccttcttcgagatgctgggctcttggtcttttggagattactttaaggaattggcatgtaagatggctctggaactcctcacccaagagtttggcattcccattgaaagactttatgttacttact

SEQ ID NO: 687 - DNA, 2051 bp, Homo Sapiens
  misc_feature (1955)..(1955): n is a, c, g, or t
  misc_feature (2011)..(2011): n is a, c, g, or t
  misc_feature (2033)..(2033): n is a, c, g, or t
tcactatagggcgaattgggcctctagatgcatgctcgagcggccgccagtgtgatggatatctgcagaattcgcccttacgatttaggtgacactatagaaggtacgcctgcaggtaccggtccggaattcccgggtcgacccacgcgtccgcaatgaagccgagtgaatgggggctgaatgtgcgagtccatagctgaagaggagcgccagatggtggaggaatacacttatttatgaaactgtcttgagttcttcttgaattgccagttttcagcctcctcatgcctccgtctcctttagacgacagggtagtagtggcactatctaggcccgtccgacctcaggatctcaacctttgtttagactctagttaccttggctctgccaacccaggcagtaacagccaccctcctgtcatcgccaccaccgttgtgtccctcaaggctgcgaatctgacgtatatgccctcatccagcggctctgcccgctcgctgaattgtggatgcagcagtgccagctgctgcactgtggcaacctacgacaaggacaatcaggcccaaacccaagccattgccgctggcaccaccaccactgccatcggaacctctaccacctgccctgctaaccagatggtcaacaataatgagaatacaggctctctaagtccatcaagtggggtgggcagccctgtgtcagggacccccaagcagctagccagcatcaaaataatctaccccaatgacttggcaaagaagatgaccaaatgcagcaagagtcacctgccgagtcagggccctgtcatcattgactgcaggcccttcatggagtacaacaagagtcacatccaaggagctgtccacattaactgtgccgataagatcagccggcggagactgcagcagggcaagatcactgtcctagacttgatttcctgtagggaaggcaaggactctttcaagaggatcttttccaaagaaattatagtttatgatgagaataccaatgaaccaagccgagtgatgccctcccagccacttcacatagtcctcgagtccctgaagagagaaggcaaagaacctctggtgttgaaaggtggacttagtagttttaagcagaaccatgaaaacctctgtgacaactccctccagctccaagagtgccgggaggtggggggcggcgcatccgcggcctcgagcttgctacctcagcccatccccaccacccctgacatcgagaacgctgagctcacccccatcttgcccttcctgttccttggcaatgagcaggatgctcaggacctggacaccatgcagcggctgaacatcggctacgtcatcaacgtcaccactcatcttcccctctaccactatgagaaaggcctgttcaactacaagcggctgccagccactgacagcaacaagcagaacctgcggcagtactttgaagaggcttttgagttcattgaggaagctcaccagtgtgggaaggggcttctcatccactgccaggctggggtgtcccgctccgccaccatcgtcatcgcttacttgatgaagcacactcggatgaccatgactgatgcttataaatttgtcaaaggcaaacgaccaattatctccccaaaccttaacttcatggggcagttgctagagttcgaggaagacctaaacaacggtgtgacaccgagaatccttacaccaaagctgatgggcgtggagacggttgtgtgacaatggtctggatggaaaggattgctgctctccattaggagacaatgaggaaggaggatggattctggttttttttctttcttttttttttgtagttgggagtaaagtttgtgaatggaaacaaacttggttaaacactttatttttaacaagtgtaagaagactatacttttgatgccattgagattcaccttccacaaactggccaaattaaggaggttnaagaagtaattttttttaagcccaaccattaaaaatttaatacaacttggtttctncccctttttcctttaaagctantttgtaaaagtttatgag

SEQ ID NO: 688 - DNA, 318 bp, Homo Sapiens
  misc_feature (231)..(231): n is a, c, g, or t
catgctactcagaggaaggggcggttggtgcggcctccattgttcgtgttttaaggcgccatgaggggtgacagaggccgtggtcgtggtgggcgctttggttccagaggaggcccaggaggagggttcaggccctttgtaccacatatcccatttgacttctatttgtgtgaaatggcctttccccgggtcaagccagcacctgatgaaacttccttcagtgaggccttnctgaagaggaatcaggacctggctcccaattctggctgaacaggcatctatcctttctctggttgacaaaaataaacaatgtggatt

SEQ ID NO: 689 - DNA, 337 bp, Homo Sapiens
ggccgcccaccggggtacgctctcccgcgcctgcgcaattccgccccgccccgtccccatctaccgaccggatgttagcagatttcccatagtgcctcgctagtggagggcatgataacacacgccggagggtcgcacgcgggttccagttgtgattgctggagttgtgtattgccaggaggctctccgagattggggtcgggtcactgcctcatcaaccggagcgatggcgtttctcggaagcatgttggggcgtgctgagtgcccttgggaggttctgaagcaaacctgtgcaacgggctgttggaagtcgaatgcggttcccccttcaagtttt

SEQ ID NO: 690 - DNA, 3270 bp, Homo Sapiens
ggccgcgggcaccagagtgccgagcccaggacgcccccggcccaggcccttggggtggacaagtccttcacttctcgccggagtgtgtggaggagcgatgggcagaaccagcacttccctcaggcactagacctgtcacgagtgaacttagttccctcctatactccttcactctaccctaagaacacagatctatttgagatgattgagaagatgcagggaagcaggatggatgaacaacgctgctccttcccgccgcccctcaaaacagaggaggactacattccatacccgagcgtgcacgaggtcttggggcgagaaggacccttccccctcatcctgctgccccagtttgggggctactggattgagggcaccaaccacgaaatcaccagcatccccgagacagagccactgcagtcgcccacaaccaaggtgaagctcgagtgcaaccccacagcccgcatctaccggaagcactttctcggcaaggagcatttcaattactactcactggacactgccctcggccaccttgtcttctcactcaagtacgatgtcatcggggaccaagagcacctgcggctgctgctcaggaccaagtgccggacataccatgatgtcatccccatctcctgcctcaccgagttccctaatgttgtccagatggcaaagttggtgtgtgaagacgtcaatgtggatcggttctatcctgtgctctaccccaaggcttcccggctcatcgtcacctttgacgagcatgtcatcagcaataacttcaagtttggcgtcatttatcagaagcttgggcagacctccgaggaagaactcttcagcaccaatgaggaaagtcccgctttcgtggagttccttgaatttcttggccagaaggtcaaactgcaggactttaaggggttccgaggaggcctggacgtgacccacgggcagacggggaccgaatctgtgtactgcaacttccgcaacaaggagatcatgtttcacgtgtccaccaagctgccatacacggaaggggacgcccagcagttgcagcggaagcggcacatcgggaacgacatcgtggctgtggtcttccaggatgaaaacactcctttcgtgcccgacatgatcgcgtccaacttcctgcatgcctacgtcgtggtgcaggctgagggcgggggccctgatggccccctctacaaggtctctgtcactgcaagagatgatgtgcccttctttggaccccccctcccggaccccgctgtgttcaggaaggggcctgagttccaggaatttttgctgacaaagctgatcaatgctgaatatgcctgctacaaggcagagaagtttgccaaactggaggagcggacgcgggccgccctcctggagacgctctatgaggaactacacatccacagccagtccatgatgggcttgggcggcgacgaggacaagatggagaatggcagtgggggcggcggcttctttgagtctttcaagcgggtcatccggagccgcagccagtccatggatgccatggggctgagcaacaagaagcccaacaccgtgtccaccagccacagcgggagcttcgcgcccaacaaccccgacctggccaaggcggctggaatatcactgattgtccctgggaagagccccacgaggaagaagtcgggcccgttcggctcccgccgcagcagcgccattggcatcgagaacatacaggaggtgcaggagaagagggagagccctccggctggtcagaagaccccagacagcgggcacgtctcacaggagcccaagtcggagaactcatccactcagagctccccagagatgcccacgaccaagaacagagcggagaccgcagcgcagagagcagaggcgctcaaggacttctcccgctcctcgtccagtgccagcagcttcgccagcgtggtggaggagacggagggtgtggacggagaggacacaggcctggagagcgtgtcatcctcaggaacaccccacaagcgggactccttcatctatagcacgtggctggaggacagtgtcagcaccactagtgggggcagctccccaggcccctctcgatcaccccacccagacgccggcaagttgggggaccctgcgtgtcccgagatcaagatccagctggaagcatctgagcagcacatgccccagctgggctgttagccgggccaccccctctgaaggtgaaactgagcagatgaggccacagaagcacaaggggaaggtgccgtgtcaagcccaggcagacgagacctctgccctgaagaccaacaccagcccgtgggctgccccctgcctccccaccctccccatggcccacccatctgggctgtctctgcagggcagagccgtccagacctgggatcagggaagctgctggcatcgtccccacccccagcctgggggtctgcgctggggcagggattgctcagtggaagcaggactgggggtctggcttgccccctccctgggcctccatcacccctgagcatccctctggactcagagggaacaaggtgggagagagagtttgagacagctccgtgtggagagcttagcccctggaggcagcacaaggaggatgtgatatgtgggggagtgagcactgggttgggagccgggtcctggtttccaatttgggttctgctgtgtgactctgggcaagtcactctccctctctgggcatgtctgctacaaatggacaagattatttcagaggtcactgaagactgtgattacatgcacctgccttagaaggtaggattttcttcccagggacctcctatcaccctaccctgcttcttgaggtccctggagccccaggtgggctgaggggcagggagccggctgtgcccagtatgcctcctggaccctccagttctgccacaggtctgccgatgccctgtccactgcctacacatgacagacaagtaaccccctcatgggggatggggacctacctggctcctcagccagcacccagcttaacccctgccatcccatgctgggccctccaggccaagagtctcagctggccgagagtccaggccttgcctcccccgaccgccatggagggggcagcccggcacagctgctgggagcccttgtgtgtctggtcacactttttaggcgtcacgccaaaggccagcctcctggccccaatacccattttggaagcccctgtggccgtgtggatgtcggtaacagttgtataaaataaattctatttatcgctattgt

SEQ ID NO: 691 - DNA, 180 bp, Homo Sapiens
cccgcaggacattgcgttggcgctgacggtcgctggcggccgttgccagggtaggggtcgctttgcggcatggcgatggcggagggcgagaggactgagtgtgctgagcccccccgggacgaacccccggctgatggagctctgaagcgggcagaggagctcaagactcaggccaatgac

SEQ ID NO: 692 - DNA, 549 bp, Homo Sapiens
  misc_feature (3)..(3): n is a, c, g, or t
  misc_feature (13)..(13): n is a, c, g, or t
ttnagacggcgcnactactactatgctgcgagaagacgacagaagggggaggccctgtctaggtagctggcaccaggagccgtgggcaagggaagaggccacaccctgccctgctctgctgcagccagaatgggtgtgaaggcgtctcaaacaggctttgtggtcctggtgctgctccagtgctgctctgcatacaaactggtctgctactacaccagctggtcccagtaccgggaaggcgatgggagctgcttcccagatgcccttgaccgcttcctctgtacccacatcatctacagctttgccaatataagcaacgatcacatcgacacctgggagtggaatgatgtgacgctctacggcatgctcaacacactcaagaacaggaaccccaacctgaagactctcttgtctgtcggaggatggaactttgggtctcaaagattttccaagatagcctccaacacccagagtcgccggactttcatcaagtcagtaccgccatttctgcgcacccatggctttgatgggctggaccttgcctggctc

SEQ ID NO: 693 - DNA, 3552 bp, Homo Sapiens
ggggggggagaggcctggaggacaccaacatgaacaagttgaaatcatcgcagaaggataaagttcgtcagtttatgatcttcacacaatctagtgaaaaaacagcagtaagttgtctttctcaaaatgactggaagttagatgttgcaacagataattttttccaaaatcctgaactttatatacgagagagtgtaaaaggatcattggacaggaagaagttagaacagctgtacaatagatacaaagaccctcaagatgagaataaaattggaatagatggcatacagcagttctgtgatgacctggcactcgatccagccagcattagtgtgttgattattgcgtggaagttcagagcagcaacacagtgcgagttctccaaacaggagttcatggatggcatgacagaattaggatgtgacagcatagaacaactaaaggcccagatacccaagatggaacaagaattgaaagaaccaggacgatttaaggatttttaccagtttacttttaattttgcaaagaatccaggacaaaaaggattagatctagaaatggccattgcctactggaacttagtgcttaatggaagatttaaattcttagacttatggaataaatttttgttggaacatcataaacgatcaataccaaaagacacttggaatcttcttttagacttcagtacgatgattgcagatgacatgtctaattatgatgaagaaggagcatggcctgttcttattgatgactttgtggaatttgcacgccctcaaattgctgggacaaaaagtacaacagtgtagcactaaaggaaccttttagaatgtacatagtctgtacaataaatacaacagaaaattgcacagtcaatttctgctggctggactgaactgaagatcaatcctcacaattcagactgagggttgagacaaaactttaaggatacatcttggaccatatcgtatttcattcttctaatggtggtttgggcttgtcttctagtctgggccgctctaaacatttataattccaacattgtggatttcatcttatatctgtggaccatcctagtttattctcccataagtcttagaagctttatggtgattattttgaggttttcattctcgcataaagcacaatgctgtcttcatcagaaaacagttggcataagaattaaacatatgaacatcacaaaacaatttataaaaacttcttaaatatacgctttgggctagttgcaaagactatgctaatagcacttccagtgagagtgatatatttaagtgtactggatctggaatggtgttttggtttggggggaattttttttttttcctggcaaatcacatatgttgttgatgtgagtatctgatgaaaaaacaatgtcagaataaccgacatgaaaattttttaggataacttggtgcctacctgaaaaatgtattgtgttttagactcttgatttcaaaaggttccacagaactagtctgcgcttaccttacccatgtttatatatagctgtcctacagggagcttttatttagaaaatgtctgcataatgttagattcttctcctgtctacattatgcactacataattggacttcattatgcttttgaaatgcttatctgcctgtcacataagttaaactatttaatttgttttgaatgttttggattgctacacaatacaatattctaaatttaggcatgagggtttttttgttttatttttactttttttttgtcattgcactatggaacacaaatgaaattctcttaatttataagaagatagtaggagttaaattttgaaaatggttgtgatgagccacgaaattcaatctttataatataggtactgctctttcagacaaacagtccatttttaatgacttcttattttgttgaaattactttaactgctaatcactgtggttgccaaatatttacttcagaagcaaagattttcaaacaagcatacacgatgcaaaataccagtctggcttctagtctatttactgttttgtttcactcagattagctcagttttctcatcaaagcagaatgctatcttgcgtgtgtgtgtgtgtgtgtgtgtgtgtgtgtgtgtatgtgtgtatatatatatatatatatatatatatatttttttttttttttttttttaaattacaaaagccatgagctgcttttatgctgaaaatggtcatttccctgttcacttactgacatgtgaagaagggtttcttgctttcttaaacatttccgtaaggcaggctagaaatgtaatacttcaaatgtttgatgattatggtcttttgataggaatagattctgcttgggatatatatccaggcactctctaaggtctagggttgatattaacaaaggaatgtacttagaatagcagtacattttatgcaaatatggaaattattttaagaaacaatgacatatcaaaactgctttttacatgattttgaaatagactagaaagctttccctatagacatattaatattccaatcataactttaattcaagaatgcagttttaccaaaagaaaaatttgaaaatttctattcaggctactggaattggttattaaaagaaaaaggaaaaagaagaatcttgctgctttcagtatttcctgatttttttgtaaatataaagaggaacttcaattatgaaaaatttttaaaagatatatatatctatatatctatatatatgtactgttttgtttcctgtcttgaagattttgagttatggttattggtttcagattgattaattcacatatgctgtgttttctttaaaagtcatatgggttcgtggcctaatgccttggattttacatatttttctttttaaatgcaaaaccttttcaacaaaatagtgtttgtcatcaggttggtactaaacatttataattactgtgtaattataaacaaaaatacataaagctttgaatataattatgtagcataaaagttaaggttgttcactatgatggcatcttagaattaaacaaaacttttactagggctgaaaagagaagactgatttaatgtggtgtgattattctgaagataaatgtctggctacagggaatattttgtactaaaaaatgattacacatatggctgtgtgtgtttgagtctgtgtctgtgagagagccagagagagtgagagagattgacagagaaagggagagacacacacacgccccttgaattgctttaactcctaagtgtttcagtcctcattccggtaaactccccatgctgattctttgttttaaactgaaccataggtacagtttcctttttgccaaatgtcaaaacaggtacaaattttaaaatgtaatgctttttaaatagaaaaatgtataaaattagaagtgcccacatataaaaaatacttgagatgaagattatctttagtgaatatcatctgcatatctctgtaagttcaattgtgtttcttacagtccctgtcatattaccaacagaggcaataaaagctgcagtgaaattg

SEQ ID NO: 694 - DNA, 289 bp, Homo Sapiens
  misc_feature (47)..(47): n is a, c, g, or t
  misc_feature (85)..(85): n is a, c, g, or t
  misc_feature (139)..(139): n is a, c, g, or t
ggcagtccgtctgtccatcccgccgcgccggggcagtctaggcggangggggctcaggcggcggcggcctcgacgcgagtaagtntcgtggttggggtgctggacccagagtgcctaccctcgcctgcctgggcctcantttccacatctgtacaatgggggtgaccatccctgccctgctggctgccaggagcggctgtaagtcttcaggcgtggatgcagcctgggggaagccatagggcgctttcacaggcctggccttcaccatggcgggagggagaccgcatct

SEQ ID NO: 695 - DNA, 9373 bp, Homo Sapiens
tccattcattcatttatgcatgcattcattaaacaggtattcactgactgtgcctcagacctggttttgggtaccaaggaagtttttcaaaacctcacagggctttgtagctataaagatatgtaaggatccttgggttatctgaagcccagagaagggagataacttgtccaagagcacacagcaagttgggggcagcgctgggccagtgctctgagctcctccaaccccgcccccacccacccaaggctagatctagatctacccactcctctccttaactcttcatcggctgtactcccaccctaaggagtcgaaatccccaccctagggagagacatatcctgtctggattgtccaaaagggaatgaaaggtaaaaatgaaaaaaaaaaaaaaagtgtccccaattcaagtgcagtgcctccctggtgcgggcattccagcgtggcctggagtgagtggcagtccacctccagaggcgtcccctgggcgctcctagggactcgaatttcccacgcggctttttgctttatgtattcactgtttagacgttttcggtcaaagcattttgggacttccgtaactctcagagcgcgccagggagccgcccttaaagatacctagttactgatgagttccatccggtaaagcagagggtagtgggcggcttggagactcaggatccgggtcccctcacgctcctggctgagtccctggcttcacaggggaaactacctccgcaggccaggacccatctagttacaggatacctcgatgttacaaagacgaggcttccagcgcgggggcgtggaggcggctgccagccctgcccgcagcgtgctggcgacccccgggacgccccttccctcccgcgcctctgctccctagctggtgggagcagagcgcaccgggatcacttccaggtcccttgcaccggaggaatgggcggcagcagggtccggagtcggcccggcggggcccacgtggccagcacatcggtcctccgctcgcgatttcccttttccgctctcgggcacgaggtactgaacgccaggtggaagcacagctgtgcagctacaggctctgccgttcagctgccgcgggccggggccggggcctgcggcgtcgtgcgcgtgcgcggaccagttccaggcgggcgagaccgccgcagggcggggcggggcgaggcggccgcagggcggggagggcggggagaggcggccgcagggcggggagggcggggcgcgaagccgggggcgggggccacgcgtggggcaggcggtgctcggctcggctgacgtcggcccgccggcgccccaccagctccgcgcgggcccgggttggccaccgccgggcccccgcccctcccccggccgtgtcccggccggaaccgatcgtggctggtttgagctggtgcgtctccatggcgacccgccggtgctataagtagggagcggcgtgccgtggggctttgtcagtccctcctgtagccgccgccgccgccgcccgccgcccctctgccagcagctccggcgccacctcgggccggcgtctccggcgggcgggagccaggcgctgacgggcgcggcgggggcggccgagcgctcctgcggctgcgactcaggctccggcgtctgcgcttccccatggggctggcctgcggcgcctgggcgctctgaggtgagggactccccggccgcggaggaagggagggagcgagggcgggagcggggcgggctgcgggccccgggccccgggcacgtgtgcggcgcgcctcgccggcctgcagagacacgtggtcgccgagcgggccacgaccttgaggcgccgcttcctcccggcccggggttctcccgcggctggataagggtgatccgggcgcctcgttctgcccccgtcttcacagctcggggctggaggggcctaggggagacccacccggagaccctgcggccccgcgccggcctctttcccaacccttcggcggccgcgcgctggccggggagccgttggggaggccctggcggccgcgcagcaggtgcaggggcgcagagcctgggctcgccttggtacagacgagcgggccccggccttggcgccttcagtttccttccagtttttattttcgctgtgtctacagagcagatgacaccaatttggaaacccgcgagagtgggtagagctaagatagtcttgctgtagtagctgtgatattagatgctcggccatgacttagaggtgtttatttaaggactgtgaatgactcggtgatttcggaaaagcttggcttagatgaacggacatacacaggggagacagccctaaggtttgcagaaaaggctgattgtgctgtttgcgaagtcgaaataattggtgaaagtgtagaaggcagaacctctcaggaatgtctggggaggacaaagaatgtgttggctgactttgtttaaacataaaattgggcagactttaattgatttgtgaaatttttttcaaagtttgtttgaattagcccctatctcttctaacattatcctcttgtgctaattgattgaccattttaaataacttagctgttacagaaagaccgaaaggtgttcttcagtaaaatatattcaagtaagttacttaagtaacgccttaaaagatacagaaaagcaaaaaagtattggcgtattaaaaagaaatcaaaactttccaagtttaggcctgaacattgccttaaaaatatttaataaggcctcaaatgacccagtccgagactgcatgagcctatttattattaaattgtaaatattcttcatataaacaaaaatatataaccatgtctgtaacaaaaatggttttgctagcgttgttactctcttcccttctccgaggggtgatttaggcaacttcggaggttgacaatgccaagcagtcacaatagatagagctttaaagcaaattctatgcatgggtttggatttatgacaggcccgtcaccctgggcctgtcatagtaccccatgccagagcaaactgtgtccccgaaccattgcctggcctctgtgcccgtaggctgctggcactgaagtgggttgcacagtggaaaagaagaaagctctacctggcagaaatttttaaaggttaaaataaataattttaagaaagctggttcacaaggtgccacatttgatgaaagcaaaatacagtggcttttattgttactagagtgatgttcttgcttgtttttcttttttggtgaagttagccccaaattattctcatagctaagcaaatacgagagtgactgtaaggacagttggcattcccggaattgctaaacttggtaggcaacgctggtttaagaatactgagttctagccgggcgtggtggctcacgcctgtaatcccaacactttgggaggctgaggcaggcggatcacctgaggtcgggagttggagaccagcctgactaacatggagaaacgccatctccactaaaaatataaaattagccaggccccgggtgtggtggcacatgccggtaatcccagctactcgggagactgaggcaggagaatcgcttgaacccaggaggcggaggttgaggtgagccgagatcatgccattgcactccagcctgggcaacaagagtaaaactctgtctcaaaaaaaaaaaaaaaaaaatactgaattctgatcaggtaacagcaactgtaatacaatgtgataagttgacttgaagattacagtttttaagaagtatatacccagctaatacatgaaaattaactcgtaaaatctcaaatgctccagacatttccatgatgcctgttggtcagtaaaaatcattctaagacttagtggaagtaggaaatgtttgtatggctgtgtataaaggctataatgtaatcccagcactttggaagaccgaggcgggtggatcacctggggtcaggagtttgagacccacctggacaacgtggtgaaatcctgtctctactaaaaacacaaaaattagccgggcatggtggcaggcgcctgtaatcccagctgctggggaggctgaggcaggagaatcgcttgaacccgggaggcagaggttgcagtgagccaagattgcaccgctgcactccagcctgggtgacagcgtgagactctgtctcaaaaaaaataaaaaagtctataatgctattttaagtttctaaggaactgaaactgctctgaaataaatcagaccattataagacttttttccatatcagtgagctaagtgcagataagcttctgaaacttgcatgctagatttttttggtacaaatatttgaaatgcttagtgtgctgccttggaaaaacctggtattttttgttgtgtccttatactgccaaggtttatggaatcatgtaccttatgcctagtaataattaggatgaccaggccagtgagtggttcatatccggggcatgattagctctgcgtgtgctcagccagtgccccatcttcaactcgatgtgttcctaaggtagacagcaaattccctattttatttctcagattgtcactgctgttccaagggcacacgcagagggatttggaattcctggagagttgcctttgtgagaagctggaaatatttctttcaattccatctcttagttttccatgtaagtattcagtttacatttatgttgcaggttaatcttaagaattgtattgctaaggcttctaagtgaatttctccactctatttgcattttgttgcatttcagaggaacatcaagaaatcatgaacaactttggtaatgaagagtttgactgccacttcctcgatgaaggttttactgccaaggacattctggaccagaaaattaatgaagtttcttcttctgtaagtatatgaggcccatgctggcagtgcagctgagagtgccaggcaagtggaaaactttggcaaggtctaaggaagagcaatgaggcttacatgtcttgttatggaatgtagaaattaattcactggtggtaaattaatagtgataatggtgatactcatatcagtggctagactcaaaagagcaggattcattgtgactgatgggaatgaaggtcgctggctattggtgtggtgtgtggtgaggctgctagtgagtcacctgtgaccactcttgtttcaggatgataaggatgccttctatgtggcagacctgggagacattctaaagaaacatctgaggtggttaaaagctctccctcgtgtcacccccttttatgcagtcaaatgtaatgatagcaaagccatcgtgaagacccttgctgctaccgggacaggatttgactgtgctagcaaggtaagcgatagcagcaggcctcaaaagcgttgtataaaatgggcctggtattccccacgaggcagatacaagttgtgttttttgggcaataaatgctcactaaaggcaaatggggcgggggggtacatgacaacttcccatgcttttctgtttattccacgtgttaagccacatatggatagcatgacaccactcttctttttcagactgaaatacagttggtgcagagtctgggggtgcctccagagaggattatctatgcaaatccttgtaaacaagtatctcaaattaagtatgctgctaataatggagtccagatgatgacttttgatagtgaagttgagttgatgaaagttgccagagcacatcccaaagcaaagtgagttattcccccatctgagggcaagatcgggagcataagatatgtggattcttatcaaacaaacttaaatttctgattattatatttctatactttagtagaaagtagttgaaacccccattgagtcatgaagcctgggactcaaactacagaatatatcagcgacagtatttagaacaggattgtttttattttaattgtggctataagtgaacatctatcatgagacatttgctgcactttccttgcttgtaggttggttttgcggattgccactgatgattccaaagcagtctgtcgtctcagtgtgaaattcggtgccacgctcagaaccagcaggctccttttggaacgggcgaaagagctaaatatcgatgttgttggtgtcaggtgagattttggtgggatagctagaggtcaagacattgaacagtttgagttttacaggctttctcctagtgtttgctattattttaagaaatactaagacacagtgtctcgtctctttattttaccccagcttccatgtaggaagcggctgtaccgatcctgagaccttcgtgcaggcaatctctgatgcccgctgtgtttttgacatgggggtgagtatacgtgaccctgttagggaagggcgggacacaactgacaataactagtcttaattctagagttaactttttatggcagttggttctgtattacatgggtttcagcctatctgctgcatacatttttgttattagctgtggatctggctgacttattttcttgattctaggctgaggttggtttcagcatgtatctgcttgatattggcggtggctttcctggatctgaggatgtgaaacttaaatttgaagaggtaatttagaacaaaactgtaatactcagtagccgttctaataaattcctttttggaatatttcaaaatttaagtgtcttaactaataccacaatgggctgaagtgtcttggtgtgatattttgagtgatttctttgtgctgtctgacattacacttgataccatttggttttctaaagtgtgaatcagctttcccagaagtcttggataattggttacattggaaatcatggctcacacctgtaatccagcacttggggaggccaaggtggtaggatcacttgagcccaggagtttgagaccagcctgggcaacacagtgagaccccatctctacaaaaaaaattttaaaattagcctggtgtggtggcgggcacctgtaatcccagctacttggaaggctgaggtgggaggatcacttgagcccaggaggttgaggctgcagtgagccatgatcatgccactgcactcagcctgggctacagagtgagaccctgtctcaaaaaaaaaaaagaaaaagcatgttgctgtgggcttcctagagaatatgctgactgtagcacatcatcaccccaaatgtgctttgctagacctatgcttcctctccttaaaatacttgaaatgtttagtcacttaggaagttaagccattatattggtgcttgaatttataaaatacatccacatggtttgttaaaatcatgacgtaggcagaataggatttttatcctgttggcatgtatttgttaaaatgttttgacatcttgatgccttcctaggtagtagttagttgcgtactgttctttgataaaaatcatacccataacatcctaaaggagatagggtgcctggaggggaatgaaaacgagccacctgggatatgtagcctggttttcagggagatgttgatgtttttttgcttttgttactttaatgataaacctgtctgttgatgcctggtctcatgatgtcatgtcacaaggccctgtgatgttactcccccatgtgaatttcccacaatgaaggctgctctttcttttctgtttcactctcttagatcaccggcgtaatcaacccagcgttggacaaatactttccgtcagactctggagtgagaatcatagctgagcccggcagatactatgttgcatcagctttcacgcttgcagttaatatcattgccaagaaaattgtattaaaggaacagacgggctctgatggtatgtataaaggacgaatcacttcatgtataactgaaagctgatgcaaaaagtcattaagattgttgatctgcctttctagacgaagatgagtcgagtgagcagacctttatgtattatgtgaatgatggcgtctatggatcatttaattgcatactctatgaccacgcacatgtaaagccccttctgcaaaaggtaatttctgagcatactgtataaaacaattaagaggactggtcacaacacgtgtaattaagtagtacttcctctctccgtctctttatatagagacctaaaccagatgagaagtattattcatccagcatatggggaccaacatgtgatggcctcgatcggattgttgagcgctgtgacctgcctgaaatgcatgtgggtgattggatgctctttgaaaacatgggcgcttacactgttgctgctgcctctacgttcaatggcttccagaggccgacgatctactatgtgatgtcagggcctgcgtggtaagtaagccatgcatgttgatggtgctgccaagaataggcaccttcttggatgtgtgcttcttgtctagacgaataagaaattgtcttgcctaagattaaatatatatggatatttttcctaagaaaagttttagaaaagactgatgagtgtatttctatgtaattggaatatatttaagttcatgccatgtgtcttgtggtttccttattaccaaaacggtgactgaagaaacgcttgctttagaaatacattgaattggccaggtgtgctggctcacacctgaaatcacaacacattgggaggccaaggcagaaggatcacttgagcccaggagttcgagcctgggcaacatagtgagaccctgtctctacaaaaaattaaaaaattagttggccatggtagtgggcgcctgtagtcccagctgcttggctaaggtgagaggtttgcttgagcctgggaggttgaggctgcggtgagctatgatagcaccattgtattccagcctgagtaacagagaaagaccctgtctcagaaaaaaaaaaaatacattgaattgtttcctgatgggaagtaaatactctcatgcccagttaggagtgagtcagggtttttaatatgccactttttctttctcaggcaactcatgcagcaattccagaaccccgacttcccacccgaagtagaggaacaggatgccagcaccctgcctgtgtcttgtgcctgggagagtgggatgaaacgccacagagcagcctgtgcttcggctagtattaatgtgtagatagcactctggtagctgttaactgcaagtttagcttgaattaagggatttggggggaccatgtaacttaattactgctagttttgaaatgtctttgtaagagtagggtcgccatgatgcagccatatggaagactaggatatgggtcacacttatctgtgttcctatggaaactatttgaatatttgttttatatggatttttattcactcttcagacacgctactcaagagtgcccctcagctgctgaacaagcatttgtagcttgtacaatggcagaatgggccaaaagctt

SEQ ID NO: 696 - DNA, 372 bp, Homo Sapiens
tgggtgtagaaactttgatagtgttttagtcgctattttgaaatccagccaagtgtttcctattaaattacatgactgatagctgccgcttatggttacttagtaaaaactcctgttgctaaatggctcaaatggatgtctgtgtgtttattttgccatctaatacaaagcataaatttttcttactccagtagctcatcaaacccttgaatctttcatcataagcacattgaggcaggaactatgcctgtgccatcctcacacctttgcaagtggcactcaataaatgtttctcaagtattgttcagactcagtgagggtcacatccccaggaggaaaaaggacgctggggaatgagtgatacgagatttg

SEQ ID NO: 697 - DNA, 275 bp, Homo Sapiens
ggcgctagcagcgcgtgacttagtgtgtccccctcgactcccttcacacatatcccgccacaccacggaaattcggggatactccccagagggtcccatcctggccacgctccctccccccattcaccgatccccgaagcaacccacgtctaccactcccccaacctccatccctccgggccgatacaccctcagtctatactcgcacgcgactccacctcgaggaaatcccccgccccgaaagcaccctgccccgccctactccatccatactc

SEQ ID NO: 698 - DNA, 697 bp, Homo Sapiens
  misc_feature (511)..(511): n is a, c, g, or t
  misc_feature (596)..(596): n is a, c, g, or t
  misc_feature (688)..(688): n is a, c, g, or t
gcttacactaaaaattatttcttaggcattctgaatctgggatgagaaacaggattgtttcacaatagtaagcacataatttttaaggccaaggcacatttgactcctgagatgaattttttgtggtcataatcaaatacttagttgtttttgatgccccaaaataaagtgagaatggtaatttgccaggaattcttcataacagtatcttacaaaaaacgtgttgctctcttcacagtattatgtgtaaagtcattgtttaaagcacgaatgttccctctggggtacttgttaaagctaaatttattttgcttccctccacttagaagtgctgcacactttacagcagcttcctttctttccatggcactgcctagttaacagaagtcttataaaaatttaaaaagacacatttcttacaaaaaagagttgaatgaggtaaaatggcattagatgggctcatattttttaaagctatgtattgttcagcgtcactttccaagtacttatncatatccaaacatgtctcaggtttatatttcacttatattgctgggcggattaagcttgtgtgatgggaccacattcaggcacgnagcacggtctatacatcgccatagtgtaataacgtcacgtcaaaaaaaaaaaaagggcgcagcttccctggggggaattactggaagcgggnttaagcgga

SEQ ID NO: 699 - DNA, 1441 bp, Homo Sapiens
ccaatagtagtcattttaaatatatattctgaaatctttgcaaattttaacagaagagtcgaagctctgcgagacccaatatttgccaataagaatggttatgataattagcaccatggagcctcaggtgtcaaatggtccgacatccaatacaagcaatggaccctccagcaacaacagaaactgtccttctcccatgcaaacaggggcaaccacagatgacagcaaaaccaacctcatcgtcaactatttaccccagaatatgacccaagaagaattcaggagtctcttcgggagcattggtgaaatagaatcctgcaaacttgtgagagacaaaattacaggacagagtttagggtatggatttgttaactatattgatccaaaggatgcagagaaagccatcaacactttaaatggactcagactccagaccaaaaccataaaggtctcatatgcccgtccgagctctgcctcaatcagggatgctaacctctatgttagcggccttcccaaaaccatgacccagaaggaactggagcaacttttctcgcaatacggccgtatcatcacctcacgaatcctggttgatcaagtcacaggagtgtccagaggggtgggattcatccgctttgataagaggattgaggcagaagaagccatcaaagggctgaatggccagaagcccagcggtgctacggaaccgattactgtgaagtttgccaacaaccccagccagaagtccagccaggccctgctctcccagctctaccagtcccctaaccggcgctacccaggtccacttcaccaccaggctcagaggttcaggctggacaatttgcttaatatggcctatggcgtaaagagactgatgtctggaccagtccccccttctgcttgttcccccaggttctccccaattaccattgatggaatgacaagccttgtgggaatgaacatccctggtcacacaggaactgggtggtgcatctttgtctacaacctgtcccccgattccgatgagagtgtcctctggcagctctttggcccctttggagcagtgaacaacgtaaaggtgattcgtgacttcaacaccaacaagtgcaagggattcggctttgtcaccatgaccaactatgatgaggcggccatggccatcgccagcctcaacgggtaccgcctgggagacagagtgttgcaagtttcctttaaaaccaacaaagcccacaagtcctgaatttcccattcttacttactaaaatatatatagaaatatatacgaacaaaacacacgcgcgcacacacacacatacacgaaagagagagaaacaaacttttcaaggcttatattcaaccatggactttataagccagtgttgcctaagtattaaaacattggattatcctgaggtgtaccaggaaaggattttataatgcttag

SEQ ID NO: 700 - DNA, 450 bp, Homo Sapiens
  misc_feature (422)..(422): n is a, c, g, or t
  misc_feature (433)..(433): n is a, c, g, or t
ttttagggtgaatcctatgtgtagaattgcttggtcaaatggtaagcaataaaagcaataaacagttgacgcccttgattcgtttttctgttcaaatgtcaattctttaaagaggccttttctgatgactcatgtgaaaaacagctcactgtcattctctggctctttactctgctttattttcctttgaagtccttattggacatcatattatctattaatttgcttattgtttatcttttctactggactgtacacctcatgtgtgtagggcatttgttttgctcacagctgtcaggtattggggataccccaatatctaacacagtaaacaatcaagaattattgggttgaattaatgagttaataaaattaaatactggcctcattgaaggggttatatagatttttaaaaaataccnggttttgtgcnccatggacccaaactgg

SEQ ID NO: 701 - DNA, 454 bp, Homo Sapiens
  misc_feature (422)..(422): n is a, c, g, or t
tattgcagttcactttattgcacgtcaagatattgcctttttttttttttaaacaaattgaaggttcggggtaactccagagtcaagcaagtctattggcaacattttcccacgagcgtgtgcccactttgtatctgtgtgtcacactttcgcaattcttgcaatatttcaaacttcttccttattatatctgttgtgaagctggttctcccagacgttccctgcaggctgtttatgcagcgcccatccgagatgaacccacaggacactcaggatcccagactgcaggagtcgtctgggatcacaggcggggcagagcaatttgtcaatgtttatgaggagtcctccttggcagcccagtctttatcctcactcacgtggaaatgagattcgacctctcctaatcacctggtgcccgaggnagcggtaggcgcctgtcccaagcctgagtttc

SEQ ID NO: 702 - DNA, 329 bp, Homo Sapiens
  misc_feature (12)..(12): n is a, c, g, or t
  misc_feature (325)..(325): n is a, c, g, or t
gatttcagggtngtgattccactgaagcaactgccaaaccaaagagaagtttttatgctgccagggatttgtacaagtaccgacaccagtacccacagaacttcaaagatatccgatatcaaaatgacttgagcaatcttcgtttttataagaataaaattccattcaagccagatggtgtttacattgaagaagttctaagtaaatggaaaggagattatgaaaaactggagcacaaccacacttacattcaatggcttttccccctgagagaacaaggcttgaacttctatgccaaagaactaactacatatgaaattgaggnattc

SEQ ID NO: 703 - DNA, 210 bp, Homo Sapiens
  misc_feature (58)..(58): n is a, c, g, or t
  misc_feature (112)..(112): n is a, c, g, or t
  misc_feature (114)..(114): n is a, c, g, or t
  misc_feature (126)..(127): n is a, c, g, or t
  misc_feature (137)..(137): n is a, c, g, or t
  misc_feature (154)..(156): n is a, c, g, or t
  misc_feature (175)..(175): n is a, c, g, or t
  misc_feature (186)..(186): n is a, c, g, or t
  misc_feature (188)..(188): n is a, c, g, or t
  misc_feature (190)..(190): n is a, c, g, or t
  misc_feature (194)..(194): n is a, c, g, or t
  misc_feature (196)..(196): n is a, c, g, or t
  misc_feature (200)..(200): n is a, c, g, or t
  misc_feature (203)..(204): n is a, c, g, or t
  misc_feature (207)..(210): n is a, c, g, or t
tttggtgtctggctatggacccccatctgactgtccagctctctctcccccacccctnccggtgttgttattaaacgtctgtggagcttctgctgcaaggaacaaaaaagananaaatcaaaaaanngacaaaaaancacaaacagaagaggannnaaaagcaacaaataaaganaacacacagangngntttnanaaanaannggnnnn

SEQ ID NO: 704 - DNA, 1743 bp, Homo Sapiens
ggcgcggggacgcgggtttctgcctcaggccctgccctgctctactctgcgctctctgcccgcgccgccgccgcctcagcctcggccctgcgctgcgcgcccggcccgtgctgccatggcctgccgcccgcgaagcccgccgaggcatcagagccgctgcgacggtgacgccagcccgccgtcccccgcgcgatggagcctgggacggaagcgcagagccgacggcaggcgctggaggcccgaagacgccgaggaggcagagcaccgcggcgccgagcgcagacccgagagctttaccactcctgaaggccctaaaccccgttccagatgctctgactgggcaagtgcagttgaagaagatgaaatgaggaccagagttaacaaagaaatggcaagatataaaaggaaactcctcatcaatgactttggaagagagagaaaatcatcatcaggaagttctgattcaaaggagtctatgtctactgtgccggctgactttgagacagatgaaagtgtcctaatgaggagacagaagcagatcaactatgggaagaacacaattgcctacgatcgttatattaaagaagtcccaagacaccttcgacaacctggcattcatcccaagacccctaataaatttaagaagtatagtcgacgttcatgggaccagcaaatcaaactctggaaggtggctctgcatttttgggatcctccagcggaagaaggatgtgatttgcaagaaatacaccctgtagaccttgaatctgcagaaagcagctccgagccccagaccagctctcaggatgactttgatgtgtactctggcacacccaccaaggtgagacacatggacagtcaagtggaggatgagtttgatttggaagcttgtttaactgaacccttgagagacttctcagccatgagctaactgccccctggcggccaggaagagaaacagctcctccccgactaggtggaaggctggccaggcaccaagcatgtgtgtgcacttgtacctggtggtttctctgttagcagtccattagctcatgctgaattatttttgccttactttcttaagaaacattaattttatgtatagtgagtatattttgcatgttttaaattgtaaatggagctaagtccaagaaagtacttgaagctctcttccagcgagcttaattgcgtaatccctgttgtcctccagggtaagctgacacgtctacataactggttttccacaggcatcttcagttattgcttgtcaggtggactgttttggatttaaccatgtaatccatgggaccaattgagagtcagctacttttataggcatcaaagtattctcagacacctttaatatctttatggaaacttaatttttggccttttatcaatatgtcataacagcattctgaagtcagacattgttaaattgagctattaaactaatgagttttatgtaagttatatggtcttaatttggtatttgtaaatagcactagttagactctttagaatactccaagagttagggcagcagagtggagcgatttagaaagaacattttaaaacaatcagttaatttaccatgtaaaattgctgtaaatgataatgtgtacagattttctgttcaaatattcaattgtaaacttcttgttaagactgttacgtttctattgcttttgtatgggatattgcaaaaataaaaaggaaagaaccctcaaaaaaaaaaaaaaaaaa

SEQ ID NO: 705 - DNA, 678 bp, Homo Sapiens
ggctagtagaggctggtgttaattcggccgaggtcatctttgcagtacaggagctcgtgccgtggccacagcccacagcccacagccatgggctgggacctgacggtgaagatgctggcgggcaacgaattccaggtgtccctgagcagctccatgtcggtgtcagagctgaaggcgcagatcacccagaagatcggcgtgcacgccttccagcagcgtctggctgtccacccgagcggtgtggcgctgcaggacagggtcccccttgccagccagggcctgggccccggcagcacggtcctgctggtggtggacaaatgcgacgaacctctgagcatcctggtgaggaataacaagggccgcagcagcacctacgaggtgcggctgacgcagaccgtggcccacctgaagcagcaagtgagcgggctggagggtgtgcaggacgacctgttctggctgaccttcgaggggaagcccctggaggaccagctcccgctgggggagtacgtgctcaagcccctgagcaccgtgttcatgaatctgcgcctgcggggaggcggcacagagcctggcgggcggagctaagggcctccaccagcatccgagcaggatcaagggccggaaataaaggctgttgtaaagagaaaaaaaagaaaaaaaaaaaaaaaaaaaacctct

SEQ ID NO: 706 - DNA, 468 bp, Homo Sapiens
tttttcactttttggaggaagtttattaaattaaaaaaaaaaaactacaaatgagtaattataaaatataatttcactcttttcattatttaccacaaaaatttaaaaataccaatatacagacgagcacaagtgaactggaaaagagctaaaaattgtataaaagacaaatctaaactcaagaatatatgagaagtgacatacaccatacactctcaagtgagttcagaaagcatgttccgtgctgggcaggttttctttccaggtcagtttttattggcactacacctggaaagctctctaagccaaagttcttatgtgtcaggatcttcctagacctcccttggaaagcatttctcataaaacaactcacaccagacaggctgacttattgtaggcacaaaaatcataaatgcctctcataggccccatggagcttggaaaaaaaagatctgctaatgaaagcat

SEQ ID NO: 707 - DNA, 584 bp, Homo Sapiens
  misc_feature (409)..(409): n is a, c, g, or t
  misc_feature (441)..(441): n is a, c, g, or t
  misc_feature (452)..(452): n is a, c, g, or t
  misc_feature (520)..(520): n is a, c, g, or t
  misc_feature (535)..(535): n is a, c, g, or t
  misc_feature (554)..(554): n is a, c, g, or t
  misc_feature (575)..(575): n is a, c, g, or t
  misc_feature (581)..(581): n is a, c, g, or t
gaaccaaaggactcttcctctgggcaccacaaacttccccttcctccactgagaagactgtctctcccgcagaccctgaattattgaaatcgaaggctgacttcctttctgcagtgagcccaggggtaatgttatcctgtcacacttgcaactagtgacttttgtttagtgatagaagatttggggaggacccaaaggactcagaactttctctccatacctccttttactcttttctttctgtgtaatgtatcaacaactgtttaatctcccttctaacaaaccttgatataagctttctgatatcaaagtatattgacagttaacccttactgattttaaacttgactatccagtctgttaattacctaaggattttgttttcatttcatctctaattgttttggancatgggcagaggaagggtatttggaattcatncagttttgctncctattttaatctctttggatttaaaataaaacttttttcaaatgggaatttggaattttaggaggcnttcattatccttggnaatcccctccttaattggncggctggttaaagggttatantcctanatc

SEQ ID NO: 708 - DNA, 552 bp, Homo Sapiens
  misc_feature (440)..(440): n is a, c, g, or t
  misc_feature (521)..(521): n is a, c, g, or t
  misc_feature (541)..(541): n is a, c, g, or t
cctttaaacttttgaaaataataaactttaaaatatcagatgtgttattacaggatgatacttggaatcaagtgaaatgagttatatggtcatcactaaatttagaaatctattgtgaaacaaagacaaacaggaaagtacagaatagagacttttagtaaataaatggaatttaaaagaaagtgtttatttacagtgtcacgacagaaaaggatgtctttgttgtcatagtctttgagggatctccgtaaaatctggggcacaggtacaagaaatagccaatatttagttcccagaccatgtttagtagtgtcccagtttcagatcatgctgccaagaggtatctccccctcaggtgggtcatcactgagccctggaaattggagactcatacttgccccagcacaatgttacgggcagacaggccgacatctagtgantaggctggaagccataaagaaaagctgctaagtggccactaggtgccacttttctggttttggtaatgcctttcattagcngatcctttttttcaagctcnatggggcctat

SEQ ID NO: 709 - DNA, 2742 bp, Homo Sapiens
gtcactcgtataaaaacctatgctttgaaggttctcgtgtgtctcggcctgcaggtctcgctcagagctgtgtccctgaacatccaccctgctggggtggcttgacgcacttctgtgcaaatctgttcgctcgcaaccctacctacctctctcccgaaccggagaaaaccttcggcggggtccttccgggttttgtgtcgaatctgcggcggcgacccggcgccgcgtcacgcggtggtgaatgtgcggcagtacgcgcgccgcgtcgtttacgcggcgatttcatcatgctccgagccggcggcgcgcgccgcttccgtcgccaccctctctggacagcccagggccgcaggctcatgccctctccgcgtccagtgctgcttagaggtgctcgcgccgctctgctgctgctgctgccgccccggctcttagcccgaccctcgctcctcctccgccggtccctcagcgcggcctcctgcgccccgatctccttgcccgccgccgcctcccggagcagcatggacggcgcgggggctgaggaggtgctggcacctctgaggctagcagtgcgccagcagggagatcttgtgcgaaaactcaaagaagataaagcaccccaagtagacgtagacaaagcagtggctgagctcaaagcccgcaagagggttctggaagcaaaggagctggcgttacagcccaaagatgatattgtagaccgagcaaaaatggaagataccctgaagaggaggtttttctatgatcaagcttttgctatttatggaggtgttagtggtctgtatgactttgggccagttggctgtgctttgaagaacaatattattcagacctggaggcagcactttatccaagaggaacagatcctggagatcgattgcaccatgctcacccctgagccagttttaaagacctctggccatgtagacaaatttgctgacttcatggtgaaagacgtaaaaaatggagaatgttttcgtgctgaccatctattaaaagctcatttacagaaattgatgtctgataagaagtgttctgtcgaaaagaaatcagaaatggaaagtgttttggcccagcttgataactatggacagcaagaacttgcggatctttttgtgaactataatgtaaaatctcccattactggaaatgatctatcccctccagtgtcttttaacttaatgttcaagactttcattgggcctggaggaaacatgcctgggtacttgagaccagaaactgcacaggggattttcttgaatttcaaacgacttttggagttcaaccaaggaaagttgccttttgctgctgcccagattggaaattcttttagaaatgagatctcccctcgatctggactgatcagagtcagagaattcacaatggcagaaattgagcactttgtagatcccagtgagaaagaccaccccaagttccagaatgtggcagaccttcacctttatttgtattcagcaaaagcccaggtcagcggacagtccgctcggaaaatgcgcctgggagatgctgttgaacagggtgtgattaataacacagtattaggctatttcattggccgcatctacctctacctcacgaaggttggaatatctccagataaactccgcttccggcagcacatggagaatgagatggcccattatgcctgtgactgttgggatgcagaatccaaaacatcctacggttggattgagattgttggatgtgctgatcgttcctgttatgacctctcctgtcatgcacgagccaccaaagtcccacttgtagctgagaaacctctgaaagaacccaaaacagtcaatgttgttcagtttgaacccagtaagggagcaattggtaaggcatataagaaggatgcaaaactggtgatggagtatcttgccatttgtgatgagtgctacattacagaaatggagatgctgctgaatgagaaaggggaattcacaattgaaactgaagggaaaacatttcagttaacaaaagacatgatcaatgtgaagagattccagaaaacactatatgtggaagaagttgttccgaatgtaattgaaccttccttcggcctgggtaggatcatgtatacggtatttgaacatacattccatgtacgagaaggagatgaacagagaacattcttcagtttccctgctgtagttgctccattcaaatgttccgtcctcccactgagccaaaaccaggagttcatgccatttgtcaaggaattatcggaagccctgaccaggcatggagtatctcacaaagtagacgattcctctgggtcaatcggaaggcgctatgccaggactgatgagattggcgtggcttttggtgtcaccattgactttgacacagtgaacaagaccccccacactgcaactctgagggaccgtgactcaatgcggcagataagagcagagatctctgagctgcccagcatagtccaagacctagccaatggcaacatcacatgggctgatgtggaggccaggtatcctctgtttgaagggcaagagactggtaaaaaagagacaatcgaggaatgaggacaattttgacaacttttgaccacttgcgctaataaaaaaaaaaaaactactcttatgtccactttacaaaagaaaacagcattgtgattactcccagggaccgtattttatcttcagtggctgcctgattttacccccacaattaaagttgaaggaatcctga

SEQ ID NO: 710 - DNA, 2824 bp, Homo Sapiens
aagtaacagaagttagaaggggaaatgtcgcctctctgaagattacccaaagaaaaagtgatttgtcattgctttatagactgtaagaagagaacatctcagaagtggagtcttaccctgaaatcaaaggatttaaagaaaaagtggaatttttcttcagcaagctgtgaaactaaatccacaacctttggagacccaggaacaccctccaatctctgtgtgttttgtaaacatcactggagggtcttctacgtgagcaattggattgtcatcagccctgcctgttttgcacctgggaagtgccctggtcttacttgggtccaaattgttggctttcacttttgaccctaagcatctgaagccatgggccacacacggaggcagggaacatcaccatccaagtgtccatacctcaatttctttcagctcttggtgctggctggtctttctcacttctgttcaggtgttatccacgtgaccaaggaagtgaaagaagtggcaacgctgtcctgtggtcacaatgtttctgttgaagagctggcacaaactcgcatctactggcaaaaggagaagaaaatggtgctgactatgatgtctggggacatgaatatatggcccgagtacaagaaccggaccatctttgatatcactaataacctctccattgtgatcctggctctgcgcccatctgacgagggcacatacgagtgtgttgttctgaagtatgaaaaagacgctttcaagcgggaacacctggctgaagtgacgttatcagtcaaagctgacttccctacacctagtatatctgactttgaaattccaacttctaatattagaaggataatttgctcaacctctggaggttttccagagcctcacctctcctggttggaaaatggagaagaattaaatgccatcaacacaacagtttcccaagatcctgaaactgagctctatgctgttagcagcaaactggatttcaatatgacaaccaaccacagcttcatgtgtctcatcaagtatggacatttaagagtgaatcagaccttcaactggaatacaaccaagcaagagcattttcctgataacctgctcccatcctgggccattaccttaatctcagtaaatggaatttttgtgatatgctgcctgacctactgctttgccccaagatgcagagagagaaggaggaatgagagattgagaagggaaagtgtacgccctgtataacagtgtccgcagaagcaaggggctgaaaagatctgaaggtctcacctccatttgcaattgacctcttctgggaacttcctcagatggacaagattaccccaccttgccctttacgtatctgctcttaggtgcttcttcacttcagttgctttgcaggaagtgtctagaggaatatggtgggcacagaagtagctctggtgaccttgatcaaggggttttgaaatgcagaattcttgagttctggaagggactttagagaataccagtgttattaatgacaaaggcactgaggcccagggaggtgacccgaattataaaggccagcgccagaacccagatttcctaactctggtgctctttccctttatcagtttgactgtggcctgttaactggtatatacatatatatgtcaggcaaagtgctgctggaagtagaatttgtccaataacaggtcaacttcagagactatctgatttcctaatgtcagagtagaagattttatgctgctgtttacaaaagcccaatgtaatgcataggaagtatggcatgaacatctttaggagactaatggaaatattattggtgtttacccagtattccatttttttcattgtgttctctattgctgctctctcactcccccatgaggtacagcagaaaggagaactatccaaaactaatttcctctgacatgtaagacgaatgatttaggtacgtcaaagcagtagtcaaggaggaaagggatagtccaaagacttaactggttcatattggactgataatctctttaaatggctttatgctagtttgacctcatttgtaaaatatttatgagaaagttctcatttaaaatgagatcgttgtttacagtgtatgtactaagcagtaagctatcttcaaatgtctaaggtagtaactttccatagggcctccttagatccctaagatggctttttctccttggtatttctgggtctttctgacatcagcagagaactggaaagacatagccaactgctgttcatgttactcatgactcctttctctaaaactgccttccacaattcactagaccagaagtggacgcaacttaagctgggataatcacattatcatctgaaaatctggagttgaacagcaaaagaagacaacatttctcaaatgcacatctcatggcagctaagccacatggctgggatttaaagcctttagagccagcccatggctttagctacctcactatgctgcttcacaaaccttgctcctgtgtaaaactatattctcagtgtagggcagagaggtctaacaccaacataaggtactagcagtgtttcccgtattgacaggaatacttaactcaataattcttttcttttccatttagtaacagttgtgatgactatgtttctattctaagtaattcctgtattctacagcagatactttgtcagcaatactaagggaagaaacaaagttgaaccgtttctttaataaaaaaaaaaaaaaaaaaaaaaaaaaaaaaaaaaaaaaaaaaaaaaaaaaaaaaaaaaaaaaaaaaaaaaaaaaaaaaaaaaaaaaaaaaaaaaaaaaaaa

SEQ ID NO: 711 - DNA, 541 bp, Homo Sapiens
  misc_feature (57)..(57): n is a, c, g, or t
  misc_feature (367)..(367): n is a, c, g, or t
  misc_feature (420)..(420): n is a, c, g, or t
  misc_feature (464)..(464): n is a, c, g, or t
  misc_feature (475)..(475): n is a, c, g, or t
  misc_feature (483)..(483): n is a, c, g, or t
  misc_feature (501)..(501): n is a, c, g, or t
  misc_feature (509)..(509): n is a, c, g, or t
  misc_feature (522)..(522): n is a, c, g, or t
ttcagtggcagcacagattatttttatcagagctgtaaagaaaacaactgtcctttnctccccaccacccctcctgccccactttggcccagaaaccaaatgtgaacttcctgtctcccacctcagcactagtccatgccaggacaccagctgacaatttcttggttttactgtcaataattgtaccatgtgatcaattactgtcctcacttagaacaaagcctgagtccgagaatatttatattttaccaatatatgcctgttacaagagaaggaaatatgagttatttaagtttaacttttttatgtgaattcagagtttatttatcgagggaaatatgtacaaagaaggcttcaaatgggaatnttttaccgacatttcctatacctgacagacactggccacatggggaagatggnggtaataataaaatggtttttaaatggggaaaaaaaaaaaaaanccggggggggncccggtancccatttcggcccaaagngggtccgntttacaattcccngggccgtcggtttacaacg

SEQ ID NO: 712 - DNA, 471 bp, Homo Sapiens
tgccaccgtcttctgtctctacctccctcctggctggccaatggctctgtgttcctgggcctgctgctggctgtccagagtaggggttgcttagagctgtgtgcatccctgcgggtggtgtgggagtgggcggttgtctaaaggcaggtcccctctactgataaacaaggaccggagatagacctagaggctgacattcttggctcccccagcctacaccccccccacctcgatttcccacagagccctagggacgggtagccagctctgtggcatggtatctggaggcaggccagcaacctgatgtgcatgccacggcccgtccctctccccactcagagctgcagtagcctggaggttcagagagccgggctactctgagaagaagacaccaagtggattctgcttcccctgggacagcactgagcgagtgtggagagaggtacagccctcggcctacaagctctttag

SEQ ID NO: 713 - DNA, 2500 bp, Homo Sapiens
cccaggcgcagccaatgggaagggtcggaggcatggcacagccaatgggaagggccggggcaccaaagccaatgggaagggccgggagcgcgcggcgcgggagatttaaaggctgctggagtgaggggtcgcccgtgcaccctgtcccagccgtcctgtcctggctgctcgctctgcttcgctgcgcctccactatgctctccctccgtgtcccgctcgcgcccatcacggacccgcagcagctgcagctctcgccgctgaaggggctcagcttggtcgacaaggagaacacgccgccggccctgagcgggacccgcgtcctggccagcaagaccgcgaggaggatcttccaggagcccacggagccgaaaactaaagcagctgcccccggcgtggaggatgagccgctgctgagagaaaacccccgccgctttgtcatcttccccatcgagtaccatgatatctggcagatgtataagaaggcagaggcttccttttggaccgccgaggaggttgacctctccaaggacattcagcactgggaatccctgaaacccgaggagagatattttatatcccatgttctggctttctttgcagcaagcgatggcatagtaaatgaaaacttggtggagcgatttagccaagaagttcagattacagaagcccgctgtttctatggcttccaaattgccatggaaaacatacattctgaaatgtatagtcttcttattgacacttacataaaagatcccaaagaaagggaatttctcttcaatgccattgaaacgatgccttgtgtcaagaagaaggcagactgggccttgcgctggattggggacaaagaggctacctatggtgaacgtgttgtagcctttgctgcagtggaaggcattttcttttccggttcttttgcgtcgatattctggctcaagaaacgaggactgatgcctggcctcacattttctaatgaacttattagcagagatgagggtttacactgtgattttgcttgcctgatgttcaaacacctggtacacaaaccatcggaggagagagtaagagaaataattatcaatgctgttcggatagaacaggagttcctcactgaggccttgcctgtgaagctcattgggatgaattgcactctaatgaagcaatacattgagtttgtggcagacagacttatgctggaactgggttttagcaaggttttcagagtagagaacccatttgactttatggagaatatttcactggaaggaaagactaacttctttgagaagagagtaggcgagtatcagaggatgggagtgatgtcaagtccaacagagaattcttttaccttggatgctgacttctaaatgaactgaagatgtgcccttacttggctgattttttttttccatctcataagaaaaatcagctgaagtgttaccaactagccacaccatgaattgtccgtaatgttcattaacagcatctttaaaactgtgtagctacctcacaaccagtcctgtctgtttatagtgctggtagtatcaccttttgccagaaggcctggctggctgtgacttaccatagcagtgacaatggcagtcttggctttaaagtgaggggtgaccctttagtgagcttagcacagcgggattaaacagtcctttaaccagcacagccagttaaaagatgcagcctcactgcttcaacgcagattttaatgtttacttaaatataaacctggcactttacaaacaaataaacattgttttgtactcacggcggcgataatagcttgatttatttggtttctacaccaaatacattctcctgaccactaatgggagccaattcacaattcactaagtgactaaagtaagttaaacttgtgtagactaagcatgtaatttttaagttttattttaatgaattaaaatatttgttaaccaactttaaagtcagtcctgtgtatacctagatattagtcagttggtgccagatagaagacaggttgtgtttttatcctgtggcttgtgtagtgtcctgggattctctgccccctctgagtagagtgttgtgggataaaggaatctctcagggcaaggagcttcttaagttaaatcactagaaatttaggggtgatctgggccttcatatgtgtgagaagccgtttcattttatttctcactgtattttcctcaacgtctggttgatgagaaaaaattcttgaagagttttcatatgtgggagctaaggtagtattgtaaaatttcaagtcatccttaaacaaaatgatccacctaagatcttgcccctgttaagtggtgaaatcaactagaggtggttcctacaagttgttcattctagttttgtttggtgtaagtaggttgtgtgagttaattcatttatatttactatgtctgttaaatcagaaattttttattatctatgttcttctagattttacctgtagttcataaaaaaaaaaaaaaaaaaaaaaaaa

SEQ ID NO: 714 - DNA, 407 bp, Homo Sapiens
tttttctgtctcaggactttcagggaaaacaatgttttcttaccaatgggcattttcaaagactctaagttggtatgtcagtcagtgtacagacaacgtgatccgcaaggcacgggcaccaccctgccgtgaaccacatctcagccaatcttccgcaaagaaatgtacccaaaaacttttctgtaaattcaggaaggtgatccacaccttccacattttgttttgaaacaatgatggtattttaaaagttcttcaaattaacaaaagtgatatcagaaatataaacatttctaaaacagagcgggctgtgaggagtgattttgccaaacttaagtcagtagcacttgacttatatctgcttttagtctgcggtggcaccacgcttaccaaggcacagtatccccttg

SEQ ID NO: 715 - DNA, 349 bp, Homo Sapiens
tttagtaacttctcttttttcaatctgttattttaattatttttatttcactgttatctcattaactgtgaggtgagcagacgattcaaacaaaagctgtctgattcagacttacactagtcgtcaactttgggagacacaaaatcaaagctctagaatacagcacacctaatttagagttagaatgacaagaatctttttaaaacatgcaaaatcaagctggaagagtgccaggcaatgaatttcagaagtatgatgatgtaaacaaaaccatgccatacacaaaaacattctttatgtacacagtcaggaaaaaccccaaactaagtattccaacaggcttcggaac

SEQ ID NO: 716 - DNA, 321 bp, Homo Sapiens
gcacgagaaacaaacaaaaaaggaacttgtttcctagcaagaagcagatgaggctggtgaataagcataccacataagtaagtaatccactaacttagggaatttcgtgaccagtcactcagcacgccctgttgcgaaggggacggctgaccaataggatcatctcagagtcaccctcacacaacttggcttagcctagttggcaaaagtgtctcttcagagacctaccctcctggaattgaaataaaatgaaaatttgtgatgacgatcagctactgtcagtgtgacttaggtgtagaaattaaaaaaaaaaaaaaaaaa

SEQ ID NO: 717 - DNA, 220 bp, Homo Sapiens
  misc_feature (64)..(64): n is a, c, g, or t
  misc_feature (139)..(139): n is a, c, g, or t
  misc_feature (161)..(161): n is a, c, g, or t
  misc_feature (216)..(216): n is a, c, g, or t
aaacttttcctgaaacaattattcaaactctgcatcttggatatcaatgtctctagcagtagtnagagccatattttaaaaagagctttactaaatacagatcataacattcagctgttttaagtgtattaacgcattnggggtaaatttacagacttgtncaaccacaaccacagtcctgattttagaacaatttccatcaacttcaaagatccnctgg

SEQ ID NO: 718 - DNA, 148 bp, Homo Sapiens
tccctaagctgaaaaagaatgcacattgaatggatgtgagagaccacattgcctttcccactgctttggggagcactttcctgtcatttctaacttaccacatgctgggggtactatatgtatgtggcgcctaatatgtggcaaagaa

SEQ ID NO: 719 - DNA, 283 bp, Homo Sapiens
  misc_feature (241)..(241): n is a, c, g, or t
  misc_feature (251)..(251): n is a, c, g, or t
gcggccgcctactactactatacggctgcgagaagacgacagaaggaaaagttagtaggcatgaacatagatcagtaaaaattatccgatccgacaaacagaaaatcgattttttttttgttttaaacagagcatcataaactgtaggacacagcaacggattaccacatgtattacaggaatacaagaatgaccagaaggaaaaaatgaagcaagaaaaaagttttagtcttgaacacanggcaaataanaaaaaaaaaaaaaaaaaaaaaagtcgtatcga

SEQ ID NO: 720 - DNA, 596 bp, Homo Sapiens
ggcacgagggtcccccggaagtggagcccgggacttccactcgtgcgtgaggcgagaggagccggagacgagaccagaggccgaactcgggttctgacaagatggccgggctgccccgcaggatcatcaaggaaacccagcgtttgctggcagaaccagttcctggcatcaaagccgaaccagatgagagcaacgcccgttattttcatgtggtcattgctggccctcaggattccccctttgagggagggacttttaaacttgaactattccttccagaagaatacccaatggcagcccctaaagtacgtttcatgaccaaaatttatcatcctaatgtagacaagttgggaagaatatgtttagatattttgaaagataagtggtccccagcactgcagatccgcacagttctgctatcgatccaggccttgttaagtgctcccaatccagatgatccattagcaaatgatgtagcggagcagtggaagaccaacgaagcccaagccatagaaacagctagagcatggactaggctatatgccatgaataatatttaaaattgatacgatcatcaagtgtgcatcacttctcct

SEQ ID NO: 721 - DNA, 2443 bp, Homo Sapiens
aaatggcgtgcccgtctctccgccggccccctgcctcgcagtggtttctcctgcagctcccctgggctccgcggccagtagtgcagcccgtggagccgcggctttgcccgtctcctctgggtggccccagtgcgcgggctgacactcattcagccggggaaggtgaggcgagtagaggctggtgcggaacttgccgcccccagcagcgccggcgggctaagcccagggccgggcagacaaaagaggccgcccgcgtaggaaggcacggccggcggcggcggagcgcagcgatggccgggcgagggggcagcgcgctgctggctctgtgcggggcactggctgcctgcgggtggctcctgggcgccgaagcccaggagcccggggcgcccgcggcgggcatgaggcggcgccggcggctgcagcaagaggacggcatctccttcgagtaccaccgctaccccgagctgcgcgaggcgctcgtgtccgtgtggctgcagtgcaccgccatcagcaggatttacacggtggggcgcagcttcgagggccgggagctcctggtcatcgagctgtccgacaaccctggcgtccatgagcctggtgagcctgaatttaaatacattgggaatatgcatgggaatgaggctgttggacgagaactgctcattttcttggcccagtacctatgcaacgaataccagaaggggaacgagacaattgtcaacctgatccacagtacccgcattcacatcatgccttccctgaacccagatggctttgagaaggcagcgtctcagcctggtgaactcaaggactggtttgtgggtcgaagcaatgcccagggaatagatctgaaccggaactttccagacctggataggatagtgtacgtgaatgagaaagaaggtggtccaaataatcatctgttgaaaaatatgaagaaaattgtggatcaaaacacaaagcttgctcctgagaccaaggctgtcattcattggattatggatattccttttgtgctttctgccaatctccatggaggagaccttgtggccaattatccatatgatgagacgcggagtggtagtgctcacgaatacagctcctccccagatgacgccattttccaaagcttggcccgggcatactcttctttcaacccggccatgtctgaccccaatcggccaccatgtcgcaagaatgatgatgacagcagctttgtagatggaaccaccaacggtggtgcttggtacagcgtacctggagggatgcaagacttcaattaccttagcagcaactgttttgagatcaccgtggagcttagctgtgagaagttcccacctgaagagactctgaagacctactgggaggataacaaaaactccctcattagctaccttgagcagatacaccgaggagttaaaggatttgtccgagaccttcaaggtaacccaattgcgaatgccaccatctccgtggaaggaatagaccacgatgttacatccgcaaaggatggtgattactggagattgcttatacctggaaactataaacttacagcctcagctccaggctatctggcaataacaaagaaagtggcagttccttacagccctgctgctggggttgattttgaactggagtcattttctgaaaggaaagaagaggagaaggaagaattgatggaatggtggaaaatgatgtcagaaactttaaatttttaaaaaggcttctagttagctgctttaaatctatctatataatgtagtatgatgtaatgtggtcttttttttagattttgtgcagttaatacttaacattgatttattttttaatcatttaaatattaatcaactttccttaaaataaatagcctcttaggtaaaaatataagaacttgatatatttcattctcttatatagtattcattttcctacctatattacacaaaaaagtatagaaaagatttaagtaattttgccatcctaggcttaaatgcaatattcctggtattatttacaatgcagaattttttgagtaattctagctttcaaaaattagtgaagttcttttactgtaattggtgacaatgtcacataatgaatgctattgaaaaggttaacagatacagctcggagttgtgagcactctactgcaagacttaaatagttcagtataaattgtcgtttttttcttgtgctgactaactataagcatgatcttgttaatgcatttttgatgggaagaaaaggtacatgtttacaaagaggttttatgaaaagaataaaaattgacttcttgcttgtacatataggagcaatactattatattatgtagtccgttaacactacttaaaagtttagggttttctcttggttgtagagtggcccagaattgcattctgaatgaataaaggttaaaaaaaaatccccagtgaaaaaaaa

SEQ ID NO: 722 - DNA, 402 bp, Homo Sapiens
ggaacaaccatgtcatcagaatcgagcaaaaaacggaagcccaaagtgatccgaagcgatggagccccagctgaaggaaagcggaatcgatctgacaccgagcaggaaggtaaatactacagtgaggaggccgaggtggatctgcgggaccctggcagagactatgagttatacaagtacacctgccaggagctacagaggctgatggctgagatccaagacctgaagagcaggggtggcaaggatgtggcaatagaactagaagaacggaggatccagagctgtgtgcatttcatgactctaaagaagcttaaccgattagcccacatcaggttgaagaaaggaagagatcagacccacgaggctaagcagaaagtagatgcctatcatctgcagctccag

SEQ ID NO: 723 - DNA, 220895 bp, Homo Sapiens
aagcttgtgttaaagaatttgatttgattaagggccgggcacggtggcttatgcctataatcccagcactttgggaggctgaggcaggtggatcacctaaggtcaggagttcaagaccagcctggccaacacgaagtctctactaaaaatacaaaaattagctgggcgtggtggcaggcggctgtaatcccggctacatgggaggctgagacaggagagttgcttgaacctgggagacagaagttgcagtgagctgagatcatgccactgcactccagcctgggcaacagagcaagactctgtctcaaaaaaaaaaaaaaaagaatttgatttgatttaaaaggctgttggatgaacaagatactcaaagaagatgttcgtcactgggtaggaggctatggttgaaattaaggcagagtgtggacgggagtgaagaggtaaatccatgatgctaaggaaggagacttgagtgaacttaaggcaggaggaaaaagaaagagcaatggaaagtggagctgcagatccctctcctgttcaaactatgagagctggctcaggtcccctgctatagtgggccagaaaagcctggacttccactgctttttcctgcagagctgagtccctccagggctgccatgagaggcggggagagagagcactagacagagaagaccagaagaccatttgagaattcctttgggtttccttcatgattcctttttcttctcattctgaattgttttattttattatgtaatattcggtatatgcaaaggaatatatgacacctttgtgtgtattacaaaacaagcatttgagaatccgcacctctccacccaatttttctttgtggtttctttgccagtaaaagagttcactcatctgttgcttaaaatataggatgcttgagtcaccagcttgccatcctgtgtcattcaacacctcctccagactcttcgcaggaaggtgacccagaaaccccttgaaggacatgataccgtccctgtgctctgatgtgccccctggtgtttgagtggagtgatttttagatagcggtttgcctgttaaaaccttccctttgttccctatattattgcttgcattttagggcttctcagttgaaggatgtggttgaaagagcccagttcctcagctgctcctctgggtgactagagtgtgggtaactgatgttttaggtcctggagaaagcagtgatgatcacaaatagtagaatggagaaatggttatctcatattgatcttcaggtttgttactagtctacatttggttttttaaataattattagaaaaaaacattgtgggtggggagataggatcattatgatgaaacagttctgtacattcaatcaggatacttgttgggaattagattttgcatttacctccctcactggtgtggtccatctcattttcagtggcctacacacatcacacaccattattatttccatgttcttgtacttgttgggcagctctaatatgaaagataaaatgaacgaaaagtacaaatgaagaaagtttaggtgactattcctctgatcttgaggatgagggtttttcttaagcgttacacagaagccatgtaatttcactatacaatgtaaaaatggtgtatagtcagttctgctatagttcatcatgtgcatttctaaaaatcatgccatgcgaaatcatgcagtaaaaaacacggagtgggcatgttggctcatgcttgtaatcaggaggctaaggtgggaggatcgcatgaggcagggagttcaagaccagcctgggcaacaaagcaagacccagtctctcttacaaataaaaaataaaaattatctggacatggtggtgtgtgcctgtactcccagctacccaagaggctgcagtggaggatcccttaagcccaggaggtagaggccacagtgagctatgatcacatcactgcactccagcctgggtgacagagtaagaccctgtctctaaaacagaaacccagaacttactgtgaaatggagggttaaggatcacaacaataaaaaatctcataggtgaccaaaaaaaggaaaagatttattttttaaaaaagatagggacctgccgggcacagtggctcacacctgtaatcccagcactttggaaggctgaggcgggtggatcacgaggtcaggggttcgagaccagcctgaccaacatggtgaaaccccgtctctactgggcgtggtggcgggcgcctgtaatcccagctactcaggaggctgaggcaggagaagtgcttgaacccaggaggtggaggttgcagtgagccgagatcccgccactgcactccagcctgggcgacagagcaagactccgtctcaaaaaaaaaaaaaaaagtggggggacctaataaaacagtcacacagttttatagaccagaaaaactaagaaatatataaataccacaatgaaaaggcactttggcttgaaaaacacctgaggtttgcttgtgggaagtaagtgtcattaggttacagcttgggagttatcaggaagtggtggaaggagggctgtctgaagtccaatggaaagttctgacatcaatgtgatgaatgtgattcataacacatgcagtgacctgatgaagctggtagatgtttaaggtgcctgtgtatgtgtgtgcacattttgtgcattcctgcatggctcatttcagccgaatatggttttctgcacttcctagtgtttttctcatgcataagcaaatgcaaaatttatattatgctcagattgtttctggatgtatctgatgcatttgaacaaattcacattttcaaagtaagagttaaagcaaaagtgtcaaaaaaaaaaaacccactatgaataatgtgtactagctaatactaagtgccaggcatggtgccatagattccacatgagttatctcatcaatccgtgagttagctgtaattgttagccacaatgtacagttgagaaaaactgcagctgaaagaggtaaaacttgccccaggttccaaggctaggatatggtgattctttttttttttttttttttttttttttttgagacggagtctcgctctgtcacccaggctggagtgcagtggcgcaatctcggtgcaagctccgcctcccaggttctcgccattctcctgcctcaaccgcccaagtagctgggactacaggcgcccgccaccacgcccagctaattttttatatttttagtagagacggggtttcaccgtgttagccaggatggtctcgatctcctgacctcatgatccgcccgcctcggcctcccaaagtgctgggattacaggtgtgagccaccgcgccaggccgacatggtgattcttaattgctatgtcattctttttttctgaacatattaaaagagaaataacaaagtgggggaagtacttgcagacatttaagaagaataagtatctataatatctggaagttttttaaatcagtgaaaaaaaaaaaaagacaaaatagcctgatagcaaaaatggacgaaggtcaagagcaggcggtttacaaaggaagaaatgcaaatgctcaataaaattgggactttagaaaaaaaaaagactttcagcctcagttagtactcagtcatgcaagacaaaacaattccatgttggttttttccactatcagattgacagaaatggctgtgaggaaacactagcaggagcatagatttttgaaacctttccaaagcatgtatagtggtcctttgacccagccatctaacttctaggaatttatcctaagaaaatagagaagtgggggaacaaaagagttgttaataatgccgaataacttgctgggtgtggtggcacacgcctgtaatcccagcactttgggaggccaagtcaagaggatcgcttgagcccaggagtttgagaccagcttagacaacatagggagactctgtctccacaaaaaaaagatttctttaaagttagccaggtttggtgatgcatgcttgtagtcccagctactcaggagtctgaggtgggaggattgcttaagcacaggaggtagaggctgcattgagccccaccactgccttccagcctgggcaagagagcaagaccctgtctcaaaaaaataaaaaaaaaagataaggctgaaaaatttaaagcaatttttcatcattaagttaaacaaattttaatacactggtacagtacaatggcacacagaatgataccgtgggactctgaaaaggatgatgttacgtctgtaatggttgacactgaatgttcttcatatttattaaccaaagggaacagggtgcaaagtagcatgttcagtgtgatctcatttttgtaaaacaatttgcatgcatgtgcatgcttaagtgtgcaagcaagccttgtagaggaagaaatctggaagggcacacattaaaacattgacaatgggccgggcgctgtggctcacgcctgtaatcccagcactttgggaggccgaggcaggtggatcacaaggtcagcagttcgagacgagcctgtccattgtggtgaaaccccctctctactaaaaatacaaaaattagctgggcatggtggcacgcacctgtaatcccacctactcagtgggattacaccgggaggctgaggcaggagaattgcttgaacctgggatgtggaggttgtggtgagccaagatcatgccactgcactctagcctgggcaactgagtaagactccatttaaaaaaaaaaaaattgacaatggatgactcaagaatagtggaactgctggatgatttttatttttgttcttttcatttatatgctttctaaatttttctttagtgaatatattacttttatgattttaacaaattattaaaaacagggccaggcgcagtggctcacacctgtaatcctagcactttgagaggccgaggtaggcggatcatctgaggtcaggagttcgagaccagcctggccaacatggtgaaaccctgtctctactaaaaatacaaaaattagcagggcgtggtggtgtgtgcctgtagccccagctacttgggaggctgaggcagaagaatcacttgaacccaggaggtggaggttgcagtgagccgagattgcaccactgcacgcctgggcaacagagcgagactttgtctcaaaaaaaaaaaaaattattaaaaacattgtctaacacaaggtgcataataaatacaaaatataagaataaatgacctttgtaaactaggtttcccagcccctaatagggctgggtaacaaatacctgttaaaggattattgactgaatctgtaatttggagaaactgtaaccctatttggaggcttcacattctttattcttgaccagaattaatttaaccagatttcaggttacctcattctcaggtagatgctgaaggctgagctgagcaaagtgatatttatgttacctccaagccacaagctccataaagttcatgtgaactcagggtctctttgtgagtcatggggctgcttgcaatgcacggatgataacaggaacctctaattttggttatttgcttttagagaccagaacccagatacagtttcctggggcctcacctactttgttaagcaacttagctataagtttacaaagcagctaaaaacaggagcaggggagtgagatgagcttgagcgtgccagcctagctcgtgggaggcctgtctctggccctgagctttgtggcctgccgtaggaactggagcttcattttcaaagctccataaaactcgccttctcccgggcctcccttttctgagtttcatggctctctgtggaaatgacagcctgtgtaatcacagaatgtgaatgatcagagcagggaacagtgaggagccattaggacattcccatgggtgtagctcacagttacaaagcacaactacaccctggttctccaggcctcctctttcctggcaccgcagaccagatggggtcctggagaggctctgcgtgcccttctggagcttcccatcactcctttctgcagatgttcatcttaacagcccctctgtgccactcagcccagtacccggctgcccggctgactggagatggctccactggagctttttgtgtgtgggttgaaagggacttttttattttaatttaagtagtctcattccatctgcctacacactcttacgcttcgtgaactaagctttctgacctgtgtaggttacttcaccacaccagcccatatctttcccacaaaagggtttcaagagtacttgacaaaatgagatcagtgcacccacatgcctgtgtagtgggtgctctggaagtaccgccaacattgacctgcataagggtctacccttcaccaagcacttcggataaattatcttattaatcctcagggcaaagaggccaagtgtgtattttcaaagcagccttttgtagtgaggaaaccaaggcttaaagagaagtatcttgcccacgctcacaccactgattaggtgggcctccagagactcacacctaggcctgactaccaccaaagcctgtgcgcatctatgaggccaccctggccttctgccctccttagctttccatggatggaaactgtcggccagtgtgtgatattcttctggctctgtgttacagccctctgtattgatttcttacagagttgggattttgggggaattctaaaaggttcaacaaattcttagatttctcttagtcattttcttaaagcattttataatcttgtacttggagtgtgtcagcactaaattatgttttgtttaaatgtactgaatttgaggacatttctcagtttaatcatgtcacggaattggaattggttagtacaagctgcaatatctgtagcaatctgcccatttctccctcgcacaaggctgagtgaggacagagcttagtgtcaagatgttggtaaataataccactatgtaggaatgtagtctggtgagatgctgtttttcccagcaggtttaactgactgaatacttaaggtgcccagattgaaatgcaaagctccagttatcccatatggagactacactagaaagccccagcagctttatttatttacatttatttatttatctatctatttatttatttattttttgggacggagtcttgctctgttccctaggctggagtacagtgacgcagtcatctcggcttactgcaacctctgcctcctgggttcaagcgattctcctgcctcagcctcccgagtagctgggattacaggcacccaccaccatgcctggctaatttttgtagtagacaggggttttcaccatgtttgtcaggctggtctcgaactcctgacttcaggtgatccacctgccttggcctcccaaagtgctgggattacaagcataagccaccacccctggcctatttacatttaattatgatttatttttcctatccttctgcaagcatatatatatatatatatatatatatatatatatatatacacacacacacacacacacacaaaatatcaaaatatatatatatatgtatatatatatatatttttttttttttttgagactgagtctcgctctgttgcccaggctggagtgcagtggcacgatctctgctcactgcaagctctgcctcccgggttcactccattctcctgactcagcctcccgagtagcttggactacaggcgcccaccaccacgcccagctaattttttgtatttttagtagagacggggtttcaccgtgttagccaggatggtctcgatctcctgaccttgtgatccgcacgccttggcctcccaaagtgctgggattataggcgtgagtcaccgcgcccggcccaaaaaatctttgtgtttttttgtttgtttgttttgtgttcagagaagggatctggctaggtgccctggctcatgcctgtagtcccagcactttgggaggccaaaccgagaggttgcttttcaggagtttgagaccagcctgggcaacatggtgaaatctcgtctctacagaaaatacaaaaattagccgggcatggttggcgcacacctgtggtcccagctactcaggaggctgatgtggaaggatcgcttgagcctgggaggtggaggctgcagtgagctgaaattgcaacactgcactccaacctgggtgacagagcaataccctatctcaaaaaaaagagagacagagtctcgctgtgttgcccaggctgttctcaaactcctgacctcaagtgaccctcccaccttggcctcacaatgcactgggattacaggcatgagccaccacaaccggtctcagcagctttctgtttgtcagatatacaaatataccccaggctccaggcccccacatcccccaaaaaacacacacacacacacacacacagcatcagagacctgagaaggacatcttggtggaggtttgggggaatggagatggttccttttatttttttatagtggtggtgtggtggtttttgttgttttggtgtctaaatcagagcatcacatggccttgaaggtttggaaaggaggggccatagttcaagaacaagcagtagcttcttgggaacgtattggagagagaaaagagaaaagaatatggacaatgtagagaattgtaggtctgaaactatctgggacaaagctgaggctcctgacttctatagggaccagtcatatgaaaaagaagggagtcgtgagagatgatggggtagttgtgggttaagttgggttttggaaagcctttgggaagattgaccagggaagaggccctggaagtaggcttgagaccctttgggctgggaatttaagggtcccagctacttggaacatgatctagaaagggaagcgaggtctccaggtggacaaatccctttggacccaagactccttgcccagagaaaaggggcacaaccagacaagggctagcatgggccctgggaagcacggagttcagggtggggcaggcttgctgtgtcctggcctggcaacatacctgcactgtgttgtggtagaagaacacaaagctgggaggcagagaactggttctaatcctagctgtaccctgacaagctgtgtgaccttggccaagttactttcctctcctggacttcatatatggtttttccattctttgcatccctgaagctccatgacttaggggccatcaacttggttgtccctgagtgtttccaagaataccaacagtgcccagggttttactcagcttggagaggaggcctagagcctccctgtggtgaggaggaaagaggttagagcaagtttgggtctgcagtgctaggattagaggtggcctcacaagccaaaaccgctatactcacagccttaggacagtgactccctactcgctgcctcagtgtttccagctgtaaaaaaggacccttggtaccttcgacagaacagcacccatctagtacaaaggtagttccttttatgatcaaaacaatcaggaaaaagagagaggctgggtgcggtggctcacacctgtaatcccagcactttgggaggctgaggtgggtggatcacctaaggtcaggagttcgagacccacctatcaatatggtgaaaccctgtctctactaaaattacaaaaattagccgggcatggtgccgtgcacctatagtcccagctactcaggaggctgaggcgggagaatcgcttgaacccaggaggcagaggttgaagtaagacaagttcgcgccactgcactccatccagcgtgggcgatagaggaagactccgtctcaaaaagaaaaaagaaagaaaatgagagaaagggcctggaggtgagtgtgaggagggaaaagaacatcaaacagataaagtcctgtcctgttgtcctgggaccttgggcagccatcttggcccagatgatccccacaagaaagaggtaagggtttcctgacccatttctgccatggtcttaggaaagtcattgagttttcatgccttagtttcttaagcaagtttgaaagttcactttttggatagcaataaaattactccttttcttttgttcacagagatgctgcaatttgtcagtaatcaagtgggagagttccctgacttgttttcagaacagctgtgtagctcctttcctggcagtggtggtagtggtagcagcagcggcagcagtggcagcagcagcagcagcagcaatggcaggggcagcagcagcggagctgtggacccttcagtgcaacggtcattcacccaggtcacattaccttccttctctccctcggcggcctccccacaggctccaactctgcaagtcaaggtttctcccacctcagttcccaccacacccagggcaactcctattcttcagccccgcccccagccccagcctcaacctcaaactcagctgcaacaacagacggtaatgatcacgccaacattcagcaccactccgcagacgaggatcatccagcagcctttgatataccagaatgcagctactagctttcaaggtgattcagaagttagaatggtagtggttggttggttccaatgtttatgtgccagtttgcagacactgtaaatatttctgtcgtcttcaggaatggcaggtatatcaatatggtcctgtctgaatgaggttctggtaactggcaataagaactggtacaggagcatgtcacattctgcagcttcaaataccttaatatctattgcgcctaattcaaaaatacttggttaaaaaatccagcaagcggccgggcgcggtggctcacgcctgtaatcccagcactttgggaggccaaggcgggcggatcacgaggtcaggagattgagaccatcctggctaactcagtgaaaccccatctctactaaaaaatagaaaaaattagccgggcatggtggcgggcgcctgtagtcccagctactcgggaggctgaggcaggagaatggcgtgaacccgggaggcagagcttgcagtgagcagagatcgtgccactgcactccagcctaggcaacagagcgagactcccatcttaaaaagaaaaaaaaaaatccagcaagcatagtagacacagggccattctgataactagtggtggagacttgaataaggcttgaaattggctaggcggcagccagatctcagctgccacagttgagaactattcattcagcaaacatctgagcatccactatggtgatgaatatgacttttaatataggtgcagcagcttcaagtagcaagcctcatgctgggcccttagtatgtgttgagggaatggatgactgaaaggggcctgttctttctgtgatgtgctgcatcccagtgccttttcatcatatttccctctgactctgtggggagcccagggtaagattagtattgctttgaatttcaaagaatcttatagttcttcaatggagttcaagaattgggacaggtgggggaatgtaaaggcaaaaagctgagacagtcctcccaaagtgcacttgccgtccagaaaggatggaagaaaatgaagccccagggagttgttgattctcaacatctgttaactcccttgctgggtgcagtcatttgctgattagcttccctttcccccaccctggcacccagagtaataaaacaatttgtactcgttccctcagaaattgatgcagcccttatgggatgttcttgttgtctaagccaccttgtaaatggctgtgcacatcatcttcagcagtaggtggggagttggaatcattatgagatactccatcctcaggtttctgctgcagctgcagtgacagaatgcattcctcatctctgtgccttctttctcctcttctcccaagtccttcagcctcaagtccaaagcctggtgacatcctcccaggtacagccggtcaccattcagcagcaggtgcagacagtacaggcccagcgggtgctgacacaaacggccaatggcacgctgcagacccttgccccggctacggtgcagacagttgctgcgccacaggtgcagcaggtcccggtaagtggctggaaaggattcagggaggcactggttggggctgttaactggtccttggttgaagatgtggtctacatactaagaaggaccaaccagagtgtacacaaagcagcttgtagggcgccaggatgcacctgtgagcagcgtatagtgacctggctgagtccatatctgtagatagacactggcactcaggaaaggctggtgcagtcacttacgtacacatgtaatgggcataaaactggaaagaaatgtgctaaattggtatttcccagataattttctttttcatagttttgtgttgtgtttttttgttgttgttgttgttttgagacggagtctcattctgttgcccaagctggagtggagtggtgtggtctcagctcactataacctccgcctcccgggttcaagcagttctgctgcttcagcctcccgagtagctgggactacaggcatgtgccaccacacccggctaatttttatatttttagtagagacgggatgttggccaggctggcttgaacttctgaccttgtgatccacccgcctcggcctcccaaagtgctgggattacagacgtgagccactgcccttggctttcatagttttctgttctccatattttctgctgtggatcctgaacatatattgggttggggggagggggggcatgtattattaatcttttttttaattttttttttttggagacagttttgctcttgttgcccaggttggagtgcagtggcgtgatcttggctccctgcaacccccgcctaccaggttcaagcgattctcctgcctcagcctcccaagtagctgggattacaagcacctgccactgcacctggctagttttttgtatttttagtagagatggggtttctccaggttggccaggctggttttgaactcctggcctcaaacagtgcatcgatctcggcctcccaaagtgctgagactacaggtgggagccactgtgcccagctgggggacgtgtattatttttataatcacaaaaaacgtctttatgttatatatcatcgtggactatatcctcttttttctttttttttttttgagagtcttgctctgtcgcccaggctggagtgcagtggcacgatctcggctcactgtgcaacctcagcctcctgggttcaagcaattctcctgcctcggcctcccgagtagctgggattccaggcacgcgccatcacgcccagctaatttttgtatttttagtagagacagggtttcaccatgttggttaggctggtctcaaactcctgacctcatgatccacctgccttggtctcccaaagtgctgggattacaagcatgagccaccacatctggcctatattttcttactaacaatttatcttaaaaaaatcaggtttattatttttgcttctcagccatgtgtctggctttcctgagtcttttctctcctctctgccatccaccctacccatctctgctctgctcctgctgggccactggcaccaccctcttgaaagtctttcaacctaaaaacccatgacctggctgagcaccatggctcacgcctgtaatctcagcactttgggaggctgaggcaggtggatttcttgaacccaaaagttcaggaccagcctgggcaacatggtgaaaccctgtctctacaaaaaaatacaaacaattagccaggcatggtggcacacacctgtagtcccagctactcaggaggctgaggcagcaggatcacttgagcccgggaggtcaaggctgcagtgagctgagattgcaccactgcactccagcctgggcaacagagagcaaccctgtctcagcaaaaaaaaaaaaaaaaaaaaaaagccaggaccctcattagctagcccctctttctccacctgaacccggtattcaggctgtacaaaatagccggcttttgaaatggcctctatgaaatttcctgttcatttttttattctcaatttcataaaaattatatcatttctcattctttcttggaaggtctatgcagtaagaaaggaatgcataacagaaggataatgctatcatccttttacttttcttccttcttcatccaggtcctggtccagcctcagatcatcaagacagattcccttgttttgaccacactgaagacagatggcagccctgttatggctgcggtccagaacccggccctcaccgccctcaccacccctatccagacggctgcccttcaagtaccagtaagagctgccttctcccccaccctcctccctccccctttattcctggaggtgttagtcttcagagatgttaaatctctatatgctgagtaggtatgggagggtctatagcacaaatcagtcaaattgtaaatgtcacccctcttagttgtttttcgctcgaaaaagtattagcaatgtgtgttcgatgtgggagtactggagtctacaaggaggtagaaaagaatagcagaaggaccctctattcttggctaatagctccacacaagaccattcacctcttagatcctgctgatgacttctgaaggaccctagggccaccaggcagggaagggctccaaggtgaagaacatggaaggtaccccatccttcagttgtaggttcttagccactttcagcatcctatagcatgagaatctgatagagtaaatggtgattaaaatttagaagcactagctttattcataaaatccaagaactggaagcaactcaaatgtccatccacaggaaaataagcacattgtgatatattcatacaatgaaattatgcctagcaattaaaaaacagaactgctgacaggcacggtggctcacgcctgtaatctcagcactttgggaggccaagaggggtggatcacctgaggtcaggagtttgagaccagcctggccaacacggtgaaaccccatttctactaaaaatacaaaaattagctgggtatggtggtgcatggtgcatgcctgtaatcccagctactcaggaggctgaggcaggagaattgcttgaacctgagaggtggaagctgcagtgagccgagatcgcaccactgcactccagcctggatgacagaacgagactgactctcaaaaaaaaaaaaaaaagctactgatgcatgaaacaacatggggctgtccctcagaaatagtgtgtcaagccaccgggcgcagtggctcacacctgtaatcccagcactttgggaggccgaggtgggtagatcatgaggtcaggagatcgagaccatcctggctaccatggtgaaaccccgtctctgctaaaaatacaaaaaattagccgggcatggtggcgggcacctgtagtcctagctactcgggaggccgaggtaggagaatgtcgtgaacctgggaggtggagcttgcagtgagccaagattgcgccactgcactccagcccgggcgacagagcaaatctccgtctcaaaaaaaaaaaaaaagaaatagtgtgtcaagccaaaggagttcatgctaatgagtccatttatatgaagtttaaaaagaggcaaaatgaagctatggtgctggaattcagagcggtggtgacaaggaggggaggggcatgcggggactttctgagctggtagaaatgggctatatcttggtctgggtggttatatacattgtgtacatatgtaaaattcatcaagctataaacttaagatttgtggtttttattgtgcatgacgtacttattggcaactaatgaaattgggcacctttttatttatttattggctgattagatattgaggccattatttaagaaattaaactaaaattggtccaggcccagtggctcacgcctgtattcccagcattttgggaggctgaggtgggcagatcacctgaggtcagtagtttgagatcagcctggccaacatgatgaaatcccatctctactaaaaatacaaaaatgagccaggtgtggtggtgggtgcctgtattcccagctactcaggaggctgaggcaggagaatcacttgaaccaggggggtgcaggttgtagtaagctgtgatcacgccactgcactccagcttttgggcaacagagtgagactttgtctcaaaaaaaaaaacaaaaacaaaaaaacaggacgtggtggctcacgcctgtaatcccagcactttgggaggccaaggcgggtggatcacctgaggtcagcagtttgagaccagcctgaccaacatggagaaaccccgtctctactaaaaatacaaaattagccaggcatggtggcgcatgcctgtaatccaagctactcgggaggctgaggcagcagaatcacttgaagctgggaggcagagtttgtggtgagccgagatcacaccattgcattccagcctgggcaacaagagcgaaactccgtctcaaaaaaaataaaataaaataaaataaagttagaaaaaataagaggagaaaacagagatgaagaataaaaaggggagacctccatggttggcctatttacttaatcaaatggctcttattgagagtgtcacttctgcccttgagctttttgatggcaaaattgtataaagaaatgcagtaatttgcttaattgtcatttgagaggaaaaaatgtgtcatacactaggagaaagttttctctggtgccaactcgtggttcaccgtgtacaactttagaagtggttaacagtttgacagcaaagcagaaatcatatgacttgtttctggcatacgtagatcaaaacttaaaacatatttagccatgttaatcctcttgtggtgtagtttatcagcagtgattcttgaagggaggtagtaaccaaggttccgtggctcctgagacttcttggggcctgatttgattaacccaggaagagtctcagacctcatgaagtactgccaggtctggcagcacttggccaaagcgggcaggtctgtgttgaggttgctttatgcagactaacaaagggatcattctgctgtgtacctgtccctattctagaccctggtgggcagcagtgggaccattctgaccacaatgcctgtaatgatggggcaagagaaagtgcccattaagcaggtacctgggggagtcaagcagcttgagccccccaaagaaggagaaaggcggacaacccataatatcattgagaaacgatatcgctcctccatcaatgacaaaatcatcgaattgaaagacctggtcatggggacagacgccaaggtgggtgccaagcaaaattgtgttttatgttccaccatctcccctctacctgtttttgcctcaggagcctagagaagtcccaggctcaaggtaagtgaatacaagaccgagttagaggtgcttttttattaaagcatcttggtgtcatgtcaagattataaaatattaaaaaacataagggactggtgagggttgataaggcagtgacccgctgagacctttgactcctttggctatgctctgcagtgatggggactccactgtcagaggcagagaaagatgcctgccactcagtagttccagatacaggactgtgtgtaccttggagtcagctgatggcatagttttagctgtgtttaggggttaccttttaaggaaaagaaagaaaaaagaggttgagtctttgaccagcaacacatagaggaaactgatgttccaaatgtttctggtgtttcagtgtatgtgtcttctagaaagtaggagattttatttttaaaacctatctatgtttaaaccctattttgaaagaaaatttcattttccttgcctacaaatctgaaagctgtacatcctaagtaaaaatctatgccttaagataactgtccaggctaggcactgtggcttacgcctgtaatcccagcactttgggaggctgaggcgggtggatcacgaggccaggagttcaagaccagcctggccaacatggtgaaaccccgtctctactaaaaatacaaaaaattagccgggcgtgctggcaggtgcctgtaatcccagctacttggaaggctgaggcaggagaattgtttgaacctgggaggcagaggttgcagtgatctgagatcgcgccattgcactccatcctgggcaacaagagtgaaactctgtcttggaaaaaagaaaaaaaaaaagataactgtccaacaatgctgtggttgtttttttcatttgttttcgttaaagtttgttatggtgctaggattattataagaagtgggaacaatagctaatatttattgagtgtcaactatttgccaggctcagggctaagccctttacactcattatctcatttagccctgctgcaagcctgtgattcacgcgctttcattatctctgtgctaatgaggaggaaagtgaggttctgaggtatggaataacttctcccgagtggcacagctaatcattgggaggaccagcatctgaacttggtttctcctctcacagagccatgctgtcatcccaagtgctagggctctgctcttttcacactgtagcctgcactggtctcactgtgttttcactcatcttcctacccagatgcacaagtctggcgttctgaggaaggccattgattacatcaaatacttgcagcaggtcaatcataaactgcgccaggagaacatggtgctgaagctggcaaatcaaaagaacagtaagtgtgctgagaaaaggcttgtcagccctggcccaggtggggctttgtaaaagcagatcattttcaccaggtggggttttctttgcagagcttctaaagggcatcgacctaggcagtctggtggacaatgaggtggacctgaagatcgaggactttaatcagaatgtccttctgatgtcccccccagcctctgactcagggtcccaggctggcttctctccctactccattgactctgagccaggaagccctctattggatgatgcaaaggtacagacttttgaaatctcctgatccctggaatctttcccatttcccctaagaagatagctgggaggtcacagttatgaggccaggccgcatgttaagagggcctagcctggagaaaaacaggaattctgtgaaattagccaggtcctggagaataaagaaagaaaaaactgactccggggggaaacagtccctcaggtttaactggtccttgccgataggccccgtcagagaggaatgagtgccagatccagaacgagaatgcagagtagctgttgtgggggcgttgggagctgctggaggcacctcattgcttcactctgcctttaatgggcctggcaagaccactttgggaggctgatcagttggtttaggatgaggctgcctctgggtcctcttttcagaaatgattacaatttgcagtctaacagataacattttacctatgggcctttaatcgtcaaagcccctggcaatggtagtttaatggaattacttaagagacgctctgagcctaatgatcttcctgggaacctgtagagaccactgggttttgtactgtattttgacttcggcagtttctgactctgaaagcacaaagttccctcctagtgtttgtttttgactaagctgtttattgtatcatatacttaattttactaaggaagctccatttttgaaatattcttataaatgtggttctgtttggcaacaacaggctgtttgacatataaattgaattagctgggcttctgagtcatcagaagaaaatcttaaatggttttaaaatattgaaaagaaatgacatgctatatacacattggggcgcaggggagatctggcttcagccctcctgctgtaaaatggagagtggggtgggtgtagacaatgatacagttttagaacaggtaaaatcctttagatagattcacactaaatacggtctttgatcaacttcattgaggtgtaatttaaatgcaataaaatatacctactttaaaagtacagtaccaagagttttaacataatgtacagtgctatgtaactgtcactgtaatcaagatatagaacatttccatcaccccaaaaagctcttttgtacacctttgcaggtagtttcccacacccctctccagcctcagacaatgactgattcattggtttcctgttactttagattcattttgcctgttctggaattatacagaaacagaatcatacagtgtgttctcttttgtggtagatttctattttaaaagaaaatctcttctacctttgttctttggaacatgtacttttctcagttagcaagcaggtgaatgtgccaatgtttgagcagcagttagtgaattataggcttctcagttcccatctggccttagtcctgagttaatcgacttgaatttaaacctcataaccatttctcaatatatatatatgtatttataaagtgctgtaaaaacctatgcagtatttattccaacctcgaggccttgttttgaaggtcaaagatgagccagactctcctcctgtggcgctgggcatggtagaccgctcacggattcttctgtgtgtcctcaccttcctgtgcctctcctttaaccccctgacttccctgctgcagtggggaggggcccacgactctgaccagcacccacactcaggctctggccgcagtgtcctgtcattcgagtcaggtaggtggaggccccttgccccacctgggcatggctggaccactatggcaggagaaggaccctgtgtacaaacttcttggcttggctaccaggtcccaaagggcttttatagtgggcccccacctgcttgcttctgatagggactggcataagttccattttagaagtaacaaggcaagcccaagttcagtcagaatgagcaaaacaaatcagggacccacactactctaaataccctggggtggaggggtggtacctatttgaaggaggatatcgtgttttttatctgaggttgcaaaaccaatgcctcaaccctttcaaaacaaagatttttatggcactcagctccataatgagaagggctacagtcattagccctgtttagattatagaattatttgccctttcttctgaaaatgaggtagaagactctttcctgtgatagtgctggggtctgtcaggtgcctggctgctccgcaaggcctttcctagcagactctgctgagacgctccttcttaggttctgggggctggtttgactggatgatgcctactcttctcttatggctggtaaatggtgtgattgtcctgagcgtctttgtgaagctgctggttcatggggagccagtgatccggccacactcgcgctcctcggtcaccttctggaggcaccggaaacaggcagatctggatctcgccagagtgagttctgtgtccgcccttccccatcctcccccagacttgacaaataattcagcaactcgtgtcaaagaaagtcctatgatagatgcttgtggtgagaggaaaaagggaccctgctgctgaatagtcacagggcagtggagtgggcgcctctgcatagataattaattccagggacatgagatgatctatgtctccggtatgacaggaataatgaagttgagttctgagggaggggttctagggcttgagcggggctgccaagagtaggaaggaagggcagaggtggcagaaggaccttccaacccgaacacatgaatggacaggctgtttggagactggcaggttccagggtgtgttgagtgtaggttatgtcagagagagttgaaggcaaaggctggtagtgtgtctaggcccaaattggagagggctttcactaggaactgatttggggctttattcccaattctctatagaaccaggaaaggtttttgagcaggaaaactagctgaaagttttcatttgaaatcaacagggagtttacggaaaaaaatctggggcaactcacagcattgaggaagagttaaacatccacatttcaagaggaacaagaaccagaacactcctcagcagcagtgagccatgggcctgccctccccacctctgcaagctgcagggccattagtgagaatctgattggccatcctggatctgtcagccttgctggggctatgggtctcagaatatagatgtgattttgagaggcctgttccttgagtataacatcccaagatgtatatcctagaggcaggttcaggtgtgtgttttacaagcatcattatggtggctgtgaaggataggtaggagggagatgtgaaatgcatggaacatggcaacaagttagggtgctcttttttaagtaaagacaaggtctcactgtgttgcctggctggtcctgaactcctaggctcaagtgatcctctcaccttgacgtcccaaagtgttaggattacaggcatgagccaccacgcctggctgagtcagggggctctatgaaatagactgagtaagagatgatggcaaggacctggaattaaaaggaaaggtttgaactgaataagtatttgaaatgtaatatttggaagggaagtgattagtgacgttgactcaaggataagagaggctccaagatggagtggactccatctaggccatgttgcctggaaaagctggaagaggcccctgtagagtgagcagtgattgagaggcaggccatggggactgagcaggggcggggccagagtgtttgggaagcatgtctgtcagcagagggttcttagggagaattggactggggagtcaggaggggtaagagccaaagactgggacttgggaatagcccatctttgagggaaaggcaggggaggagccagggaacacctgcctcctttggaatctgcaaatgcaggtccttctggctggaaagatagaggcaccttagagactgttgctgtgaggacatcttttcttttcccttgtccagtcctgtaatgatgtgggaaacaaagcacagatagtgtaccagctgcccaatagaggaaaataggagaatttactttcatttcccaagactatatagcctgtcctctagtttccagcagtgagagagagaaagcgagcggtctccagtacagtgccgtagactctccattagaccctctcaggttgacaaagattagttcatctgaatcctagagtagggtagtttagctgtgagtttgcctaaaaccatggttctcaaacttcagcaggcatgaagccgggtgctgtggctcacactgaggtggggggattgcttgagcccaggagttcaagaccagcctgggcaacatagcaaaacccccatctctaaaaatgaaaagaaacgctttagcagacatggcatgagaatcacctagagggctgcaataccagagattctgattcagtagccctggggtaaggtccaagtgcttgcatttctaacaagctcctaagagctgatgctactggcctctgggggccacactttgagaccctgaaagcctaaaggatcatgcagttcatctaaatctgtgtcaccaccttatgtctaaaagctactgctggccgggcatggtggctcacgcctgtaatcccaacactttggaaggccgaggcaggtagatcacttgaggtcaggagttcgagaccagcctgaccaacatggtgaaaccctgtctctactaaaaatacaaaaaaaaaaaaaaaaaaagtgctactctgagggaactctgaccagcatttgctcatagaacaaacgcacgcagtacaatctcaatcgagtaaaaagtctgtaaggaaatacctcagaatgtcagcagggattcttcctgggggatgagattataggtggttttgttttactttcttgtagctttctgaagtttccctcgtttttatgagtgtgcactaattcctctgataattgggggcagggggagtagaagtctatatcaaaacaaaaagccggagcaaggccagtgaccattaacaccttttgatactttgtagggagattttgcagctgctgccggcaacctacaaacctgcctggcagttttgggccgggcactgcccacctcccgcctggacctggcctgcagcctctcctggaacgtgatccgctacagcctgcagaagctacgcctggtgcgctggctgctcaagaaagtcttccagtgccggcgggccacgccagccactgaggcaggctttgaagacgaagctaagaccagcgcccgggatgcggctctggcctatcaccggctgcaccagctgcacatcacaggtgagggggcagctgctgctgcctggcttgctgcaaggcatctcatgctacctctcctccttagcttgatttgccagttctgcaccctagctgaagtccctttaacgctactcttttagagtggctagaccaagcttctacctgttttcacagctgtaaggttggctctttgctttagctcatcagttctcagatgcacatgttttcacaataacatcactatactcaggatgtgtcctataaacagtggcacattgtagataagttggcagtgtttttctttagtgatacttaaattaatggtgagacttaaaattgctgacatcttagagtcaatgaaatatgatcatctgtttcattcagtaagctcctgctataataggcagagaggtcaacaaatgaatgacagttcagcgtgagtatgttagacttagcagaaggaacatgttttcgttgggagggagtgggtacccgtttggagggtttcaagaaaggttttctggggaagtagagtcttggctttgcatggaaggatgcatagaggtcaccagctctgcaggagatgagcctctgggcagagggatgttcccaaggaggagccccacctggggtggctcttgagaataagccttcagtggtcctagagggagccagggcacaaaggcagtactcagaccatgaaggatttggatgccaggctgaggatcttgtagtgtatcagtaggattcagtgaagagcattaggaaaatagtgatatgatcaggtttgtgcttctcaagtttagaagagtcaggctgggcatggtagctggctcacacctgtagtcccagcactttgggagactgaggcaggaggatcacttgcactcaggagttcgagaccagcctggacaacgtggcaaaaccccatttctacaaaaaatacaaaaattagccaggcttggtgatgcacacctgtaatcccagctacccaggaggctgatgtgggagaatcactggagcctgggagatcaaggctccagtgagccaagattgcaccatagcactccaaaaaaaaaagtttagaagattcactctgatggcagataaggagtggatcccagaggatcaaggctagagctagagaggccaaatagaagctgatgcagattaaagatgagagttgctgaaaggacagatgagaggaaattagaaggtggaattgactggactggggactcattggactgatggatggggacagtagtcagctaagacggttccctggttcttccttgggagtttgggtgagcgatggtgccaccaacaaaggtaaagaaaatagaaggaagagcaactttccaggaaaagggtggtgagttcccttttggacacttgcctgtgagatgtggaggtgagctggacatgcaggatctacagcccaaagaagactacaggtgagagtgaaaagcaagggagcctatgagagtggataggtgaaaaggagaccctcagggccattcagaagaacaccctcatctaaagaacagataggccatcgcggtggctcacacctgtaatcccagcactttgggaggccaaggcaggtggatcacctgaggtcaggagttcgagacctgcctggccaacatggcaaaaccctgtctctactaaaaatacaaaaattagccgggtgtggtggcacgtgcctataatcccagttactcgagaggctaaggcaggagaatcacttgaacccaggaggtggaggttgcagtgagccaagatggcaccactgcattccagcctgggcaacaagagcaaaactccatctcaaaaagaaaggataaaggctggcacagcagttcacatctgtaatctcagaactttgggaggtcaaggaaggaaggtcgcttgagcccaggagtttcccatcagcctgggaaacacggggagactccatctctccaaaaaaaattcaaaaaattagctggtttttgtggtgtgtgtctgtggttccagctacttgagaggccaaggtgggaggatcacttgagcctgggaggtagatcgaggctgcagcgagctgtgattgtgccactgcacatgcatgcagagatgaacagatagaggatggggagtcaggggcagaggctgcctgagaggagcagttggagaggtctgaggagacactgagatgctaagtgttggaggagcaaggtcagagagttgaggaggggagattgttgctgggacacccagtaagatgagggccaggaataacagtaggatgtggtaactggaaggtgttagataccttgatggcagtaaggagcttcagccaaaagtggaacagagccaggcaagtgatgtaggagtgaccaggagatgagacagtggggccattgtgcagctttaatatgtgggctcatggtagaattttagcagaaggtccctatctgcaaatttgccccgctgttatcttgtctgttcctcagtgtgcccttgggacagaataagcccatactcaggtctctgatcaggctgtgtcctccttgctgccaaattctggagaattccagctgagaagctttacgtcactcattccttccatactcactggcattccctgtgtgaggcactgaggggacagaggtaactacagtatggttgccacactgccctctcacctcccttcctgtgtctcctgcaggaggaacacctgaggccagtacagaatggagtgtggaggctgagatctccctaggctgataaaaagacagggaggcaaggcagcccaggagggggaacacagggctggatgagcacgggaagcctggctttgccactgtctgcaccttgacatgggcacttcctcccctgaggcaaggagactgcttgcccttgtagtgaggaccaaagccagcaacagtatgaaagcctcacgagagctgtgatgggcccttgtgcctgtgcaaggatactttgttccctgattaggggatcagccccagatgggccactgtgcacctctcataggggagggtgtggtaagccttcctggcctcccacccactaacccaacatgtgttcagctgtccttgctcagtttacgtcacttccccctcaaacgggtatgtgtttgtgtattgtgaaggcgggtttttttttggcttttttgggggacagagtctcgctctgttgcccaggctggagtgcagtggtgcgatctcagctcactgcaacctccgcatcgcaggctcaagcaattcttctgcctcagccttccaagtagctgcaattacaggcgtgtgccaccacgtccagctaattttttctatttttagtagagatggggtttcactgtgtttgccaggctggtctcgaactcctgatcttaagtgatccgccggccttggcctcccaaagtgctgggattacaggtgtgagccactggcacccagccacattgtgaaggttttttaatgaaaataaattcaaatcagttcatctaaaaaaaatttcattacctctgttgaatgtttggaaacacacagtgtggctgtgctgctgacattgttatgttgcactgtgcgcctctgagtcctatacaacaacctgcaattgtgacagctctgggtgtgacagaaatgggtgccatgttcccagctaccctgtgaggtagacaggaacacacagccagtatatcacagagcctggcatcccatcctgtgatcaggcctgtctgatcacaaagttcacctcgcttctcccctggttcctctcttactttgatcgtgctggagagagcaggaaaaagtttggttttggggctccatcaacaatagtgtctgtttctgcccaccctagggaagcttcctgcaggatccgcctgttccgatgtacacatggcgttgtgtgccgtgaacctggctgaatgtgcagaggagaagatcccaccgagcacactggttgagatccatctgactgctgccatggggctcaagacccggtgtggaggcaagctgggcttcctggccgtgagtacccttcggttcccttctgtaaacctcccctgagcacttacctagccaggagttaagatgcagaagcagttatgaacccccttccccatcaggtgctgcccacctggaggggtaggcaggcattcattcagtcgctcatttcaccaggactcccagcaaccgataaaacagaccaaaattcctccccttgtggccttaataccataagccttgtaggcaggacattttggtcccctgaggtaatatgaggtaatatgaagattggttcagcaatagcagagctactgtacttgggggttaatatgcaacttttctgttcttcaagtggtcataaaaattcttagaatcccctggttatgtctcatggttctttcatttactcagaaggtatttattgggcatcttgtattgatcacagcactgtgaatccagaaataaaagccagtgcctttgccaagctacagagttaaagaaaagaaaaatgaaatgaataaaagtaaaagaaaacctgtgcctgtctacaaggagctcaggtcagacgagggcagggattgtggctatcaagcacctcccatatgcctagctaggagccaggcttgggaactctcaaatgggtaattcccggtccttgttatcagctagctcacaacatgctgacctcaggctttctcttactctagcagaaacaggtatgttttactttgtgtcccactatggatagactgctgaatacatcaggtatgttcaagcattaccacatctctatttgtttccgtatctcagtaacagcagagatgagctgagaatgaatcagaacgtgccctgtagtgacattgatatatttcctgaggtacatcacgatagtctaggggacaaagggcgcagggaagcccagtgtactctttatgtctacacttgatcttagccagaaggctgagaagtgatactttttatgtcttacctctgtttctggtgactacagataagagactcatcccttgattcactcattcagcaaatatgactgagcaccgtctctaagcaggacatttgccttgtcctcagggagcatagttggcaaggaatctagacagcagcccttcttgagcttgacattgatcttctcatgaggaggactgggctccaggtggggaaagaaccccatcctcacttgtgggctagacgacctgggagtccacagacactgaagacacatcattcttcctattcatttcaaccttccctcgacagatcttcctgggaccaggtcttcaggacagtgtgagctagggtgagctcctgagctggtcttgggggaagtcagggtgggctttctggggaaggtgaatctaggctgacagcaggaggcattgatgagatctctctccttttcagtttattgaagtgctctgggctgatgtcattacatttgtaacttccatgccccccaaaaatgttttgaagacattcattttatcaaaatacaacatacatgcagaaaaatgcccacattttaacttacggcttgaagtgaagttacccatgcaacacccacccacatcaagaagtagaacattcccagcacccccagaagccttcttgaggccctccctgctcttcctgccccaaccaaggtaaccactcttctgaattctgtcactggagtttaatctgtctattgttcatcatttcagtaaacttatcaaagtacatgcttagaagtctggctgggagggccgggcacggtggcttacccctgtaatcccggcactttgggaggccaaggcgagcagatcacctgaggtcaggagttcaagaccagcctgaccaatatgatgaaaccctgtctctactaaaaatacaaaaattagccaggcgtggtggcatgtgcctataatctcagctacttgggaggctgagacaggagaatcacttgaacccaggaggtggagggtgcattgagcggagatcacgccattgcactccagcctgggcaacagagcaagactccatctcaaaataaatacatacgtacatacaaacaaaaattagctggatgtggtggtgcacacctgtaatcccagctacttgggaggctgaggcaggagaatcgcctgaacctgggaagtggaggttgtaatgagccaagattgcaccactgcactccagcctgggtgacagagtgagtgagactccgtctcaagaaaaaaaaaaaagattacaatatgcatgtcaaaaagtatacaaatcataaatacacagttcagtgactccacagagtaaacacacccttatagccagcagacagatcaaagtacagaaccaagaccccagaaacttctcttgggccctttgcaatcactaacctgccccttcccccaagccttccagccttccaagggtaaccaccatcctagtcacctcagatgctttgcctctgtttaaactatattaatataaggagagtcttgcagtatacactgttttgtgtctgacttattttgctcaatatcatgtgtaagaatcattatgttgttatgtagaattatagattgttcgttctcatatttatagtgttccattgtatgactagattattgcagatgaactttttagttgttttctggctttggttattatgaagggtgctgctgtgaacctccttgtacacacatctttcaggaaacgtgactgcatttttaggaatggcatcgctgggtcagaggttgtgcgtatttccaaattgttggccattctccactccatcagcagtgaacaagacttctagttctacatccttaccgaacacatataatgtcaatttttttaagcccttctagtgtatctcattgtagttttcatttgtacttcccaggtgattaatgagattgagcacctcttcttacatttattggcaatttggatagtctgtttcgttacattcaattcaagtcttacctctttttcatttggactatctgtcgtctcattgattagaggaattctttattctggagattacccctttattggatatatgcttttcagataccttctcccactctggggcttgcctgttctgtcttaatggtgtctagtgagagcacaagctcttaatttcagtgaaatccagattattagtcttttcctttacagttagacattttaagtcctgttcaataaatctttgtcctacctcaaagtcatgaagatattctcctatgttgtctgctagacgctttattttttactctttacacatatgtacctaatccacctggaattaatttttataagagttggaggtaggagtgcaagatctgtttttctccataaggatatctacctgacgcagaacctgttattttaaaaactatccttcccctgctgcaccaagtggcacctttttttcataaatcaaggatccgtgtaccgtgggtctgcctccagatctagtctgttccactgcaccatcaccacccaaccctaacggctgagttttctcttacgtcttgatgtctggaagtgttggtcttccagatttagtgactaacgatgaatcttgggtgtttctttgtagcctcttcattctacagaggtacttgatgctgctgatggacatttgggttgtttccagtatttgccgttataaacagtgctttagggaacatttttgtccattgtcttcatgcacctccataagagtttcctcagaccaaatctgtagagatggtgatgctgtgtcaaaggatataaatatttgaaacttaatagtattaccaaatttgcatattcagtaagatggaaaaaggagaactgtcatctttaaagtaactgctcttctctgtttacttctcttgagagaggataaagagactcagacagtactttcttataaaggaagaagctttgaatttggtgagatatatttagctacaaatgagccagttgttgggggcaagtggagggctggcctctgtgaaaatggtttagactagaggttcccaaacttgctcaactcatgactcaagattcccaaacattctctactcactatgtctcagtaaatttttcatggcatcccttagccaaaagaaatacctaacggttctggttttcgttttttgaaacagtgtcttgctctgttgcccaggctggagtgcagtggtgcaatcacggcacactctagcctcaacctctctgggctcaagtgatcatcccacctcaccctcccgagtagctgggactgcaggtatacaccaccacaccgagcttatttttgtattttttgtaaagtcagggttttgctatgttgctcaggctggtctcgaactcctgggcttaagcgatctgcccacctcagcctctcaaagtgctgggattataggcatgcaccaccgcgcctggcctctgttaagtagttaagtttgaacatcctaataggtatttaaattgtcttaacagcttagtggtcatttgaaaaaatcatatgtcaagttgaaagaagaaataatattttttgctaggagtggtagcacacacctgtggtcccagctcctcaggagactgaggtaggagaatctcctgaaaccacgagtttgaggctgcagttagctatggtcacacctgtgaatagagccactccactccagcctggacaacatagtgagaccatgtctctattaaaaaaaaaaaaaaagaggttgggcacggtggctcatacctgtaatcccagcacttaaggaggctgaggcgggtggatcacctaaggtcaggagtttgagaccagcctggccaacatgatgaaactccgtgtctactaaaaatacaaaaattagccagggatcgtagcacgcacctgtaatcccagctactcggaaggctgagacagaatcacttgaacccaggagtcagaggttgccgtgagccgagattgtgccactgcactctgggtgacagagcaagactctgtctcaaaagaaagaaagagagagaatattttggattcttaataatttcttagaaatcatggttattaagaatccaaaatattcttttatttatttatttattttttgagatacagcctcactctgttgcccaggctggagtggaatggctcttcacaagcatggtgtcactgtttcttaccaatacatgaacctgtcaagcactgcacacctcaagctttggaatcagactagcaaccatcactctctctcttttccacattgattttcacacagtactatgacagatatcacatctccaaaggaagctagtgtggtctcaatgctgaggctgcatgctctccccatctagtcacttacagtgcccagctgatgttgagcatcactgttttcctcgaaagtttaaaatagccagtggctcccttgatcacttgctgtggcacctcagactgccttggcacacgatttgagagccatggggttagaccgatgttaggggacacaacctggggttgggactggcccagggatactgagtggctctcaggatctaaacagttgtggggttcttgccacagcctctttcacatcaggcaattagcagatgagttacagggggaggctcctaggccccagttggggaagattctggtgtctataaaatttaggaaaacttaaaaaaaaatttttttttttttggcttgggattacaagccaagccaccagcgtggccaagatggtgaaaccctgtctctactaaaaatataaaaattagctgggtgcggtggcgggtgcctataatcccagctacttgggaggctgaggcaggagaattgctagaacccaggaggcggaggttgcagtgagccaagatcacaccactgcactccagcctgggtgacagagcaagactctgtctttaaaaaaaaaaagaaaagaaaagaattaagcttaaaatacatttttacttagtgatttccacatttgcctttctggttcctcttgccgtatgacctggactaggctttgcttctacttgtaacatttgggccctcgtgagggaccagttggtcctcagtttctcctggagcagccaccaggctcccttgctgattggacatgtggaattggctgttcttggaaagagagttggagtcaaccgttcaaatgttctgggacctccgaagcccaggaatcacgccaccaccccccaatctccctccctgctcagctcctcaactgctattctcccaccattgcagttatcagctcagattcagtgagtgctttgtggaaggttggcagagggtcgcgagggtcctctacatttgttctccagtatccagtatcaacactggttaccaaagaggaaggacggactattggtgcccctggtcccagtgattagaaatgtaagtgaaacaccccacctcatctcataagctgctttgagattatgagtatgtgtctatagaacaggttgttttctctcagactcaggcagtgtctccaggttccccctggagagagatagtcttctctgtctgtgtcctcgagtggcactctgacagtgctatttctgaccctggcattcaagtcttctgaagccgttacattcgctgatggctacttagagcccagtaaaggtcagaaccatcagactgaaccagaccatgaaacagcgctgctcctgtgggggcgagggctggggtgtggaagcgatgtctgcgggcctcggcctggcagccccgcccctgggctccctgggctttctatcttatgcttctccctccctcctgtcttctgtcctcagttcctcactcaccctggcctgtttcggggagtggttatgggttggaagtcatgggtgttagtgtgaaaataccctcactcaaaaagtgacagaactgaaaacgtggtagatggtattgtccctgcagttcttgtcagtggggtcctggaatgatgttatcccggcaagtggaggaggggcccagtgaccggggccctggctctttgaattgtcccacaaagaggctttccaggttccccctctgttctttctcgcaggctggtgttcacatcaggggctcatgcaggggtgccatggggtttctgtagggggccgcccttgcagggccagctttgtggggggagtctctcaaccacctgcacacagatacttgcctgtacagggcctgggctgtcctcccagctgccccttcactccagtgccatctgatgtgaccctgacggctggccatgtgccgagcactgttctaaactttacacgcaaagtaaaagtaaaagaaaaattagtcaaagcagaataattttgcctaaaatagtctaaaagatatgtaattaaaatgacatgatgggccaggcacggtggctcacgcctgtaatcccagcactttgggaggccgagacgggcggatcacgaggtcaagagatcgagaccatcctggctaacacggtgaaaccccgtctctactaaaaatacaaaaattagccgggcatggtggcgcgcgcctgtagtcccagctacacgggaggctgaggcaggagaatggcgtgaacccgggaggcagagcttgcagtgagtcgagatcgcgccactgcactccagcctgggcgacagagcgaaactccgtctcaaaaaaaaaaaaaaaaaaaaatgacatgataaaaagtcccaggatagaaggggctgcctggcttggcactctcggggccgaggggaaagtacagcagccagggggcccctgagacccctccttgggaaaccgccttcctagtttaccctgcaggttgaatgccagtaggatcaggcagccccagcaggacaggatgcagcaggggccccacgcgtgccttgtggctgctccctgccctcctgctgggatgtggacctagtcagcaagtccagcacactctactggtgggcttgccctagtttccatggtgggctttactttcaggtacctgtgggagtcctatccctgtgctgatctttcccagtctcccccaaagcccacctccaccatggtgctttctgcaccccacagtggctgcagccagcattctgccaccttggtgttacccctggtccttgtccttccacagagctacttcctcagccgagcccagagcctgtgtggccccgagcacagtgctgttcctgactccctgcgctggctctgccaccccctgggccagaagtttttcatggagcggagctggtctgtgaagtcagctgccaaggagagtctatactgtgcccagaggaacccaggtgagaataccttggagccattcagaattggagaaagccatgcaaaccgccggtactacagagtcactgcaccagacacgcggagacacgggttgtctcttaatcttgttgagtccgtttgtttgtttgtttgtttgtttgtttgaaccaaagctcagggaggttgagtaacttgcttaaggtcacaagcctgatcagaaattgtcagtggctaagctgggtgtgcagctctgctctctctaacattcagagcccatggtccttacatcacacagcaataaattgtgattaagctccaagggtactcttagcccttgttttgggcactttggagacacaaaggatgtgtgaggcttgctttccctggcctccaggtctctcccattgggagagcagacagacataaatggagagtttgggaacaataggtggcaggcagtcatcaactgctcagagtggtgacagggacgaggcttcaggcattggaaggaggtgctggctttctgtccctggcatttgatagtgattggagttgactcgcccggccttggagcagtagaggctggtcaggattgacttagaccttgagtgctcagtggctgtctgctttctgctgtacttttcctcccctctcagaattggagtctgtggggagagtaaggttctacaggtataggggtgtgtgtcacacattgggggagttcactgtccttttcttttttaaataataactgtattgctcaacgtgagaattgtgtgcaacaccaaaatataaaggatgaaagcaaaagcaatcctaaatctttctaccccacccctgctggctaaacatggacttctcagtggctttgtcatctctggcagtctctggctccaggccttgttacttggaatgtgttcataagtgtccctcctcctggtcattagatcgaggcccacatatctgccacatgtgaggagagagaaggggctggtgatttgaggcctgccagtaaagaaacttgctggtgacagtcagctatccaagcattgcaaggccccgtgtctagccagttcagacaggtcactgctgatggcacgttccatgacaaggctctggaaaaaccggagcatgttcttcgttgtcatgagcgtggcagcagctaccacctttttttccttgcctggtggttctccttagccacatggagaagagaaatcctctgagacattccattttctgttttctgatccaactccacctgacagctcccaaccttagagtactgagcactgtgccaggagacacagcaccctcccccacaccccctccccaccggagctcatccagaactagtcttgagctcttcaggctgggagtgaacactctcccccatcctccaactgtttagcacagtagttctgggctttggtggagaaggggcatctgatccccattcacaaggcatggctgtgtttggagtttctctccgtaaagacaaagtgggctcataaatgagctccatttaaccccccttgcctgtctcttttccagctgaccccattgcgcaggtccaccaggccttctgcaagaacctgctggagcgagctatagagtccttggtgaaacctcaggccaagaagaaggctggagaccaggaagaagagagctggtaaagtccccagaccagtccccctgccttaggacctgtccacgcaggcaactccaggacagcctgaaggcctgcactcctggagggaaacaagcctggcatcgggttggcagggcaatcaaatggttcctttgtatttaatttctcaaaaatgagagccctatgttaactctgacctggcctttcctcctagaccaagtgcgttttttttttttttttggagacggagtctcgctctgtcactcaggttggagtgcagtggcgcaatcttggcacactgcaagctctgcctcctgggttcacgccattcttctgtgtcagcctcctgagtagctgggactacaggcgcctgccaccatgcccggctaattttttgtatttttagtagagacgaggtttcaccatgttagccaggatggtctcgacctcgtgatccgcctgcctcagcctcccaaagtgctgggattacaggcgtgagccaccatgcccaggcctttttttttttttttttttttgagatggagtttcgctcttgttgcccaggctggagtgcaatggaccagtctcagctcactgcaacctctgcctcccgggttcaagtgattcttctgccttagcctcccaagtagctgggattacaggcgcccaccaccatgcctggctaatttttgtacttttagtagagatgaggtttcaccatgtcattcaggctggtcttgaactcctgatctcgggcaatccgcctgcctcggcctcccaaagtgctgggattacaggcatgagccaccacgcctggcaggtgcacccatttttatgtatccctttaccaagcggagtcagtacttggaccaagtcagggatttcattagcttgctctgctttttggggtagggagcaggggcctgttgaaaggggatgggggctgggtgcagtggctcacgtctgtaatcccagcactttgggtgggaggccaaggtgggcagatcacgaggtcaggagatcgagaccatcctggctaacacggtgaaaccccgtctactaaaaatacaaaaaattagccaggcgtggtggcgggcgcctgtggtcccagctattccggaggctgaggcaggagaatggcatgaatccgggaggcggagcttgcagtgagccaagattgcgccactgcactccagcctgggtgacagagctagactctgtctcaaaaaaaaaaaaagaaaggggatgggaatgaaatgtgacgagctcagcagaaggcagacacatctggcctggacatcttggggacccagcccctcatggaatgtgccgggcaatttttctctctgacatacttactgagcacagtccttctttcacagagtaagacctgagaggcagataggtgccaaagtcacttttgttttttgttatttttgtttgttttttggggggttttttgagacagtgtctcactctgtcacccaggctggaatgtagtggtacagtcttggctcactgcaacctctgcctcctgggttcaagcggttctcctgcctcagcctcccaagtagctggaattacaggcacgcgccaccatgcccgactcatttttgtatttcttggtagaggcagagtttcaccattggtcaggctggtctggaactcctgacctcaagtgatctgcctgccttggcctcccaaagtgctgggattacaggcgtgagccaccgtgcccggccccaaagtcactttcctacaaggcccagatcctgattagggtgcacctgaggagagggggagggggcagttctgcctgggagataagaaaacttttgggaggagatgacactggacttggggcttaaggagaggagtgagggtaggctgtgggggatgctagggaaaggcccccagtagagggaagagtgtcagtgacagcccagagacacggaggaaggatgcctgaggaatacaaagggtacacatagacagcgcttgcgtgtgcctgggatgacaggaaagggacagaaatggccattgggtcttagagctggagagctgaacagctaggccatgaggtgggccttgtgtatatgttttgatgtacatgggaccctttcttttcttcctagtgaattctccagtgctctggagtacttgaaattacttcattcttttgtggactctgtgggggttatgagccccccactctccaggagctccgtgctcaagtccgccctgggtaagcacctgcgggtggcccacagtctcagggtgctcagttcaggtcttcacagtgcttttgccccaggggtccagggcgttaggagtgtagatgccagcatcttctctggatcccaggttcatacctgtggctccagttcacagtcaccccctcccaaacagcactcagaggcaggaaactatggttttcagagaagtagggcaatgagtaattgaatgtcttcctcaagccctagctgtgtgacccaggtgaggacccttcttaatgcccagaagaacaagcaatgagtggcccaggcaccagggatggtggggagtcacctttcagatgcacagtggcccctgaggcagctcttgggccttatgctctttgctgaagagacttttcatctgggcctctctaccactcctcagcccctcatcacatcagtgtcacagcacagcccactgactggattgacatcatgacatttctttgcttctgtccctaaactgccatcaggatgatagcacatcagctgccaactcttgggcttctgtggccaccctggaagatgggggtaccaagctaccgctggtcactctccctagggagggagggatcccagaaaatcagccaccctatcatgatccctgacctgtggcctctgttttcaagtttagggaagcatgaccatccccgctggttttgtgggatcactactgtcatcattttgcagttgagaaaactaaggctgagagaggagaagacttaaaatattctaacaggagcctgttccagatactttgaagataccattctttatggctattgaaagcttaggttgtatccatctttttatttaaaaacaacactgcagtcaaatatgtgttaaacttttttctctctaagccagtttcattatgacagactgccaaaaatgggattactagcttaacgggagtgaacttttttattttttttgagacggagtcttactcttgttgcccaggctggagtgcaatggcacgatctcggctcactgcaacctccgcccgcaccgaggttcaagcgattctcttgcctcagcctccctagtagctgggattacagtcacccgccaccatgcccagctaatttttttgtgtatttttagtagagagggggtttcaccatgttggccaggctggtctcaaactcctgacctcaggtgatccacctgcctcagcctcccaaaatgctgggattacaggcgtgagccaccgcggccaaccaggaatgaacatttttaaggctcttgatatatattgccaaacactttccaagattgtgctggtctattcccctcccccagaatcctgggtgtgggagcccagaggctgctggcccgttcccagcaggcaaagatgttacccatctcctaggaaggaagtgtagcagcctctgagcgccacaggtctcgtttctgtgggtgctggagtgcgtttggtgctgttctcctctaggtccagacatcatctgtcggtggtggacgtctgcaatcactgtggccatcagctggctccagggagacgatgcagctgtgcgctctcattttaccaaagtggaacgcatccccaaggccctggaagtgacagagtgcgtaaccctccttggccactcacttgcttctctccaggggaatcttgtttgagttagcaggagcaaactggactgggtgggcgtgttggggtgaagggtcaggactgcatgacaggtgggcggctagaaaagtcgggggtgagggcaccatggagaactcaagttgggccagcaggtcctctgtgcaagtgtcctgctctgcacaacacgacagttgtcccagcagctgtcagcactgtgtccgggtcctcctccctgcagccttcatggcgccacaggctgaaaagaagagacgagagcagtgtggcccccagcatcttcagaagctttgtggtggaggcaggcactggtggttcacaatcagtgcagagaggccactgttgcccccaaaactcatgtgcactggagcatcttgcccctgtgtgctagcattttatccactttccttccagccacctccacccccaccatcaaccctggcaactttgtcctgtaactaaaatagcctttagcacatggcataaccggagagcttttgacattcctctttggagattcatgtctgcgtcttgggggcattcggcactagtgatgggcagccctgcctgctgactccccggctgtttctaattggatctgagtattctaagagaaactgtaaaatgctccaagacagaaaggccccacgaggtcctatccttagagccaaggctgtagcatttcctatcaagcagacccttaaccggcgcacaggaaggagctgagaagagtgagtatacacaggcttgaagtcctttgttccctgaagtagatgtgacaccctaatttcattgaagtagccccatttgtaagcactctgactaggtaagcacccagcccggtatagcattccacctgtatgtgtgtctcccccagtcgatgtgcctgaggacactgagactcagcaggtaagttgtccaaagtcacctcgctccagagcagcagagcttccatggacagccaagacacccctgcaggcactgctgcctgctggattcacttacccctgggtccctctgcttttcagggactaggatgctatgagaaccctcccccatccctagcctccccttccactcccagtctcctctacagaaagaagctaactaagtatctccagagagtttaataccacatctctgggggggtggtcccttaaagaacgggtacaacaccttattgtggccactttataggtaaggaaactgaggcacacgttggaatgactatcttgggtggcttcttagcagcagacgtgatggtgaagcctgtgtctctgacttccagcattgaatgaaggtgctaaagggtggggcgctaaccctagctcagggctggcatttcagatctggagctggtggcatggtgccatagtggcagcattggagtcaacagatgcacatgtcatatcagtgtggggcgtggcagtcactggcttgggcccctctgcctgtcacgcaggtgacacatagtgacctgcctctcgactccctgtcactgctgcaggagccccctggtgaaggccatcttccatgcctgcagagccatgcatgcctcactccctgggaaagcagatgggcagcagagttccttctgccattgcgagagggccagtggccacctatggagcagcctcaacgtcagtggggccacctctgaccctgccctcaaccacgtgagtgggagctgagttggcccctgggggaggtgctctgcactggtttacgagaacactcccactcacctcatgctgaccctgcgggtggggccatccgaaagacagagaaaccaggacagcagccccctttcaaaaaagttacggcttattggcctaggtggactcctttttcatcccttttcagcctctgaggcaagtgtgtttctacctgcacctttcttaggctcccagagtcccaggtcctgctggcccatagcctctgtaagcccaggtgcaccccagctggccaggggttcacctgcatttgctccagcggtttgcgtgacttcccaggcctctgcaggcagccttggagtgggttcctgccccctcgggcacacaaacagagctgaagaccaccctgggcacctccttggctggccgcatacctcctggcgggcagctgtggtgcattgtagttgcattgcatgttctggtggtacccatgcaatgtttccacagtgcatcacagaggcctgcctggccctcgagagactgccctgactgaaggccctatcaggtgggggaggggatcctgatagagggcactgctgccactgttggggcccaagtcacagccatcccaggaaacaggagggcacccagctgaaagtggagcatcacctggtctacggggaacatgtccttagctccagagtgggagggaccgggagagtcctggagattcagattctcagccactccctggggcttggtcttagctggctaggctagtacttcaagctagatattgtcagtggacctgggcactgggatgaacccaggacagcgtggcagcccctacagggacaggcaatgtgcagaaaaggcccaaactggctggacgcggtggctcacacctgtaatcccagcactttgggaagctgaggtgggcagatcacctgaggtcaggagttcgagaccagcctgaccaacatggtgaaaccccgtttgtactaaaaatacaaaaataagccaggtgtggtggcatgtatctgtaatcccagctactcaggaggctgaggcagaagaatcacttgaacccaggaggtagaggttgcagtgagtcgagattgcaccactgcactccagcctgggcaacagagcgagactccatctttaaaaaaaagctggtgggggtgcccaaatgccctgggctgccaagaccaaaggcagatggtgagccacatttcaccttctcttttgggctttccattagtctcttccgtatttgtcttcatgagagaaccaaacagtacaggctcagtttggggaatgagaggcttgcagccaccctttggactggggttccttggtagcagctctgtggtaggaaagtgagcctagaagacaacgccatgcagcctgatggccctcggagggcagaatccagacataggcctgctgcctccatgcccacaggtgcttctgcagcatgcacagcttagaagtgccaggttttgaggagagggatccttttccacatccccttgaagcacacaacagccagaaaacagtgtaggcaaggatcaaggccttgtgcagggacagggcagggtcttcctcaggcccagtgtcctgggaaggaggaaagccagggctgggtgagatgaggctcagcctgagggagttcatcaggaccggagggctgcttgcggcccatctcaacaaggactcctcactgctcggtgtcgtgcaggtgtgccactgcgagccgggtgggcagcccagccccataggtcgtaggcagagagtatgcatggcccacatgcagtaccttctcatatgatacaacagccctgtgatggtgccatttacatttttttgaatgaagaaactgaggctcagagagactaagtcctatgccagggtcatgtagctagtaagtggcaaagccgggtcagtaggcctagtccccaagcactaaggcactctgtggttctgtcttctgagacacctgtctccctctcccactcctcctcctccttcccccagccccatcgacaggctctgctgccacttcaggcttttccttggtaccttgtgggtatctcagcctcctagccagccatggtgggactcccatggggtggaagaacctgcgccttcaacccacaagggttttatttctgcccctgccacctgcctgtgctgtattccctatacaagctgctgtccctgtcagagccttgctttctcacctgcagaatggggagggcttgtctcccacctcctggggccatggaaggaactggttctcccctgagctgttccctcacgtcctgcggagttcaccagactctggggctctccacttcctcccagagctgctgagtgttggtctggggagaggcctggtaggtgctaggatccttgcctcagggatgggccagtcacctgtctcccctctctcgtggctgaccccacaggtggtccagctgctcacctgtgacctgctactgtcgctacggacagcgctctggcaaaaacaggccagtgccagccaggctgtgggggagacctaccacgcgtcaggcgctgaactggcgggcttccaacgggacctgggcagcctgcgcaggctggcacacagcttccgcccagcataccgcaaggtgaggcccagctggctggtggggcagggcagattggagcctgtggggcctgagcccagaacccagcatgggcaccagcatgtggttgtggagttggccctctgaggtcagcctggtgacctgtcgagcacctgcttggctcgtgcccaacactgggctaggcgccatgtgtccctgtgttcagcacacattggttgagtgcctgctgtatgcctggccctggagctcagcagggagcaggccacactttgctgccacagacaggggccagcagggagctgtgcctccccaggcacatgctgggtgggagggctctgagggcaatggtggcaagtcagggctcctggcctggtcccgagctccacgttgactttcattctttttcacagtagctagaggcttcggttctgctgctgggtaacatccccttggcagtggccacgtgatctgaactaagtcacggaggaaagttctatgactgggcttgccaggctccagctatttccttttttgtttatttgtattgctatataatgtattcaacatatttgtacctgtatttttttctaaaaatttgagtgagatgactcaagtgtcattgagggggcacgggctgggctggaagaaggcctcagagcgaggctgctgccgtggagcttgggattcagcccccacacccatcaccctgaggtgctgcggggcccacccagggttgcactgtggccactgtgtgcagcaagccaagacagacacaacagacagtatcatcggagagccattccttactgtggagaagagggcatgtaccccaggcctggagcggcacccctgcctcctggagcccactctggtcagctctctggtctgctcacagcatggctggcatcagtggcctttttttcataatagatggggtcttgctatgtggcccaggctggtctcaaacccctagcctcaagctgtcctcctgcctcggcctcccaaagtgctgggattacaggtgtgagccacctcgcctggtccaaaggcctcctcttaaataccatttccattctgctgctccctgctgagagcccatcagcggctccccattgcctaccaggaccagaatccacttggcagcactgaagaccctccctgaagactgagatataaaggcatcaaaaagagcttgagattttaagaaatgacagacctcagccttgcccttcacccaccagtggctcatacctaagcgctgcagactttacccgcacacctctagactctcttcctttctaaagatacggaaagaggataccaaacctctctggtaccagcccaactgtccctcctcacccctctgtccctgtcacacctgtccttttgtcaaactgcaggcagcctccagggccttggggcttcacccagggcacttgtctaccagccccacgaggtgcgtccagggctttcttgtcaccagttgggaaaagcaggccttttgcctctctctcctctcatcctgctcctgctgttcagccaggtttcctgcctggctcagggtcagagtacgggacaacagaggttgcttttcaggggtgagcaaggcagggtggtgtgggaagggatgtcatgaggtggcaggcgagatggctcagggagagctaccctgggcatagatgggtggggaccaggggtgtgatggatgtcaccccggcacctccccaggtgttcctgcatgaagccaccgtgcgcctgatggcaggagccagccccacccgcacccaccagctgctggaacacagcctgcggcggcgcaccacgcagagcaccaagcacggtgagtccacccctccccagctcacaggctgggccaggccctgcgccctaggaagagaggagaagaggggccagcccagctcccacatctggcattggtgcccagcacacctctcgcctctctgagaatgaaagaagcccgaggccgcccttggtgggttgcaggggttggggtggtcatgggtcatgctgtgatcagggaaggagggttggggtggcgtcccagcacaggtgcaggcatagaagcagaagctcgagccaggtcatgtgggcccatctcagccccaccacgggctggccgtgagaggctggacaagttcacttcttttccgtggattgggtggggcagcagaccccacctcccaggatggatgtgagcgttcagtgaatgagtccaggtaacgccaaggaactgcaccaacttcatggtagattctcggttgtgacacacatctccttcccacaggagaggtggatgcctggcccggccagcgagagcgggccaccgccatcctgctggcctgccgccacctgcccctctccttcctctcctccccgggccagcgggcagtgctgctggccgaagctgcccgcaccctggagaaggtgggcgaccggcgctcctgcaacgactgccagcagatgattgttaagctgggtggtggcactgccattgccgcctcctgaccaccaggctcagcccacccctccacctctctctcgatttctctctctccccctcagcatcttcccgctgagagtggtggggaagagccttgtcttcttagctgtcacctgccgaggcttctgggccactcaggccagtgcacccctgggcagagccccttaaagctgctgtcactagatgcccatggtccagggcctggtgggcgtgagaggataggtggcagggcagaaactgggcagccctgacttgatagcagcagggggagctcccaagctgccaagcccctgcctccagccttcctgagtttctctctcctgaaccctactctctcctttttgcttcctcagtttttatcaggctttctctgggggacagcagtctctgagcaccagggagcagttgccctcaggcctgtgcccagcatgccctcccctttttatacgaatgttttctaccagtgtgcttgggtttgccatgatgcgaggctgagttgctgtagcgtcttgattctctccctgggtctgcgttccctcccctgggcctgactgagcctgctcattgtttttccctttattacacaggacagccaggggaggaggggggcccagccctgggaggctggtgggaggcagggggcaggcctgcggatgcatgaaataatgttggcattattttttaattttttaaaaaataaatggtatcttatttaattgtcctgttccttcccactccccgcctcctaggatgttagcccaagctcagggtaggcccagggggctgggagaaatgaagccacccatggggactggggaccaggggccttcagcatggcttctaggttccctcctccccctaccccatctcctacctccacagtacagactgtccccaacttaacagtggttcaacttaaaccatgtttcaactttacaattggtctgttggggtattaaatgaatttgtgacttaggatattttcatttatgatgggtttatcaggaagtaaccccatggtaagttgaggcatatctgtatatatttaaacctaattaattcttgagctgaaaataaataaaccaggatggcagggaccaacccctaatccctccccagcggcaagcccctcttttcagagtgggcagagggttgcctatggtgggcactaggaatgaggtcccctgcctcgatgcgggtcctaggagaaaaagtcctacttttctgggtccccaggtgcagcacctcccggagactgtttctcccatggcctcctgagtgatgggccctgcctccctgtgcctcatcctcaggctggttggagcagagggtgggcaggagccccagcacagactggggggtgctcacagcagggccaccttgatgcaggctggaatgttatccctggggtgtgcttggaccccacctgctttctttctctcctgcccctcccctactctcactgtaatttatggaccctgcccgcctgcgtgttgtgtgtatgtcctgtgccttttctcactattgtttgggtgtgggagggggtggtttttcactgaaaaggggggtacacctatagctttcttgatgttcaatcaatcagtcactgtgtcccagacatattcaataaacacagattggtaccacccagcacgaggtgtgtgagggtctgtagtgcgactgctgtggtgcccagccaaggggctgcgtgacttggcaggcaatgggccagggactgagggcagccccccaactgctgagagggcccctggcttcagtctaatgggcctcccttgtccaccttccttccggtgcctggcgcaccctccagcctgggataaaagggctgtgggtggcactttgggggtcagaggtcactgtatccaggttccagcttgttccctggatgtaatgcaggctggctgacagatttggggtgctgaccctctcccccactgggtaaactgctccttagtttctccctccctgaagtcagtgatcctctgagccaggaggctcactggcccacaagtcagatccaagtccaggtcctgtgcttcccagctgggtcacctggggtgggacctggcctcagtctccacttccacgtgtgcagaattgggaagctaagctcagccatgaactgcagctccaaaggcttgtctgccaggactgagtgatgggatgcaagtttacagcgagtgccttgtgtggctggtgaggccaggcttggcgtaagacacaccaggggacaggaccacagactgggatgggagtgctgggcctcgtcgcaagaggagtcaggatgtgactgagcatgtggctgaatccctcagctatgagccacatccttctctgaagggtagtcacagcaggctaccctgagaccagagcagcccggtgaggcccaattgcagctggtcccgtgcacagctccatcattttcagggatggccactgcccacagcctcagcctggctccactgggatggagatccagggcccttggaactgagaatgagcagggggaattgcccactcttggcacagcccagcagggggtgggaggtggggtgagaagcaaccagattcctttgtgagtctgtgtaggctccatgcctcagcccccaccctcctccagctctgcacagctgtgggacaggggcaggaccgtgggcccagagctctgtcctggtgcttctaggccttggtttccttaacagcctaaagggacagggaggtggaccctttgtggcaggagcggagaccgggcctggtgggttctggggcctcagggcagcccaaccagcagaaggaaagctccagactgtttatatataccctgggaacagggacccctccctaccaaccctcagaaccctccctcccagccaaactgcctgttgcttgccattccagccgattcacagcaattcgggagagtcctaacctgggagtctgctgggtgaccttgggcaagctacttaggtttcaaaacccaaatttcctcctctgtaaagacacacccacttgaggcgcttgtggatttcctgagaaaggccaacaaatggtggccattgttcttaaaacagtacaccacacttcaggtactcaggagggaaacagacccacctgggtggctttgctgaggtcacacacctcaaccagccacagccctggcccctagcctccccacatcacacacctcaaccagccacagccctggcccctagcctccccacatcacacacctcaaccagccacagccctgacccctagcctccccagtgttacctggcggagaggaactctgtggaagatgcacgcagactgctagcagtgctctggaccacagccaggtgcaggaagccctcccggagggacactgccagggaccctgctccagcttttcccccatttccttcagagaagctcctgggaggaggcgcccccatccggagcaccagatgtccacacggcccacacccattaaggggggtagcccggggccaatctggccaagcgacctgcaggccaggggctggcccacagccagtggtcagtgagcatcagccaggttcagccaactcaagctgcagagtggcggctggagggggctcaccttcagtacagggcatggaccccccactgggccttggacccaacagccctctctcctgtgcccgggcctttctatggctgaagtctaactgttccctctctcccagggctcccacgggggtgggcattaaccctgacattcaaccctggcccccctctccagccacttccccctggctctggccggtgcactggagcagtcctccaaccttgcactcgccgtgccctctgcctgcactgccatctgtacagtcagtgaccaatggtgcctcgcagccacgctggggcttctttattctcaggggcaggaaccacataaaagggcttatttacaagacgaacccgcggcctgcaggctccaagacaccactgccgttgaggcagacagaagagctggccttacggcaggcgctcctctccctgtggcctgaggctccgacgggcagacaggaccccagcccatgcctcgagggcaccgcggccccgcttcacacggtgacctcggtcttgctattggtccttaggtaccgggacccgcggcccgcgctgccgtaaaggccggggagctgcgggttgaaggtctcaggcatcttcacactgaactggcgccgggccgcgtgcccgggtcgccggggtacctggaaggcccgagccgtcgggtggctgagcggggcgggccgggccgggcgactggaggtccaggcggcataggggcccggcgcggcagggggcgcgtagaccggcggggcccaggggcaggcgtccagcggcgcaggcaagtccggggatggtcgcggagcccgcgccgggggttgccgcggggacggctcgagggcggggaaacgctgacagaagtcccgcggggcggcctctgcggggacagggcagggaagagtgacgccgcgccgagcacccaagctcaggactggacaaggggtcccggccggggactgggacggggaccgggccggggcgggccgggggcggggcccgctggggcgagggagccgattggccgagcggcgggcgcgcggaactgggaatttggcgcttggagctgcggccccgcgcttcgcagtccgggagctcgtgcgcccaggtgccctgacgctgcccgcacccgccactcacctgcggccttgagcgcggcggccttgaacgtggcgtacttggcgtagtctggctgcagcgtcaggctgccgccgccctgcagccgcgggccgcgcgggggccccggggcggccgacccccggggcgcgttgttgaggcgcttcttgtctggagcgaggagtgagacgcggctcggtccgatgccccggttcactccgccctcgctgtcacctctccgtagtcctctccccgaggccgttcggtgagaacctgggggaccgttctccgggcgaggctgcgagccaagcctgtcttcgccgcagcctccagcgcctggaacagggcctggctccgagtcacgcgcagcggcggcggcagccagcccggggggtgccaccctcatgaacggctcgcccggaggcgacgctcgagccaggcgcggagtcctgggacctgctcccgccgagacgggggatgtctgaggaacagaacccagacggggcgtgggggctgccaagcctgcctgcctctcgagagacccagggggaggctctggagcccgagcctcagatcacagccccggccagcaaatcctgcatctggaaccttcctcacacatcacagccccccagactcgaggccgcaggacccgtggggggtccctttccaccctggcgagctggctggccggtcgggcccctcacccgcagaggccgcggctcatttccaccggggaagcctctatgccccagccgagggaccgcctctcggcctctcacgcccctccgcgtgctccgccgccgctcagccccgcccgccaccgactcacctgcgctgttgtggggggagccccgggggaggccgtcccccatctgcacctggacacagccacccaggggtgggcccagggtgggaggcagtggctcctgggggcccggctgcttcagaagctctgtcagcgccctgcggggacagcagtcaggggtggccctctgtctcccacctcatcaaaagccagccccggccaccaccgtctcaccgtgtggccctgggcagttctttcggcctctccaggccgtcctctccggtgctcgaaatcacgcacgagtttcccctcccaggcagtatctgccagcctcacctgtggccccaagacagctgcttcccagagcaggtcaggaaactctaatgaggctccccttccctcccctcccctccctggagcccactctcagggaccttccccaggtgagcctcccctcccaatgcgagctttctctgctttcctgcctcttctcccaaaaaactgctactcattcttcagaccccatcagcggcctcctccaggaatccttttttttaatttttttatcttttgaagcagagtctcgctctgttgtccaggctggagtgcaatggcgcaatcttggctcactgcaacctccacctccccggttcaagtgattctccagcctcagcttccctagtagctgggattataaggtgcctgccaccacacctagctaatttttgtatttttagtagagacggggtttcaccatgttggccaggctggtctccaactccgccggtctcggcctcccaaagtgctgagatgacaggtgtgagccaccgcgcccggcccaggatgccttatttacctgcctgcctaactgcccctgcagccgcggcttctgctgggacctgggataaagctgccatcacgggcatgaaggacagatgggtgacggaatggggatgttgggagaccccctggtggcagcccaggacccacaggctgtgtgaccttggacagccacctccttggacccaacacccagcccccacccagctgtgatgtgacagtgtctgcagcccagctgccttcagaacccggaacccatgattttctcccactcagcctgaccctccttccggggctagagcctcaaatggctgattcgtgaaggtcattcaggaggcaggacaccagggatggccgaggtttggcttcaggtttggtggcagggtctgaaaccatcctagtacctgcctgggctgaccttcctgccctgccctctccccagaggctcacctctgtggcctcatctctgggcaagcacctcaagctcctgtctccctgacagctgagtaaccaccacgcctctgggcctttgcacaaactctttccagatgccccgcccaagccctctgagaagccttccctggccttcaaccccaacacagcagaatgaagggtgagactcgaggggaggacagggactcaggacacacccacacacaagcctacgtcccattccaggtctccccagcagagaaaagggagttggggccatgggagcctgaagcccagaaaggagaagggactggcctacaccacacagcacagcaagggtgggcatggctttcctgcggcatcaccaaacctgctgccccatccccagcaggtgcagggagttcaggatgaacatgtcagctgggctgctgcagccacccctcaccatcgcagccctaagttcctttttccccgcccctgtcaaagacatatccaggcctcttccaagctaccctcacccatcatgggggacccccaaatttgggcagcccagcccctacccctgcagcatccagaagccaggccaggaggctccacctcctgaaggcagtgcagaagctgagggtggaggccagggtgccagcccgggcttcccttagagctccctgggagaaagtgggctacgtggtttcgggagcgaggggtgctgaagtgccaaggaagccctcaccccctgcctctgaggcccaggagggggaagtgtccacatctggcctgccagggtatgaaggcttctctatggtcacttttaaataccagcctgtcacattcggtgtcagcagcccacaggcccaaagggtgctgggaccgggtggatgaggagggcacaggccccagggcatgggggttgctgggggcatgtgagtgccacgtgtggcatgtgggtgggagttccagggtcaggacacatagagtcctagagtcctcgttccaaccgaggaaggggacctggaccctgtagtgcccacttcacaccaagctcagaatgcaacaagcacctgtcctggcctcagcaacacacgactgtgttccagagtcccctttctacgcagagggagccctgaccttcacctgggagctgtggcatggggtgagtggggggaggcctttgaaacccaaggagggaagggcagccttgagtcacagctgtgggggcaggggagaggcaggaggtggaagaggggagggaggagtggggagaagcaggagatgggcacccagagaaccaagcgccccttcctttcccgtgcccaagacgcccggtcacctccctggccagcggcgccccttaccctggacagtgacccggtgccctctgtgcaaggctacctgtccccctcccagcccgcccccacccccctgccctccagaggagactcgagcagggaaaggcggtgcggcgcccagcacgggcagaaggtcaaagggagtcagggcggtgtcaggtgtctccctgatgaagtgttgggggggcggcggggggagaaggagacaggaaaacccagagaaggggcctgctgggagaaccagcgcttcgagagcggcgggaaggatcagcgggcagggagagcagtccgaggagcaggcgggggtccctgggcggcgcgtgctcacctggtcactgtgcgccgcgcgcgcgggctgtgcgccctctccagtcccaggcgcgccccgatgccggccagcaccagcagcgctgcgacgccgcacacagcgtagacggccgtatggctgcgctcgcggccggggtcccggggcgctgcggtgtcgcgggcgcgggcgggcggccggcctgtctggacccaggccggcgtgtcgtagttggaacagcggctctggtcgaggcgccgcggcccgtcgtggcagcagaagcggtagccgcacgtgccgcagcagaagctgtaggctccggagctgcagttgaagggcgggtcccactggcccatcacgtcgtagtagccgcggcagcggtcgcccccctccggggctgtcgtgccgggcgccgcgggaccctgcgcctcgggggctcccgcgcggcccgacggcggccgcgccagcagcaacgcgagccgaagcgcgagcgcgagccggaggccgggaggacggcggccgccgagcagtccccgcgccccggcccgcgccatcgggcccgcgcctcccgctactgcgcccggtgcatggccgggcgccgcggctccctccggctcggctcctccgctcccgcagggatcgcgctggctcccggcgcacgccgcctcggccgtcggcctcctctggggaccccagccccgagtgggctgggtctggagctccgaggccgcacctccggtgggcgcgtcctccgcccgggctcacctcggacccgagctgcccggtccgcgtcctgagatcttccccgggccgggcggcgggtcctcgcctgcgcgcggcccccggcttctccccggcccggcaggtgtgcgggtcttggccctagcggaggccgcgccggggccgcgggccgcccgactgcgctaccttcccgccgcgctctcagtacagcccgcgctctggctccggctccggctccggctcccgctcgggctcggcgcgggctcgggcgggcgggggagggagagaggagggagggcggaagggaggcagagccgggggaggagcgcggctgccgcgaggggcgagaggaggcagcaggccccgcggagccgggaggccccacagggaacccccctccacaaagactgccccgaaacattcatcggaactgggcgctcgaaggggatcagttctagggcccgcgactagagcgtccctgtcttacaggtgcggggacctgtaccttacaggcgcggaggtcaaagcagcccggaattgccccgggacgggcagggccaccctctcacctccttcccgtcccctctgtccgttctgatcataacataaggagggccccttcccctctcggcgcctcgattttcccacctgtcaaatgggaaggacttcccctggcagcgccgcttcagagggccaaggatttaccccacggcgcgagcccagttccagaacccctcgaacgctgggctggggtccagggatgtccccatccctgcgtcgatgggcacggcttggctgacgcacttccgcgatctgctccctccccaggtgtgaggagagggggactgggctcgcccctgccctggaaaaggaaagcctggaaaaggaagacctccgccctgcgcccacccgcaggtcctttcacaaaccgaggggtagggtgtgggggccctaaggagcccggacccggtcccagcacggcccagtggtgttttcggggttgagttgaactggagaaggtcctggtgcttggcttctccctgcctcagtatctcatcttaacatcaaagactcttcctggagggcagactcataatctgccccttccaggagataggggtcgatatggaacctccctctgtccagacggaaacagcaggagggcaaggactgggcgtgcaattcacccagtgtgcagctcaggcctctgtcggcatttgctgaatgaataaatgaatgaaaggactccagcgcctagtttctgtgagatgaaacatttggggctccctagggtccctcctggtcccctttccatccgtccttctctcagcaactgggaccagcttatgaaagtggagaaggtgggggagaagaagaggaaggatttacattttaaggaggatcaagtctgttgcctgacatgaggggctgacagactaatttcaggtattaatgggttcagacaggaagaggaggtgacctccccactcagagcttctccttgtgccctggccaaagacagcctgctccctccacctacacacacacatgtgcacacacatgtacacacacttcccatccagccccgaaaacccaccctcattaaaggaccccttattaccagtttagaagaaaaaacacagatgaacaaaggaattaaatgaaattgctttaatcccatgtccagagacaaccacactaaaatatgccacatttacatgctggattgtaactagtttgtggtttactttttgccatccttaaacttttcgtttggctgggggcagtggctcacgcctgtaatcccaacactttgggaggctgaggcaggtggatcacaaggtcaggagttggagactaggctgaccaacatggtgaaaccccacctctactaaaaatacaaaaattagctgggcatggtggcatatgcctgtaatcccagctactcggaaggctgaggccagagaatcgcttgaacctgggaggcagagtttgcagtgagctgagatcacaccattgccctccagcctgggaaacagattgagactccgtcttaaaaaaacaaacaaacaaacaaaaaaaaaaaaacaaaaaaaaaccttctcatttgtgattcttctcagagcttctgagctctactttctggagcgtcctttcctgcttcctttccttagggccattcctagaaatggaatccgtggcacaacccgtatcactggtattgaagtccccaccgccctctgcccactgccctggaggctgcaggagctctgaggggggcctcttctcccacctttcccacccgttgccgggcactgggttgaaagaggcttgtctctgcccccttggaactggggcctcttccaagttagagtgaggggtcagagcaagtctcccagtgctcccccttcctggacaccctcctgcccccaccgtcctggcactgggtgctttcctcatgttgaccccatcaggccttcacatacatatacatagtgacagccatttgtccaatgaaggaagtggattccagcccctcccagggactgatgtccaacccccaacaccaccccccaccccccaccacacacacaccttcctccccgtctcaatctgattcagtggtcagccagcagccataggtaaccataactactgggtctgtgccaggcactggataccctcttctctccatgggaacacctggccgcggggagtgagtggagcaggagagggcagctgtgaacacagagcccagctgaccctgactggctgagtcctgggatctgatcgcccattcagctgacactgccccaggtgcctggccatgtgccgggtgaggggatctggagatagagcagcccggccgaggagtgacccctttgccctggaccccggggtctctcaccccatcaaggctccagggcagccaccccttatctcttctgcctgcccccctccactaccactaagcctgtgtcaccaaaactcatccattgatccaggcttaaaataacccctggcatctgcagcaagccccgcggggcgggcagaggagccgagtccctgctcctgaagggcacccgccccgcccccagctcccaatgctggcagctcgagtgtgcgggtgtctgcgcgtgtttgggtgacagcaagagtgtgcatgtctggggctagcatgactatgagggccttccctgcacggtgggcatgtgtgtgcacacgtgtttgtcagcatacatgctcctgtgcacgaacggccttcctccatgtccagccctcacctggtgctcagttctggctggggaaggctgggggccctgagaggtgtggacatgacaaacagcctgtgctgggcctcagtgtccccattttaggtggtgggtgaccagtctgccagctctgctgagccctgggaaaggtttgggatttcctagagagaaactcaagactcagagagaggaagtgacttgctgtgactggcacacagccaggaagggcagggtctggcctggaacctgcactatgagtcccgaatccacattctggccagttcagcacacccgggaggcactcctaccccacgacagggcccttgccaacacctgacccaggctcatttgccccctgtctggtcacgcaggctgccctctcttcctggaacccctttccagccccacatgcccagagtttctaggttttatttatttatttatgaaacggagtctctctgtgttgcccaggctggagtgcagtggtgtgatctcggctcactgcaacctctgcctcctggattcaaccaattctcctgcctcagcctcccgagtagctgggatttataaggacccgccaccatgcctggctaatttttgttttgttttgttttgagacggagtctcacactgtcgcccagctggagtccagtggcgcgatcttggctcactccaacctccgcctcccaggttcaagcgattctcctgcctcagcctccggagttgctgagattacaggtgcacgccaccacgcctggctaatttttgtaatttttagtagagacagggtttcaccgtattgatcaggcgggtcgcgaactcctgacctcaggtgatccgcccgcctcggcctcccaaaattctgggattacaggcgtgagccacggggcccggcctaatttttgtatttttagtagagacgggggtttcaccatgttggcagggctggtctcgaactcctgacttcaagttatcggcccgctttggcttcccaaagtgctgggattacaggtgcgagccactgcgcccagcctttatcctttattttggagccaggctgaccgggttggaattcctgctcttcagggccattcaacctttctaggcctcagttttgtcatctgcaagatgggctaccagcatttcggcagggttacagggagaagcagtgggccccagagacactgaagccaggctgagaagaccgtgaccgcggatgccacccacaagcctccaaggcctcattcctaagctaatttcacttccatttcctcaatgatgcagttacccaagaagcagaggctcttggggactctgggctccctgctggtgcaaatgccgataccaggaggggttctggagggagggcccacggctgtctttgtctcccgcgaggcaactctgactcaggctccagctgcccgtgggagggagggggcgcccgggctcctgaggtcgccagggagcggcgggactgggaggctccaaagccctcagtgtacgtgcgaatccggagcggacaccgagaccttagcgcgggaaccaagagaggacagagctccacggaggccacagcgcgtgcacggggacaggtgcgccctccccggcagcccccctgctcctcggtcacagttctgtgcggaggcgtcttgcgccctcccccctgagcctcgcccttgagtcggggccgtgggccgcatccaggcccccagggctcgggatgcgcgtgaggacccggactcccgagggcgcagaggtcgggagcccgaagcaggcgcccttggccttggtcccgccccttatccggtcccaagctttttcctcgccccttggccttgactccaccccttaggcatgccgctggccccgcccctttccggccaccttgaggcttgggggtccctcagccccgcctctcttcttgaccccgccccttggcagcaccccctacccccgccccacgtccaaatctcccggggccggtggtggccggggctgacggcggaagccgcgcagagactcgcttgccccgaagtcgctggattcgggcctggatcccagattatccgcagcctaggggagtggagagatgcccaaggttcctctgggtcccgggaccccagtagcgtccctccccccgtcccccacgccaaccactgagcgcccttcggagtcccgggaggaaagcgtaggggcggggaactctggcatctctctcctcccggttgctccccgactctgccccgctattccgctatttggggcagtcgtttctaccgcacccccattctctccccaccctcgggtcatgagggcaggaccaggcctgctcacacctccctgctgggggcgttccctggctctagcaggggtccctctgtccctacatgccacaggacctcttcaatctccaaggacagctaggtgggcctcaagagccccattttgcagatgggaagaggggcccagagagttgaggcccagtgagatgctaccagcttgcagggatagtgctgtgttgagccatccctgctgaaacgaaagtggggggtcaggccttcctccctggcctcaccagctgggcctccacaacccctcctggagcccccagcctctggctaccaggcaggaagtgaaaggggcctgcaggaagccccaggaggaagcgagacttcagccaggcctgcccccaccggccagggccctggggacctggtgggaatcagaccctccttcaggaaaagctggcccgaaacacaggctcagagagaggccttttcccttcagttcccacccgcaaaacggcgcttccagagtctgtctgggatccctcttatcaaaatgagagaacagttggggagaaaatctgagtagtgatgaaaccagggagtggggcctggcatcagtccccgagttctccgctcccaaggagggggtccgggccaatgacattctgctgggcaggcatggccgccaagcgcaggagcccagggttcgcccagctccaccacccacctgttgtatcttgggccggatcccattacctcacagggcctctcttttcctatctgcaaactggaccatataatccctcctcatggatgtgaaatggtctagattttcaggagaaaatttggaccaacagggacctttaaaaaggtcaaggctgggccgggcacgatggctcacgcctgtaatcccagcactttgggaggccgaggtggacggatcatgaggtcaggagatcgagaccatcctggctaatatggtgaaaccctgtctctactaaaaatacaaaaaaattagccaggcgtggtggcgggcgcctgtagtcccagctactcaggaggctgaggcaggagaatggcgtgaacccgggaggcagagtttgcagtgagccgagattgcaccactgcaccccaacctgggcgacagagcgagactccgtctcaaaaaaaaaaacaaaacaaaaaggtcaaggctggctgggcgcggtggctcatgcctgtaatcccagcactttgggaggccaaggcgggcagatcacctgaggtcgggagtttgagaccagcctggccaacatggagaaacctcatctctactaaaagtacaaaattagctgagtgtggtagtgcatgcctgtaatcccagctactcgggaggctgaggcaggagaatcgcttgaacctgggaggaggagcctacggtgagccgagattgcaccattgcactccagcctgggcaacaagagtgaaactccatctcaaaaaaaaaaaaaaaaagtcaaggcctttggcgcaacaactgtgctgggaaacagagactcctgcacaggcgcatgtggcctgtgccgtcttggccacaacagcaaaaaccaaagtatccaaatgcccaggtggaaaaccttaccatgttgaaaactttattgtggagtctctaaagagagagaaacttaccaaatattaatatgatggtcaagacatgaatttgtatgtatagaatgattacaattatgtagaaaaatacaccacacactcgaggcctggggttactggacacgggtcatttcttccctgactacatcatggattccggtccagaacttccagattgtctacaaaatgcctatcttcatttttttcacaaaaaaaaatttaaacaaacacaaacaccccacccccctcctccaggtgctcttatgaagatcaaatgaggtattgatgtgacggctctgggtctcagtttcctcgtctgttaaatgcatatgagaattatctaaggttccttcctgcccttctctggggaccacaggccaggaggagaaccttgcatacaacccctcatttttcagaagaaaaaactgagaactcaggggaaacttcctaccggctggcggggccagctgggacagagagatgcccaaggtttgcatgtctgagccccagaggggtttcacccaccctcggggttttcacctgctgagctaaccctggctgtagcaaaagatggggtgggagatgggggtgtccaggagaagatggggtgggggagatggggtggccaggagaagatggggtggccaggagaagatggggtgggagatggggtggccaggagaagatggggtgggagatggggtgtcaagagaagatggggtgggagatggggtggccaggagaagatggggtgggagctggggtggccaggaaaagatggggtggggcagatggggtggccaggagcagctcagactcccccaactccagatggaaggggagtggatggctgggcccatgtgggcctgaccccaccaaacctctcccacacctactgcttgtcacttgacctcaccctgtcacctggctccctgggggcaggggcatctgagatgggttcatggagcaaatagccaggcagagacctggatgtgagtggccactgtcttccaagctgggcacacaacaggtccttgggacaggaagcactgagtccagaggcctggcaagggacaggaggggcaggagaagcaggggtctacaggtggctctggtggcagctcagggggaggcaggcagaaaacatctgatgcacagaacagaacatgcccagggcccaagagtgggaaaacagcacccagaactccaccttctgactcctagtccagtgctcccttccaaagatgctaagctgcaacaagttccaaggaagctgcccagggcgaagtccaggtcaggaggttctgaccctgtgcaggagggcaggtaggaggcggctgactgagtgcacagtgtcgtccaggagtggaaagagatggtcttgtccccagaccccagagcaaggaacaccattgtaagaggagggagcagcttccactgtgacggtgggtgaccagggggctggcacaggatggccaaataagcccagcactggggggccagtgcttcaggggaacaagccagagagagaagggagttcaagggacctcatgtccacctggttcaaggtcacacgcctgccctggcctctacacaaaggagcctcctgtaggtcccagcccttccatgtttatggctaaatgtgctgtgtcttggagcagctggaaccccaggtggaccctgagagagctacctgccagcatgttccttcagctcgagtttggagtccagccctggaggctgcgcacctcctcccaaatgcaggcttgtggctctggaagctgccactggggtcaaaatggcatcttaggttctggcagattgggccaatctcagggttgaccctggggtacagatacctgagaatcagcaaaatccagctcaatcttttctcctttgttatttcttaaaataatcttgtactaaatcccaaagcaagcgaacccatgaattgattattcactgctgccatttgcatcagtttaaaagcaggacggctctgagggcaggtattaaagaaatagaggccaggcccggcgcctcctgcctataatcccagcccttcggggaggactgcctgaggccaggagtttgagactggcctgggcaacataccgagaccctgtctttaaaaaaaaaaaaaggccagccacggtggctcacgcctgtaatcctagcactttgggaggctgaggcgggcggatcacgaggtcaggagatcgagaccatcctggctaatacggtgacaccccgtctctactaaaaatacaaaaaaaattagccgggcgtgatggcgggcgcctatagtcccagctactcaggaggctcaggcaggagaatggtgtgaacccaggaggcggagcttgaagtgagccgaaattgcgtcactgcactccagcctaggcgacagagcgagactctgtctcaaaaaaaaaaaaaaaaaaaaaattagctgggcaaggtggagcacctgtagtcccacctactcaggaggctgaagcagaaagattgcttgagcccaggctgcaattagctggggacccatcgttgcactccagcctgcgtgatacagcaagaccctgtctcaaaaaaaaccaaaacacaaaacaaggccgggcatggtggctcatgcctgtaatcccagcactttgggaggccgagcagggcggatcacgaggtcaggagatcgagaccatcctggccaacatggtgaaatcccgtctctactaaaaatacaaaaattagctggctgtggtggtgcgtgcctgtaatcccagctattcgggaggctgaggcaggagaatcacttgaaccaaggagtcggaggttacagtgaggcgagatcgcgccactgtactccagcctggcgacagagcaagactcgtctcaaaaaaaaaaaaaaaaaaaaaaaaaaaaaatcaaacaaacacaaaaaaccacccaactacaaattaggcatcctcccacttggtcttttttcagattcattttggcttaatggtgccttccccattttaaaagcggtcttttactcatagtgccccagccttttgaaggcacaggaacaggagctgggctaccaccttcaagggctgtcaaagatggtgaggtctgaagccaaaggcaagcacaccaaactccatgggggctgaatgctgtggtctgtagtgtctgtgcttctgcagagttagcctggtcccagaaagagggcatgtgcatgctggagtgaagagctgaatttgatttccaagcccctggctgggggtccagagggagggcaggggccacctcctgccggctccctgctattgttgctcagggccggccgtcttggtggtcaccagttcagtggagcccagctctgtggctggcacagggacactgtggccaggtggggtggttcctgggtcttccccaggaggaggccaggcaggagctgtggcatcagagattcccggagacagaatgatgaccttgtccaggggctctggggctgcaggcagagggggtagaggctccgtactcagtcacagccttccctccctcccctagaagactcctctggaggggcagtcctccgtcaaatgaagcccaatgcagggtggggaggggtggcacctggctgaccctgagtccagaggcctggccagtggggagctggcagggcagggagttggggagctggggctcagtctggcaaactcttcagggatttatgggggaaccaagctccgttagactcccaaagggcaggacagactcctccctcagacggggcccccttcctgcaacctgtctcttcctcacactggggtctgtcagggcagagctgttcctggctccgaccagggtctcaggggcaggactatgtctccctccccagcctgagctcctcagcgcaaactcttttccactctgtctccgtttccccttaaagcccttctctccccctcaggggccatgcatctccccctagaccgtcccgacaccccagcccctgcgccccgctcagactggttcccctacacacggaactcaccgtccttgtctccgtcgggggcctctgcggaggacgcgccgcgaagccgccgctgtcgccgcctccagctcaccagacccaccaggaccagcgccaggaccagtgccaggcccagcagcgcgggggcgccaaagagcagcccgggcaggggcagcgccgcctcgccggcccccgcgcccaccgactcctgcggctgcagcgccgtcctgggcgcagggctgctggccccggctgcttcgggaggggacagggagggaggccagggggccgaggggagggaggagcggggacggggaggggcggaggggggcgaggctggccggggaggggagggacagccggggggcggtggacaaggggagggagagaggcggcggtgagggccacgcggtgatcgcgggcccctccaggccctgcccacagggtcctttcagccctcggcgcccccgggggtcggggctctgcctgcgccctggcgatcggggccccgttctccccgcagctgccggcgccgcgcgccccgtgggtcccccttacccggtttcggccgcggcgtgcgcaggagcccgcaggccacgcagtggcggaccagcaggtcgaagcactcggccgggacgcagggcgtgggggctggcgcgtccctgccccgcaggctccggggccctcgcctcatggtgccgacgccgccgcacaagctgcggggactgaggctgagctgggctccggggccctcggggaggaagcggggggcggggggagcactctgccctgccccgcccccgcctgctgggtgggaccgagctcgcctggggcccccctttcttttctttttttttttttgagacggagtctcgctctgtcgcccaggctggagtgcaatggcgctatctcggctcactgcaagctctgcctcccgggttcaaacaattctctgcctcagcctcccgagtagctgagattgtaggcgcccactgccacgcccggctaatttttgtatttttagtagagacggggtttcaccatcttggtcagactggttttgaactcctgacctcgtgatccacctgcctcggcctcccaaagtgctaggattacaggcgtgagccaccgcacccggcctggcctctctttctacctgtggttccccaattcagcccctcaaccagcaccgcctgggtgggccctctgctgggtgctgggaggtgtctgggggcagaccagagcctcctcttgggtagggagggggatggaccccgcagccaggacacagaccctgagtggttcctctgctccgtctagccaaagcctctccatgaccccgagtgctcccctgccatctcccccaacccacctgtctcctcctctcttcctgcccttcctggacagagctggttggggatatcagacacctgctttttttttttttttttttgaaaaagagtctggctctgtgcagtggtgcaatctcggctcactgcaacctctgcctcccagattcaagcgattctcctgcctcagcctcccgagtaactgggattacaggcatgcaccaccatgcccggctaatttttgtatttttagtagaggtggggtttcaccatttggccaggctggtctcgaactcctgacctcaggtgatccgccctcctcggcctcccaaagtgctgggattataggtgtgaagccacagtgcccagcctgacatcagacacttgtaccaggcccaagtagcatgtgggtctgccctgagggaatctcacacttgtgctgatgggggaagacagcctcgcagcaagggcaccagctcacgtcatcctggaaggtgggccggaaggcttcatggagagggcgatggtgaagtgtttgccagatggactgaggtctagggagcagatgggggtgaaggccaaaggggagcaaaggcttggaggcccaaacaggaagtccagggagtgctgggaccgaaaggctggactggggccttatctagcacattagggagcttggactgtggctgggggacacgagggagccactggggctttgtgcagggaggacccaggaagatctgcctatgagtgagggaactgtgactgcagtggagggaagcccgcccacacctgctccttttctccagggctatgtgtcctctcctgctcacctctgtgtctcactgcgggcccctcctgtctatctctgctccccagtgtttggggtccccaactgtctgtcacccgtgtctctctcagactgcgtctcagaaacacacacaagcccctccgccctcctggtcacatgctaccccctccccagggccagggctggagggaactctgggagctcagggctcagcagagagcatggggttaaatgccacacatgccacccagacccctaagcactcagggctggggaagcacagtgagaggagaaactcaggggctggggagggagcctgggggcagagggagaccctgagcagcagcgagggggaggcaaacactccaggcggagggctgcaggggctaaggcttggagagatgaaaggggagcctgagctgctctgggggcaggcatggccactgccacaggggatgctgggagggaggagggagcatccgggctgcggatgggcagggcaccagtcccggggcagtacagaacctgggggtgtctgggtaggagggagattctgagctgtacctgcaagggtccctctctctggcactgtggcccacgtccagggcaggtggcccagggcaggggatgatgcagcggctggccatggagtgaggggagcaaggccgacccccaggtttccagcttgggagaccctgaaggttcacaaagaaccccagtcagccagccctgactggtgggcgctggcccaccctctccatcccctgtacatgggccagcagctcccaggcaggaaggtgtgggcggaggggagctgcaaaggagaagtggggctgggggcaggtgtgggtgagcgtgggtgtatggtgatgtgggggtgggggcaggtgtgggtgagcgtgggtgtacggtacagggatgggggacaggaccctggaggggagccagggcagggaaggcctctctgtgaggcagagaggtggggacaaagccagaagactgagccataaccctgccacccacatacacgtccatccatgttggtgctggtattacccattagtgagggctgcagaggcctgactgagtaccaggcagctcatttagcccttgtgccagccatgtgggcagactgaggcttgtgggaacccaggaacggggaacctgtccctggagagggtggcccagtgaggccagagtcgggagaatttacaggagttaggaggagggggtccgcctgccccaggtctgcgtttcacagcagaagcactggctgctctgacccccagcagagactcgaggagactgctctcaaggccagagagagtgggagggctggagcccactgtcagagttccagggtcccttaccttggccagagagggaggccagctgctaagagcagcagacacaaatgagacacccactcatgtgacacaaatgtttgctgggcgctccctatgtgctgggccaggtgccgggacaaaaggcctgcgggattcgtgtctgtgttgtgtgcaggtgcctggcctcacatgaacctttccacttgggcctcctaaatggggtgggggtggggggctgcagcaggccctgtgtcgctacttggatgacaaaacagttaagaagaattcacaatcagaccaatgtggggaatgttagtttactcctcaatgtattcttatttccccgtggcttttttttttttttttttttttttttgagacggagtctctctctgtcgcccaggctggagtgcagtggcgcaatctccgctcactgcaagctccgcctcccaggttcacgccattctcctgcctcagcctcccgagtagctgggactacaggcgcccgccaccatgcccggcaaattttttgtatttttagtagagacggggtttcaccgttagccaggatggtcttgatctcctcacctcgagatctgcccgcctcgccctcccaaagtgatgggattacagacgtgagccaccgcgtcccttttttttttgagacggagtctggctctgtcacccaggctggagtgcagtggcgtgatctcggctcactgcagcctctgcctcctgggttcaagccattctcctgcctcagcctcccacgtagctgggactacaggcacgggccaccatgcctggctaaatttttttgtatttttagtagaaatggggtttcaccatgctagccaggctggtcttgaactcctgacctcaagtgatccacccaccttggccaacacgcctggcctaatttcttttctttttttttgagatggagtttcactcttatcgcccaggctggaatacagcagtgcgataagcaacacccaactcagctcactgcaacacccaactcccaggttcaagcgattctcctgcctcagcctcctgagtacgtgggattacaggcacctgccaccaggcccggctaattttttgtatttttaggagaggtggggtttcgccatgttggggaggctagtctcaaactcctgacctcaggtgatctgcccactttggcctcccaaagtgctgggattacaggcatgagccaccactcctggcctaatttctttattcaagtcttttttttttttttttgagatggagtctcgctctgttgcccaggctggaatgcaatggcacgatcttggctcactgcaacctccacctcctgggttcaagcgattctcgtgcctcagccaccccagtagctcggataacaggcacgtgccaccatgcccagctaacttttgcattttagtagagacggggcttcaccatgttggccaggctggtctcgaactcctggtctcaagcgacctgcgcgcctcggcctcccaaagtgctgggattacaggcgtgagccactgcacccggccaccatgctctacttttaattcactgaatactctttttaaaaagataatttgggcctggtgtggtggctcatgcctgtaatcccaacactttgggagaccgaggcgggtggatcaccagaagtcaggagtttgagaccagcctggccaacatggtgaaaccctctctctataagaaatttaaaaaaaaaaaaaaattagccgggtgtcgtagctggcgcctgtaatcccagctacttgggaggctgaggcaggaagaattgtttgaacccggaagccagaggttacagtgagctgaggtcgtgccactgcactccagcctggctgacagagcgagaccccatctcagaaaaaaaaaaaataataataaaataacaagatagtttggggtcttcagagagaagggggtttctgtcgatttttgtgccccaattctcctgaagacaccctcacaaggatctgatgcaggtactattaggacattttccagatgagaaaacagaggctttaaggggcaagggccctctcaagatgagccagcagatgggaggggcctgcagggggtctgtgtccacctgactgtgaagcgtggcctgggccctacatgcttcagggacggggttggggaaagtgagagcactctggggatgggacaagcacagtgtcatggggagcagtccttggggacagagaggcccagtcccccagatctggatgtgaaactgctctggggcctgggatgcactctgtacttcaaaatcagttttcgttgtaattatgcagtagtacctgaacacgtgctcaggaaaaacctgcaaacaatacagaagtctatgagtgacaaagggcgtttccccacggtccccagagggagtctctgttttcccttgggagcctttcttcactgcctggttctgtgcctttgccccctcgtgtaggtgtacacacaaacagcttttcccgtgttccaggaatggggtcagcagtggagatggctctgctggctgggttgggcctgcagggcttcgagtcagctctcttggctccattttgtctcatgacagcgccaggaccaccccttgtggttatttcctttcccttctcctgtatttaaaagcccccacaaacaagtacaatgctacagagtacctcttgctggggccaggggaaaggatgcagtgccgtgggcctcggttcattgggagagggcagagtggccacggaatcagcacaaagtcctggcgagtccagagcagtgtgacccagaggcagaggcctgggagtccccagatcccgttcctccccgaacccacaccaggggagggcaggtcacgcccttccatgaagcagtcacaaatccttgcctgggtcttcatgggctggagctgcctgtcatccagcccgccactccatgcacacgtgcgcacacacgcgcgctcctgcactccacagggtctggccagggcaccccagccactctcagcatggccccgggatagaggacatgggccctccatgtgagactagagggcagaccacagccctttagccacagggagcaaagcccccacctcttgggggccaggtgtgtgaagtagagggaggctgtaaggccagggtaggcaagggggagaggaacgggggcccccagggccaacctcccaggccttattcagggtaccacgcaggaaggcccttgtgaacgcagaggccgacccctgcgcggatgcctccccgtcactcgccactcactcacttagcacctaccaggcaccaggagctgttttgggttctggggaaatagcagggaagcagagaggaaacccaaatgggacacaacgtagtgggtggggaggtaaggagtgctggggagaaaaagtcagaagggcagggtgctcgagggttatgggtgcaatttcaaacaggggagtcagagaaggcctggtggatggtgacctcggaacagaggacagggtggagcgatccccaaggatgtctgggggaagcagagaaggcccagtgaccaggaaaagggctgtgcgcaaagcatctccctacccggccgtctcctccctcagccctgtgtggggctagcacgactggtcccactttacaaagagggaaagcaggctagagtaaaggggcccgccaggcagcccctgagcctgccacactacacacatcagtggggtcctcttcccgtgtgcggacagcggcagggagagggggtgggggtgggggtgaggcccaggggtctgtgtcctcacagggaggctggccaagcatattggaggaggagggctgggggaccccttgggcctggccagctcgcaggggccccaagttcggctggcataccctttgatggaagagggcggtccagggaaggctgcctcctgtgcaggtccggggctctgggaagtacctacccactctccccagggagctgccctcagcagcccccagtccacagcatcccatactcaggtgggacccgcagacttagggtacacagcctggcagcccaccccactgtctccctcagcccccaagtgtgagacattctttcacagagactctctgcctgtgtccttctgaccccagggtacactggaggggaggggctaagccaacagaaccttccagaaaacgtccctttgtgctcgagccctgccagcaggcctggcccagcacccctgatgcgtgtgggttgggggcaactgtaacagggccttgtctcaagaaccccacggctctcctcgcccaccagcctgccagcccgtaccgagccactgtctgtagagggtggaagggctggcatggagtcaggctcttcagtttctctccaagcctcacaagacctgaaaaggggggcaggcagtggggcttggagagggaagtgggctgccccaagtcacactgcagatcagccacagaccccaagtcggtgggactcggaggctgctcctgttcccactgcaccacttcccctctgcagctgggctgctcctgcctctgctcaccgggggtgcaggagacacggggcccaggctgcagagcccctccttgctaggaaggtcctgcctccttggtagggatgggaaacaccatcagattgaggccaggacactcgggcctggaccactggccatggagaacgtgaactccctggggtcccaaggactgctcacagccaggtggaatgagggggacaaatgagtgtgtgactccgagtaagctctactcctctaagagtggggcccaaacaccaccttccttccagcttataagagcacggacggggcagcttccaggcccagctgaagaggcgccgcttccagtagccttcgcccccccattcccagcctgtaggcctagggggttcttgcccgccttcaacatcctgcaatgaccacgtcatgaccatggccaccctgaggcatctgacatttgtttaaagctttatgttcaaaataatgggcttgaggccagcaatttgagaccagcctgggcagcatagcaagaccccatctctaaataaatacataaaatagtggcttcttcattgccagtcctcaactagctaggaagaaaggcatcggttagcctggcgccacgctacagctgaggaactgaggcttgccgagggtgagtgacctgcctgaggtcacgccaccaagcaagcagccaagcccagcctctcccatctccctccaccttacctcagtaccaagccccaattccggcacacactgatcttccattacttccctcagccaaactgtctcctggacaatgtcactgggtctccagatggcgtgaagcaaccccactctctggccacccatcccccgccttccagggacagcaggtctgagggcacctgcctgccatttaagtgtggctcagctctgctgtgaggcaggggcaggccagcccccaactctagaggggaggcctcctggttccagggcccctgccaagctcagctgggagctggcggcagtgacagcactgtgttccccagtgcttggaaggttcccagactcttggctggagaatgcgatgccacttctcttgttaaatggtaccaggtggcaaggaaaatgtggcacagggacctgagagaggtgccccatgcgggcatgggggggagggggtgtgggggaaggcctctcctcctggtcgccagcaaaaagtgacatcccagatcaggcaggctgcatccacaccgccttcctcccctgcttggacacccattccatcagccccgccaaagacctactctaccctccagttaccctgcaaagacacgcattctggccaaggacagaagggccaaagacaaggtcactctctgggaaggctggccttccgggctctgctgctactgcccatcccttcagggaccaaagtgaaggttcacctccagcctcttccttctgccctggagcctcccctcctcaagcagaggctggcttccccgaccaagtgcccgaggggctttttgctgcgggcgaaggcctgctcaggcccagagcctgcaccactctgctcccacgctaagggcctctgccctcgggcctatcctgccaccccctgccctctcgcgatgctgtgttctagtggtcccatcctgaggcaggaaccatggcttgcagactgctgctttctggagcacacgggctgtctccaccttctgtattccagctcagggcctggccagtggagatgcccaaatcttttttttttttttttgagatggagtctctctgtcacccaggctggagtgcagtggtgcaatctcagctcactgcaacctctgcctcctggtttcaagtgattctcctgcctcagcctcccaagtagctgggattacaggcgcatggcaccatgctcggctaattttgtatttttagtaaaggcggggtttcaccgtgttactcaggctggtctcgaactcctgacctcaagtgatctgcccaccgtggcctcccaaagtgttgggattacaggcgtgagccactgcgcctggcctccaaacctttcttcaaggattaggcaggcacacagaaaaactggagagaagcagagtggggctggctctgctgccagttagctgtgtgactgtgacacacctcccatgacaacggtctgtttcatgaactgtgaattggggaaacatcatctacctcacaggtctgctgtgtgagaagagctctgtgaagcatgacgtgcctgcaaatgtcgggtgacatgtggggcctcgaccggaatctacgtggctgaagtcctcagcggagcccaagggactgccaggaagtcagccaggtgtctacaaacccttactgagcactaggggtggggcctgagctaagttccagaaggaacctacagaaaggggcagatagggccgcatccccgacacctacaaggagttagaaggcggcccacccctcagtgaagggcatgggcccagctgcgatggtgacatcaaagcagagaggccttaggccggccgcggtgactctcacacctgtaatcccagcactttgggaggccaagggtggcagatcacgtgaggtcaggagtttgagaccagcctggccaacatggcgaaacctgtgtctactaaaaatacaaaaattagctgggcatggtggcgtgcacctgtaatctcagctgctcgggaggctgaggcaggagaatcacttgaaccagggagcagaggctgcagtgagttgagatcacgccactgcactccagcctgggcgacagagcaagactccacaccccaccaaccaaaaaaaaagaaaaaagcagacaggccccgaggtgctggtgcagtgctgcccagggcttcaactggggtccatcctgaggcctgaggctggtgggcatgccctggcacatgcagggtgaatgtggggagggcactgtcatgttccaagggagtcaggacctggctctctatgggatttctagagtccacttctgatgcctctacaatctccaattagacccaagggagaaggaaagcaactggcactgtacaatctctcgccatcaaccccaaaatgagacctccagccagcttttctcacttcttgcaaacttctgacagtggtgtaattcctaatttgcaccagtttttgaactccgctgtgtgatttcttttttggagatagagtctcgctccgctgcctgggctgaagtgcagtggtacgatctcagctcactgcaacctccgcctcctgggttcaagcaattttcctgcctcagcctcccaagtagctgggactataggcacagactgccatgcccggctaattttctgtattttagtggagacggggtttcaccgtgttgccaggccagccacaaactcctgagctcaggcaatccgcccgcctcggctttccatgtgatttcaaatagttactgttcactgagtgcctacctagcaaggtgcaaggcattaacacatgttatgaacacagcaacctactcgcaggcatggggggtcacacagtcccaggcatgtccatcgtctcattcaatcctcccaacgtgacaaggtgagcagaacctcatctccattcacatctgagaaaacaagctccaagaggcaacaaccaggttctataatagcagggccaggatgtggagtctgactggcataacgagtccaagctccccttaccccgccccactcctttttttttctttgagacagagtctcgctctgtcgcccaggctggagtgcagtggcgcgatctcagcttactgcaagctccgcctcccaggttcatgccggtcttctgcctcagcctcccaagtagctaggactacagatgcccgccaccatgcctggctaatttgtttgtatttttagtagaggcagagtttcactgttagccaggatggtctcgatctcctgaccttgtgatctgcccgcctcggcctcccaaagtgctggaattataggtgggaaccaccgcgcccagcattttttttttttttttttgagacggagtctcgctctgttgcccaggctggagtgcagtggtgtaatctcggttcaacaccacctccgcctcccaggttcaagtgattctcctgcttcagcctcccgagtagttgagactacaggcctgcatcaccatgcctggctaatttttgtatttttagtagagacagggtttcactatgttggccaggctggtctcgcttttttttttttttttttttgaggtggagtctcactgtgttgcccaggctggagtgcagtggcacagtctcagctcactgcaacctccgcctcccgggttcaagtgattctcctgcctcagcctcctgagtagctgggactacaggcgcccaccaccacatctggctaatttttgtatttttgtagagacagggatacaccatgttggccaggatggtctcgaattcctgacttcaagtgatccacccacctcggcctcccaaagtgctgggattacaggcgtgagcctctgcacctggcccaccctgccctactcttaattgttctgagtcagtttcctcatctacaaagtcaaagtggtgaatgagaccagtgatttttaaactttttttagccacagaccttttgttcaaaggaaaccttaaatggagatgtaacacgccagctgcttaaagacacaggctctgcaagagtgagtgtgggagtgggagggggctacagtctcgccagctgggccccctcgctgcttctgcccagctctccctgctgcagcactggcactgcagggaaccttcccagccacggcgggctgagcctgggcctgtcaagccctgactggacatcctcaacagagaatgtttatggagtcagcacgaagccatgagaaggggcagcccaggggccagccaccctcacaggtcctccagggaggggccctcagagcttctcagcagggacagcaggttcagagctgagacaccgggcacgtggccagcacagatctgcagcacgcgcaccaggcgctgcgccatggtggccctaaagccttccacctgcggggagagcagagaacagcagtgagatagaatgctggccctgctcccttacccagagcagctgcaggggctgccagagcagggctgggggcggatacttgggggtagctcaggtcaccactgcccaccacagccacgccctcattcatgccacacctcagagtagcttccaactgcctcagcttgcccaatccttcaaacaacctccggagacatccagagcctgacctcctgctcaagaggaaatgaaggcttaacaaggctggctaggtcgaacaaactgtctagggtcacccagctagtgactccagagctgagctctgaatcagggctacttccaaccaatgcccaggcagctcgggccccagatgctcaagaccagggagcagaagatacagggataggaaggagggaggggcagcgggtggccctcaccacagataagaaggtgccatcaaaaaggaatgggcccaggggagctgtggggccagagagggacaagactgctctaggcccgggcacagatgttctagacacgtccgctggaagaacacgatgctgcccagtgtctgtctcaaaaaagaaagaaaaagaaagaaaaagaaagaaaaagaaagaaaaagaaagaaagaaagaaagaaaaagaaagaaagaaagaaagaaagaaagaaagaaagaaaaagaaagaaagaaagaaagaaagaaagagcctccagacctgtctctctatttctgccctagtttcccttcagtccactctcctcccggcagccagaggggtccatttaaaacccaagtcaggccacatccctccctggccccaagccctccagcagctccccaccaggctccactgatccagccccaccattcctgatttctccaccccaacccgccctttgctattgtgctgcagccacccaggcctgcctgccagaccttgagcacaccaggcaagtcccacactcggcccatgcacttgctgttcctccttccacgaggtatctccgtggcctgcctgcctacttccttcaggtctttatttatttagaagtcctgtttgcaggggcgttccctggttaccctgcctaactcttgcctgtttaccaccacctgacacgccacgcctccactttccagcacgtcatttaccccatttgtttccttgactagaacaaagctggggctttttttgttttgttttgagacagagtctcgctttgtcacccaggctggagtgcagtggcaccatcttggctcactgcaatctctgcctcccaggttcaagcgattcttgtgcttcagccccctgagtagctgggattacaggtgtgtgccaccatgcccagctaatttctgtatttttagtaaagactgggtttcaccatgttggccaggctggtctcaaactcctgacctcaggtgatccttccacctcggcctccctaggattacaggtgtgagctaccgtgcccagcaggaagctggggtttttgactcttttgttctgtgctgtgtccctggagcctagaacagtggtcggtaccacagaaactcaggaagtatttttttaataagtcctctaagtttggtggcctttgttcctgaaatctatctctaggctgctgaggcttgggttccacaacctgcctcctgcagcagcctcgacccagcctcctgcctctggccaggcttcctccaatccacatcactccagagacgtgacccaaatgcccaggtctgaccacaatcatgactttgctcatgacatccaagaagaaatgacctaattctaccaccaggctcccagagctcagcaaatccttctgctgttgcttatgttacatgtctgcttatttcatgagattctgagagggcagggccaatatctgactcatttgtgttcccagggcccagcacagagccctaccagcagacctaggcaattatttcactgggccaatcacataccttcctgtgtttcctcatcaatggaacggggccggtaattcctgccacgcaaaggcctcaagatatatggtggggcttaaactcaattatgcagaagagtgttctgaagaggacaacaccagcatgaagaaggaggccagttcaaaccctgggtgctccatctgagggatgcaggcctatgtcctgagcaggcatttctgcagctcctgctgcggcgggaaccaggctgggacctcctgcttcctgcccaggccaagagagaacccaggacctggcctggcctgccacctcatggccacagacagaattacaccacttgtcacagggtgagtaggcaccactgtcccccaccagcacctgaactatggagcaaagatcgtgactcccctttagagatgcttcgtggcagacaaagtgacctattcaaagtcacacggtcagcaggctaggacagcagaacagctggctctacccctcactcacgagctgtctgaccctgagcaagtcgcctgttctctctgggaggaaagcctggcggggcaggcacttcaggtgtgcccaggcctcagggtcccatctgtgagatcagagtgctgatctggtcaggggctcaaaaagtagtcatcaactaggaaatcaaatgcgtgatagagtcaagtgtgtatcatgatcgatgcatcgagcaaggggcaggcctaatggctgctgccacatgagacagtgatgagacctgcccaatcctaatgtgatatgaaaacatccccatttctactggcgacagccacagactgctatcctctgaattctgcccttagaccagaggagtgccctgacaccaggataagggaccctggtctagacagtggtgatggattggtggtcacagatcatgtgctgactcggttctccctgcatttcatcactttgctttcggtaacaggcacaagacccagaacagagcagaaacacaactcttcgaaatgtatctcaaaaccaataaacaggtttccaaaggaatggagcaggcctggcacatgggtgtggcagtgcgggccctgggacccctcagtagacccatcgcggggagcacatcaactcctgctgaggcctctttagcaaaaagtcatcaggatttatcctgcataaaaagcggctaaaggccaggctccgtggctcgctcctgtaatcccagcactttgggaggctaaagtgggaggatcgcttgaggccaggagttcaaaaccagtgtggggaacacagcaagacctcatcgctatattaaaaagtaaataaacagtggccgggtgcagtggctcatgcctgtaatcccagcactttgggaagccgaggcgggcggatcacgaggtcaggagattgagaccatcctggctaacacggtgaaaccccgtctctactaaaaaatacaaaaaattagctgggcgtggtggtgggtgccggtagtcccagctacttgggaggctgaggcaggagaatggcgtgaactcgggaggcagagcttgcagtgagccgagatcgcgccactgcattccagcctggacaacagagcaagactccatctcaaaaaaaaaaaaaaagtaaataaataaataaatacttagctaggtgcggtggtgcatgcttgtagtcctagttactcagtaggctgaggtgggaggttcacttgagcccaggagctcaagtctgcagtgagccatgagtacaccactgcaatccagcctgggcaacagagcaagaccttatctaaaacaataacgacaacaacaacaacaacaaaaaggctactttcctacccctcgtggttagtttcaccttgtgagaaacaccaacaggatccagttggggcagaattccctacatatgcatccaaccatctacccacctacccaacaaacatccctattgcctgctgggtaccctagcttggggtgggacgagacaagatctgaaatcagagagttaaggggaaatcaggcattctgactcccagaggacacaaggatgcaccagttaaagagacggacatacgcttggcctcacaatcacttacaccccagcaggagagtggactcacaaatacatacacataagacttagttataactgagtatgcagaaactcagcaaaagcaaaagcagggcagcacgtgctagagcctggcatataagatgcactccagatgaaagcacatcatcctcacttcacacctgtgtaccccaaggctcagggtgacctgcccaggtcatagccagtgagtagaaaagccactcaaaccaggatcctgtgtctccctccccttcaggagctgcctcgctcggatactaagtccttcgataagcattcccaatgtgcccactgtgtgctgaccaccctttccccgcacccgagtatagtgttggtctctgtgatcagcatgctcacctccaggtcacagtagagcagggggctttgataggtgtgggccagcttcaccacggtgtgccggtgaatgctgcagtggctctcccgcccagctggaaagaagccatgagtgctatagctgcaatctctaccttcctggctggaattcaggaagtgctgggcagagtcactcacttccccactctggggctcagtttctttctagtcgcgagggtgacagtcctattctactttcttttctaggtagtcaagaatatcaaattagacaatgaagataataatagctcctaccccactgagtcactctagagtcagtgagttgacatctagaaattacttggcctgcatttgctcaccaatgcttcttgagaattatctgtgccaggcactctgctcaaggagctaacagttcagctgggaaggcagacaggtcagacacctcatgcatgccggagtgacactggggctgagttttgaggtatttgtaggggttagcaagacaaagaagaggaaatgtatttgacagaagcctagagtaaacaaaaagaggacggccgggtgcggtggctcaggcctgtaatcccagcactatctgaggcaggcggatacctgaggtcaggagttcaagaccagcctggccaacatggtgaaaccccatctctactaaaatacaaaaattagctgggcatgatggcgggtgcctgtaatcccagctactcgggaggctgagatgggagaattgcttgaaccagggagacggtggttgcggtgagctgagatcacgccatagcactccagcctgggcggctgagcgagactccgtctcaaaaaaaaaaaaaaaaaaaagggacgggccctgtaacaggacttacctaggtgtaaaccttggctctaccacttttcatctaggggcctggggcaacttaacctcatgactgtaaaacagaggtaataacacctacctccaataggaatatgaaaacaaagcaattaccgtgtctgcctcacagtgacagctcaaaagatgtcagccattattattttcactgttaatattacaaagtctcaggaacagcaggactttttcagagaacgataagctgacccagagaaggagagtcaccggagatgagactagctcagaaggcagaggccaaactgcaaagtgttttatgtctttagagtttggattttaccgaaagccacaggcaaccactaggcaactccaagtaatggcagagttatctgctcatattcactcttagaaaggctgacaacaggtcagattccaaagtatgtgtatatgtgttctttcggtttttaaatttaacttttattttaagttcaggggtacatgtgcagatttgttatgtagttaaaacttgtgtcatggggtttgttgtacagatcattgtcacccaggtattaagcctagtacccattagttatttttccagatcttctccttcttcctgccctccaccctccgataggccccagtgtgtgtaaaatacatgctctttccatcacccagggtgcctcagcaagaagcctacggccgccccagctttcccttggctgggggtgggcagtaacaggcgaggaacgtacttaccacctgtggcgaggaaacacaccttccccaagaagaagctggcatccacatggcgcagggactcctctgtgttctggagactggggtggccaggccagggtgagaaaacaaaccagagaacaaaactttacaacggagaaagcagaagtccttgcttctctgatcctagaggccagagaatgacaagagggtgactttctctggagaaatatttgtcctttaattttttttttttttttttttttagatggagtttcactttgttgcccaggctggagtgcagtagcgcgatcttggctcactgcaacctctgcctcctgggttcaaatgattctcctgcctcagcctcccgagtagctgggactacaggtacatgccaccacgcctggctaatttttgtattttagtagagacggggtttcaccatgttgcccaggctggtctcgggcaatctgcccaccttggcctcccaaagtgctgggattacaggtgtgagccattgtgcccggccgttgtgtattttaaacattgtgcactgaccactggctcctctctcctcaccttacagattgacctcagccagcctctcccatcctcaccacttcccatcacaagttaggtcaccgtctcagcacagtcctgagccaggcctgcctgagccctgactgccccttcctctggctctcacctgtatttgctgtgaagattaaccacaaacacgatcaggtcaattcggggccgattcacactggagggcaaagggagggactttgccaagtggctgaaaaacaggaaattgcaggactcaagatatccgtacccccctcatagcgaccgtttaaatgctgcccttcatgtggaaagaggccgtcaagggctccccacctcatcctagccacccgaggctcttgtggccacgactccttgggccagcacagaggcaggacaggtccggtcctattcagattactcctgtctgattccctctgccagaaacgggctctgtttagtcaccacctcggcaaggggaggttgggatataagacggcatgggactagccagctacgctgcatgctgggagaaggaccagcctcagaggagggggcgctgggcttcggagtttagcagctaggaccgaatccctctggagtgagagacacgtgggcccaggccacagccgcggctacttacaccttcagctcggaggcgcagtcctctttgagcatcgagtccgccagctgctgcagaagagcatcctccgtgcccaccagctgcgcagggagagagagcggacagtcgagccctaggcacagcaccccctggggagggcctggcccttcgacccactcccggggggatcgggacaccgccagcaggcggctcggaggacatttcccgagaagtggaccccgcgaagcggcacgggctgggggcctgaggtttggacccgctgcaggcctgtgggcaccgcactctctactacccgaccctcgctcccaccgccggcctctccaggaggccagacccccagacgcgggaaaaccaattccaggcgcgggaactcgccaatcagaagctgggaaagggtccgccgagcacctattggtgggtgcgtccctcaacctcagagagcggctactccaattggttcagagcatggctctccgcctattccccgcccccgccacggtagcgcgcgctggcttggcgcctcagagagctcagttgacctagtggctgaagcaccgcccaggaggaaaaaccggcgggggaagcagggccgcctgcacctaccaagatggtggccgtgttcaggccgggcagcttgtccaggggcctcaacaccgacatcacagccgcaggaccaaccgttgctcctgcggtgcgcgccgatctttcaaaccgccctgagtccagcccctagagcgcggcctgggggcacgtgcctccttataggcggggcttcgcgggacgggacggggcctcttaaaggaaccgaacctttatctccttttctgaggggcgttccagcgctacccgtggaacacgtggtggacaggcctttggttccacgctccacagtaagcaggtttttagtgattcctttgttcactttcattcattcatgctcatacacagtactttttttttttttttttgagacagagtctcgctttgtggcccaggctggagtgcaatgcgcgcaatctcggctcactgcaacttctgcctcccgagtttaagcgattctcctgcctcagcctcccaaggagctgggactacgggcgcgcgtcaccacgcccgacttatttttttatttttagtagagacggggtttctccaagttgcccaggccggtctcaaactcctggcctcaagtgatcccgcctcggcctcccaaagtgagtgctgagattacagacgtgagccaccgtgcctggccctttttttttttttttttttggagcgtcactttgttgcccaggctggactatagtgacacgatcatagctcactacagcttcaaactcctgggctcaagtcatcttcctggcttagcctcctgagtagctggaactacaggcaagtgccaccatggggatctggccatgttgcccaggtgggtcgtaaactcctggcctcaagcagccctcctgcttcagcctcctgagtagctgggactaccgctgcacaccagcaggccctgccaattgactgcttttacagtgagtggtaagcatgctgttctttgtccaatgggagactttacctcatctttcaaggttccttgctgcaaacacagcctgagtacagagctgtcagggtcttgctttcttgacatacccagcaagaacatgcagggacgctcagggcccatagcaaactggttctgccaacagttatataataacttgttcactgtctctacatctaaaatgtaagaaacaagaggttagagactttgtcactttgtatgtccagcactctaaaagtccctggtacatcgtagttaataaatatttgttgagtgaatggatggattacattcatccattcattctcagcagtcattcattcatcatttcctatgcccagacccaatgccctaccctaggaagtcagttgaatcagacattattgattaacttagtttgatgggggtgggatagacaatgataacagtgtgttcattgttgtaataactgggagagcagagacactgtctagcctaaatccttcttactgcagactaaactaactgtgtcttgctcagaaagatcaggacgtaaatggccccatagagccactgccctcagcacagatacggctttcattcctcatggcatggggtgtggagaggacttcctgaaagtcaagcagtagtaggcactatgacaagaaaataaagtaagctgaacgccgtggctcatgcctataacccagcactttgggagaccgaggcgggtgaatcacttgaggccgggagtttgaggccagcctaggcaatatagtgagacctcatctctacaaaaaaatttttaaattagctgagcagggtgggcatggtggttcacgcatgtaatcccagcattttgggaggccgaggcgggcggatcacctgacatcaggagtttgagaccagcctgaccagcatggagaaaccctgtctgtactactaaaaatacaaaattagctgggcgtggtggtgcatgcctgtaatcccagctacttgggaggctgtggtaggagaatcgcttgaacttgggaggcagaggttgcagtgagctgagattatgccagtgtactctggcctgggcaacaagagcgaaactccatcacaaaaacaaaaaacaaacaaacaaattagccaggtatggtggcggtggcgggcgcctgtaataccacctactcgggaggctgaggcaggagaatcacttgaacctgggaggcggaggttgcagtgagctgagatcgcaccactgcactccagcctgggtgacatgtgagactccatctcaaaaaaaaaaaaatgaaagataaactaaagctgtctggcagaagagatggatgggaggaggctactttagagcagggaggcctccctaaggtgacatttgagcagatgcttgaattcagtgagagaggggccccttaagtatgatgaagaagaggcctcaggcagaaggcagtgcaagtggaaagcccctgagtgggaagcactcctggcacttccgaggcgtagcaaggaggccagtggctgtggcagatggagtaagaagaacaggggaggaggtgaggccacggaggtgattgagctcccagagactgaggcccttagagagtggtgggctgggaaaagactttggactctggtggggactttccaggaggggccgggctgagacccattgggtcagcatgtgctgagtgcctgccctggggaccctggtcccagaggggccaaactgcttcagggagttaccacttgtaacaagagacaaggcactgcagttggggaggccatcggggagcagccaggagcagcaggaacccaggggaagctgctctgtgtccctggggagcctgcactccacttcaccggggcggtgatcattggctgaacagaaagtagttgtgtttaagatccatacatgatgaagggtagggatggggaggaggccagatagaggcctggaggttcttacatcctgaacacccaagctggcagggtcatcagagtcctctgggccagcatttttcaaatcggcttctgtggagccctggggagatgacttggggtcctgtgagagacgggggattccgagtgggtggggtccagaacccccacccccacccaaccattgaaccgaagcaacctccactttatctctgttatgtattgagcttcccataagcttttgtatgaataaggaatcagtggctaaaacaatgccgacaggccatggatcacatactttacagatttattgaggcataagggacacgtataatcaactacacttatttcaagggtacaatttgataagtttgacatatgtatatacttaagaagccaccatcaccattaagagcctgaacataccttcaccccaaaaagtttactcctgcccctttgtgattcttcccccaactcctctgctctcccaccccaaaatgttaaaaagcactttggccaggtggtggctcacgcctgtaatcccagtactttgggaggctgaggcaggaggatagcttgaggccagaagttcaagaccggcttgggcaatatggcaaaatcttgtctctacaaaaagtacaaaaatcagctgggcatagtggcatgcatttgtggtccaagctactcgggaggctgaggtgggaggatcacctgagcccaggaggcagaggttgcagtgagccatgatcacaccactgtgctccagcctgagtgaaagagcaagaccttgtcttaaaaaacaaagcaaaaggccaggcgcagtggctcacgcctgtaatcccagcactttgggaggccgaggtgggcagatcatgaggtcagtagatcgagaccatcctggccaatatcgtaaacccgcctctactaaaatacaaaaaattagccgggcatggtggtgcccacctgtagtcccagctcctcggaaggctgaggcaggggaatcgcttgaacccgggaggtagaggttgcagtgagccgagattgcgccactgcactccagcctggcgaacacagcgagactccgtctcaaaaaaaacaaaccctctgtgaactcacagtcaccccccagtcccacatatgctggaaaggacctgtcatacctgaagagcccctagatggcgcagaggtgtctgtggtgggggacctaggtcctgaagccacctcacccagaggctttccccctgcccatccccaggtttctgggaacggattccctagggaggtggttcctggaagccttttcccagccacgccccgtgggccctagggggctgctctctccctcctgagaatagccctcaacacgtggcagataccttgtctatggcatagggggagggggaggatccatgcttgggaaggtggaccccacccccaacgtcagctcttggctttgaattccagctcagtcactgagaagctgagggctctgggagaaggagaaggccagcagcatcacctctctgcctcatcccaaaatggggtctcaacaccaatccagctgggaggactgcaggaagtgatgttggggccagctggaagatgggagtgctcaatgcctgtgctggctgtacaccagccaggggtgctgtggggtagatgaggcagaatggggagggggagccatttgcaagggtcctgaaagccaggctagggctctgaccctggcattgctactttcttgctgtgtgaccatgaataagaattaattgagttaatataatcaaagcgttgaaaacagtgtctggtgcataggaaatgttacattgagccaatgtgtctgaactctcagactcagtcttggtttttccttgtataacatatgacccccttgagctctactggtcactgattctctgtccccacccgcttgccatttaccccagcatctccctgctccccaaatggcagaccatcaaaccttagagttatcagccacggtcctctcctctctaggcccaccaggcttggggtcctgcagcctgctgggtgattccccctccccgcactcccccaatcctgccgctctgtcatctgctgtaccacgtgcacagtaccagggatccagaagagaaggctggttgccagggcaacggaagataaagcccttgctctgccaggctgctgattggctgagacaggtcccacctcctgccatcctgagagtgggggctagggggaagggtctctgatgggcagggagagataccagggtgctgagccagtccaggactgccccctcctggcccactcagagcccctgggtgtgagaagctcgtctcccgtgggttgcattggctctgccctatctctgcctccagcacccagggcggccgcagatggcagtgtctctggggacagcagctgcgaatgagtccacgggccaatgctgagctgctcaggctgaggcggtgtgctcagcacagagcccccggaactggcatctgcagggcgtgaggtgggtctttgggcacacggagggcaccgagtggtgccaatggcttgggaggtagggagaggggctctgcaaactcacactgtctcaggcagcacattggctgaaatgaggctggaaaattccatatagatcatctggtaaccccatccccaccctgtcaccgtgcacaggggaccgtgaggcccagagagggtgaagaaggggccaagataacacaggaggccagtgagtgtgttgcttttccacctaggtcagttccctgagaaatcaggaagagaccacggggtcctcagtcagcctcagaatgcctgggattttgtgcacagggctggagaggttgggggaccttgatctctattccacatcccccagcattgcagctgaaatggcttctgttctgccccagccctccattcgcatgtttaagctggaaggaaactgggggcctggctgggcctggatagggggcatgagtcaccttggacacagttaagtcacacagggagcagcctccctgcctgaggtgctccttccctaccttcaccaaccctggcagcaccagacaatcctgcactctctccagctccccagaaaggcagctggttaaaaggtgctgggtcctacacgctcccctgccctggctgcactagtcactttggataatcagtgcactcttcattttattccttcacaaatagggcactttaatacaatgtcggtgcctcagaacagccagtgaggacctttggggtaggagaggggctccggatggatgcaggaccaggaaacagcatctttccctcccctggggccacagcttccctcacaggcccacctgggagtagagagacaagaggagctggagtttggagacggaggtcagaagagtgagggcttctctccgacctacctggagttctttccatccatccccctgctttcctccccagaagcaaggtgggcatctgctcatttcatcctgctcaggtgcctttccctcccctggaggacgcaagcctcagggcatcgctggggtttggcgtctagctctgccactttccagttgggtaagccaaggcaagttagtgagcctgtctgggcctcagtttcttcatctgtaaaatgtggatagtgacacttgccccataggcctgttgtgaagtttgtggaggaagtcaaaacagtgctctacctgccgggcaggcagaggtgggctcctcacgtcacccctttcttataactagggaaggttgggggtgggttcaataggccctgcatcatcctgtccctggaggagatgatctgtgatctgtgatctgttttttttttttttttttttttttttttgagatggagtctcgctctgttgcccaggctggagtgcagtggcgccgtctcggctcactgcaagctctgcctccggggttcacgccattctcctgcctcagcctcccaagtagctgggactacaggcacctgccaccacgcctggctaattttttgtatttttaatagagacggggtttcaccgtgttagccaggatggtcttgatctcctgatcaagtctcaaaaaaaaaaaaaaatagagaatggtaacaagtacccaggtgatagagcttttgtgtctgctgaatgagttaatttatgtaaaatattcagaaccagtgcctggcacataacaagtgctacatagtaagtttgttcttattctctgagcctcagtttccttatctgtaaaatggggataggaatagcacccacgtcctaagggtactttgaattttttttttttttttttttttgagatggagtcttgctctgtcacccaggctggagtgcagtggcaccatctcggctcactgcaaactccgcctcccaggctcaagcgattttcctgcctcagcctgttgagtagctgggattacaggtgcctgccaccacccctggctaatttttgtacttttagaagagacggggtttctccatgttggccaggctggtcttgaactcctggcctcaagtgatccactgccttggcctcccaaaatgctggaattacaggcgtgacccaccacagccagacagtgatctggcttttgaagtatgagtaggaatttgccaagtgaacaagaatgcatatgcaaaatgaaagcatatgcaaagatgaggactgcataatgtgcaggcgcatgtaggtgacggacaggcagttccatgtgaccgcacatagtgtgccatgtgaggagggggaggttggcagggagcagatgggcacctttgggccattctaaagagtctgggtgggccgagcacggtggctcatgcctgtaatcccagcactttgggagtccgaggttaggatcacttgaggtcaggagtttgagaccagcctggccaacatggcaaaaccccgtctctactaaaaaatacaaaaactacctgggcatggtggcagatgcctgtaatcccagctactcacaagggaggctgaggcaggagaatcgcttgaaggtggagcttgcggtgagccgagatcatgccattgcactccagcctgggcaacagaatgagactctgtctcaaaaacaaaaacaataaaaaagagtctgggtgtatataaggtttgtgacgcaccttacacctgctaccttccactttcctgccttctccgcctctcgctcagtggaaataacaatagctgatattgaccaagtgctgattctgtgccaggcagaatggtgcaaaatgcttttttattttaatttttttttttttgagacagagtttcactcttgttgcccaggctggagtgcagtggcacagtcgtggctcactggaactccacctcctgggttcaagcaactctcctgcctcagcctgccgagtagttgggattacaagcatgtgccaccacacctggctaattttgtacttttagtagagacagggtttcaccatgttggtcaggctggtcttgaattcctgacctcaggtgacccatcctccttggcctcccaaagtgctgggatcataggcatgagccattggcctggttgcaaaatgctctttaggcattgtcttgttaaaactgcaaagtacccaggctgcatgcggtggctcacgcctgtaatcccagcactttgggaggccgaggtgggcggatcacgaggtcaggagatcaagaccatcctggctaacacggtgaaaccccgtctctactaaaaatacaaaaaattagctgggtgcagtggcggtcacctgcagtcccagctactcaggaggctgaggcaggagaatggtgtgaacctgggaggcggagcttgcagtgagccgagatggcgccactgcattccagcctgggtgacagagcaagactccgtctcaaaaaaaaaaaaaaaaaaaattcaaagtacccttaggacgtgggtgctatttctatccccattttacagataaggaaactgaggctcagagaataagaacaaacttactatgtagcacttgttatgtgccaggcactggttctgaatattttacataaattaactcattcagcagacacaaaagctctatcacctgggtacttgttaccattcccttttttttttttttgagactggatcttgctccaggctggagtgcagtggcgggatcacagctcactgcagcctccatctcccagacttaggtgatccttccacctcagcctcccgggtaactgggattacaggtatgtgccaccatgcccagctaattttttgagtttttagtagagacggggttttgccatgttgcccaggctggtctcgaagtcctgggctcaagcaatccacccgctttggcctcccaaaatgcttggattacaggcatgagccaccacgtccagccccattcccattttatagatgtagaaaccaaaggtctgaatatcttgcccaagtgttttggtgctaggggccttgtccttacaactatgaaactgggcttgtgtagactccattgatatcaaccaggtctccttcaatgggtgtttgttcactacactttcaccaggccacacttggctagggcgtgcaggtggctgggagacctactcatctcaggggcaggtgctggcaactggcagccatggcagctgcagtcagggctgggccccggggctcaggggcacaaggagaccagaggaggcatcgcccaacctgtcctttaccgagtgccctgcacaggccccatccagggatcagtcaccccactgaatcctcactaggaccagtgtagaggtgttgcccctttccccttccataggggaggaagctgaggccctgcgaggttaggcaacttgcccaagggcacacatcctggcaagagactgaaccagaactgctcatggttaagtcgctctgttgcccaggctggagcacagtggcgcgatcttggctcactgcaacctccacctcccaggttcaaacgattctcctgtctcaagtagctaggattacaggtgcgtgccatcatgcccggctaatttttgtatttttagtagagatggggtttcaccatattggccaggctggtcttgaactcctgacctcaggtgatctgcccacctcggcctcccaaagtgctgggattacaggtgtgagccactgtgcccagcctaagactccttaaagggtgaataggagctgggtgtccccatggcgtggggatagctctgtgcttgcccacgaggcctgggcggctgagtcaccacgtggtctttttttttttttttttttttttttttcctgagacggagtatcgctctgtcacccaggctggagtgcagtggcacgatcttggcccactgcaagctctgcttcccaggttcacgacattctcctgcgtcagcctccggagtagctgggactacaggcatgcgccaccacgcccggctaatttttttttttttttgtatttttaatggagacggggtttcaccatgttagccaggatggtcttgatctcctgacctcgtgatccgcccacttcggcctccaaagtgctgggattacaggcgtgagccaccgcgcccggcctaccacgtggtcttgatcagccgcttccccgcccttgctctcctggacctcagtctccccatttgtaaagtgatgcttgggcctcgggctctgtgaagcctgaaggtctccctctgggtgggcgggacagggagcacctctgctggccctcaccacgctgtgtctccgcagccaaggccgccgcgatgccgcacttcctggactggttcgtgccggtctacttggtcatctcggtcctcattctggtgggcttcggcgcctgcatctactacttcgagccgggcctgcaggaggcgcacaagtggcgcatgcagcgccccctggtggaccgcgacctccgcaagacgctaatggtgcgcgacaacctggccttcggcggcccggaggtctgagccgacttgcaaaggggataggcgggcggcaccgggcgccctcccccagcccgccccgcccgcccagcccggagacccccaaggcagagggaggccggcctgttggccctccacgctatccctctgcagcctgggccctcccgacagaggccccaggtgcgctggcagtggaggtggggcacttaggtgcctggctggcccagggcttgctctccgtgtcaagccgactcacccagagcccaccctcccaagctcaggggcatcctccgctgggccccagtgcctttgcgctgcgcagcactctgccctccactggactcaggcatgtctatggctgcctgtcctgaggctccggagccctcatttcttcgtgaagtccccagctcccctgcctccactcaatggcaccggccctgcaactttaggcaggtcgaagccaacccaaggaaagaacctaagaacctcgtttggagggatgtcagcttgggccagaccagccgcaccccgcggggctcaggcttggaactggtgagggtgtgtggtgggggtatgcagagggataagaccgtggtagaggagagggttggtgaggagagagagagagagagagagagagtctggggggagcgggcaagcatggggagatgagatgtgtatatgtgagagagagtgtgggggccccaggcagggcaggaggtggtggaaacggggtgaactccgtgggctgtgtgaggactgtccatagtgggtcccaaccccctccctctgctggagtttcctagcccttccccctccccaagactgtggcagcaggcaggagcccctgccctccctccctgtcctgtgccacacttctggggccaaacccagcccccttgagccaggccctgccagactccaagcccaccctagaaccctcctcctgtgtggagactctgttgccccactttggacacagattggcaacctgcctcaccccgccccccttcgctggggcttccatcttaatttattctcaataataaagacttcatgatgatctctgcaggaccctgtcttttcctgaaatgaggatcatgtctgtcaactcactgggtcctcatgaaaaatatgacagctccatagtccccattttagggatgggaacactaaatctcagggaaggtaggccagggcttcccaagagctgcagtactgacattttggactcgatcactcttggttgtagggggttgtcctgcccattgtaggatgtttagcaaccctggtttctccccagtagatgccagttgcaattgccccctctcctgttaggacaatcaaaaatgttaactgggctgggctcagtggctcatgcctgtaatcccagcactttgggaggctgaggtgggcggatcacctgaggtcaggagtttgagaccagcctggccaacatggtgaaacctcgtctctactaaaaatacaaaaattagccaggtgtggtggcacatgcctgtaatcccagctactgcggaggccaaagtgggagaattgcttgaatctgggaggtggaggtggcagtgagccaagatcctgccattgtactccagcctgggcaaaaagagtgaaactctgtctcaaacaaaacaaaacaaaacaaaacaccccaaaaatgttaactggaactcctggggtagattaccagttaggatacaaattcagacacaaccaagatgcaaaacaacagagccttacactgtcaacaaaaagagtccaactcttttcggctggagcacagtggcacgatctcagcccactgcaacctctgcctcccaggttcaagcgattctcctgcctcagcttcctgagtagctgggattacaggcggccgtcaccacgcccagctaatttttgtatttttagtagagacagggtttcaatatattggccaggctggtctcgaactcctgacctcaagtgatccacccacttcagcctcccaaagtgctgggattatagataagagccactgcgcccagccaaactgccttagtttctcagagagttaggggtgtgaggctgggattagaagctcagtgcagcccctgttcatccagaaaactctttcccagccatggtcagaggcaggactgaaaagggcccaggccaatccagttaggagtgatcattgcaagggacagaaacttgactgtcctagcttggccaagacggccagataccatgaggacactgcggtattctgtccctttaggacaggaaagtagtgggcttaggacaactagagccaggcatgcagacccccttaggattctttttcttgttagtcgccactctcacaccctcagcatggaaaacacagcagtcagctgctggcaatttctgtatctcacagctccagcccctggagctaccagtccttgctctgcccccagtgcaaatatctctggggtgggattcgttgcctcattttaggtcaagtgtccatgttaagccagtcacccaaggctggggcagtgtcctgtgggtggttcagcgtgggtcatctcagaacaaggcagatcccttgggatgtagggagaggaaaaggcaggtttcaggaaaaatgatgtaaactcccccatccccacctcgaccacaacagactcttttggaggtagattaggcttgactggctgagcgagggagggcctccaggcatgatctggcctgcagccaagtttgatttgtcccacatagtgttttgaaaaaatgcaaattagttgccaacattcaccagtcaggagatttcacactagaatctttttctgactcctccttaaaaataaaaattctagccacatagagtctgaagtgtaaatgtgttcatggtcacgagcttcacagcctgggcagggagggtgctgactgtgaccctgccggaggccttaaggtggccagtcctcctctcaggagggctgcctccattcaacggctgtagcaagatttctcatcctaggctgccatcaaaggaaggctgagagattcatccaagccctctgctcttcaacctggatcctttcccagacttctcccctgggctcattgcataaatgtttatttacacctgttcttcccctaaaagattcaagaaggtttcagttgaaggagccacataacatgggtgtaaggaggaaatattttaattctgactgctactgtaatgctgttattattacttgtctctaagcctcctggcagccagagggaaaggagaaacacaaagagggctttattttatttatttatttatttatttatttatttatttatttttgagacagagtttttgctcttgttgcccaggctggaatgcaatggtgctcactgcaacctccgcctcccgggttcaagcaattctcctgcctcagcctcccaagtagctgggattacaggcatgcaccaccacgcccagctaattttgtatttttagtagagacagggtttctctatgttggtcgggctggtctcgaacgcctgacctcaggcaatccaccagcctcaggctcccaaagtgctgggattacaggcgtgagccactgcgcccggcttttttttttttttcttttttagaaatggggtcttgctatgttgcccaggctggtcttgaactcctgggctcaagcaatcctcccacctcccaaagtgttgggattacaggcgtgagccaccacacctggcccatctttttattgttatgtgatagaagggagagattcactcttcatgaaagacaattttttttctgttttttgtttttttttttttttttgagacagagtttcgctcttgttgcccaggcttggctcactgcaacctccgcctcccaggttcaagtgattctcctgccagtagctgggattacaggcatgcgccaccatgctcagctaattttgtatttttagtagagatggtgtttcgccatgttagtcaggctggtcttgaattcgtgacctcaagtggtccgcccgccttggcttcccaaactgctgggattccaggagtgagccatggcacctgacctttttctggttctaaatatgaaaaagaaatgcctcagatggtatagtaaaagcaacacagtggaggggagggaaggtttgacccagatggcagagcctacagaaacaggccattgcccgtggaggcaggatgttttttccatctgcgaggggatgccagaggactggactaggagcgattcgaggtcaagacctgataatagttaatcctataaaaccattgatttaaattgcacatccttgggcaagtttcctgagctctcagaaacacaaccaaacatttttgtgtcaggcactgagaatcacagatgattaaagctcaaaaaaatgtcccctgccagtgtctggcattgtgctcagctcctgtcaggttctccgtatagccctgttcatttcttttttttttttttcttttttcttttccttttttttttttttttttttttgagacagagtctcgctctgtcgccaggctggagtgcagtggtgcgatcttggctcactgcaacctccgcctcccaggttggagcaattttcctgcctcagcctcccgagtagctgggactacgcaccaccacacccagctaatttttgcatttttagtagagagagggtttcaccatgttggccaggatggtctcgatctcttgacctcgtgatctgcccacctcggcttcctaaagtgctgggattacaggcatgagccactgtgcccatccaagccctgttcattttcatatcactcctgccctacctccctcaccgggtgatggcaaatgtcagagatagtggggaagaaagcactgtataaacgccatgtatcacatagctatcctcttttttttttttttttgagatggagtcttgctctgtcaccaggctggagtgcagtggcacagtcttggctcactgcaacctctgcctcctgggttcaagcgattctcctgcctcagcctcccaaatagctgggattatgggcatgcgccaccatgcccagctaattttgtatttttagtggagatgggggtttcaccatgttggccaggctggtcttgaacccttgacctcgtgatctgcccgcctcggcctcccaacgtgctgggattacaggcatgagccactgcgcccggcccacagctatcctcttgaactctacagaggcatgtcacatacctaggcctggcaccaagaatgtaatggaaaagaggatgtccctgcatcagaagagctcacaaactggggttacagaagtataaacagacaaactattattattagtagtagtattttttgagagggagtgttactctgttgcccaggctggagtgcagtggtgtgatctcagcttactgcaacctccgcctcccaggttcaagcgatcctcctgcctcagcctcccgtgtctgggactacaggtgcgcgtcaccatgccagggtaatttttgtatttttagtagagactgggttttgtcatgttggtcaggctggtctcgaactcctgacctcaagtgatccgcccaccttggcctcccaaagtagtgggattacattgtgcctggccaacagacaaattataaaactgtacctgcagcaagagaagtatgtgtgcagaactggaaacggaaccgaagaagtgcctagtttttggggaagggggttgtcaaggaaggcttcccggaggacatgactattaatctgggttctggaggtggaataagagttttccctgcaaagggaaagaaggctgcaagtgttaagccatggactctggagagaacctagtcctttttgaggactgtgagtggtgtggccaaaagacagaatgcaagtgagccagtggcaggagggcaggcggattaagcaaccagaaagtggcttttcaaggaaggcttagacccagactgagaacccgatgaccttcctattaccacctactcgaggaagccttccctggcccccccagcagctttccccattacaatgctaatcttgtgttgcgattttgttcacgtcagtggggagcagtgaccacatcttctcatcttggcttgcagccttactggcactggtcagggcctccttaaaagcttgcttgttgcaagaatggggctagtttctttggaagtcctgccaggagttgcctgtttgcttagaaaccaagatttcagaaaggcttggaggtttcctgggcatcaagctgtgtgcagatttttaaaatgctttgagaggttttgcagagtcctgggagctttcccaacatctgagagctgtcaggatggggaagggcaggtgtgtcagggttcggcccagaacaggaggacaggaggcgggaatgtacagggtccctgagtaagaatggctgcaatgttcggattccagccctggagggtggcacaggctcctcattgttccgccccctcagttcttcacactggctgagaaggaagggctcgggaaggctgagagaccagctttgggagaagggcaaagactgcaggctccctcaaaagactatcacagtctcagtcaaccacccttacagagaacccctggcaggcagagcttttttctccctccctcataaggtatgacgggctcagtatttggagcctggagacctaggtgtccagctactgattcactgtgtgaaccttggcaggtccatttccctctatttctgcagctgtaaacagctggaactgatgagaaagtcagaggaaatcatggaagatacataaaaaaggaaatcagagtgccaaggcaacaatttgaatggctaacatggactgagctcatggactagcaattgcccattgcatttgtttgtttgtttgttttgaggcagagttttgctctttcgcctggactggagtgaagtggtgtgatctcggctcattgcaacctctgctccttgggttcaagtgattctcctgcctcagcctcccaagtagctgcgatcataggcgcccgccaccaggcccagctaatttttgtatttttagttgagatggggttttgccatgttggctaggctggtcttgaactcctgacctcaggtgatctgcctgcctcagcctcccaaagtcctgggattacaggtgtgagccaccgcgcctggcccccattgctttttttttttttttttttttgtgagacagagtttcgctcttgttgcccagctggagtgcaatggtgtgatctcggctcactgcaacctttgcctcccgggtttgaacgattctcctgcctcagcctcccaaagtagctgggattacaggcacgcgccaccacacccagctaagttttttgtatttttagtagagacagggtttcaccatgttggccaggcttgtcttgaactcctgacctcgtgatccgtccgcctaggcctcccaaagtgctgggattataggcttgagccaccgcgcccggccccccattgcattcttatggcaaccatgcaagtgggtcctcactgctgttcaccaaaggtttctgactctccagctatcagcacacggtaggattaaacttccctgcctccttgtgatgggtggggccataagactagttctggccaattagttgtaattagaagtgagtacaggccgaatggctgatggactaatggctagtccacaatttgtcactccctccttccctctgccacatgactagcaatgcactagaaggcagcctgggtcccagagggaagagggcacagagcagagccttagtggacccaaattactgtggacatgagacatggatgagaaatcaatgtatcattgcggccaggtgtggtggctcaggcctataatcccagtactttgggaggctgaagtaggaggatcgcttgaggccaggggttttagaccagcctgggcaacatggcaaaaccctgtctctacaaaaattagaaaaattaggctggacgcagctcacgcctgtaatcccagcactttgggaggctgagaagggtggatcacttgaggtcagaagtttgagaccagcctaatcaacatggtgaaaccctgcctctactaaaaatacaaaattagttgggtgtggtggcacacacctgtaatcccagctacttaggacgctaaggcaggagaattgcttgaaactgggaggcagagtttgcagtgagctgagatcatgccattgcactccatcctgggcaataagagcaaaactccatctcaagaaaaaaaaaaagaagaaatattagctgggcgtggtggcacatgcctgtagtcccagctactcaggaggctgaggtgggaggatcacctgagcctgggtaggtcgaggctacagtgagctgtgatagtgccactgcgctccagcttgggcaacagagtgagaccctgtctcaaaaaaaaaaaaaaaaaaaaaaatcagcatgttgttatcagccactgggatttgggaatggttgttactgcagcataatttaactcattctgactgatataatctccattttacagatgagaggggagctcagggggattgacttgtttgaaaatcacatagttgtaacaaacccaggcttgaaggactccagagcctatgacacttgtctgggaggccaccacaatggttttgtggttgagtggaggcctctgttctctgaggccacttccaggcctatggatctttcctttgatgggaaagcaccatatgtatagataggagagggccattgtcactttgggcccctagagggcagctgaaacttggcctgtaattactgggcaggaagtgtcctctaagcctctaagcagggcagatgggcaggaggatgcggagatgaacatgactcaggccttgctctcaaggccctaacagcctggcagggagcgagatggaggaattgtagatcttgaagtagaagagaccgaccacatgagggcatctgatccctattttaaaaggcaactgagtcccagaagcacaagttaatctgatagacgttgcctggtgaatcgttggccaaagtggggagagaacccagggccactgatttcagcccaaggctgcttatctcacagagatcatgtaatccaatggggctgggcccaggaaagtctcccttgctccaatccgtccaggcagagctgtgcctctccttcccagcaccctctgttcttccttaagtcaggccagttctcagggcctcaaagcatggaagcgccagatagctgccctcccccatccactgggatcccagcacgttgccctggtaaccagagcccagccaagtttgagaacctaaagctgtaaggggagagaaaggataagaagagggataggggctgggcacggtggctcatgcctgtaatcccagcactttgggaggccgaggcaggcggatcacaaggacaggagatcaagaccatcctggctaacactgcgaaaccccatctctactaaaaatacaaaaaatttaggtgggcgtggtggcgggtgcttgtagtcccagctactcgggaggctgaggcaggagaatggtgtgatggtgtgaacccgagaggcggagcttgcagtgagtcgagatggcgtcactgcactccagcctgggtgacagagcgagactctgtctcaaaaaaaaaaaaaaaaaaagaagagggatgggtgctaggcccacacaatcaccattcaatcattcattcattcattatttctttctaaagaaatttaccggttgggcacggtggctcatgcatgtaatctcagcactttgggaggctgaggcagatgcattacttgaggtcagaagtttgagaccagcctggccaacatggtgaaaccccgtctctactaaaaatacaaaaattagccaggcgtggtggcacacacctgtaatcccagctacttgggaggctgaggcaggagaatcctgaggcttgaacccgggaggcggagttgcagtgagctgagatcccgccactgcagtccagcctgggtgacagagtgagactctcaagaaaaagaaacttactgaagccaatttttgccagaccctggggcccagagaagaagatccaggaccttcataactgagctttccacccaggcatggtggctcacgaccgtaatcccagcactttgggaggtggaggtaggagtattgcttgagctcagaagttcgagaccagcctgagctacatagggagacccccgtctctacaaaaaataaaaacttagctgggcgtggtggtgcatgcctgtggtcccagctactctggaggcagaagtgggaggatcacttgtgcccaagaggctgcagtgagccatgatggcgccactgtcttccagcctgggcgacagagtgaaaccctgttcaaaaaaactaataacaacaacagcaacaacaaacgaaacagagctgagctaatatggtagccacagattaaaataaactaaaaaatccagttccttggtcactgtagacacattttaagtgatcggtagccatctgtggctagtggctactgtactggacagcacagacatagaacatttccattatcactgaaagttgtattgcccagcgcagctccagaagctcactcgctaaagagagagacacacaggagagcagaccagacaacacagtgttgtgtgggctgcaatgtcctcctcggtaaaaagcaggtgatgaggcggagattaaaggagatgccaggagaatgcttagcctagttcctgactcagggtgagtgctcggaggacatctgccatcaccgtacaggacagtactataggatctgtttacatacctatcttcctagcagactgtgagctccgcccagccctggcatggtgccgggcacagagcaagtgctcaggaaatagtagctgttatcagcaccattgttattatcaccactgctatgacagaggcagccgagggctgtgggaacacagaagagggctcccatcccagccccagggccaggggctgctgagagtcggcattgccagagccaggctgggtggctttgtggtcccctcaggggcaggcctagggcggggtcctcttcacacccttagggtctgggtacagggtccagctggagcaagctggggctcagggaatagttgtggaaggagctctagcctccaggaactccagcccccttgaggaaagaccaggtgagtgggcaagatggtctgagggttgcagagctgaacagggcatgaagggcacagaggcagagccagagggagactcgcgctgggactaccagagtgcagccatatttggagtacccctgtttttactgcagactccccaggcatcaaagtctgtgggagacagagcagatttggggagggcaggctgcagggaacctccctgcaggtggccgtgagtgccagcctggccgttaccagcctcccatggctcttcaggattccagaggctcagagcagccattcacagccgcccactcctaggaagccagcccctccctgcaccagagcccagcccagcacggtctccggggatgtagctggtgggacagtgagcagagggctgggccctgtgcctggggactgtggcctggaggctgagcaggagctgaggaggggaccagagggacaaggcccctaagctggccaccatggccagactctgagtgcaggggaggtgaggggcctgcgtgtgccttatcttcccagacacactggatccttcttgtcctctgatcaaggtaggtgtgtaggggggtggaagggtgtgggggtttgtgggggtgggagggtggtgggggtggggtggggaaggaccaagcaatccatggaagatgggagtgcagtgaggggatggggagtcgggtgatgccctcggacaccctgtcctctggcctgctctgtgtgtgggtgtgcacactgaggggagctgtttgtggctaagtgcagggtaaacgtgtgtgcccaagtggatgtggctgtgcaggagggggcagaagttcagggctgcagtgataggccaggtgggaaagggttggaggccaggacagtcttggatacaaatatatggctggagagggatgaggggctgggggcaccattgtgaggggtgatgccttccctgtccggtgccctgccttccccgtccctgctgcagacctcaaggacctggctacatgatcactcccctccccatgagccctctggaactgactcctcccaccagccctggccttgtcccccagctgcaggtcccagcctgctgtgttaaaagcaaccaaaccaacttttttctagagggtgagttacttggagtccagagtagcagggagtggcccatctactaagaccacagccagagtcctgagcttcatcctcgacacctctttgtgcccactccctaccctgggcagtcccgccacttctacccctgtgcaatgcagcctcctccagccccagccctagctctgccccttgcacagcccacggagcagagagtttcaactatgtcctcatgggatcctggcttcaattctgttcccatctgatccctctgtcacactgcccgagtggccgttcccacctacagatcggaatgggtcacattccctggcctaaactttgctgtagcctggcctggaccccagctcacctgcagccttggctctcccctccctgctacatacagcctaggagccccatgttggattttcagaaagatgccacactttctcacctttgggccttctgtaggaacagccccagctcaggtctagcctcccgcctttctacccctaatgcttagcttggtggagccctgcctacttccttgcctggcatccctgggcatggcagcctcttcaagggcggggaccatggcttgttcaccagataagctccttctgtgaacactcactgcctctccatttcccatcctcaccttctccagggctggctctgtttctgactccagcactaggccagctcagggctctttcttggttctggggctctaagccaaattggtcctctctcatcctgccacctggacacctgagctcctatgttggctgctgtgggtgggaacccacagccctttggttctttctggaagagaaagggagagacgtctccagtaagcactgccctcctctggagtccctgaacatgtatgtgacctccatagagctgtccacagagacaggggccacactcaggcccaggcaaagggagacgtaagcccagcctgagatgccccatgctggaggcagactgctcactggacgtgcccaccccactgtgtggtggctggccggggtggggtaggtatgaggtacagatcagtctgcagcaggtaggagccgtaggaggacaggaggaagttacatgcatcctccactaaggactggacagtccccagaaccaggccccttcagacccggcatgctcagctgctggtcaggaaggggagagctgagacctccaggcctgagctcctcacccctgcctggcctcttctctctgttgattgcctcagggaaagacaaacgacctggatggaccacaactttgctcctgctcctccagagatgcagtcgcatggagctccaggcccgggaacctccttctcccatagccatgtgctggggcgccctatccgcccctcgagactccctggaggagggtcccccctcacccccgtcctcaggaagaccatccatctggataccttcccccaaagccatatcccacagacctccagccggctgggccttggagccaggacccggagtgtgcccccacaggagacgggcatcgctctgggggcttccttgagccccctgcccaccagcagccttgtacccaggaagctcagctccatctccttgactctccatcagaacagccaggcacggtccctggatcgcccactttctcactgggaagagttgcctaccccaggaaagaaggctgctccccatgaaggagggagggtgtcctcgccaggctcgccacctgtgaccctagtgccagggggcagggtccactctgagggcccagggaacccaggtctgaccaaatccaacaggatgcttgccacggagaagcccctggtgagttcctacctagccttacctttccaatcccggttagcccagagtgcaccagtccttgcagagccaggctcgttgggccaggggcaccttgtctcagtgactgaccacatgcctaccagagcttctccaggaaaaggcaagccccgggccagggggatccccagaccccgggggcgtctccaaagggccaacacgactgtgaatttgactgctatggacacaaggacagacgcagccagacatttagccacaatggccaccaacagacctagcttggctatcaatttagccacaccaaacacatcccaactggacacaggcacagagttccctgccctggatatcaagctgggcacagccagagacttgtcttcggtagggacagtcaagtcaggcaaaaccgtgaacttggctacagcaggcacaatcaagccgggcacagccatgaatctgactacagttgggacaaccaagccagggatggtcatggatttgatagcctcagaaccagacaagctgggcaaagccatggctacaagaagcacagccaaaccagatatgaccacagagggtatagccatggattcagcaacatcagacccagtcaagccggacacaatcacagctacagtgggcaccagtaggttggaaacagccatggctttggccagagtgaacagagccaagctgggcacggctaagaattctcttgctttggacacaagcaggatgggcacagctgtgggttcagttgtgccagtaaccccagacccagccactgggaagaccacactgggcagtgttaataacctaaccatatcagacgttgctacatgcctgctaatgccaagcagatccacagacctagccctggacaacactaatgctgccatggacagagccacagagcctgcctcactggacctggccacagaatacaaaggtaaatgcagaaacttggttggggatggactaggctgccgggagggggaggtgtgtgagcttggagatggatcatgcttgcatgggttgagaaacggaggaaggactctaaggtcagggttgaatgggttgggagaaaaggaaatgggggttgtagggccagacatagggactgtaccctgagctgggttctaacctgccagtctgaggtcaggctgagggaaactatcagaaagaaggttttggccaggtgtggtggctcatacctgtaatcccagcactctgggaggctgagatgggaggattgcttgagtgcaggagttcaagaccagcctgagaaaaatggtgagactgtctctacaaaaaataaaaaataaggggctgggcacggtggctcacgcctgtaatcccagcactttgggatctgcccaaggcgggcagatcacaaggtcaggagatcgagaccatcctggctaacacggtgaaaccccgtctctactaaaagtacaaaaaaaaaaaaaaaaaaaattagccggacgtggtggcgggtgcctgtagttccagctacttgggaggctgaggcaggagaatggcgtgaacccgggaggtggagcttgcaatgagccgagatcatgccactgcactccagcctgggcgacagagcgagactccgtctcaaaaaaataaaaaaataaaaaataagggttgggcacagtggcgcacacctgtaatcccaacattttgggaggccaaggcgggtggatcacttgcggtcaggagttcaagactagcctggccaacatggtgataccccgtctctactaaaaatacaaaagttagccaggtgtggtggcacatgcctgtagtcccagctacttgggaggctgaggcacgagaagcacttgaacctgggaggcagaggctgcagtgagccaagatcgtgccactgcactccagcctggtgacagagtaagactctgtctcaaaaaataaaataagataaaataaaataaaaaattagcagggcatggtggcatgcatctgtggtcccagctactggggaggctgaggtgggagaattgcttgagcccaggaggtcgaggctgcagtgaaccatgattgtgcgacagagcaagaccctgtctcaaaaaaaaaaaaaaagaaaagaaaaagaaaggttaacaggggtaacttgtggaggagcaattatggtgagtcctcctttcagcatctcccgggattgtttgtttcctgaagacctggaataatcaggtgatcaataggtgtgtccacctttaaaagcagtggctcacacctgtaatcccagcactctgggaggctaaggcgggtggatcacgaggtgagttgttcaagactagcctggccaggccaggcgtggtggctcacacctataatcccagaactttgggaggccgagacaggtggatcacgaggtcaggagatcaagaccatcctggctaacaaggtgaaaccccgtctctactaaaaatacaaacattagccgggtgtggtggtgggtgcctgtagtcccagctacttgggaggctgaggcaggagaatggcgtgaacccaggaggcagagcttgcagtgagccgagattgcgccactgcaatccagcctgggtgacagagtgagactccgtctcaaaaaaaaaaaaaaagaaaaaaaactagcctggccaacatgatgaaaccccgtctctactaaaaaatacaaaaaattagccaggtgtgtaggctgagacagagaattgcttgaacccgggaggcggaggttgcagtgagctgagattgcgtcactgcactccagcctgagcgacagagcgagactctgtctcaaaaagaaaaaaaaaaaaaaaaaaaaaaaaaaaagcaagcctcctacctcctacgtgaaaatactgactagcgctttaggaagttgtgatttgtctaataggtagtctctgcagcctcctctggatgtgagataatgacctcactcgagactttccaaatccatttacgctcagccttttaggaaggtatctgttgcttaaaagttgtcttacctgaatgtctctttcttggtcccccacccccagccctttaatcctgaaaggtaagttggagccttgtatatatggaagtcctacacagaactctaaaatagggcaacacaagggctggacattcatttggtcttagaaagcctgtgacatgcctaaagtcacaccaaagctggctggtggcagtaagctgattggaatccagattgttaaaatctctactttgggcagcctcattcccaacatttcaagggctcagagtttttgggtctggaaaggtgcctagaaggcatccagtctaatgccttaattgagtcgttagattgtcagacccctttccctccaccccacacactcagtctgggcacctcacctaaattctggtcttcacttctccctacgagatctcagctctccctccatctgcagcccagccctgtctcctgaagtgcagatgtgggcagccagcagcctgctaggcttatctacccggatgtctcccgggcatgtccagaggtagcccttttcttcttgaactgactcctgcctccctgatctcactctctcagctgtaggcattgcctaccttttattaggtgcctagaaacccgggtatcctcttcttcctcatctctctcttgccatctcatccagtctacttcccaccttgttggtttacctcctcagtactcaactatctggctggctgtcccctcctctccatccttctgcccctgtgaggccacctcccacccaccagcttgttccctgtccacacacaactgctgcaacgactcccacattgaatggcagcactttcggcttaatattcgtcagtgactcaccattaccttccattaaaatccagcttccaaggctgcgtgcggacttctccagcctcttatttagctctacacacctgtctggaattttctctgcttcagcgacaccaaggactctgggctgtccaccagcaccacgcagctctcacctctggagaccctcacctctgctgtcctctctttgcagaatacctctccctttccattcttcccttccactcccatttgcctttccatctggccctcatctcctccaagaagtcttccaagccccctctccccagggtgcccacctgcctgcaccctcagttccctgtgtgcaccccggcccctgcattaggacattccatcttcctgtctcctccactagacccagaaccttcgaggggagggatggttgtcctcacccctgtgaggcaatatgctgtccattagtatccactgaatgcgtgaaatttttttctaatgggcaaactgaggctcagagaagttcctgtctggctcaaggttattggttcatcattctggagcagggcctggaacccgggcccctgactcggctctacaggcacccgcgcaacaccccagcccccgcgtgactcacgcgcgctcacggccgcccgcagctgccactggtcccctgcgcccctccgcccgtccccgccgcagcccagtgggtaaggggcggggagcaggtccagcggggagagacgggactgggatgcaggcacctttccgggcctggcacctggagcccgcgggggcggctcctggaccgcccgcagcgtggacccgggaccagttcccgcttgcgggcgcgggcgccgcgggaaggggaggggccctcggcggggccgacgggcgcgcggtcacgtggtgcgggtggcagcggcggcggctggcggcggcggcaacggtgcgcgcggacaggggcggcgcggcgccgagcgagccgaggcgaggtcccggggagggcgcggcggcgcggggcgcaggggcggcgcggcggggccgcgggccgggcgggtgggaggagagcgcgaaggggcgaggcccgtttgcaggggccgctcggcccggggaagcccgcgccccgctcagccttgcagccccgcgcccggagcatctccctggaggaacggagacaaaggaggattcatgtccaaaggtagggcggccggccaggccaccggcacccgccaggaggaggctgcggccccggccagcgcggctggaggcgctcctgggggagggtttccgcgccgaggagcccacgcgcggtgacagatgcgcggacacacgcacacacggtggcacccacctcgagagagacaatcttggagagaggcagacataggacgcggggagacgcagggacccacggacacgcaagcagggacccagatgcgcacagaaagccccatgctggagtacaccaagacacgcacacacacacacaccacgcacaggtgccagggccatgccagccggatgagagacctgtgcactgatacatacgtcccctcccccgcaacccctacaggcacacgctgagacaggcaccagctggtggtctccaagggaacccgttggcctccagaggactgggatgggggaacgggtgtcccagggccctctgctcctgcgaatgggaaaggaccgagagagctttcgtgattccttttcccagagcctagggctggaactggggtgggctggaattgcctttgtggggggcggtggggtcctgaaggctgcggggggctgaggaagatccatcttcagggtggaaggaagagggggggcctgcactaagcaggtgctattttggaaaagtaccctcccccagctgctaccttcctaacacaggggtggggtccctgggccagacaaagccaaagccattcatttgcctgtaaaaggaagtgccagggtctttgcttagcatgggaatggaggggctgtttcttggctgcaaccgagtcaggtggatggtgcctctccctggagcactgatggggcaggtagcttctggcagagggtgctgcaggcagatcccccttctccaggggccctaggagagccaggagctgaggggggccccaaggaccatctagccaggatggcagacttgagctgcaccctgctgtgacccgagctcttccccacccttggggagcccccctccaatccttgttgcagaggaaggaggaggtctcaacaattctactcccttgactgtggcggagacaacagccattgctcactggggggtcagctgctctgcatggggagaagcatctgagggaagagaaaggtgatgtgtctgatacctgcctcactctgaagttctcattcactcatcattcattcattcacttattgaggagtgcctgtggtatgctgggtagactggggcacagagatcaataagacacggccccgccctaaagaagggtgagaactagtacgtatttgtgccagataatttacattcttcattctgtataaccttcatagaaacccagcaaggtaggttctatccccagttgtctgagcagaaaatgaggctcataagggtcacccagccaggattcaagcctgggtcacctgcccatctgacgttgacatggtgggaccaggggagttgtagggacagaggatggaactacagaatccagctccagagcagcattggttctgtgccccagaggtctttgtttatttgtcaggcacccttaccagacagggggccctcaagggcaacaaccttgtctggggtacataagtgtccttggaatttcgcctagggcttggctggtgtagacccccatttgacagcatatgaaatggcctagatgggatggaatgaatgaatgagtgaatgtgatgagtaccagaaaatgtgcagtgggcacagaagagggccatccacatcagaaggcaaagcagaggctttcctgggagtagcagtggggctgaatgctggaggaggaggaggaggaggaggaggaggaggaggagggagccaggggttggagggggaacaggatcttccagcaaagcttgtggcacagtgacctgcacacatttactgtacttggggctggtgggtggcttgttagcatgtgactggcatgtcactggcatgtggtggggaggctgacttgccagcaggcgctgtgtacagtgcacacagtgggtgctcatatgtgcttgttggaggaatgaaagtgagatctaccaggtcctggtcctgtagtgggcctgtggtagcccctagatgctgcttggggatctggtaggaccctctctccatcagggtctatcttttgggcgtgctcttttaggatgctgcagttgacaggccagggcggagcaggccatggtgagagcacacactttataggaatctttacacaacctctcataagtaaatacaaggcatactttccaagtctgtaaaatggggataagaccacccccccaaaccatgtggctctatcttataacacaggttgagaccaaatgggctcagctgcagaggcataaggggcaatggaaaggcccagcttgtgtgagcagctgggcaggaaaaatggggcattggtcccagtgcaggtgtgctgagtggggcctgtgagccacgtgcaagagtggaggagcagggccaggctgctgagagtcagctgctgcagggctgggccaatcttgctgccatgcggagctgcctggctgggaacagcttcctgggaagcaagagagagccatgccaggccctggggaggtcctgaggctttggcagatttggctgtgcctgggagtgacagaagaaagaacagtttcccattgggagagagggtcttaccagtaccggtggaaggaccaggtggagggagatgagagtaggctcctggctgggtttaggggtgggaagggaatacttctgtcccctctccctcccgcccatctgctgctccatcaggcctccctgtaaggttgagactctgcagggtgttagtcatgaaacataggattctagaacggcagagctggaaggtgtcctcaagagcacatggagtccaacaaccatgcttgtgtaactggcatctggggacaccttcctttaaccaatgctttcacatgtactgtttcatttcccctacagacctgaaaggggctggggcaaaagggtctgggactgtaagatattgctcagtgccttttttttttttttttttttttttttggagacagagtttgactcttttgctcaggctagagtgcagtggcacgatctcggctcactgcaactccgccttccgatttcaagcaattctcctgcctcagcctcctgagtagctaggattacaggcgcctgccaccatgcctggctaatttttgtatttttaatagagacagggtttcactatgttgatcaggctggtctcgaactcctgacctcatgatccgcctgccttggcctcccaaagtgctgggattacaggcgtgagccaccgcgcccggccattgctcagtgcttctaagcatcatgtctcatgaaagctcaccacagtcttagtgatgatctttccattttatagagagggatgcaggctcatagtggggaggtggtcttcccaagtccacaaagctgagaagtagcagagccaggctctttccacttcaccccataccccaattgtatggatggggaaatggaggtgctctattctggaacctgccctggtggacagtggcctgataaggaaacccacagatttctcctgtgtatgaacacacccatgatccactaaacccagggggacgtttgcccttcctcactagggaggggctggttcctcagccttctctttcatctgctatccaccactccaagagcacactgtgtcgtcttaggcaagtgactgccctcatctggttctcatcccctccccactggttccacagattcagaacaatggctgggagggtgtctgggctccttcaggtacagacacccctactctgcagtggtgctcatggtacagaggggacatcgaggctgggagacgagagtgatagccactctccagagaagggtagccctgtttgcttctaaaagatgaagcagccgaggtcagtgacagttaatagatgttagtgcaggatcctaaaaagtctttgccctttattcggggagggaggcatgactcaggtctgaacaaccccagacatttcttagaccagtggttctcagccagggcaatggtgcttcccaggggacatttggtaccatctagagacattttgggttgtcacagcctggggggctactaagatcaggggtgccactaatcatcctgtaatgcatgtgacagcctcccacaataattactcaaatgtcattagtgccaagatggagcagcccctgggttagatgcacagatgtgggcttcagagcagtgaggtgcatttgaaagtgcccagcaaccagagaacctggcactggcccagattttacctctgacctgctctgtgttcttagttgagttctttctcctccaggcctcagtctctttgtctatgaaatgagggacctggactggatgatactaagatcccttccaggcccaactttgtatgattctgtagcaagagaaaaataccatggtttccatgtgacctctgccgtcctcctgatcacccctccgacccctcccaccttggctctgcagggctcccagagaccaggacggacgcagccatgtcagagctggtgcctgagcccaggcctaagccagcggtgcccatgaagcccatgagcatcaactccaacctgctgggctacatcggcatcgacaccatcatcgagcagatgcgcaagaagaccatgaagaccggtttcgacttcaacatcatggtcgttggtacggaaggctgtggggctgctgcaggcctggtggcgggcagcaccaaggatcccatttctttcccccaaatggctgtgaccctggctcttctaagatgagctgtttgtagaagggagaatttcaccatgctgatcacaaaggcctgacccctgtctccccttaagactagctgacccaggggtaggagcttcaggtggatgccagcccagccccccatcaccagctcggtgtacacaggcagccccttcaccactctgatcctgcttttgggtttgtgacatgagagaatcagcaatgttcttccttacctctgagagctggtggaaggattggatgaagggtggtcttatttctactcttttgtagtgctttaaaactttgagagaaggccgggtgtggtggctcacacctgtaatcccagcactttgggaggctgaggtgggcagatcacctgaggtcgggagtttgagaccagcctgaccaacatggagaaaccccatctctgctaaaaatacaaaatcagccaggtgtgatggcgcatgcctgtaatcgcagctactcgggaggctgaagcaggagaatcgctcgaacccgggaggtggaggttgcagtgagctgagatcacgccattgcactccagcctgggcaacaagagtgaaactccgcctcaaaacaaaaaacaaaaaacaaaaaagattttgagagaatttccagggatttggtcactgagtagcatcactgcgtcacagaatgtaagagtaggaaggggctgggcatggtggctcacgcctgtaatcccagcactttgggaggccgaggtgggtggatcacctgaggacaggagtttgagactagcctgaccaacatggtgaaaccctgtctctattaaaaatacaaaaaaattagctgggcatgatggcacatgcttgtaatcccagctactctggaggctgaggcaggagaatcacttgaacctgggaggtggaggttgcagtgagctgagactgcaccattggaccccagcctgggcaacaagagtgaaactccatctcaaaaaaaaaagaagaaaaaaaaaagagtaggaagggacctttgccccgtctcagtgagatgtccagtcagtgctgaaaaaggaatctggcgtcatccttctgtcctcttcctccttcatcccccaatcagtcatccagtcctgtccattttacctcatacgtatctcttacgtctgcccacttctctcctctctcttgctgccaccctatactgactttctctcacctggcttgccgtggccacctgactctgtgctgtcaaagtgctgacctgcagcaagataagctcagctggggcttgggccagagtataaatcatctggaaaatcttgctataaaaaacctccactgagctaaacagtgtgctcagtgacaaggtagatttctctcctgaggcagacttcttatctcaagaaccagtagcaaatgggtcagggaccctggtagctgggcccctatgggccacactcggagtggcaccaaccctcctagctctctgtctcctttcctctccaatcccttgtccaccagtgaccaaataatcttcccaccttgcaaaacttatcgagtcacccaacttacttaaaactctgtaacaaactctcctttaacctcagggtaagtttaaactcgtagactgtcctgattgtacctcttcagctcatctctgaccacttcccatctagcattgtactcctcactcagaagaggcagtgctcgtccacatgccatgctctctcctaccctagagcttttgcatctgctgttccctctggctagaactcatgactcttttgaaatcaaccttccggtttcagcttagttgcatttctccagaagtcttccttagtcccagagagactgggttggattcccttggcaatgctgtttcaataccctgtggctattctctttcacagtggttattgcaacatactataattgtctgcttatgttttggtcactctcacactaagcagctccttgagggtaaggatcatgttttgttcacgatagtacctccaaattttaggacaacacttggcacctaagaataattaatgaatgaatgctcttagaaaacatctcagagcaagcatggcaaatccaacacccgtgagccacttctctccccagtggtgtgcatggcagactgctagtcagtcatggcacgtgttcagtgctgagcccagatgtagcctttttaacataatggtctaggtgactactaccagataatcagcaggaatgagaaatgcaccttatttaccatccctggtcttgtccaatttcctctctcctcaccatcctatcagtaaagaaaccaaggcatgactaatccaaaggcattcagggaaaacaatgcaggtgggtctggaactctaggcccttgtcccccagcatggttctttttctaatataatcacaagaattcaccagcccagtatttcttagatcttattgtccataggactcttctggaagcccagttaaaatgcagattcagaatcataggtctggggtggggcctgagattctgcatttcctactagtgtccgggcaatgccgaggctgcttgtcaattgcaagtctttcttgtgggattcttgtacgtgttgaagtttgagaagctctgctcagaccagtgggtttgtttcttttgagacagagtctcgctgtgttgcccaggctggagtacagttgcgtgatcccggctcactacagcctctgcctcctgggttcaaacgatccgcagcctcctgagtagctaggactacaggcatgtgccaccatgcccggctaatttttgtatttttagtggagacagggtttcaccatgttggccaggctggtctcgaactcctggcctcaagtgatctgcccgccttggccttccaaagtgctgggattacaggcatgagccactgcacctggcctgaccagtggttttccctttttttttttttttttttttttttgagacggagtctcgctctgtcgcccaggctggagcgcagtggcgcgatctcagctcactgcaagctctgcctcccaggttcatgccattctcctgcctcagcctcctgagtagctgggactacaggcgcctgccaccacgccgggctaattttttgtattttttttagaagagacggtgtttcaccgtgttagccaggatggactcgatctcctcctgacctcatgatccgcctgtctcggcctcccaaagtgctgggattacaggtgtgagccacggcaaacggcctgaccagtggttttcaaatgttctttagctgtgaaacttttccttgaaatgaaatcttctgcagatatgcatctggaaaacaggtgaaagggagccatagcgaaggaagtggatgcaggggccctgcctgcccagcctcctcctcctctcacagtgccctctctggcatgtatcttcacaggacactaaggcttctgggagcacaatctaaaaaccactacactagaagaaagagtggatatagagccaagatgttattagggtttgagttcctggtcttgcatgtattagttatgttgctctgcacatattttgttagaagaggattcatctctctaggaccatctcaactgaggataaagatagttctgcttcaggatccacagggctgatataaaaatgaatttggctaacaaatgtgaatgtacaatatgcactgtgaggcagtatcaggatgcaaagtcattctatttttccttttagtatcattaaaaagtgaaaacctaagcaaaaaatggaatcacgagaaaacagaaaaccacgacactagacatatgcagaggttgtcccttttcccagtggtcctgtggctctgggaaggagagaatatggaatccaagtgatgtttccccaaggccctctgcagtaagcaggaagccattcccacctgcctgcaatccccactcagcctggccatcccccagtgagtggtcagacaaggtgtggcctggatcatggctctagaattctgtaagcttatggagaaatattaggctcaggaggtggatgcagagtctccctacctcctcctcctgctttgctgtaggccagagtggactgggcaaatcaacgctggtcaacacgctcttcaaatcccaagtgagccgcaaggcctccagctggaaccgggaggagaagatccccaagacagtggagatcaaagctatcgggcatggtgaggaccaggcagggacccctatgggctttgttcagtgagtgcctctgctggaaaggggaaagaatggggcttattgaagaataagatcaataaaaggcaaccttaagacaaaacagacgtgagcacttcactctgaagcaaactccttagactgcaggttcagggaagagagagcagggagctcgaatggaaggaggtgagatttgaggtggatgataaagtacaggatttagacaggtagaaagaggtaaggagtgggcaggtacggtggctcatgcctgtaatcccagcacttcgggaggccaaagtgggaggatcgcttgagtcatggagttcgagaccatcttggtcaacacagtgaaaccctgtctctttttttgtttgtttgttgtttgtttttttgagacggagtcttgctttgtcgcccaggctggagtgcagtggtgcgatctcggctcactgcaagctccacctcccgggttcacgccattctcctgcctcagcctcctgagtagctgggactacaggcacccgccaccacgcccggctaattttttttgtatttttagtagagatggggtttcactgtgttagccaggatggtcttgatctcctgagctcgtgatccgcctgccttggcctcccaaactgctgggataacaggcgtgagcaaccacgcccggcccgaaaccctgtctcttaaaaaaaaaattagctgggtatgatggtgcatatctgtagtcctagctattggggaggctgaggcgacagcatcacttgagctggggagttcgaggctacagtgagctgtgattgcaccactgcactctagcctgggtgacagagtgagaccctgtctcttaaaaaaaataaaagaagaagaaaaagaaatgagtagagagggtattccagattccaggtacagggaacagcataagccatgatatcgagatggaaaagaccctaaatttgacttttccaataactgatcctgaagacaaggcctgggtctccctggctagtaggctgccaggtacctggggtcagctgtaggactgacctctctggtacattttcttttcacccccagtgatagaggaaggcggtgtcaaaatgaagctgaccgtcatcgacaccccaggctttggagaccaaatcaacaatgaaaactggtatctgtctgcctctgagatctttgccctaaagactctgctgggaagatacttactatggtgcagattcattcacgttgagaaccatctgcaccctccatgctctgtagttcccgacagcccaggccagggcccctggggagctccacccctgctaactaaccatccaggaaagccatcggtgcgggggctgagggggaatctggcagcaggtatcctaggcccaccaaccagggaatgacatgaatgtaaggagattgctaccagatcatgcctaagctgagccctaggtcttgttcttctgatgcatctatctactttccctccccatcagctgggagcccattgagaagtacatcaatgagcagtacgagaagttcctgaaggaggaggtcaacatcgccaggaagaaacgcatccctgacactcgtgtccactgctgcctttacttcatctctcccacaggacactcgtatgtaccaaccctacccctattgtcaggcctggtctggtttgtatcatctgtgcccatctggattggatgatccatacgttgactcagctaggcctccctagctgagtcctagcccttccagccagatgggttggtacatagtcatggcccatgaccttgggattccctagactttccacgaggaagtttgactttcttgctaggaggttaaagctgtccaacatcagccaccaatatctgcccactggtgtcccagcagcatggcacaactgtatcagcaaagaggacttggtgaatgtgagcagagggcacttcatttattcaccaaatacctgctttggaaaataattggagtcggagggagcagcaagaagggtgaaatagggcagtgcagggctcctggattggggctggtgtttggagggtagggacccagttgtaggcatttagaaggtaccagcctggagtgaggcattgtgtgttcagagatgaaggccaaccattgtcatgaagtactatctgataggcagaataagacacacacaagcatgttgggaactctgattgtgagtgacaggtgggccccatgaaggaagtgctgggaacaggcagaggatggagatcctagggggcaggccagaaaccttcctgcagagaccgggggaggggggtcccataacattactaagcccagctgctgggccagagttaagctcttcagaggatggcacaagcaaggtaagccccaaattttctaggaaccaggcagtgatggtagggggagaagagagatgaaacaagacccctgggctagacccaggaactcaacagaaggctggttttatccctccctaggcttcgaccccctggtcagaatgaaccatcagacagactgacttagtgagtccctgagattgcaaaatagagccaagttggggtctcagagcctgaggtaggatgggggcatagactgtcagattgtgggaagggcaaggcctccagtttggccctgcaggactaactctgggggctaggaggagacctgtcaagaagtagtctgataggcagaacaagatgtacacactaggcacggtggctctcgcctataatcccagcactttgggaagccgaggcaggaagattgcttgagtccaggagttcaagaccagcgtgggcaacatggcaagacattgtctctacacaaaatttaaaaattagccagacatggtagtgcgcaactgtggtcccagctcctctggaggctgaggtgggaggattgcttgagccctggaggtcaaggctgcagtgagccaatgaccatatcactgcactccagcctgggtgacaaagtgagaccctgtctcaaaaaaaaaaaaaaaaaaaaagacacacacagtgttgtttttttttggttgttgttgtttgttttttgtttttgagacagacaaaaaaggaaaaaagacacacacgcacaaggacatatgagtagagacagtagtccacagatgctcccaggagaaagaaatccctgagtcagaaaagatgtcctgaagtggtggtttgaggggggcttaaagagaggcagaatctgcaaggggactgaaaaagaaaaaggcaggtgttgaggctgctctacagacggcaaggcagtggggctgtgtcggagacgagaggtagcagcctcttggcctcagccagatgcccagcccagtcctcttctcctgtgggtgtcctggagtggtggtggtggctgagttggggagggcaaggtggctctgatgattctgccttttctgtgccccagcttgcgacctctggatcttgagttcatgaaacacctcagcaaggttgtgaacatcatccctgtcattgctaaggctgacaccatgaccctggaggagaagtctgaattcaagcaaagggtgagaaggccccctgtcttcttttcctgttcccatcccctcctttctctccgctgggttcaggccatctcctagccctcatcattctgccttcacccccaccctcaaccctcccccaattctccaccccagcccccttcttaaccattcaagaggctgaggttggtggtatctggggactatgatgaagaaaagatggcacagctctgggctgccttcttcccaccctccaaacctacctgtgaagaccactgaatacatgtatcactgtgtacataagaaatcactcctccaacgttagcctaattgaagggctagactaattagtgagtcaactggccactagtcctcactggcatcttctctttgttttttttttggagtctctctctgtcgcccaggctggagtgcagtggcgtgatctcggctcactgcaagctccgccttacgggttcacgccattctcctgcctcagcctcctgagtagctaggactacaggcacccaccaccacgcctggctaattttgtttttctctttttagtagagatggggtttcactgtgttagccaggatggtctcggctagtcttgatctcctgacctcgtgatctgcccgcctcggcctcccaaagtgctgggattacaggcgtgagccaccgtgcccagccctcactggcatgttctataagctcagccctgtgctggatgtacagggttggggaggggcgatttgagagaaatgaaaagacaattgctgcctttaagaaatttacaatccagttgggcgtggtggctcatgcctgtaatcccagcactttgggaggcagaggcgggtgaatcacgaagtcaggagatcaagaccatcctggctaacacggtgaaaccccgtctctactaaaaatacaaaaaaattagccgggtgtggtggcgggtgcctgtagtcccagctactcaggaggctgaggcaggagaatggcatgaacccgagaggcggcgcttgcagtgagctgagatcgtgctactgtactccagcctgggcgacaaagtgacactctatctcaaaaaaaaaaaaaaaaaaaaaaagaaacttacaattggctgggggcggtggctcacgcctgtaatcccagcactttgggaggccaaggcgggtggatcacctaaggtcaggagttcgagaccagcctggccaacatggtgaaaccccatttctactaaaaatacaaaaattagctgggcgtggtggcatatgcctgtaagcccagctactagggaggctgaggcaggagaatcactggaacccgggaggtggaggttgtagtgagccaagatcgcaccacggtactccagcctgggcaacagagcaagactcggtctcaaacaaacaaacaaacaacaaacaaacaaaacttataatcaaatagaaaatgaagaggtcctggatggtttcctggagaaggcaagacttaagtcgaccttgaaagagggcaaacagtctcggagtagggggagcctcacctttcttccttccaatcaggaatataacatgcaggggtctgagcactccccagtgggctcacctgtgctgcttgtgtaaatcccagtctcgcggaccctgagatgagcaagctggttgcgaggcgcctgggacctgaagttgcacctcctggcctcttcctcctctcaggctaggttgtaattgtatagctggggcttgcatttattcaccatcttcctgctgctcagggtctcagagttcagagatgactgtggattatccaaggctggatttggctctctgacctcagctcacgcacacaggtgcacacacccctcttttccattaccctgacacttgactaccttgtttcttctcctcgcctctaggttcgcaaggagcttgaagtaaatggcattgaattctacccccagaaggaatttgatgaggatttggaggataagacggagaatgacaaaatcagggtgggtgcctggggcactgctcctccactgatgcccccttgcgacctctgggatgtgtattgtgcacgtcctctgtctgtcttttccctttctgtactccccccaaccttgcctgacccagaccagaagtgacatagggggatggggaggactatggccctggactgtgaacccacagaagggctccctgtacccagaaagccttctatccccagaccacataaaagcctccttttccccaacaaggtctggcaaaaacagtatttggggtgatgggaggggcagcaggcaggaagagcatcaggctggggtccaggaggatctatgctgtggtcagaccctgccttagtttcccctctatgaaatgcaggggttagactgagtggcttataggcttcccccgctagaataacttaaaaaaattaaattggctgggcgtggtgactcatgcctgtatcccagcactttgggaggcctaggtgggagaatcgcttgagcccaggagttcacgaccagcctgggcaacatggcaaaaacttatctctacaaaacctgcaaaaattagccaggcatggtggcgcatgcctgtaatcccagctactcgggaggctgaggcaggagaattgcttgaagccaggaggtggaggttgcagtgagttgaaattgtgccattgcactccagcctgggcaacaagagcgaactctgtctcaaaaaagaaagtacaaagcgctctgcagctgaaggagagctgattcctgaggttaaccagtgaggcagtggtacaattgggactagacccaggactcttcaatctcagtcgggtgctcttttcaagagactgagccttgcccttgccatcagtagtatctctgaatgagcatcagaagtgtgtggttcaaggctagaggaccatatgccatcctgctcctgaaagtccaggttgttggaggatgacggtgcacatgtgtctggtttgtgtttctgccccgtgcagcaggagagcatgccttttgctgtggtgggaagtgacaaggagtaccaagtgaatggcaagagggtcctcggccgaaaaactccatgggggatcatcgaaggtaattcactgcatcttctggaagaactggttgctgatcagttatccagtcaccatttattaagcatctataggtcaaggcactgtctcaggacatatgaaatgaatgccagccagattctgcccataaggagcttacagtctcattgagaagacgatgctcacaggcaggagtaacaagagactgatttagcacctgactgggtggcactgacttagcgcatcaaaggagttcagaacatggagagattagtaaggcctggaaaaactggagaaaggttttcataggaagggggatgtgatctgacaaactgccggagggttgttcaggtgttgccatttccattttattatgaatggatgtgaccctgggcgggtcttgatgattctgaaagtggtcaaagaatcactttaatgatttcattcaatatgataaccctatgaagggaggagagcgggtgctcctgttctcagagtataagctaccaaagcaccggaagctcaggttaaaagccttgtccaaagcacataacttgttagtggtgaaacttgatttcagactcagattttttttttttttgagacggagtctcactctgtcatccaggctggagtgcagtggcgcaatctcagctcactgcaacctctgcctcccaggttcaagtaattcttctgccttagtctcccaagtatctgggactacaggtgcggaccccgatttttgtattttttatttatccccaaaaattagcccagctaatttttgtatttttcgtagagatggagttttgtcatgttggtcaggctggtcttgaactcctgacctcaggtgatccatttgccttggcctcccaaagtgctgggattacagatgtgaaccaccatgcctggtgattttatttttatttttaatagaggtgggggtctcactgtgttacccaggctgatctcaaactcctgggctccagtaatcctcctaccttggcctcccaaagtgctgggattacaggcatgagccacagcgcctggccccatgtcttaatcctcattctgttccaacagtgcttggccaatgatttgcaaatactaggtattcaatatatgttgaattggatttgtcatgtagtgcatgacctttttaaaatggctcaattattattttctctgtgttacttccaaccggattataagcttctgaagaatgggaagtgtatcttaggccttggccagtttctcagacttggtattagttttctcttctataaaatggtaaaaattatagtccctcttggctattatgccacagcgtctagaaggatgtcgtgcccattgtagctgcttaatatttgttcaatgaatcaaatccagtacacccaagtgagcaaatctctggaagggttacaaaaaatgacctgtcccatagctttctcctaaatgcctccgtgacccaaacagaagctcacctcctgggtgttgctgtattaatgaactgactacctgttttgctttgttttgttttgttcatagtggaaaacctcaaccactgtgagtttgccctgcttcgagactttgtcatcaggtaagatgtctcccctccagctgtccagacagcaggttgaattatttggggtcagggtctatctgttcagattcacctcctgcatctccaggtctctctgacagagctttctgccccagttccagctcctgttgcaaaatggaaggtgctgtagaagaatccttagctcctgggagtggttcccattcactgggtccagtccctcgaagtgatgtgtgtcaccgcctcctcttcctgcccctaattgcagccctcttcttctcaccctgtgtcctctaggacccacctccaggacctcaaggaagtgacacacaacatccactatgagacttacagggccaagcggctcaatgacaatggaggcctccctccggtgagcgtggacacagaggaaagccacgacagtaacccatgacgaccacttctctgtgtcatcacacatacccacttcacacacacacatcccaaataccaccaccaaccaccttcttcctctcaactctgtcccacaggcctgtctggtatttgtggagcatcttgtctgtgtgtgtgtgtgtgtgtgtgtgtgtgtgtgtgtgtgtgacagagagagagcgagagagcctgtgtgtgtgcatgcaggggtgaggtattttcactgccctccctggagagtcccttgtaagtttggctcctccatgcctgtccattatctgtctcctttccttgtgtcccaaaacaaagctgtttgcctcactcaggagatctgggggaggtttcatttaaaagtgctgggagcaggtgagccacaggcaactcttctctcggaacctgcacacaaactggggctatagagattctccaaggacagatggcagtggagctagacctgagtagggggcagggagttcaggacaaccctcctgtaagttgggggtggtctgggggtaaggctggggcttcctgggaaaaggaaggccatgagaaggcagagaagtaggccagagctgggttcttgcagaaagcatcagtgcctacaaatggagctccacccttcagtctgtgtcgtgttcagtgtcacaaagctaccacctgtcaccagagcctactgctgctctccactcaactggcctctgctgccaggccactgcctgtctctgcttccgactttgtcttctttctccctttccctccttccctcatacattgctttctctccctctcctgcgtgtctctgacatctctcacttccttttagatgaatctactttaggttcattcctatatttagcatttatgcccagtctacttccagaaatgactttagactgcctttcacataaaatcacaaaactacaggacagtacaaacagattgccagagaaatctgggtcaaagaaaggaataggaaagaaagtttctgtagtcaagcacctgaacaggccctgagctcacaggcagccaatgtaaagagggaaacacagtgagttatgcagttcccagtgtccagttaaaggaagcacacatgctagtcatgtgagacaaccttttattgggacatcaggttctagaactaattctaaagaagtatcagaaacaatatacataatttgtctttcttagtaatttggcttcaaagacaaatttttgaccacacctccgttttctccgtcagacttctctcccttctaagcaggcttctctgttgctccatttgcttcatacatacttgacctctcttttctattccccatcacttttgtgctgaagctaatcatatttatgtctgtctttctctacttttccctaattccctctcctcctgactcctgtagacattcccaatgatacccaccgtcatacatttaggcttttcttgcctttccctgaagccctgtatttattaatgcatatatttcccctgcttgttgtacaagtaagttactcttttcctttaatctgtaagattcatgaaattcggggccagggaaacagtttagccttagggaagggaaaacactaagtgaaactgtttacaataacctcatacaaccttctgtcccatctcctggttcagcctaggtgtttcactggtcctctatgaatcccagcacttataatcccagtcttttatcactcaggtgctaggaaaaaaaacatagactcaagacccaagattcaatggaccaggagaaaggggggcggtgatcaggtcaccagtgaccccaacctatgctctcggtctttcctggaggctgccaacccagccctcatcctcccttgctcacaaagttacagggtaggcacctgtcaggacagaacagcagcagcgctacagcccagaggttatacatttcaacagaacagggatccttggctactgtagaagcagtcctgtatggagaccttggaccagcaggggaagatctatgggcatgggaggtgggcgttggaaaggctgagtaggaatggtgcctggcacccctgaaccatgatctgagcctccctggagaaggtattttatatgtctgctgccagctgctggtctccacaccctcaaccgttctcaacccccctgcagggagaaggcctcctgggcactgtccttccacctgtgccagccaccccctgccccactgctgaatgaaggccatttcaagcgctgcttctcactccattcctctcagctgttattgctgcagggccaagccctttttagtgctgtgctcgtccagctcaccaccacagcccctctcagccctcagtaggtgggaggggccagctgcctctttaggccagttgcatcctccatttatccaaaccactcctctcctcccagtggagtggggttctgccagtacagccctactgcatcatctgcgtcagccggtcctagcccatctgcagggtgaaagaactcatcaagagctccttctgcccttgtaagcccatcccagctacttgtaaccatctctaagggcaatggcattgctccctacccattcatctgcatgagctactcttggcttccttaaagggtcaagaaagcaatttttctgcttactagattcattgagatcagctgtgtgagccccaaagtgggacaagggtgtctccttcattacttaaagatattcatgagggtgggtcactacagatgttggggagcaagggctaggatcactttttaaaaaatcaccacttgtggctgtcccagagtgcggttgtacatcctccccacctcataacgcagccactgaggaagagtggttttcctaagaagacattgctggagttgactttcttctgtccaaacaaacaaacaaaaactaaacacacacacaaacccccagaaacccacaatatgtacacgctaaggaaaaactagcacccttctgtccactcagcaataagagggatctcttcccacctaccctacctactcctacccccaacccccttccccattaatgtgagtaatgaattagcctgaccacaggtggtcactgtaggctaatggaaaatacccaagggagggcaaagccccccatcagatgcatgaatgtttgcgaatgttgactgccactgccccacacactgtgtctttatagaattcccctttgcccaccctcttcctgtctccacctggacacaacttgctcaaaggctggtgacttgtgggccattcatctacaaccaagtcctgatggagcaagaggcccacgcctaggggatgcaagaacaacccgtttcttaaatgttaccagtcccagccaatcttacggtgacattacagttaaatttcccaattgaaaacaagcaaacagacactcaaactggtcctgtaattgttgctagactttatgtgttgtacaactaaacattgctgtttgaacagtaactgcctggcctgtcttatttgtgctccttgaccaaatcagccattatgtcatctcacccatgtgtggagggtgagactctcttggtaagaaatagccacagatattagagatgaaaacactttgtgaggtcagttcatcttcagttggcgtcaggtcgggcctcagtcattattttctagtgtttcataaccaaagtgagtaatggatgggaggttgaggtgggaagatggcttgagcatgggaggttggaggtgcagtgagctgagatcattcctgacaggaccaacccaagtccatacctaaaggcagggggctaagggggcaggtgaggtcgggaggccactcacctatcactcaccccttcgcgctcgagccaattctcagggcccgcctctttctcccctttctcggcgggggcctctaccctgactccgccccgctccccgggcactgccccaccacgtgacccggtctcgctcctcctcctcctcctccttacgtcataatctccgccctccccttcagaaccgcgccccacagctcggcgcaggtcccgcccctttccatctacggggcggcaggaggcccgaagcaagatggcggtgaatcagagccacaccgagaaccgccgcggagccctcatccctaacggtgaaaggtgcctgaggggaagcacggcgtgctgtcggaggagaggagacgaatgagatagacatggcggctcgcaaactctcagcgagtcagggactttgccgccttttttgggcgcggcgctcttagctccgcccccgacctttgggagcgcgcgcccctcactggtgttccggcatgtggaggtggcggaggccggaacgcgtggcctcgcgcgtttgaggggtgggggtgggaatgcgccttttcaaggcgcggggcccagacgcatgtctcctcagggcggggcggggagggggtgcgagacgcgtgtgtccttcgaagagaggccggagctgaccggcggttgtgagcagccgggggccttcggtggcagcgtggctgcccttgggtgcctgcgactttgttggatgaggacaggtactgggtgtgtatctcctcctacttccacgaacaaggtgtcgctctttggtaagagggatgaggaggtcgagtgtggatcattctggaaagatctcaaactgttgtggggcttctccttggacctggaaactttctaaagccatgtttcctccttgctccaaccagggagatgtctgcttttaaaaacaaaattgaaaaaattgaggccaggtgcagtggctcatgcctcttatcccaacagtttgggaagctgaggtggcccaggagtttgagacaagactgggcaacatagtgagaccccatctctacaaaaagtagaaaattagtgggccatggtggtgtgcacccataatcccagctgcttgggaggcgatggtaagaggattgcttgaacccaggagtttgggctgcagtgagctcagattgtaccactgcactccagcctgggtaacagagccagatcctgtcttaaaataaaagatgggactgaacagatgcctgggcacaacaaagcactgttggtcgcaggaagctgtggggcttacaccagttgctttgctccttgcggtgcctgctgctggcccctgagctctctactggagcagactcagccagaggggtgcccatctccaccttcaagcacacttgttcactaaggcctgactccactgcgctcacctctttaccccacacgccccctttcccgtttcctacactcaaactcagtctcccccgctgtgcagttctaaattgcgctcctttctgggctctgacttgccctcaatttccttttctcccaaccagcattgaaactcaagctggatgatgtgcttggggccagcacactcaggtcagtttgaatgtagttgtcaggaagatcgaagtagacgttaccaaatgctgatatccaggtctttcttctatctttccttcctccagaaagttttcttgacagatttatatgggccttagaggttgtatgttctcacctgcttcctacgtacctctgctgctttgttccattttgtggtagatgattgctcaccactctgacagtggtgtccccgtgagcacttactgagagccatttgagcacttgtcattccatggtgtgaagcctttcttttcttttcttttttcttttcttaagatatttttatttctccaaatttgttatttattaggagtgactgaaataaaaaacataattgagtcccatcatcatcatcatcatagaaatggctttaagagaaaactggtcagatgactattattgcttcccatttccaaccagtgaatagttgccactgataaattgacagcgaggagtctgtcaagaatgctcaagatagccgggcgcggtggcccacgcctgtaatcccagcactttgggaggcccaggtgggtggatcacaagatcgggagttcaggagcagcctggccaatatgttgaaaccccatctctactaaaaatacaaaaaaaaaaaaaacagccgggagtggtggcggatgtctgtagtcccagctactcaggaggttgaggcaggagaattgcttgaacccaaaaggtgaatcacccaaaaggtgaaccaaaaggttgaggcaggagaattgctccaccaaaaggtggaggttgcagtgagccgagattgtgccactgcactccaccctgggcaatagagggagactccgtctcaaaaaaaaagaatgctcaagatatgtcatataatacaacatgcctgttcaaagggggaaaaatcttaggaaataacttacatgtacttcttggtttcatcatacaagacaagcacaaaagcaccacccatgcctctgagaacactggaccatgcacccttgaaaacagctttgcttccttcatcatgagtaatcttcctccagcagtcaaatgtgcctgtgtacatgatgtcagttcctttgcatcctgactgcatcatcatgtagcagcaaatggtgttaaatgaataggaagtcaacccagcaacggcagtgacagtctgtgcatcatccaactgatgacaatgtgagtgttcttgggatccggaagcattccctttgcagtgtcatagttaccgaagtaggcagcaggcagctcggtagataataccctgcacagacacgttaaagccttggtacaggctcttaatcccgtcagatttgtagatcttaactaggcagtcaccgaaacctcgcaattccctttcagctccagctttgcccacatcagctgctacacgagtatgggcaaaatcaagagggtacacaaaacacaaggatgtggccccagtggcaccgcctgatgccagattccctgcaaagtagcgccaaaactgggatctcttgtccacaccatccaggaagatctgcttgtatttatctttgaaggtgaagttaagagcctgggtgggggaagtatctgatgacactggccaggttaccgcaccaggacaggactccgtgctccttgggaatacagaccatgcagtctctaatgcccttgtattgcttatctgcagtgatctgcttgctggcatgctgcacctgtagcagcagcttgacccgctcgatgggtgctaccgccatcttggagatggctgcggccactccacctgccagggagtccttggcgaaggacacagcagcctctgtgatgtcgaaagaggaggcaggctgctgtgggatgggactggtccgagaatcggctttgactccggggctgattgtgaagtcatttctaatttggtgtttgggtgtcttctcactcgggctatgggtgtctctctacttcactgcttgtgtgttggagaaagggaaggaagcatgttttaaaaaacaaaacacagaaacactgatttttgtggtcctttgaattacctttatgggatccattttgtgctcctgaatacttaatagcatttatcgaacactatttcaagtactgttcttagttctaagagctttatactgtagttaaaaccactttaccagccaggcgtggtggctcacgcctgtaatcccagcactttgggaggccaaggccagtggattacatgagatcaggagttcaagaccagcctggccaacatggtgaaacccctgtccctactaaaaatacaaaaattagccaggcatggtggtgcacgtctgtaatcccagcgactcaggaggctgaggcacgagaattgcttgagcctgggaggcagaggggaggttgtagtgagctgagatcatgacactacactccagcctgggtaacagggtgaggctctgtctcaaaacaaaacaaagtaaaaaaactcagtctatctacagtgaagatcagtactgttttccctcatttcacaggtgggaaaacaaaaagaagtcatttgcttaaagcgcatgtgggagagcttggatttggatttgaacttaggtactgtgcataaactcctgtactccagctgtccctctagaaagaaaaggactctttctctgttttcttctcaccaaagaagatcctattagtaccctagcttcctggatagaaactactttaaagaaccagagatagtggtgcacatctgtagtcccacctattcgagaggctaaggtgggaggatcacttgaggccaggagttcaagaccacgctgagcaaaatagtgggacctcatctcacagaataaaatttaagaaaagaaaaaaaagaaactatagccaggcatggtggcacatgcctgtaatcccagctgcttgggagactgaggcaggagaatcgcttgaacccaaggaggcagaggttacagtgaacagagatcacgccattgcactccagcctgggcaacaagagtgaaactccatctcaaaaaaaaaaaaaaagtgccagcttatgaggtaattacattggttctctccagaggggtaacctgccaagaagagatgctatagatgttactcttatactgtaaaacattgtgaaatcagattgcttaaaaatgatgtattacaaagttatggaaaaaagcagttgtgactatggaagcccaaggcttatatcctagctctgtcttacactaaatgtgggtacagtgtttccactttttgtaaaatgggagctaatatcctccaacctgtgtgcctgacatggtgattaaaaggattaatcgaaacaacagtttgtaatttattctgtcagagcaaactgctgataaataaaagggagtaagttgactaaaaataaattttttttaaaaaaagaaaaatccgaataaagcaagtttgtactttgtatacaaataaaagatgttattaaaaaaaagaaactaaaaaaacttgagcaggagaagattgattctatgaggagtcttcaaaaagatcatggaaaatatgggttgcgaaaaaactatgcatggattccagattatttttccaccaaaattaactcatactaacttgttataacatgactgaacaggatttagtttgaggcactaagaaagataagatatcaatttgaaaaagggctcctatcagagcaacataaatactgcttaaattgaaggaagaacaaacatcaaatttatggtaaaccttgggtggaagaatggtgaaaccattgatgctttaggaaaagtttatggggaaatggcccaaataaatcagcagtttacaaatggataataagaagggacaagaggccagtcgcgatggctcacgcctgcagtcccagtactttgggaggccgaggcaggtgggtcacttgaggtcaggagtttgagaccagctggccaacgtggtgaaaccctgtctctactaagaatatgtaaaatttgccaggcgtggtggcacatgcctgtaatcccagctatttgggaggctaaggcaggagaattgtgggaacccaggaggtggaggttgcagtgagctgagatcacgtgactgcactccagcctgggcatcacagcaagactccatatcaaaataagtaaataaataaaatttaaaaagaaggaacaagggctgggtgcagtggctgatgcctgtaatcccagaactttgggaggctgaggtcggtggatcacttgagtccaggagtttaagaccagcctgggcaacatagtaaaaccctatctctactaaaaatacaaaaaatagttggatgtggtggcatgtgcctgtagtcctagctatttgggaggctgaggtgggagaatcacttgaacctgggaggtggaggttacagtgagctgagattgtgccactgcactccagcctccagcctgggtgacagagtgagaccctgtctcaaaaaagagaagggacaagatgatgttaaagacgaagcctgggcagggcacagtggctcacggttgtaatcccagcactttgggaggccaaagtgggtgtattgcttgaggtcaggagttccagaccagcttggccaacatgaggaaaccccatctctactaaaaatacaaaaaattagctgggtgtggtggtgatacctgtaatcccaactactcgggaggccgaagcaggagaatcgcttgaacctgagaggctgaggttgcaatgagccaagatcacaccattgcattccagcctggtcaacaagagcaaaactctgtctcaaaaaataaataggctgggcatggtggctcatgcctgtcatcccagcactttgggaggccaaggtgggcagatcacaaagtcaggagttcgagaccagcctgaccaacatgatgaaaccccgtctctactaaaaataaaaaaattagccaggcgtggtggtgcgtgcctgtaatcccggctactcaggaggctgaggcaggagaatcacttgaacccaggaggcggaggttgcaatgagccaagatcatgccactgcatttcagcctgggtgacagagtgtaagactctgtctgaaataaataaataggccgggcatggtggctcacgcctgtaatcccagcactttgggaggctgaggcaggtggatcacctgaggtcaggagtttgagaccagcctggccaaaatgatgaaaccccatctctactaaaaatacaaaaattagttgggggtggtggtgggttcctgtaatcccagctacttgggaggctgaggcaggagaattgcttgaactcaggaggtggaggttgcagtgagtggagatctcgctactgcattccagcctgggtgacactcctgagtgagactctgtctcaaaaataaataaataaatagatgaagcctgtggtggcagaccatccacattaatttgtgaggaaaaaattcatcttgttcatgccctaattgaagagaattcatgattgacagcagaaacaataaccaatacagtacacatatcatttggttcagtttacagaattaaagttgagcaaactttccattcaatgggagccaaaagtgtagtgcccagatcagctgcaggcaagagcagaacttgcagtggaaaatttaaatatgtgggatcaagatcctgaagcatttcttcaaagaattgtaacaggaaatgaaacatggctttaccagtatgatcctgaagataaagcacaatcaaaacggtggctacaaagatgtggaagtggtccactcaaagcaaaagtgaacagacaggtcaagagcaaatgtcatggcaacagttttttgagatgctcaaggcattttctttattgactttctggaaggtcaaagaatggtaacatctgctttgttttaagaaaattaggcaaagctttagcagaaaaacacccaagaaagctttactagagagttcttctccaccatgacaatgctcctgttcatcgttctcatcaaacaaaggcaattttgcaagggttttgatgggaaatcattaggcattcatggatcattaggctccttctaatttattttgtttcccaatcttttttttttttttttcgagacggagtctcgctctgtcacccaggctggagtgcagtggcacgatctccgctcactgcaagctctgcctcccgggttcacgccattctcctgcctcagcctcccaagtagctgggactgcaggcacccgccaccacactcggctaattttttgtatttttagtagagactaaacccactgatggggtttcactgtgttagccaggatggtctcgatcgcctgacctcgtgatccgcccacctcagcctcccaaagtgctggcattacaggcgtgagccaccgctcccagccggctttgtttcctaatcttaaaaatcctgattgggcacccatttttcttctgttaaaaatgtaaaaaagactgccttggcatgattacatttccaggaccctcagttctttagggatggactaaatggcttgtgtcatagcttactaaagtgtcttgaacttgttggaacttatgttgagaaataaggtttatgtttttatcttttaattccatgaactgttcggagttcccattatattttgactcctcttgcctattcacaatacacagttgagaaattgatcacagcttgctgtgttttgtagagattttttctgaccccagctgagaagtcatgaacatatgggacagactctactgtaaaatgggaatcattgagttgttttattttatgcattgttaaaacgtgtgctggaaacctgtcattatagaaaaatcagaagaaaaaatctgttatcccaaatttttaccagtaatgtttgcattttggtatatgtccttctgtacttttccacatggaaataaacagtttttttctccaactgctttataacttattttcctcatttgccagtatattgggaatgttttctagtgtatctacatcattattttcaatggctggtattccagtgtgcataaatctttactcaacccctaatctggaatagtctgggtttttgttttgttttttgtttgtttgtggtttttttggtcattactataaacattcctgcaatgaacatttttgaaaacataattttgcctacctgtcaaaatgtttctttgggataggggaattgtgaggtcagaggattagacttttaaaaagagattaaaaatatttattgaaaatataaaaatcattgttcaaaatattaaagtatacatgactttacattaaaatacacttattgcagaattgccctacagaattatatcaatttacattcctctcagtactctgagtgcccacttcaccatacttttcccaacaattctgttcccattaaacaattccctctatccctctccccatgacacctagtaacaaccattctactttctgtttctatgaatttgactacttcagatacctcatgtaagtgtaatgacaatatttgtctttttgtggctggtttatttaacttagcgtaacatcctcaaggttcgtccatgttacagcatgtgacaggatttccttcttttaaggttgaaaaatattccattgtatgtatgtgccacattttgtttatccattcatgcactgatggacatttaggttgcttccacctcctggttattgtgaatagtgctgctatcaacataagtattcaaatatctatttgagacactgctggcaattcttttggatgtatacccagaagcaggattgctagcttgtacggtagttctatttttaattttttttgaggagcctccggactgttttccatagcagctactcattttacatttctagcaacagtgcacaagagttccggtttctccacatcctcaccaacacttgtttttcttctcttctcttctcctcttcctttcctttcctttcctttcctttcctttgctttcctttcctttcctttcctttcctttcctttcctttcctttcctttctccctcccttccctctccctccccctccccctctcctcccctcccttccctttttttgacagagtctcactctgtcactcaggctgtagtgtagcagcaggatcttggctcattgcagccttagcttccggggttcaagtgattcacatgccctcagcctcctgagtagccaggattacaagcatatgccactacacccagttttttgtatttttagtagagacggggtttcgctgtgttggccaggctggtctcaaactcttagcatcaagtgatccactcaccttggcctcccaaagtgctgggattacaggcatgagccaccatgcctggacctgttggttttttaaatattaaccatcctaatgggtataaagtgatgtctcattgtggttttgatttgtatttctctgatgattagtaatgacaatctttttatatgctcattggccatttgtgtattattgctcttgttgcccaggctggagtgcaatggtgcgatctcagctcactgcaacctctgcctcccaggttcaagtgattctcctgcctcagcctcctgagtagctgggattacaggtgcccaccaccacacctggctaattttttttattattttttttctaagatggagtctcgctctgttgcccaggctggagtgcagtggcacgatcttggctgactgcaagctccgcctcccaggttcacaccattctcctgcctcagcctcctgagtagctgggactacaggtgtccaccaccacgcccggctaattttttctattttttagtagagacggggtttcaccgtgttagccaggatggtctcgatctcctgatcttgtgatccacccgcctcagcctcccaaagtgctgggattacaggcgtgagccactgggcctggccaatttttttgtatttttagtagagacagggtttcaccatgttgggctggctggtcttgaactactgacctcagttgatccacccaccttggccttgtgctgggattacagggagctctttacatactctagatattaagcccttatcataaatacaatttgaaatattttctcccattccataggttgctgtttcattctggtgattgtgtcctttgatacacaatttttaagtttgatatagtccaatttatttatttgttcttttgttgccggtgcttttgtttttttatccaagaagtcattgacaagtccaatgtcacgaagattttcagtatgtttttttctaggagttttatagttttgggtcttatgtttaagtctttaatccattttgagttaatttttgcatactatgtaagataaaggtatgacttcattcttttgcatgtggatatccagttttctaaaaggacatcatttgttaaatagattgtcttttcctcactgagtcatcttagtacctttgttgaagattatttgatcaattctcacatatatgtgaagatttgtttctattctagtccattggtttgtttatctttaatgccagtatcatgctgttttggttactgtagctttgtaatatactttgaaatcaggaagtgtgaatcctctttgttcttctttttaaaaattatttggctttttggggtcccttgagattctatatgaattttatgatgtcgctttctgtttgtgcaaaaagtgttgttgagatttggtagggattgtgttgaatctctgaatcacttgagtagcctggacgtcttagccttattaagttttcaaatccatgaacatgggatatctttccatttatttatgtcttcaatatttttcactaatgttttatagttttcagtgtacaaacctttcacctccttggtgaggtttattcctaagtattttattctttttgatgctattgtaaatggaattatttccttaatctcctttttggatcattcataattagtgtatagaaatgcaactatatttgtgggttgattttatatgctgctactttactgaattcacttattttgacagctttttggtggactctttaagtttatttacatataagatcacgccatctgtgaacggagttaattttacttcttccttccaaatttgaataccatttatttatttattttattttttgcctaattgctctggctaggacttccaatactatgtcgaatagaagtggtgaaagcaggcatccttgccttgtttctaatcttagaggggaagctttcagtcttttgccattcagtatgctgttagctgcaggcttttcatatatggcttttattatgttgaggtagcttccttctacttttagtttgttgagtgtttttatcatgaaaatatattgaaccttttcttttcttttttttctttttttttgagacggagtctcgctctgttgcccaggctggagtgcagtggcgcaatctcggctcactgccagctctgcctccaaggttcacgccattctcctgcctcagcctcctgagtagctgggactacaggcgcccaccaccacacccggctaattttttgtatttttagtagagatggggtttcaccgtgttagccaggatgatctcgatctcctgacctcgtgatccgcccgccttggcctcccaaagagctgggattacaggcgtgagccaccacgcctggccaaaaatatactgaatcttttcatatgctttttctgcatcgattgtgatgatcgcatggttttttcccttcattttgttcatatggtgtgttacattgattcattttcctatgctgaaccatccttgcattctaggagtaaaccccatttggtcatagtgtatagtccttttaatgtgctgctgaatttggtttgctagtattttgttgaggattttttacatcaatattcatcagagatactgacctgcaattttattttattgtagtttctttgtctggcttcggtatcagggtaatgctggcctcataaagtaagcctagaagtgtttcttcctctttaattttggggaagagtttcagaaagattagttaattctttaaacgttttgtataatagaatttgttgagaggtttttttttctctttttgagacaggttctcactctgtcaccctgtctggagtgcagtgatgtgacatgatcacagcttactgctgcctcaatctccgaggctcaagtgatcctcccacctcagcctcccgagtagctgggactacagatgtgtgccaccacacccaactttttttttatatattttgtagagatgaggttttcaagttgcctaggctggtcggaaactcctggcctcgagcaatcctcctgtctcagcctcccaaagtgctgggattaaaggcatgagccaccacacctagctgagaggtttttggttactgattcaatttccttactagttaattggtctgtttatattttatgtttgttcatgattcagtgtggtaggttgtgtttttctagggatttatccatttcttctaggttatccaacttgacatacaattgtccttggttttctctttaatccttgtaactccttggcatcagttttttttttggttgttgttgttgttgtttttcttgttgttgttgttttggagacagagtcttactctgtcgcccaggctggagtgcagtcgtgcaatattggctcgctgcaacctttgcctcctgggttaaagtgattctcctgcctcagcctcccttgtagctgggattacaggtgcccaccaccatgcctggctaatttttttgaatgtttatactagagatggggtttcgccatgttggccaggctggtctcaaactcctggcctcaagtaatccacctgccttggcctcccaaagtgctgggattacaggctgagccaccatgcctggctggcatcagttttaatatcctctttttcatttctgattttagttgagacttctctctttttcttaatctagctaagagtttgtcaagtttgttgaacttaaattttttttcttatttttttctattctcgcttttatttatctctgttctaatctttattattttcttctttctgctagctttgggcttcatttgtttttctttagttccttgaggcataaagttaggttgtcgatttgagatctttcttctttattaaagtacacatctgcagctataaacatcttagcactgcatttacagcaacccataagctttggtatgttgtgttttcatgttcatttttctctaggtactttctaatttccctctgatttcttctttgactcatttatttaatagtgtattgtttaatttccacatatttgtggcagttttccttgtgctgttgatttctagtttctttccattgtaatcagaaaacatattataaaatatagcgtttcttgtatttcaaatctactagtaaagagctttcattttttgtttatttggtaatgtcttaatttctctttaatttttgaaggatagttttgccactcatagaattcttggttaagagttttttgtttttagggctgggcacggtggctctcgcctgtaatcacagcactttgggaggccgaggcaggtggatcacgaggtcagaagatggagaccattctggctaacatggtgaaaccccatctctactaaaaatgcaaaaaattagttgggcgtggtggcacgcacctgtagtcccagctactcaggaggctgaggcaggagaatcacttgaactcaggaggtggaggttgcagtgagccaagatcatgccactgcactccagtttgggcaatggagcatgactctgtctcaaaaaaaaaaaacaacggagtgtttttttacttttagcagtttgaatatgtcatcacatttccttttggcctccatgatttcaataagaaatcgctgctggccgggcgtggtggcttatgcctgtaatcccagcactttgggagcccgaggtgagcagatcacctgaggccgggagttcgagaccagcctgaccaacatggagaaaccccatctctactaaaaatacaaaattagctgggtgtggtggtgcatgcctgtaatcccagctatataatccaagctactcgggaggctgaggcaggagaatcacttgaacctgggaggtggaggttgtggtgagccaagattgtgccattgcactctagcctgggcaacaaaagtgaaactccatctcaaaaaaaaaaaaaagaaaaagaaaaagaaaaagaaatcagctgctagtctgaggattccttgtgcgtgatgagtcacttatcttgttaatttcaagattccttgtatttggctttcaataatttgattataatgcatgtcagtgtggaactgagtttattctacttggagtttgttgcacttggatgtgtagattcatgtatttcattaaatttgggaaggttttggccattatttatttattttgagatagggtctctatcacgtaggctggagtgcagtggcacgatcacagctcactgcagcctcgacatcccaggctcaagtgattctcttgcctcagcctcctgagtagctggggctactgatgcatgccaccacacctgactaaatttttaattttttttttttttgagagagagtctcactctgttgcccagactggagtgcattggtgcgatctcagttcactgtaacctctgcctcctgggttcacgcaattctccggcctcagcctccggagtagctgggattataggcatgcaccacccacgcctggctattttttgtatttttagtagagatggggtctcaccatgttggtcaggctgggctcgaattcctgacttcaggtgatccatctgcctctgcctttcaaagtactgggattacaggcatgagccaccgcaccccaccggcaaatttttaaatttttagtagaggtgaggtttcactatgttgcccaagctggtttcaaactcctgagctcaagcagtcctcccgcctcagcctcccaaactgctgggattacaggcatgagccactgtttccggctcagatattcttttttcttattttgagacagggtctccctctgtcacccaggctggagtgcagtggtacagtcgtggctcactacagccttgacctcccaggctgaagcaatcctcccacctcagtgtcttggataggtgggactgtaggtgcactccaccatgcttggctaattttttgtattctttgtagagatagggtttcaccatgttgcccttgctggtgttgaacacctgtgctcacgcattctgcccactgtggcctcccaaagtgctaggattacaggcatgagccaccgcgcctggccccaaatgttctttattcccctttctctctctcctctccttcttgaattcccattctagatatattggtatgtttgatggtgtcccacagatttcttagacttcgttcattttttcttcgttttttcccatttgtgttactcaggtagtaaccgttattcccattgacctacttcaagttcaataattctctcttctgcctgccaaaattggctgttgagccccagtgattaaattgttcatttcagttgtagtcttcaactctagaatttctgtttggttccttttaataatttctgcctctttattgatattctctacttcctgagactttgtttgtattctttcttttagttatttggacatcatttcctttaactctttgagtatatttacaatagtttatttaaagtgttgtctgataaatccaatgtatgggcttcctcagggacagtttttattaatttattttgttcctgtgtattcccatactttcttgttcctttgcatgcctagtgatttttgttgttgttgaaaactggacattttgaatattttaatgtagtaactctggaaagtagaatctccctcttcttcagggtatatttttgttgcttgttatttgtttgtacagtgacttttctgtactaattttgtaaagtctgtattctttgttatttgtggccactggaatctcagttctgttacctcagtggccagctagtgatttgacagaaattttcttctatgtctggaacaacaacaacaaaatctcccagcccttgcagatgggctttgtgtgtgttggagcatgagcgtgcctttcttactcagccaggcagtttacaactctgccttcaccttcacttctttttgcatcatttccttttttttttgagacagagtcttgctctgttgcccaggctggagtgcaatggcatgatcttggctcactgcaacctctgcctcccgggttcaagcaattctcctgcctcagcctcctgagtagctgggattataggcgcccaccactacgcccagctaatttttgtatttttaataaagatgggattttgccatgttggccaggctggtcttgaactcctgacctcaggtgatctgcctgcctcagccttccgaagtgctagattacaggcgtgagccaccgcaccgaggcctttttgcatcacttctaattgtcaatcagaggtgaaagcttagtgcctcttcagtgtgtgtgtgtgtttcattttttgtttgtttttagtatgaatctagccctggacatgtatgtgtatggctttcttgtttctcaggaatatgtgtgagcttttcgaagcctttattcctcaaagcatctcattgctcatcctttcctttagcttttcaatttgtctgtttttttgccccagttgtcatccctttcgctaggtagcagcaactaatacattggcttggaaattttttttttcttgagatgaaatttcgctcttgttccccaggctggagtgcaatgggaagatcttggctcactgcaaactctgcctcccgggttcaagcaattctcctgcctcagcctcccgagtagctgggattacagacacatgccaccaggcccagctaattttgcatttttagtagagacggggtttctccatgttggtcatgctggtcttgaactcccgacctctggtaatcctcccgcctcagcctcccaaagtgctgagattacaggtatgaaccaccggacccggccggaaatgtttttgacaaatgcctcccggtagcctcatcagtcccgggaaaattacaaattaaatacatgccctttgagccggtccttcaaggagccaccagacaagtcaaactacaatttttaaaaataagtgtgttctgctccctccagtacttcgtatctatcatgggaatatagattgttgtcttcaaagctgctgccaagctagtagtgggggatgataccagggtaggttaaaatgtcataaagcttacttactgagatttggctttttaaaaaaattacttaagcattcccctagttaccataagcttttgattagattctagagttctgaaaaagttgattctgacaggttttcttttgctttatttattgcttttatggctagactgacatttaaagattcccattccacagttttttgctaatgtcctgtattttcatagtcttttaaaaatcctccccttttaatctgcacattaccaccctagttccagtttttaccttgcatcaggactattttaggaattcttaaactgatccctctgatacactaccttcttgattatgtgactttcctgttgagaaatctgaagctcacagtttctccttgcctatcaaatgatgtctttaagctgtagttccagcatagctttccaactttgtttcactgtttctcctaacctcacttccacactgtgttttgatgaagccataccactaggcttctcccaagtatgcagtttgctttccatatctgctcctgcacctccatgaatgctgtttgcttcccatctggattgtcctctaccttcacctctacctactgaatgctacccatctctctctctctcttttttttgaaacagggtcatactctgttgcccagggtggagtgcagtggatcactgcaatctgtgccccatggctcaagcaatcttcccacctcagccttccgagtagctgagattacaggcatgtaccaccatgcctggatactttttgtattttagtagagatggggtttcaccatgttggtcaagctggtctctaactccccaaatgatccgccagcctcggcctcccaaagtgctgggattacaggcgtgagccactgtgcccagccagaatactacccatctcttaatcagctcaaattgcagtctttctattaggtcattcctaattacttcaactaaaacgaatctcttctttcactaaattgctatgacagtttgttactaataaatgtatgacatacatttatattatgtatgtcatatattgtttgcattatgatctgtattcatgctttcattcattcttttaataactatttagagcacccactgtttgctagggctagagtagcaaagaaggcagacattgtacctaatgatcattatacattggttacatatatcattaagaaagaaaaggctgggggactgggtatggtggcgcattcctgtagtcctagcacattgggaggctaaagcaggcagatctcttgagcccaggagtttgagaccatcctgggcaacatggtgaaacctcatctctactaaaaatacaaaaaaattggccgggtgcagtggctcacgcctgtaatcccagcactttgggaggtcgaggcgggcggatcacctgaggtcaggagttccagaccagcctggccaacatggtgaaaccccgtctctaccaaaaaatacaaaaattagcctggcatggtggcaggcgacttaatcccagctatttgggaggcagaggcaggagaatcgtttgaacccgggaggcggaggttgcagtgagccgagatcgagccattgcactcaaacctgggggacaagagcaagacttctctcaaaaaaaaaaaaaaaaaattagccaggcgtggtggtgcttgcctacggtcccagctactcaggaggctgaatgggaggatcacctgagcccaggaggtggaggttggtgagcagagattatgccactgcactccagcctgggcaacagagtgagaccctgtctcaaaaaaaaaaaaaaaaaagacagaagaaagagagagagagaaaagaaaggaagggaagggaagaaggaaatggaaggaaagaagggaagggaagaagggaaggaaagtcaaaaggaaaggaaagaaagaagtgagggaaggagggagggagaaagagaaagaagaaataagaaaaagagaaagaaagaaaagaaagaaagataaagtaagaaaaaaaagaacccagcaggatttgatgagtgacagtaaggtgagtccaagttttccaggttaacagtaaggagagagcacgacaggctgagggaacatgtcagagggggctggggcagtctgctgccttactttctttaccagcgtcaaagaaccatttctattagcacagtgctttacacttaccgcacaagaagtataagaattaatgaacacacattgagaataggagtaggtttgacaagaaaaagaatccaatgatgaagagggagaagaataagagtaaattgtcagagaataagatcatttgaattcctttttatttcaataaaatagtagtagtagtaatagtagcagtagcagcagctaatgtttattgagtgcttactctggaaaaaaaaaaaaaaaaactacattaagggccgggcacggtggcatgcctgtaatcccagcactttgggaggctgaggcgggcggatcacaaggtcaggagatcgagaccatcctggctaacagtgaaacccccatctctacaaaaatacaaaaaaattaggcaggcatggtggcgggcgcctgtagtcccagctatttgggaggctgaggcaggagaatggtgtgaacccgggaggcggagcttgcagtgaggtgaaatcgtgccactgcactcccgcctgggcaacagagtaagactctgtctcaaaaaaaaaaaaaaattgcgttaagaactttatgtgtgtcattttacatacattctttattgtgtgccgtctgttcctcattttctacagtctcttgaagcggtctccgaatgtggagctctccttcccacagcgatcagaaggctcaaatgtctttagtggtagaaagacaggaacattgtttctcacttcataccgggtaatttctacttctactttaatctgctgattaactctacatttgttttccttgaaatgaagaaaacttaaacattgacttttgaagtgtttttaaacgtgcgctttgggattttccacactgaagggtggtggaagaaaagatgatgtttctcagttagaccagaatgcaccttgctcttgtaagtctcaatccatggacaaattctgcattccttttccaaagtttctgtccttgcgtaggtgattttcataacttcatgctccatcagtgatcccatgttgtcttttatgatgccatttgatctgatgacgaacctcactgttgaacaaccagtatttgctgcaaacttcattaagggaactattcaggcagctccatatggtaagtgttccctcagaagtgtgtatttttttttccctcaaaatcttctaaaaggtttaagattcaaacttggctcatgttgaaattcaaacaaaagctgccctactttgtcaggtagtgcttcccttggtgtttgtggcagtctttctgttgtcagctatgccagtttcttggtgagtgtgtgccatttcttcccccaggtggctgggaaggacaagctacttttaaattagtcttcagaaatggagatgccattgaatttgcccagttgatggtgaaagctgcctctgctggtaagtgatgctgataaagatattaagcactttggggttttttgtttgtttgtttgggttttttgttgttgttgttgctgttgttgttgttttgttgtttttgagacagggatttttgtatttttgtaagtcggggtttcaccatgttgcccaggctggtctcgaactcctgaactcaaatgatcctcttgcctcagcctcccgaagtgctggggttacaggtatgagccaccatgcccagcccactttggggttttaaggcttgtggaattaaagcaggacttctactcagccaagatttgctggcctttgtggccaggcagttggtattcgcacacatattcagcaggcatttcctgggcctacctacaattgtcaagtaccatgttacagggtaggaacacaaagattattcagtcccttcctatcctgaaggagcttgcaatctagtgggagcttacagccagacacccaggtgactaattatacctgatagtcttttgtccatttaaacactgacctcagatatctactgagcgtctcttccttgggtcagggagcccttagttattctttctttggtgtggctttttagtttttcttctctctggacttgcctttgcttttctcaggtttagtccccatcttacatgagaggggagtagaggtactgtcaagacttatagcactgatctaatggatgtaccacagaactctttcaaactgtgactacaaataatttttttatctcatatatgtgtgtgtgtgtgtgtatatatatatatatatatatatatatatatatatatatatttttttttttttttttttttttttttttgagacagtgtcttgctttgtcacccaggctggagtgcaatcatgcaatcttggctcactgcaacctccacctcccgggttcaagtgattctcctccctcagcctcccaagtagctgggattacaagtgtccaccaccaagcccagctaatttttgtatttttagtagagacggggtttcaccatgttggtcaggctggtctcgaactcctgacctcaggagatccacctgcctcagcctcccaaagtgctgggatcacaggcgtgagccagcacgcctggccggtccttgcgatctttaacccatggcttccatggcctctttgtacagccagcagagaaggaaataaagatctcccctgggaaatttttatgggccaggcctggaaactgtctacattacatctggtcacatgccataggcaaaactcagtgtggtaggctgataatggatccccagatatatccccatcccaatcctcagaatctgtgactgttacgttatttgtaaaaagggtgtttgtagacgtaattaatttaaggatcttgagatgacaagattaccctagattatttaggtggcctctaaatgccatcacaagtgttcttataagagagatgcagaggggagacaagacaaaagtgttttcttcggtaccacacttcctcacattggtctttaatggatatatcttaccaacttggtagaatcctcacttagaagttttttctgaatatctgttatgattaggtgctatgctaggcctggaataagcacaggcaaatgagatacaatctctgcccttaagacacgtgccattcaggacaagggtcatatttcttttctttctttcttttttttttttttttttgagacaaggtcttactctgtcacccaggctggaggctccagtgcagtggcacagataaggctcactgcagcctcaaatttccaggctcaagcaatcctcctgcctcagcttcctgagtagctaggaccacaggcatgcaccaccatgcctggctaatttttaaaaaattttttgtagagatagggtcttgccatgttgcccaggctggtcttgaactcctggggtcaagcaatcctcccatcttggcctcctaaaatgttgggattacaggtgtgagccacttcacccagcccatgtttcttttttatcttgtgtctcaagagcattgttggaaacacatgtaaggtggtgattaaatactctgttaattgtttagttgatatctgctatatatctgacttaattaaaagagttcctattttgccaaatttgtctttccagctgcccgaggatttccacttagaaccttaaatgactggttcagctctatgggaatttatgtaattactggggaagggaatatgtgcactccacagatgccttgttcaggtaaggtatggcagagaggttcttcctggaaggtggaaaattatgccagaggctcaaagatctatcccttgcaggcttgctccctgcaggagcagcagcagagctttaggggcttggaaaatggtcacatctgtgactttgtttccagactgaaacccagtggcaaagtcagcaagtgactgggctttggtttcaggcttacttttaatgatatatacaaacctggaacatacttggcaatcctgttagtgggaagggtcacttcctgtttatagcctgagcagaaaatatatgctcttgcccacttccttgtttccatttcacatagcatagtcatcatacctgtgccacacccttcaaccttactgaggactcgagccctgggtcctttaacagtttgtgttgttaaagtccactgctactgaatggggtttctggaaagtaattctcaaacatggtccactgcctactggtgggccaccaagggtctcctaatgctgccaacacacacaaaaatatgggacttttcttgagttctccttggaacttgatatgcatgtccatgggcctttagttttgtatgtaacttaaaggctacttatttgtaaccttaataggtaccttggtttttaaaggttattacagtctaatattcagaatctaaagtaattgttgctagggtttaacattttttcagttggtgaaattcacataacatataattaacattttaatgtgtacaattcagtggtatttagtgtaaaatttagcagtatttgacgtattcacaatattatacatccaccagctgtctctagtttcaaaaagtggtgttttttttttttggagacagagtctcactttgtcacccaggctgtagtgcagtggcactatcatggccccctgcagcctcgaccccctgggctcaagcgatcctcttacctcagtaccccccaaccagagtaggctaggaccacaggcgcaatccaccatgcccggctaatttttatgtgtttttgtagagacagaaatctccctatgttgtccaggctggttctgaactcctggcctccagccatctgcccgccttgccctcccgaggtgctgggattataggcatgagccatctctggcagccttttttgtttttgtttttgtttttttgagagggagtcttgctctgtcgcccaggctggagtgcagtggcgcgatgcaagctccacctcccgggttcacgccattctcctgcctcagcctcctgagtagctgggactaccggcgcccgccaccacgcccggctaattttttttttgtatttttagtagagacgggatttcactgtgttagccaggatggtctcgatctcctgaccttgtgatccgcccgcctcagcctcccaaagtgctgggattacaggcttgagccaccacacccagcccctgccagcctttttttttaaaaaaattttgtagatacagggtctcactgtgttgcttaggctggtctcacactcctgggctcaagcaagtctattgccttggcttcccaaagtgctgggattacaggtgtaagccacagcatctggtctggtttcaaaactttttatcacctaatagccactaagaagttattccccattgtcccctctctgatcccctggtatcctctaatctgctttctgtctttattgattcacctattgtgaatatatcacataaaagaaatcatacaatatgtgaccttttgtgtttggcttatctcactcaagataacgtttttgaggttcctccaagttgtagcatgtagcaatacttcatttcttttcctggctgaataatactccattgtacatatataccacaatttgtgtattcattcctccattgatggacatttgtcttgtttccaccttttggctattacgaatactagctgctatgagcatttgtatataattttctacgtagacatatgttttcatttctcctggatatgcatcttggagtggaatttctgggtcatatgtaaattctctaactttttgaggaaccaccaactattttccagtgctgcactattttacattcctgtgtaaatgtaagtgttcctatttctacacatcctcagcaacacttatcttcctttttttaaaaaaaaaaatctatattaaagccattctagtgggtatgaagtggtatctcattgtggttttaatttgcatttccttaatgactaatgatgttgaacatcttttaatgtgctttttatataccttaattggagaactgtccaagtcttttgcctattttttttattatttaaatcggattgcttgtctttttgttgttgagttgtaagcattctttatatagtctggatatgaaatccttgtcagatatattatttgtaaatatttttaggttttctttcacattcttgataatgactttttttttttttttttgagacaaagtctccctctgtcacccaggctggagtgcagtggcgccatcttggctcactgcaatctctgcctcccgggtttaagtgattcttgtgcctcagcctcctgaatagctgggactgcgggtgtgtgccaccctgcacagctaatctttgtatttttagtagagatgtagtttcaccatgttgttcagactcatctagaactcctgagctcaaatgatctgcctgcctcggccagtgggttacaggtgtgaacaactgtgcccaggcaaaaatggcttttaatgcacaaaggtttttaatttttatcagatttctcttttttcctcttgttgctcatgcttttgatgtaaaatgtgagaattcgttgccaaatccaatgtcatgaagatttatccctgttttcttctaagcattttatagttttagctcttatatcaagcttgtccaacccatggcccaggatggctttgaatgcagcccaacacaaattcataaactttcttcaaatgttatgagatttttaaaaatagctcatcagctatcgttagtgttagtatattttatatgtggcccaagacaattcttcaccaatgtggcccagggaagccaaaagattggccacctctgttttatattaaggccattgattcactacaagttaatttttatctgtagagtgaagtgagggaagaacctcattcttttacgtgcagatatccagttgtcccagaatcattttttgaagagactgtttttttcccattgaatggtcttggcattctgtcaaaaatcaactgttcatagatgcttgggtttatttctggactcttaattcattccattggtctctaagtctgtccttgtgccagtaaaacactgtcttgattacagtagttttgtaataaattttggattaaagcaaaataactttacagctgtccattcactttatccagttaaatcactttggggaatgtaacccaaggtaataagtaaaactcatgtttattgtaaggttaattggaaagtcagaaacaacaaaaagagtcatctatccatatgatgaaatattatccagctttgaatttatgaagtaaattaacaatatgaagacatttcttataatattaagtaaaagagccagatttaaaaaatcatatggctggccgggcgcagtggctcacgcctgtaatcccagcactttgggaggccgaggcgggtggatcatgaggtcaggagatcgagaccatcctggctaacatggtgaaaccctgtctctactaaaaatacaaaaaaattagctgggcatggtggcgggtgcttgtagtcccagctactcgggaggctgaggtgggagaatggcatgaacccaggaggcagagcttgcagtgagccaagatcgcgccactgcactccagcctgggcaacagagcgagaccccctctcaaaataataataataataataataataataataataataataataatatggctgatatgatcatgattatataaagaatattcacagagattctacaaagaaatacaccaaaatagtaagtgttcaatggtagaattatagatggcttttttccattcctcttttctctattttccaaacgcatattcctcattaagcatgtattactttttttcataatcaaactttattaagtaaaacacatatctgtgcaagagtataagtaacgcaccgatctattgatagggttgttttcatgttgatttgaatccctgcacaacaggaagtgatatgccttcaattggtgatagctagaggaaatagctttagcattattctgcctgacttctcttcttgcgtcagtttgcttcagcattattttttaagttcttccttctcacatattccttgacttaaaggtaactgaatttttttccttccattataattcccagttattgtctatggagccccacctgcaggatatggagccccacctcccggatacggagccccacctgcaggatatggagcccaacccgtaggaaatgaaggcccgcctgtgggatacagagcctcacctgtgcgatatggagccccacctcttggatacggagccccacctgcaggatatggagccccacctctaggatatggagccccacctcttggatatggaaccccacctctcggatatggagccccacctctcggatatggagccccacctgcaggaaatgaaggcccgcctgcgggatacagagcctcacctgctggatcaggagccaggcctcaggaatctacagcagcccaggctcctgaaaacgaggcttctcttccctctgcctcctcttctcaggtccattcttaaccttctaagatgtaaaccttgaagactcaccaagcaaagaggtaccctaaaattgaagtcaggataaggaggacgactcaggtatgtgatcacaggcttctcgcaggtagttgttccaccctttggaagggcaatcttatgggggaaggtgaaactttacttctgtgcctagattttagaagcagaatcaactcttaaatagctggctaaaggaagaataccattgtggggctaattccccagtaatttggttgacattgggttgcatttttaaacataactttttccacactcgcattcaaggttcctgtcttcccatcctcattcaagaaacatttattatgctccgtttgctaggcactaagatgcgtgctaaaaacgtcatgttgaacacttagttgtttgagaaagctaaattttcaatagtaagagtgttataaattacggtggatccacaaaatggagtattatacacctgttgaaaactatgtctagaggtagagaaagccttctttgaggagaccaaaaccaacaaataaaagcatgataaattgactatatcaaaatttaaaacttctctatgacagaagttaaaagataggcaacagaataggaaaaagtgattttcaacatatatattaatttatagtcagaatacgtgaataactacaaatcaattctccccaaaatgacagaaatatgaattgccgaataaccaaggcaatagcatggccagaaaacgtttgaaaagatgttcagcttgactagtgttagggaaatgcaacctgagatgagaaaacatttttatctccaaagatttacaaatattaaaactcttgatatggcactttcacattttaaaatatgcctgcgagaaaacttgcatgtgtgcacaaagatgcatgtgggaagatttcattatattcattgtttctaacagcacaaaattagaaataacctatatgtccattaataggaaatatatgaataggctatggtatgcccatactacgtatgcagaaatttctaagacttgttgataaggagaaaagcaagttgtagggagcatatactatagtgattttcagcctcatcagactgaatgccccattttataacaaatatttatattttataacaaacgtttatatttgtatatttataacaaatattttgtaatgtctccttcacttcaatgaagtttgtagataattgcatatgattccacaccatttcaaccaaaattaataggccataaatgtgatagaggaaataaaaggagtttgtagtaaaattttaagtgttttaatatataaatgctcagattctaccacactagaagacatactgaagtaatcaagggttcactcccatatacatagtcagcataggtataaagattagaagtgctaactgatatgaatatgttgctttggtgacttgaataccattgctattggcaatattgttctccaaaatggtgaacaacctttgaaaattttccaaataaaacaaagtttagtcttcccttgatttacacagtggttgaattcctgaaaatttctgtatatattaaagtcatataaaacagagttaggctgtaggctcaaatgattataaacatgcttcacctacatcactggctggagagccatttgaaagtcaggagacataggacaattaaggtactgccctgtacgtttcaggatgtcttgcatcttcgactcctcacccattaagtgccaataatggcctccaattgggataaccaaaaatgctcccacttatttcctaattgctccctggggggcagtaccatccctgctgaggaccactattctagactgtttcaaggctttcagccccttcagagctcaccattctcccactctggcaaggcaggcaaagttcttaatttcattggcctttccttatcttattgtaggctcatcaagccacctaaaagggaggccttaaaaatacattagtagccaggtgtggtggcacatgcctgtaatcccagcactttgcactttgataggataaggtgggagaatcacttgaggccagttcaagaccagcttgggcaatatagcgagaccctgtgtctaggaaaaaaaaaaaaaaaaaaaaaaagccaggtgttgtggtgtgcacttgacccagaagacatttaaatcaatatattttctatgcatttttttttttgagacagagtcttgctttatcacccaggctggagtgcagtggcacaatcttggctcactgcaacctccacctcccaggttcaggcaattctcgtgcctcaacctcctgagtagctgggattacaggcaggtaaaaccatgcccagctaattttttttatttttatagagatggggtctggccatgttggccatgctggtcttgaactcctggcctcaagcaatcctcctgtctcagcctcctgaagtgctgggattacaggcatgagccactgcgcctggccttctatgcatatttcttatatgtagttgaaatcatgctatataatgtttcaccagatattttacattttcataggttttgaagaaatgcttgtaaatattgttagtgaccacataatattctgtgacacagttacaccataacgtattttctcagtccctcttttaaggtatttgaattgtttccaggtttttgttattacaacttcatgattaacttctttgtatatggagctttttaaaagttttaaatgctttccttaacacagcttagagtcattgattgatctgcattgtgaaaattaggaaaccagatgctcccatgttctcaaggacagcctttcttaaggaagtcaggtagatattaatgggttttatgtgaaatggagtaactgggttaaatataattgaaaaagacaagaaaactggtttctttactacttcttagagccttgactatactaatggacataatctccaagaaggagagattttcaaaatttacagttttttcaaaattatttgattttagaatattcagtaaacattttgttcagtggaagaaactgagaaacactttctggaattatgggatattagaattagaatggacttcaggtatctggagtatgctagaccttaaagctctttccaaaaatgaagacaagtcaaaagaccattcttccttccattccaaataaaagagctttatatccaatttacagaaagcagggtgggacatcttgaagataaaatatatagaaagtagctgctgcttcctctcagaaattactgggatagagttatgggtctaggaagctggaatgtcaaaacacagggacagccactttgcccaggcaactggcatgaagggaagaagtgaaaagggaaagtgtggctgtaaacctctctaaagtttccaaacagggaatccaggcaatattggatcttaaacatgggtcataggatctggcgcttttatccctaaaatttttggaggaaaataacgagatattttaagtttcttcttttcttacttccaaactacagtacgtgggcaacagtgatgagaggaagagaggagagactcaaccaactagagcagggataaggtttcccttgttcagcttttcagtgtctgctggaatgtgatggtaagttgagaacagggtgaatgggtgaggccttttttatatcagaaagttttccgagtaactgatctctggcaaatatttggggattagaattctaaaagaatacaaactagacttctcttctgctcttcatgttagttatacttgtaccaggtagatttgaggtggggtccagttacctgaaaagcgtagcaggttcgagtttcttaaaggtggaattccaccatgttctcctgtgcaaagggtacctgtttacctggtccaccaaactgccccagtacaaccaaaggctgtgactgtgtaaggatagaaccaagtggagccacagtttggacccacgtggtgctgcgtggcacacctactgttagttagctcccactgtctggtacagttgtttcccccaaaggctcagtccaatttgttctataagaagagctttgtgtcctgtatattcaaaggaccctggtttttgctttgctgaggacaaatccagtcagaattcagctgagccttctgcatgctgagagcactcatgtgctgagttcctcagctcctcactgacgttttgagtactttctttctgactcactcactgtgctggtggattccgctcttcctgtctcttccccagctgcaatacagaaactatactctgttgtctactctttcatttcctattagaaatataaagggatagaaataagaagaccttttagtcctggactatctggtattggcccctaaaatgagcctccaaatactccttttcatgggtaagtggatgctccccagcctgctggagcagaaccttcctggctcagctaccctgagatatcaggacaaaaacatatagttggtgtgattttcctctttttgtttttttttttttcaagatagaatctggctctgtcccccaggctggagtgcagtggcgcgatctcggctcactgcaacctttgccccacaggtttaagcgattctcctgcttcagcctcctgaatagcttggatgacaggtgcctgccaccatgctcggctaatttttgtgtttttagtggagacagggtttcaccatgttggccaggctggtttcgaactcctgacctcaagtgatccacccgcctcggcctcccaaagtgctgggattacaggcatcggcctgtgcctggccgatttttcaatccatagattaatatgttcaagaaatattgcatgtctttgttttctgtaaatttatttctgttaccaagatccccaccaccatctgctttgttggtgggcttctcacaaatcctaagattatgcaaaggtatccagattttatttggcaccaagatgctgagaagtttcttctggtcatcagactgcttctgaaacagccactatccagtcctggcagtcccgtcaagtctaaaagcttgttgccttgggaccccagaatcttaggtagggcttagaaccagggtgtcagagatccaactctgtgtaccatattgctccttagaactggggagtaggaccccaaaggcctccttatccttgagagtctgacaattccttaaacttccagattctgccctctcagctgtgctgttggtctgcatcacctctatctcttaagcatctatcctaatccaaatctcaggatttgggtttacccaaaaggtaatagaaagcctttgccttcatgttgacttggctttccttgcctagcacttggttgcttgcttgaaaatcatgtatgtatatatataaaatgtagaagcccaattcaaattaataatgtaaaaatttattctgttacacagattacctcattgtcaggtaggaagtgaaacgtatgatattcttcctggcctttgccttgagagtcttctggagcctgaagagggtggggcagacaaccatggactgctagagaataaactttctttgaagcttcctaaatggattagaaagaaggggttctgtcaaagggaaagggtctatacagatgtgaccagcagtttgattagtttagatgtatgatttagtagccaatataagaaacttgtaatttttagtaattagaatttattataaataataaaacagggtattaattattaatattatggtatctttggggtgtcacttttctggccagaaacctctgtggacaagtggcacctctgcccaagtattgcttgggcccactgggctcattccacccacccggcctgacaggctgcacttggctcatgctactggcctggatcccatgcctgccaagggagattgcatggagtgacaaggggtgtgtggggaagtgtggggtctggctatttttcagtcagatgtgccagctgctgcagtggggtggtcagctccaggtaccagcatgggcaccagctctccacgaggctgcagctggaccagtcgcactccaagcagcttccacagctggcaccagggaaaaggtggtgcccagaagcttggagatgccaggaaccatagggccccaaagagggagtcacagccctggcttggagagctcccaggtctgggcttcccaaagggctgcagctcttcttttcttctctttgcccacaacatgttgagcaaggggcatgtctcaaccctgtttgtgttacaggtcttttagcctcatttagtgggtccaaagttcttcaatgaggtgcacagacaagtagagggtgagcaatgagaatgaggtacacagacaagtggagggtgagcaagacaaacaggagctattgagtgacaatagctcagaggaggccttggagtgggtagctcctatctgcaggcaggtcttcctgtcatctctgtggctctcagcagagaggaggccctggagtgggtagctcttcactgcagctcattgtgctgatgtctgctgctctcaacagagaggggtcctggaatgggtagctcctctctgcagctggtcgtcccaacatctgcttagctctggctgagcccagggattttatgggcctcagaggggaagaagtacatatcgattggtccatatgtggccatgggcaggcccagaaaagccatcacaagttctcactccagtccatgggactggcatcctggcccccagctttcaagccctccctggcctgaaggtgtgacgtcaccagggacccatccccttctacccaggaacctgtctgcctccttccgttgatggtacccaggctgtaggtgccaagccaagctgccctcagctcccctcagtttccttctatgctcattgtgcccaaaatctggagggggccagggcggcagggggctggtgtgtcagcactgcccaactttgctctgagatcagagaaggcagggagaagctaggcagtaggaacaggcatttccatgcctgcaagggcaagggggtatcgggggacctgccccaataatcacgtaggttcttttctattttcctaagcgtcggctgacttgagaaataaaaggacagagtacaaaagagagaaattttaaagctgggcatccgggggagacatcacacgttggtaggatctgtgatgccccacaagccacaaaaaccagcaagtttttattagggattttcaaaaggggagggagtgtgcgaataggtgtgggtgacagacatcaagtacttaacagggtaatagaatatcacaaggcaagtggaggcagggtgagatcacattgctaatgaagtttcaggcaccattgtcattgataacatcttatcaggagacagggttttgagatcacccggtctgaccaaagtttattaggcgggaatttcctcttcctaataagcctgggagcgctatgggagactggagtttatttcacctctgcaatctcgaccataagagacaggtacgccccgggggggccagttcagagacctacccctaggtgcgcattctctttctcagggactttccatgctgagaaaggaattcagtgatatttctcccatttgcttttgaaagaagagaaatatggctctgttctgcccggctcaccggtggtcagagtttaaggttatctctcttattccctgaacaattgctgttatcctgttcttttttcagggtgcccacatttcatattgctcaaacacatatgctgtacaatttgtgtagttaacgcaattattacagggtcctgagacgatacacatccttctcagctgacaggattaagagattaaagcaaagacaggcataggaaatcacaaggatatttactggggaagtgataagtgtccattaaatctttacaatttatgtttagagactgcagtaaagacaggcataagaaattacaaaagtattaatttggggaactaataaatgtccataaaatcttcacaatccacattcttctgtcatgacttcagccggtccctccgtttggggtccctgacttcccgcaacaaggggggccttcctgggcccccaagagtgcaaggatgcctgggtctgcagccacggtttgggcagctggagctgtgcctgggagggtggagctcccacctgcccctctgggccctgagagcacagggatgcctgggtctgcagccacggcttgggcggctgcagcagcatccaggaagctctcaccccaacttggaaggggcgggtctcgcgcttgtccctggcttttgccttctccatggagcatgcagccctggccatgcctagttgctgcagccagcgtgatggcagcagctgctccagatggcctgctgctgccatcattaatatgtagctattaaacacagttggtgaatcacttttttgtctcttaaattattttgcaataatttaatatttatgacatacaaaaattatatatatttaatgtatacaactgaatgtttttgtgaaacattgtgaaatgaccatcacattccaactaattaacatatctattacctgtatatagttaccatttttataccctttgaccaacatcctccatttccccctcttcccagcccctggcaaccaccatcctactttctgtttctatagtttgactattttagattctacataaaagggagatcatgcagtatttctctttctgtgtcttgcctattttgtttaacataacttcctccagcttcattcattttgttacaaatggcaggattttcttttttaaaggctgaataatagtctgttttgtatgtgtgtataatcacattttctttatctgttcatcactgaaggacatttaggttgtttccatatcttgactgtcgtgcaaaatgctacagtgaacaatgggagtacagatatccctttactatcctataggattgtttgatcatatgttctatttttttttttctttgagaccaagtctcgctctgtcgcccaggttggagtgcagtggcgtgatctgggctcactgcaagctctgcctcctgggttcacaccattctcctgcctcagcctcccgagcagctgggaccacaggcatctgccaccatgcccggctaattttttttacttttagtagagatggggtttcagcatgttagccaggatggtcttgatctcttggccttgtgatctccccgcctcggcctcccaaagtgctgggattacgggcgtgagccaccgtgcccggccatgtgttctatttttaattttttgggaaccttcatactttttccataatggctgtatgaatgtatattcctaacagcagtgtacaagggttctcttttctccacatccttgacaacatttgttatcttttatctttttgataatagcctaaaaggtgtgaagtgatatctcattatggttttgatctgcatttacctgatgattacaaatgttgaacacattttcatatgcttattggccatctgaatttccttttttgagaagtgtctattttggttcttggcccattttttaatccagttatttgtatttttagcattgagttgtatgagttccttatatattttggatattaatcccttatcagctatatagtttccaaacattattttcccattctgtaggttgccttttcattttttggattatttcttctgctctgcagaagctttttagtttgatgtaatcccacttgtctattttttctttcattgcctgtgcttttggtgtcatattgagaaaattattacaagaccaatgtcaaggttttcccaatgttttcttcgaggaattttgcagtttcaagttttacatttgagccttttgtctatttgagttgattgttgtgtagtatgagatggggtcagatttcatttgtgtgtgtgtgtgtgtgtgtgtgtgtgtgtgtgtgtagatacccagtttttccagtactgtttattgaacagattatcctttcccgattgtgtgttcttagcacccttgtcaaagtaagttgttcattaatatgtgagtttatttctgggttctctgttctgttccattttgtctgtgtctgtttttatgccagcaccatactattttggtgatagctttgtaagatagataatttgtagtcaggaagtgtgatgtctccagctttttgttctcgttcaaaattgctttggctattcagggttttttgtagttccatatgaattttaggattttttttttctatttttataaaaagtgcaattgggattttgatagggattgcattgaatctgtagattgctttaggtagtatggacacttagacgatattaattcttccaatctgtgaacatgagatgtctttccacttatttgtgtttttattccatttatttgtgtcagttattttgctgagtcccgtaaattcctaagtattttaaaatttttgttgctaaagtaaatgaggttgcattcttaatttccctttcagatagttcatctttggtatatagagatgctatggagttttatatgttgattttgtgtcctgaaactacggaattcattcattagttctaccagtttcggggggaggtgcggggagagagagagagagtgagagtgtgtgtgtgtgtgtgtgtgtgtgtgtgtgtttgtagtcttttgagctttttatgtatatggtcatggcatgcaaaaataatcttactttttcctttctgacttggaagcctctgtttttcttgcctgattgccctggctatgacttccagtactatgttgattaacagtgataagagtgagcatcctttccttgttctgtatcttagaggaaagaaaagctttcagtctttcaccattgagtgtgatgttagttgtgggcatttcataagtgacctttattgcattgaggtaaatttcttccatacttgttttgttgagtctttatcatgaaaggatgttgacttttgtcaaatgctttttctaggtctactgatgtgatcatctgttttttgtgtttccttcctcttattgtgatttactacattggttgattttcatatgttaactgaccttgtatcctatggataaatcccactctatcatgttgtataatcattttaatgtgctgttgaatttggtttgctagtgttttattaacgatttttgcatttatgttcatcagggatattgcctggtaattttcttatgttatctttagctttggaatcagggtgatgctgactttataaaatgagtttgggagtgcattctcttttttaatttttggaagagtttaagaaggcctagtgttctttgaatatttggtagaattagcatatgaaaccatccggtcttgggcatttctttgttggattttttttttgtttgagaccaagtctcgctctgttgcccagattggagtgcagtggtgtgatcttggctcactgcaagctccgtctcccgggttcacgccattctcctgcctcagcctcccgagtagctgggactacaggcacctgccatcacgcccagctaattttttgtacttttagtagagacggggtttcaccgtgttagccaggatggtctcgatctcctgacctcaggtgatacacccacctcggcctcccaaagtgctgggattacaggcgtgagccactgcgtccagctggattttttttttctttttcgagatagggtcttactctgttgcctaggctgcagtgcagtggtatgatcattgctcactgcagcctcaatctcctgggctcaggtgatcctcctgcctcagcctctcttacgtagctgggactacaggtgcacaccaccattcctggctaatttttttttttttttgagacagagtctcaccccgttgcccagggtggagtgcagtggcactgtgtcggctcactgcaatttccgtctcctgggttcaagcaattctcttgcctccatctcccaagtagctgggattacaggcgcccaccaccatgcctggctaattcttgtatttttttttagtagagacagggtttcaccatgttggacaggctggtgtcgaactcctgacctcaggtgatccactcgccttggcctcccaaagtgctgggattacaggctttttttttttttttccagtatcagtgaggtcttcctgtgttgcctaggctggtctcaaactctagagcccaagcaatcctcctggctcagcgttccaaagtactgtgatcataggtgtgagccactacgctcagcctggaatgtttttgattactgattcaactccttgtttgttattggtctgctcagactttctgtttcttcttgattcggtcttggtagtgtgtgtgttactaaggatttatccatttcttctaggttattccatttattggcatataggttgtcataatagtcccttatgatcctttttatttctgtgtcatccattgtaatgtctcctctcttatttatgattttatttatttgaatcttcttttttaatctagctaaaggcttgatgattttgttgatctttttaaaaagccaacttagttttttctattctctattttgtttatttctgctctaatttttcttatttctgtccttctgctaactttgggtcgagtttgttcctctttttctagtttcttgatttgtacagttaggttttttttttttttttcctcgagatgaagtcttgttttgttacccagagctggagtgcagtggctcaacctcagctcactgcaacctccgcctcctgggttcaagcgattctcctgcctcagcctccagagtagctgggactacaggcaggcaccaccatacccggctaattttttgtatttttagtagacatggggtttcactatgttggacaggctggtttcgaactcttgacttcaagtgatccacccgccttggcctcccaccatgccttggccaatgttaggttctttaattgagatctatcttctctctctctctttttttttttttagacagagtcttgctctgttgcctaggctggagtgcaatggtgcgatctcagctcactgcaacctccgcctcctgggttcaagtaattctcctgcctcagcctcctgagtagctgggattatagttgcctgccaccacgcctggctaattttttgtattttagtagagacgaggtttcaccatgttcgccaggctagtcttgaactcctgacctcaagtgatctgcctgcctcggcctcccaaagtgctgggataacaggtgtgtgagccacctcgcctgaccgagatctttcttctttttaaacataggtgtttaatgctatacatttcccttatggaactgcttttgctgattcctgtaaattttagaaagttagaattttatttttgtctcaagatattttaaaattctctctggatttcctcttttatccagttgttcaagagtgtattgtttttatgaatttgtgaatttttctattttctttatgttaccgatttctagttctttccactgtggcctaagaagataccaggtattatttcaatcttcttaaatttgttaaaacttgttttgtgacttaagatgtgacctatcctggaatatgttccatgtatacttgagatgaaattgtattctgctgctgttggctaaaacgttctgtatgttaggtccatttggtgtatagtgttattcaaatcagttgtttttttattggttgtctgcctgaatgtgctatccattattaaaagtggaatattgaattctcctactattaaattgtttttaacctctttcttcatatctgtccatatttgatttatatatttaagtgctctgatgttcagtacatacatgtttataattgttatagcttcctgttgaattgaaacttttatcattatatgactttctttgtccctagtaacagttttggacttaaaagtctgttttggctgggcacagtggcacacgcctgtaatcccagcactttgggaggggaggctgagacaggcagatcacgaggtcaagagagcgagaccatcctggccaacatggtgaaaccccatctctactaaaaatatataaattagctgggcgtggtggcacacacctgtagtcccagctactcggggggctgaggcaggagaatcacttgaacccaggaggcggaggttacagtgagccgagatcatgccactgcactctagcctggcaacagggcgaggttctgtctttaaaaaaaaaaaaaaaaaaaaaaagtctgttttgtctgataaaagtatagccacttttgctctcttttggttaccatttgcatggagtatctttttctatcccttcacctttagtctgagtgtccttatagctaaagtaagcctttagcttacttctttttatattgtgactctattaccaaatttttttggttatagttattcttgatatttttatttttcaacttttgtagtgttatgggtaaattgggcaccaccattacagtgttatattattttgtatttgactatatttacctttgcctgtgagatttatgctttcacattgctgattaggatgttttaaattccatttgaagaaatcccttaagcatttcttgtaagacaggtgtaatggtgacaaactcagtttttgtttatgtgggaaagactatctctctttcagttttaaaggatagctttgcagggtatagtattcttggttgccattttatgtcaatatttggaacatattatcccattctttcctggcctacaaaatttttgtggagaaatctgctgatagtctcatagggattcccttgaatgacaagttgcttttttcttgcatctttcaaaagtttttgactttgacagtttcattgtgatgtgtcttgttgtagacttgtgttcaacctatttgggatcctatgggcttcttcagtctggacgtctatttctttccaaagatttgggaatctttttagttacttcttcaaatacactttctacttccttttctcactcttcttcatctcataaccccataatgtgtatattagttcacttgatagtgtctcataaatcctataagctttcttcgtacattttagttcttttttctcttttctcctccaattagataatttcaaataacctgtttttgagtctgcagattctttcttctacttgagtcatcttctgaagttctgtattgcattttgtagttcagtcattatattcttcagctccagaatgttttgttttaatttttctctatctttgctgaacttctcatttcattcttgtattcttttcctgatttcattaaattgtttatctgtgttctcttgtagtttgtggaatttctctaaaacaattattgtgaattttttatcaggcggttcatggatatccatctctttggattatttactagaagcttattttcttcctttggtgttgtcatgtttccctgattccttgtgatccttctagccttgcataggtgtttgcacatttagagaagtaatcattggctgggtatggtggcccatgcctgcaactccagcactttgggaggccaaggtgggcagatcacttgagcccagcagttcgagatgaccagcttgggcaacacggtgaaaccctgtctctaccaaagaagataaaaaaattagccaggcgtggtggtatacacctgtagtcccagctactcaggaggctaaggtaggaggatcccttgagcccaggagacagaggttgcagtgagccaagaaaaaaaaaaaaaaaaaaaaaaaggagaagaagcaatccatctcttctaggttttatagagtagctttggtaaggaaagactttcactcctcaggagtgggtgggcagcatgctgcagtgtgccatggcattggttctagtggtcctccacaaagtgtgggggcatgtggcagctccaggttcatggagcagtacagtgttttattggctcagggagctgggtctgtgatgtcagcaactgtgtggtccttggagacaagaggtgtgggggcctacagtggctgcaagggctgttgaagttctcagcaatgcttccaggtgcagcagcaagggactggaacaagttgttggtgtggggctagggctcgtggtgtgtatatgctcagttgtgggagccagctgctggcacatgtgtgatggcaatggccagatgtgggcatatattgtggtgaaggcgaggaccaacagtaggggctggagtcaactctaggcacacacacagtggcagttatgtgtgtgtgtagctgtggtgttggtagtgtgcatccttgtgaatttaagggccagttgtaggcatgtgcatggagggaagggccagcaaccattctggatcagctgcatgcatgtgcacaactgaggagaagcaaattgcttttaaagtccaaatgttctttcaacaatctttgacacgctagccaaaactactggagctagatttttttttttttgagatggagtcttgctctgttgcccaggctagagtgcagtggcgcgatctaagctcactgcaacctccacctcccaggttcaagcgattctcctgcctcagtctcccaaatagctgggattatagggaactgccatcatacccggctaattttttgtatttttgtatagacagggtttcatcatattggccaggctggtcttgaactactggcctcaagtgatccacccaccttggcctcccaaagttctgggattacaggcgtgagccacctcgcccgccctgcagctagagttttaagttgttaaccaaagaaaagatttccttctctgttgcctcagagaggcaatagttgtcttttcggtttggagaagagttacccaaatgagccttgctctcctgtttcaccaagtctgtgcctagaatgctttctatccatccctgtccctatcccaccaggcatgtgccactatgtctggctaatttttttttaaatttttttttatctctacagacaaggtctcattatgttgactaggctggtcttgaactcctggcctgaagcgatcctcccacttcagccacccaaaatgctgagattataagcatgtgccaccgcgaccagctggccttacctttcaatacagccccactggggattcagtttcaacatgagtttcagaggggacaaacattcaagccatagcaggaattaatagagaaaatcaacaaaaccaaatttcgttctttgaaaagatgaataaaaattttggttttggctaggtacagtggctcatgcctgtaatcccagcattttgggaagccaaggcagaaggattgcttaagcccaggagttcgagactagcctgggcaacgaggggagaccctgtctctacaaataataaaaaactttcactggacatggtggtgtgtgcctgttagtcccagctactggggaggctgaggcaggaagattgcttgaacccaggaagtcaaggctgcagtgggccatgttcatgccactgcattccagcatgggtgacagagactgtgtttcaaaaaataaatttttaaaaatttattttgtagagatggatgtcactctgtcacccaggctggagtgcagtggcttaatcatagctcactgtaactaggaactcctgggctcaagttgatcgtcctgcctcagcctcctgaatagctgggactacaggcacatgccacacctggctaatttttttttctttatttattttttatttttttaagagagatgggcatctcactatgttgcccggtctggtcttgaactcctggccttaatcaatcctcttgtctcagtctcccaaagcactgtgattagaagcataagccactatgcccagcctaaaatcaataaaattttaaaacctcggccgggcgcggtggctcacgcctgtaatcccagcactttgggagtccgaggcgggcggatcacgaggtcaggagatcgagaccatcctggccaacatggtgaaaccccgtctctactaaaaaaaatacaaaaaattagccgggcatggtggtggtcgcctgtagtcccagctactctggaggctgaggcaggagaatggcgtgaacccaggaggcggagcttgcagtgagccactgcactccagcctgggcgacagagcgagactgtctcaaaaacaaaacaaaaaacaaaacaaacaaacaaaaaacagcctctcgccaggctaactaaggaaaaaggacaaatttctgtgaagtgaaatttcatagaaatgaaagagaaaaatcactgttgatcccatgggcattacaaggattataaggaatattgtgaacagctctctgcccacaaattcgataacctagatgaaatggactaattccttgaaagaaactcacacaagaagaaacagacaatctcaatagccctatatgtattttaaaaattgagtcaataattaataaacttccaaaaaataaagcaccaggctcaggtgagttcactggtaaattcaatatgttccagaaaataggaggagagacttgcatggttcattaaagttcaaattataactgatttacattttcaactatatttacttttaaaatgcttgactttcccattttaaaatctaaactagacatcttaattggtgaaagttgttgaagctacttgttgatagacacatgctgtcaagtgaagtagttttataggtatgggttttttctcctcctccaccagggtgggtggaataagttgatttggccaatgtgtaatatttaaactgttttgtaaaataagtgtctggccatttggtaggatttctatgtgtgaaaggtcccagaatcaaaatggtacatccataatcaaccatttaaccttctttgttctaaaacaaacaaaaaccaaagggcactggttggtagggtgaggtgggggagtattttaatttttggaatttgggaagcagacagctttactttataaggttggaacagcagcactatccatgaaatataaaccaaaaatctttactgtttctaaatttcctagattgctattatttggtcctaagttgagtattccacagaaagtggtaattatcttttctctcttcctccattagaaaattaggttaataatggattcctataatgggagcatcaccacttactaaaacacacatagaatgatgaataaaaaaatttttctaggattgtcttttattctgccacatttattgataaacagtgaagaaattttttaaaaagttttatgaattttttgtcacatcatttttagaaatgttctacctgtatatggtaatgtcccattttaaaaatattggacatcttcaatcttaaacatttctatttagctgattggttctcacatatacttctaaaagagaaattttatgttataagagttacttttttggattagatttattaatctcagtgatgtactattctgacattttaggaaggaggtaattgtttttaatgatggataaacttgctggtgttttggatcttacgatgctgagcatgttctgcactggtgctaatgtctaatataattttatatttacaaacatacgtgctacccagagattaatttagtccacagaaactattgacccctcttgagatgacaacatatacactcctaaatcagtgtgtttagacttttcaggtatctaactcatttccaaacatgcagcatgtttataaacctcttgatttccagcaacatactatagaaaacacctgctattcaaaacacaacttctcagtgtcatccattgctgtcgtgagagacaacatagcaatatctggtatgttgcaagctttcaagatagcctgaacttaaaaagttggtccattagttgtatctgatggatatataaatttgcctcctagttcactttgtgtcaagagctaaaactgtgagcctaactttctcttactggtgggtaataactgaaaataaagatttattttcaagctcaaaaaaaaaaaaaaaaaaaaagaaaatcggagcagagagaaacacttgctgactcattctctgagaccaaaaatatgtaaataccagaaccatggccagatgtggtggctcatgcctcgagaccagcctggccaacatggtgaaaccctgtctctactaaaagtacaaaaattagcctggtgttgtgtcgggtgcctgtaatcccagctactcgggaggctgaggcaggagaatcgcttgaacctgggcggcggaggttgcagtgagctgagatcacgccactgcacagagcgagtctcatctcaaaaacaacaacaaaaaaccccccgcctcccaaaaaaaaccaatcaaattttttttttttttttttgagacagagtctcactctgttgcccaggctggagtgcagtggcgccgtctcagcttactgcaagctccgcctcccgggttcacgccattctcctgcctcagcctccccagcagctgggactataggcgcatgccaccacacctggctaactttttatatttttagaagagacggggtttcaccgtgttagccaggatggtcttgatctcctgaccttgtggtccgcccaatctcggcctcccaaagtgctgggattataggcgtaagccactgcacccagcctaaaaccagtcaatatatttttagaaagaaaatctgcagaccagtatctctcataaacatagatgcaaaaatcctcaaaacaaaatattaataaacggaatccaagaatatattaaaaatacaccatgaccaagtagaatttatccaggtgtgcagaacagtttcaacatttgaaattaatataatccatcacatcaacaatctaaagaagaaaaataggctgggtgcggtggctcacacctgtaatcccagcactttgggaggccaaggcgggcagatcacaaggtcaagagatcaagaccatcctggccaacatggtgaaaccctgtgtctattaaaagtacaaaaattagccgggcgtggtggtgcacacctgtaatcccagctactcgggaggcagaggttgcagtgagccgggattgcaccactgcactccagcctggcaatagagcaagactccatctcaaaaaaaaaaaagaagaaaaatatatcaatagatacagaaaaagctcttaaaaaatctagcttctcttcatgataaaaagcctcagcaggccgggcacggtggttcatgcctgtaatcccagcactctgggaggctgaggcaggtggatcatgaggtcaggagatcgagaccatcctggctaacacagtgaaaccttgtctctactaaaaatacaaaaaattagccgggtgtggtggcgggtgcctgtggtcccagctactctggaggctgaggcaggagaatggtgtgaacccaggaggcggagcttgcagtgagccaggatcacgccactgtactccagcctgggcgacagagcgagactcggtctcaaaaaaaaaaaaaagaaaagaaaaaaaagaaaccctcagcaaactaggaatagaggggaatatcctcagcttgataaaaaacattgtccaaaaactaaaaaccctacaggtgacataaaactctgtggtggcaaatgagatgctttcttgctaagatcaggaataaggcagtgtcccctctcactattcctattctattgaacctcctgttggaagttctggctaatccagtaagataaggaaaggaaataaaaggcatatatattcagaatgaaggaacaacctactttgttcacaaatgaccaacacaatactgaaaagaacaaagtcaaagaactgatcctttaagacttgctgtaaagttatagtaatcaagacaatgtggtattagcaaagcagcagacaagtagattagtggaacagaagagtccagaatgtaccgcacaaatatagccaacatgttttacaaagggacccaggtaattcaatggagaaaggatagtcttcccaagtggtactagcgcaattggacattcatatttcaaaagaaaaaaaaatctagacacagactttacacttttcataaaaattaactcaatatagacctaattgtaaaacactaagctataaaaattctagaagataacataggaggccgggcacggtggctcattcctgtaatcctagcactttgggaggccaaggtgggtggatcacgaggtcaggagattgagaccatcctggctaacacggtgaaaccccgtctctactaaaaatacaaaaaattagccgggcgtggtggcgggcacctgtagtcctagctactcaggaggctgaggcaggagaatggcatgaacccaggaggcagagcttgcagtgagcggagatcatgccactgcactccagcctgggtgacagagcgagactccgtctccaaaacaaaacaaaacaaaaaaaaaaaaaaaaaaaaaaaaaatagaacattttggcttttccagtgagtctttagaaacaacatcaaaagcatgaaaaaagaaaaaaataattgataggttgaatacaaatacaaaatttagccaggcatggtggcacatgcctataatcccagctactggggaggctgaggcaggagaattgcttgaacctgagaggcagaggttgcagtgagccaagattgtgccatagcactccggcctgggcaaagaagcgagactccgtctcaaaaaaaaaaaaaaaaaaaaaaaagtggcacattttggtgtggcacattctgccatcttttatatctaaaatttacaggtggctcatgcctgtaatctttgggaggccgaagtgggaagattgcttgaggccagtttaagaccagtctgggcaacatagtgagaccctgtctctacaaaaaactacaaaaattagctgggcattcctatagtcctagctactcgggaggcttaggtgggaggattgcttgaggctgcagtgaacaatgattgtgccagtgtcttctagcctgggtgacagagggagaccctgtctctaaaaacaaacgaaaaatccaactcttacaactcaataattaaaaaaacaaaaaacaaaaaaaacaacctgggccaggcatggtggcttatgcttgtaatcccagcactttgggaagccgaggcaggcggatcacctgaggttaggaatttgagaccagcctagccaacatgacaaaaccccgtctctactaaaaatatataaaaattagctgggtgttgtggcgcttgcctgtaatcccagctactcaggaggttgaggcaggaggatctcttgaacccaggaggtggaggttgcagtgagccgagatcatgccactgcactccagtctgggcaacagagtgagactccattcccccgtcccctcccaaaaaaaaaaactaattaaaaaatggataaaagacccaaacagacacctcaccaaagaagataaacagatggcaaacacacatattagaagatgctgaacatcatatatcattaaggaattgcaaattaaaacagatactattatacacctattacaatggctaaaatccaaaatgctgacaacaccaaattctggtgaggatgtggagcaacaggaacgttcattgcttcctgggagtacaaaatggtacactttagtaagaaactgccaaactgtcttccaaactaaatatactcttaccatatgtcccagcaattgtgctccttggtatttatccaaatgagttgaaaatctatgtccacaaaaatctgcactcaaatatttatagcagctttattcataattgctgaaacctggaagcaacaaagatgtccttgaatagttgaatggataaacagtggtatatctatacaatgggatattattcatttaagcacattgcttaaaaagtaatgtactatcaaaccatgaaaagatatggaggaaccctagattcatattgctaagtgaaagaagccaatctgaaaggctatttactgtatgattcaaactctgtgacattctggaaaaggcaaaactatggagacagtgaaaagatcagtgatggccaggagtgggggagagggaagggagggagggatgaaccaggtggaacaaggatttttagggcagtgaaactattctgtatgatactgtaacagtgggtgtgcctcatgacacattagtgaaaacccagtgaatgtacagcataaagagtgaaccctaatgtaaaccctaatgtaaattatgaacgtttgctaataatgtatcagtactatcaattataacaaatctgccacattaatgcaggatgttaacaataggggaaacagtgagtgaagagagggtatatgggaactctgcattttctgcttaattgttcaggaaacctaaacctggtctttaaaaggctggggtcaggggagggatgggaagcccatttagagggagagactgatttcccacagctttttaaatgtctgagggctcccaagctaggtggcaaaaaccaccatgtagaaaagcctgggcctgagtaactacttattcaggtgccattctcagtgctttacataaattagctcacttaattcctgagcgataatcccatgaggtaggaactattatccccactataaaggaagtagaatattataatacattatccccattatagaggaagtagaagcacagagagattaagtagggtgctcaagattgcacagctgtaagtggagcaaggatttaaatctaggtattaggatatacaactaaattaccatcttattctcattctataaaccggtcagtctttttagtaaggaaaatcatctcaatttattattttacacaccccaagtcagtgcagatggctttgttccaacctggagaggtaaagggtctttgtagaggtaaaggtctgtctttgtaggccttcacatacagcctctccagggactgtcttgaggaatactttctgagaacttcttgaagctctttaaacaggaaccaacttgtatttttttttcctcttttttttgagatggagtctggctctgtcacccaggctggagtacagtggtgtgatcctggctcactgcaacctccacctggttccagcgattcttgtgccccagcctctcgagtaggtgggactacaggtgtgtaccaccatgcccagctaattttttgtatttttagtagagacagggtttcactatgttggccaggctggtctcgaactcctgacctcaggcgatccacccaccttggcctcccagagtgctgggattagaggcatgagccactgtgccaggcctggaacccacttgtattttttccttggagtccagaaattctagactgttgctggaaataagagtggcaaaataggtacttttcaacaatttctaacacttttgtctatttttccaatgtgtctttggcctgtgcatattgccttggcagcccctcccaatggtcactgagtcctggagatctggccagtccttcttcatcttcactgcgatcacccctgtcccagcctccctgtctctcacctggatccttgaacagcagctaattgtaggctctctgtatacctgaaaggctccagtcaggaggcaaaagccatgtgttatttgtacagaaagataggcaaccgtaagtactgtaattccagaacatcttcattacctaaaaagaaaccccataaccattagcaatcacttctcatttcctcttccctccatcccttggcaaccatttatctactttttgtctctgtaggtttgcctattccagacatttcttataaatggaataatacaatgcatgtacttttgtgtctggctttcacttagcataaagttttcaaggttcaaccgtgttgtggcatgtgtcactatggatatactgtgtggattgcatggatataacacattttgtttatccattcatcagttgatagacgtttgagttgtttatactttttggctattatgaataatgctatgaacattcacatacaagtctttgtgtaggcatatttttaaatttctcttaggcatttacctaagagtgaattgctggatcatatggtaactctgtttaacattttgaggaactgccaggcaggtttctacagtgactgatgactaacaatgtaacatgggcatctttttttttcctctttttctttttctttttcttttttttttaagaccagagtcactctcacccaggctggagtgcagtggcgcgatctcagctcaccacaacctccacctcccaggttcaagcagttctcctgcctcagcctcataagtagctgggactacaggtgcatgccaccatgcctggctaatttttgtatttttagtagagacagggttttactatgttggccaggctggtctcgaactcctgacctcatgatccacctgcctcggcctcccaaagtgctggaattacaggcatgagccaccacacctggccaatgttgggcatcttttcatgagcttattagccatttgtataactctttggagatatgtctattcaaattctttgtctatttttaattaagtcatttgtctttttattaagttgtatatatctggatactagaccctagttggagtatatgatttacaaatgctgcatcccatcctgcgagttgtcttttaactttgtttattttttatttaaaaaaaaatgagacaaggtcttactatgttgctcaggctcttgaactcctggcctcaagtgatcctcccatcccagcctcccagtgtgctgggattacaagtgtatgcgactgtgcggggcctcttttaattttctggatagtatactttgacacagaaaagttttgaattttgatcaagtccaacttatctattttttttgattgcttctgatttaaaaaaaaaattttttttttgagacagagtctcacactgtcacccaggctagagtgcagtggcacgatcactgaaacctccacctctcaggttcaagcaattctcctgctttagcctcctgagcagctgggattacaggcgcatggcaccatgcccaggtaatttttttttttttttgtatttttagtagagatagggtttcaccttattggccaggctggtctcaaactcctgacctcaggtgatccacctgccttggcctcccaaagtgctgggattataagcatgacccaccgtacccagcctgtttctgattttagtgtcctatctaagaaactgtggcataatctaaagtcactaagatttatacttatgttttattctaagagttttatagttttcagtcttacatttaggtcttttaaccattttgagttacattcatttttttttacatgtggatatctagttgtcccagtgccatttatttaaaatactattttctaattgaagggtcttagtacctttgtaaaaaaaaaaaaaaaatcaattaactggctggatgcagtggttcatgcctctgattccagtgctttgggaggccaaggtgggaggttcgcctgaacccaggggtttaagcctgcactgagctatgtcacactagtacacgccagcctgggcaacagagtgagacctggtgtctaaaaaagaaaaaaaatcaattagctatagatgtatgggtttatttctggactctcaactgtatgtctattgttataccagtaccacactgtttttattactgtagctttttggtagatactgaaattgaaagtgtgtgtcctctttttctttcttttcttttttttcttgagatggagttttgctctgtcacccaggctggagtgcaatggtgtgatctcagctcactgcaacctctgcctcctgagttcaaatgattctcctgcatcaacaggcacccaccaccatgcccagctaatttttttttgagactgagtctcgctctgtcgcccaggctggagtgcagtggcgcgatcttggctcactacaacctccgcctcagggttcaagcgattttccgcctcagcctccagagtagctgggattacaggcgcctgccaccaagcctggctaatttttgtatttttagtagagatggggtttcaccatgttggtcaggctgatctggaactcccgacctcaggtgatctgcccgacttggcctcccaaagtgctgggattacaggtgtgagccaccgtgcctggcaatttcagtcttttacaatttagtgatacttattttatggcctaacatatggtctgtcctagagaatgtttcatttgtactgagaagaatgtatattctgctgctattgggtggaatgttctgtaaatgtctgttaggtctaattggtttataattagtattggtaatataattggtaacatttattgttgaattatctatttctgtattcaattgtgtctggttttgctttatatatttggactcgttaggtatgctaatgtgtaaaattatatcttttttggtggattgatcttctcaattttataaaatcttttggatctagtaacaatttttgtcttaaagtctttttctgatattaacatagaccctccccccaaccctagtacttttgctaccatttgcttggtgtatctttttctgtccttttacttccaacttatgtctttgagtctaaagtgtctcttaaacaaagcacatttttggattgtgtgtgcacttgggtgtgtatcttttaaatgcattctgtcgatctatgtttaatccatttacatgtaattattgataaggtttatacatttgtcattttactatttgtgtgttatgtcttaagtctcttttgttccacatttcttccattactgccttttttgtgttagacattttattttgtaccattttatctctatcatatatttactagatttttaaagtttttttgtggttgccatagggattaccattaacatcttattctgaactatctcattctgattaatactaattcatgccacttgtatacaaaaattttgcttcttatatagctgttcccctcctcctttatgctgttattgttacaaatgacatctttatacatagtctacccatcttagtttataattactgcatttaagttaccttttaaatcagatggggacaaaaaatgagttacaaaccaaaatcatttatatttacttatgtagttccatttactggtgctctttatttctccatgtggattcaagttactagtttccttccattttggcctgaaggatgtcctttagtattttatgtagggcagggtggctagagatgaactctgtttttgtttatctgggaatgttttcatgttgccttcatttttgaaagatagtttggccaaataacaaattttttcatagtctttttctttcaacactttgaatatgtcaacccactgccttttttttcatttttaatttttgtggctgcatagtaggtgtatatatttatggagtacatgagatgttttgatacaggcattgcattcctgtaataatcacatcatggaaaatggggtatctagtgcctcaagcatttatcctttgtgacaaacaatccaattatacttagttatttttaaatgtacccattgccttcttgtttccatggtttctgatgagaagtcagttgtaaatcttattgagactcccttgtgtgatgagttgcttttatcttgcctctttcaaaattctgtcttttgagggtttgattatgatatgtctaggtatggagctctttgagtttaacctacttggagttcactgagcttcttggataggtagattaatattttccatcaaatgtgagacattttcaaccattctttcttccaatattctgcccctttctctttttttatgtgtatatgggtacatttggtggtatcccaaaggttttagaagttttgctcattgttcttcattcttgtttctttctttttctcagagaggttaatttcaacagatctgtcttcaagtttgctgattctttttctgtcaaatctactattattaaacctcttcagtgaattctcatttcaactattgtactttccaacttcagaatttgtgctttcttccccactacagttttatctcttctttgttattctgtttgggcatcattcttattctttcctttatttctttagacccggcttcctttggctctttgaacatgtttaaaatagctgatttaaaatctggtaataaggtaaaataccacatagcttgctgtttctactagaattcaacttttttttttttcagttgaagttttctgggttgccgcaagcttttggctaatttccagagttctgtgaaagttgattttgatagtatgtggcaggtttttcaatgcttttatgaagggagcaaactttcagtagttcgtactggactattttactggatcttgatttagacaaactatagagatttttgagacaactggcaaaaactgaacatagattggttattagattattttaaaattatgtttttttagataggaaaattgtattaaggtcatatatatatatatatatatacacatatatgtgtgtgtgtatgtatatatatatatatatatatatatatatatatttttttttttttttttttttttttttttttttgagatggagtctggctctgtcacccaggctggagtatggtggtgccatctcggctcactgcaacctccgcctcccaggatcacgctgttctcctgcctcagcctcccgagtggctgggactacaggcgcccaccaccatgcccggctaattttttgtatttttaatagagatggggtttcaccgtgttagccaggatggtctcaatctcctgaccttgtgatccgcctacctcagcctcccaaagtgctgggattacaggcatgagtcaccgcgcccggctcatatatgtatttttaaagcccttatctgttagagacatagtggtttttagggttttctgaaatttcctttcagatactctagctcacacatcagaagagcatgtgcaggaagagagatgaaataatggtacacgttgatggttactggagctggatgctgggtacatggaggttcactctaccattttatttttgtatttgaaagttttcatgataaaaagtttttaaaaagagaaagggtaccttgcgtccaaacaagtctgtatttaactgaaaaaaaaaaataattgcattcctaactggccttgaatagaagggaataaatgtcctgggagatagatggcatgtttgttgaaagaatgaagggtgaagagataggatcaatcaggcacccccaggacaaaaggaaaacttatacagcaagtaaagacatgtagctatcttgggctgaaaggtaagggaattaattggtcaagtccaggctcaactctggcccccaactcccaagtccatggtctcaactcatttcccacaaagccttcctggagctagcaagagaaggtgttcccacctgagactattccattttgcctgaacagcactatgaacaagacccaaaggcagagctatgcacggaggggcaggcctgggatgaggtaggcttctgtcctaagtttctcaacagcctcaagacatcaactggggaaaggaactttctctggtgaccctatacttaaccagtaaagcttcaatcatcttaaatgatgtaacaaaatgtgcatatgtaagtttttacaccataccctaaatacaaggacctcagaaccctgaggagtatgggagatccacccagaaaatactccttgggcagcacagtgcaaggcctggggcactgggtgctcctgcattcaaagcccaaggaggacctagctaggttgctctgccactagctctctccaaaggggagagccaccagggaagacaagtgccctgtagccttggctaaaagaggagggcttgggaaatacggaccaaagcaagacaggcaagaacccatcattccttcactttgactgttacccctgtccttaggaagagggacaggaaatcaattttaagacacaactcctggacaggtttgtggacacatctggggaatatgaacctcctttgcagccaggttgggagagaaataaaggaaaagaagtaggggttggggtggagccaccagagagaagagcaggctgaggtgctgggccaggggcactgctgggcagagcacaagctgcaggacctgggagcattgctacttggcctcattgtgttgtcaccatcaccactgccagcataccaggcacagcaggggcagctcctgggtgtgaggcaagtctggcatctctaggaagtacaatcttctggtcactttggaaaaggaggggccagacgatgccagacatcatccatagaggtgagatttgaatccagcaccccgtgtagtgccaccagagtccctaactaaaggtaccccaggtccatattacaactacttgattaaagaacaggtttattggtgacctgagggagccaaggtctcctttgtgaccctcactcccaggtggtatcaggctgcaaggccctctatgggtagaaaagccaatcacatgatccatgggcattcctggcaagaggtcagatctctctactcctaattcgaaaacttccaaatcctgatttcagagtcaacagcaaggtcagaggctagagtcctgatgggcatggagctcaggaggctggcgagttgctcagcaacgtctgtggggctgcgcacatggaagtagaggccaggaaggccacaggaaaattgccccaaaagaagtttccaagagggtttacgcttggacagggcatagaacctggccgtgagattgcactttgggtatgatggggtcagtcaccgagcaggcctggggagcagagaacctccccacttgccctgggcatgccaaggctccatggtctaggctcagtggtgccaccacagcctgtcacatgtcccagctcctcactgctgggacatctccaggttcttgatgggatacaggtaccacatcactacccctgaagggttgatgatcactgtgaagttggtttcatctcggaggccactgatgatgtcacctgagtagacgtcctgggcctgcagtggggagggacatcaccaatgccaccatgagagtggcggcacagagaccccccccgctagaggatgtagaagccttctgcctggactttggcctgtctgtgctgggcttccagtatgccctacagaagtgggagccctgaatccccatcacttctccaccagcaaatccagcaggtgcccaagcacgggcagtggagaaagccccagcccatggaaaactgtgaggaacgtgccagcaagggctgacccttgggaggagtacagccgtagaggctaatgggattcatatttatatgcagtagttctgtttgcataggttgaaaatactggtgcagagcacggcactggctgcagctctcagtgcctgcagctccccatgggcacctgccagaggccctaagcccacggctcaggggaggccatatgtgaacaaccaccccccataataccctcccacagaaatctgaagcccaggcgggtggctgcaggcagccgggtgctcacctcatatatcacagacccggtgaagttcagctggccaagggaggagtggtagcgataaggcatatcggtcctgcagctgaagaagactaaggcgctagccttgttggacagaggccgcatgtacacttcgatgagagatttttcctgggcacagaaggtggctactggctggggtcccttgctcagacaggacctaccattgcctccctggccctccctgagttctgggtcccccagttcacagctccatgtcacacaggtttagggaggatgccacgggcctccagcaccccagcttatctaaccctatctgcccaccttccctgactcagcagatactcatcaacacctactctgagcccggcccctatgctagcacactgagacaagtgctgcatgaggccctgccccagaagctcataggacaacgggagggataaacgcagaaacagggaagcgcaacaacagtacagcgtatgagtgctggccccaaacagctgccagtgctggcctggagggtgctgtccagtgggaacagtgaactctgttccaggagggtggagagtggagctggatgtgaactcccatcctccagaaggttttccaggcccagctccaccatcagcccctctggcagggaattgttacttcctctgggcatcaccagttctataggtgccttccatagttctgtaggtttctttttaccagaatccaggatttggtaaagagcaaaggcagacaggcacagtggctcatgcctgtaatcccattactttgtgaggccgaggccagtggatcagctgacgtcaggagttttgagagtagcctggccaacatggtgaaaccctgtctctactgaaaaaaatacaaaaaaaattagccgggtgtggtggcgcacacctgtaatcccagctacctgggaggctgaggcaggaaaatcgcttgaacctgggagccagaggttgcagtgagctgagatggtgccactgcactccagcctgggctacagagtgagactccatctcaaaaaaaaaaaaaaaaaaaaggctttgaggtgacactgaagtccagtcttgtttgtaccaactgtgtagccttgggataaagttactcagactctcgaagtttcatttttctcatttgtaaaatggcaagataactaccttgctgagaaaaattatctaaaactcccagcacatggtaggtactcaataaatagcagccaccagtagtcgtagtattccttggctataacagcttctcctggccgagtgcggtggctcatgcctgtaatcccagcactttgggaggctgatacgggtggatcacctgaggccaggagttcgagacaagcctggccaacatggtgtctctactaaaaatacaaaaattagctgggtgtggtggcaggcgcctgtagtgccagctactcaggaggctgaggcacgagaattgcttgaacctggcaggtagagattgcagtgagtcgaaattgtgccactgcactccagcctgggtgacagagtgagaccctgtctcaaaaacaaacagaccagctcctcctgctctggagggaagtccaagctctctgcaggccatcacgggtgtatagaagctctgtgcctcacccttgctatgtgcacttatgtggctgacacctctcatccccgactcccttgagctgtcctgctcagccctgctctcacccagcaagaggaggacagttggagcagctcccatcagagtcctcaaccataagcaaccagaaggggtagccctggttggggactgggcgactcctgtacctcgccaggtgttgcccccagggaggctggcagcctttctctcaggagaacccagttcctcagccctccccttccttccctccacaccctagtaccttgtgaatcctgcgtccctggatgcctaagggatcctggttgattttgatcatgagtggattctgcagaatgtccatgttctgggcggagatggtacgcaggtctgtggacatcaagaggggggctgccagcaccgtccacagggccatctgggcccgggattgctctaagctgagaccaaagttcccaatgagcagctgggggcagagaagaggagtagtcagctctcatctcctcaaggaggtagacacagggaccatccccaaacttgtagccgaggaagagcaattagggattagggaaagatggctgtatgtggaggaggcctggttcagcaaacaccattccctagccctgtggccttgggggagttaagtcaccttccatctgagcttcagctttttattttccatcaagaacaggagtcggcggtaggggggtgggcagatggccaggtgcggcggctcatgcttgtaaatgccagcactttgggaggctgaggtaaggaaggagaccactactactcctgctgccctcctctcccaaccttgcctagttcacaagacaggaggagagaaaaagcaaaaagttggaaataaacaaaagtaagataaatagccagacaaccatggcaccaccacctggccctaggagttaaaaaaaaaagtaataataataacatcaacccctgacctaaactacttgtgttatctgcaaattccagatactgtatgaaaaaagcattgtaaaactttttgttctgttagctgatgcatgtagcctccagtcacgtttcccacgcttgcgtgatgtatcacgaccctttcacatggaccccttaaagttgtaagcctttaaaaaggccaagaatttctttttcagggagctcggctcttaagacacgagtctgccgacactcccagccgaataaaaacctcttccttctttaatctggtgtctgaggagttttatctgcggctggtcctgctacagaggcaggtgaatcacttgagcccaggagttagagaccatcctggccaacatagcaaaacctcatttctactgaaaatataaaaattacccaggcgtggtggtaaacacctgtaattccagctacttgttcaagcacgagaataacttgaaccagaatgtggaggttgcagtgagccgagattgcaccactgcactccagcctgggcaacagagtgagactctgactcaaaaaacaaaaggccaggcgcggtggctcacgcctgtaatcccagcactttgggaggctgaggagggcagatcacctgaggtcaggagttcgaaaccagcctgaccaacacggagaaaccccatctctaccaaaaatacaaaattagccaggcgtggtggcgcatgcctgtaatcccagctacttgggaggctgagacaggagaatcgcttgaacctgggaggcggaggttgcggtgagccaagatcatgccattgcactccagcctgggcaacaagagcaaaactcagtctctaaataaataaataaataggctgggcgtggtggctcacacctgtaatcccagcactttgggaggctgaggcgggcagatcatgaggtcaggagtttgagaccagtctggccaacatggtgaaaccccatctctactaaaaaaaaaaaaaaaaaaattagctgggtgtcatagcaggcgcctgtaatcccagctactcgggcggttgaggcaggagaatcgcttgaacctgggaggtggaggttgcagtaagccgagatcgcgccattgcactccagcctgggcgacagagcaagactctgtctcaaaaaataaataaatcaataaaaaacaaaaaccccatgggggtgatgggggtggtaatatgccctggctacatcacaggttgttcagatgatcaaatgggctcctgttgtcaaaaagcttataaactaggtcaagtcaataaatgtcccaaggtgacagtggtaagaaacagaacgggacaaagtccctgtacctaccactggccacacccacttgccctagccacagctgaatggaccaagggggactcctgaccccagggcaagcaatccatagtcaggacacaattacaggcttagtgacaacaatttaagcactgtgtgcccatcactgtgccaagcatttcagagttattttaaccctcaaccctataaggtagctactattcttattttccaattgacaaaactgaggcacagaacaaattaagttacttgcccgaggtaaagtggcagagctagagctgggactccacagcaggccagttcctgctcctccaggttgctccctccacctggcttagcacttgtaattcttataatcatcataggatcaatcaggtagtaaatgcttgttgactaacagataactataaagctataaattgcaacaacaacaaaatgtcacagggcaatgaccgagatagaatggaagggctagaagcaggactgtgagggccagttgtccctgtggaggatgaggcaggaaattgacaaaaggatcagaggcacacgggggagagcagtccaggcactaggaatagcaaggtcgtgatcttcaacctgcagagcaataacatcttattccagggtcactacagacccaagttcttgagctttcagaaacatcagaattgcctggggagatggttaacagtgttcttcccctgaacattgtgatgcaaaacgtgggggatggggccctggaaaccagcttctaagtcaagtctaaagcaaccagttcagggacacatttcagaagcgctgacctagaacccggcagtgagcctccaagaaggaagaaagcacagggcagtggggagcagggtcgtcacagatggtgggcctagggacatccccctccatcctggtaccatgtcagggtcattccagtgcccagggccggccactggctgcagtatgtcctggtgctccacgaaccaattcaggatggagagcacgctccaccaggagtcctggatgtcatcatagttacgccagaggttgcagatgtccgccagcagactgtagttcacctggatgtcgaggggaaggcagagtccagcaccagaatcacacgctgcagcccagggacccacacaggagttgaggaggctcagcaggagagacagagagtggggaagagggaagagaacaggccccaccggcttgctcaggatgaggagggcctcagagggtggccctgctctggggctaccggggtctcccttctgtgcatgctggtgccaggagcctaccctgccttctcatgccagcttgggtcaaacccagggtgtgggcccaggctggtgcacccacaaacaaccctccctgacacccacccacccccatgttctctcagtgagaaactgctgtctgctttcttctcagctccagaggcctgagcccaccctttttggtgtcaaacatgctaagggagccctcatgagcccacaggctcctctgaggcttggccccacctgcctggcctccccagccttctgggtctcctcgcctaatgggcacctcctggaatcctgggcactgtgtgccagcacagatggctctcctgcctctgatgccaactccttcagcccacttcacaagggcctcttctctaaggcccgccactccctccaacacacacacctctctgggctggctgagcccacctgctctttgcggctacttaatgtaggtctctagacacctacaaatcaccatatgggcacctgtggtgagagcagccctggctctggaaggccccgtccctgaagcctggcactcaggaggtaaggaggcctgggtgtgggaagcgccatcaggcagggggcagaatggcttacccttggggggaggccgccttcataggctggccagctgcaggagaaggcgatggggcggcctgtggcattcagggcagcagccatcttggggtaccctagagaaagcccaacctgtttcagtcctgaggaagtgcaggaggcagtctggggccttagcccagaccttttcccaacagatgtgaagaaacaagctccaaacagtaggtgcctccccacatacccagagcctcaaatgcttccagggtgggctatgctgccactcatatttagggagcctgggagccacaatccccctaacccctgggtagggggaattgggaagctcagccaggtgggcgctgggtgggtctccatggccaccctccccgtttgcctacgtgccccagccagctgcgtaactcaccctgggcccgctcctcgggggtggagaagcagccatccagcttgagcatgtctaccttccactcggcgaaggtctgagcatcctggaccaccttgtccagtgtggtgcctgggtaacccatgcaggtgaagttgcccatgtccgcgtagatacccaacttcaggcccagggagtgaacctgtgggggtttgaggacacagtgggctcaagcaggaccctcaaggagcctcctcaaggcatatctgaccccgtcccattaaacctccagtggctcccacggaccaaaggagatggtcccagcatgctggcccggcctctgcccatgatggcccacctctcccccaacacacacctcccagcggctgtttcttgcccctaggcctttgctcctgccatcctctctgcctccaatgccatctctctgggctcagctcaagaaatgcctcctccagggaaccttcctagaataccaggctgtgtgagatgccctttctggctctcactcaacagaataggccaaaagtcggtgttcatttgtctgtttcccccactagactgtgagatctcaatcatgtaagtgagccctaagcgaggtagggtgaaaggagtggtctagccctgaggccaagggcagggctggggtgcggctcacgtagtcagccaggaaaggaatgccatgagggaagcgcttgggatccggcatcaggcggccactggcatcgcgaccaccgatccagcagtcatcaatgttgaggtatgtgtagcccatgtcccgccatccatcctgtgccatccggtcagccatctccatgaagagctgttcactagtgaggggcagagggatggggtagctcagggacccagcccggccctcacccacaccctgcctcagctctgattgaatctgggctataaaaaccatgaccttgctgagccctaagccaggtatcagtgtaaatgaccaccagagattgtgcgatgagccataagcaagctggcttgaaaggagtggctggccccaggctaaaaggcaggactgggtcaggggaagtacagggggcctggcctgaccttctaagagttatctcaggggctgggtccatgtaaggtccctgcctcgtgaccaggttggggcctgagagtccctgcagaggctccagacaggtcatggggctaggtgtcagacagtccgagtgacttctggctgcagtctctgggatggagaactctgaccttgccctcttttctagtggactctccacttcctgcccccgaatctgcagggccctgggcaaggctcatcaggtgagtgtggaccttactcaccttatgcagttctttgggtcctcatcacagttaatgttgcagcggaagcgttcccaggccagccagcccatgggtggtgtctgcaggagcccattgtccagcatcagcacctgggccacatgtcccagcaagagcactagggggcaagggaggaggggatggtgactatcagttgcccccacagctccagccctcatcccaccccatctgtatgttgctcagccctacagaggctgcctgcctatatataagggaaactggactcctgggtttagggtagaattggctcttcctgcaatggctggctcttgcaaagcagtaagtgggaggatggtgcctgggccaggcagtggcttgaggtctggccgtcaccacagcattgctggaattagcaaaactaacaccttatgtcctaaccttcctataacccccatcagctcctcccatcccatatatagaacttaacagtacagatgctcctaggcctaccacggaactacgttctcataagcccagtgtaagttgaaaatatcacatcagccagatgcagtggctcatgcctgtaatcccaacgctctggaaggccgaggcgagtggatcacttgaggtcaggccaacatggtgaaaccttgtctctactaaaaattcaaaaacttagccaggcgtggtggcatgcgctgtactcgggaggctgaggcaagaggatcacttgaaccccagaggcggaggctgcagtgagctgagatcgtgccactgaactctagcctgggctgtgacagtgcgagaccccatcccaaaataataaaaaagaaaatattatgtcaaaaatgtacttaatacacctaacctggcaaacatcatagctgagcctagcctaccttaaaaatgtggacaggccaggcacggtggctcactcctgtaattccagcactttgggaggccgaggtgggcggatcaccgtaagtcaggggttcaagaccagcttgggcaatatggtgaaaccctgtctctactaaaactacaaaaaaataccggggtgaggtggtgagtgcctgtaatcccagctacttaggaggctgagcaggagacttgcttgaacctgggagatggaggttgcagtgagccgagatcgcgccactctactccactccagcctgggtgacagagtgagactccgtctcaaaaaaaaaaaaaaaaaaaaagtgcgacaacgcacattagcctacagctggccaaaatcatctaacacaaagcctattttataataaattgttgaatatttcatgcaatttactgaatactgaaacacaggttgtatacgtactgtggtttctactgaatgtgcgtcgctttcacaccacagtaaagttgaaaaatcgttaagtcgggaccattggccagactccaggtctcctgagccccagtccagagctctttgctctctaccacagaccctcaagaggcctcagagaggcttaagaagtaagccagccaggatgggcacccaatcagctcacctaagtgagacctttccccctcgggcctcagtttccttatctgtaatatggagttactgtagggactgtacaggcggttctccgcacatgctgatatccatcagttagggcctctgtgcttgagggagaggaagtgagaaaggaagggcccctttgaaggagaaatgattcccgtatggggaagcatctcctcccttcctgcccagctctaagtaaaagagagaggaacctgtctctccacatacccacattagggaagaagggccaaagcactccttgtagcactcacccctacccttccaagccaccccagccggtgtaggtacctgtcttcagcagcatcgctctggactcagcttccgaggacctgaccagatctggtctgcgtgtatcagctgtatgtgttgggctctggaagctaagaaacgtctgaaaagcactggggtcacggctgcctggctagctcggccgccctcaaccttaggcgtggatcgtacactcggtccccaagttgcccgccccatccccagccatcacttcccggagcttcagttcttccttcagaaatacgaaacaacgtgtcttggatgtcagacctcacaccctctgcagtgctgggagtcccgagggcctacgggccgccttcggccccgcccgggctcagaaaaaggcagccactggcttaaggtcaccaagaaagagcggaggggcggggctgcggccaggctccggacttccagccgggtccgggttcccgccctgggctccccaaaaccgcagagccccctcccaccgcacttatcctaccgaagcgttcagacctgccgccgcttctgactcgaatccggtaacctgataagtccgaagcgttccagtgagggcggggcctcacgaaggcaacccttcgcgcaacctatcagaatcccccctagcaacgctgtgccccgcccatatgggtccggcctcccagcctccctaagcccttccccactgggctcccgccctgcgtgctagcgaggcaggcattggcagaacggactcggggctgtccttcgtggcccggaccccgcgaggcctgtccttccacctctgtggggaccaagagggcaaggatcgtgccaggctcaccgtgggcgctcagtaagcggccgtgcagaggacggttgagggctttgtgcagaggaaatgagagactgctctgaagcaaggcccgcctagtgagctgctaggaaaatggaagtctgggattaatcgtctctacaaggagggtgcgtgggaggcaccaaagcaggcggtcacagctcccgcaaaggcagccggctctccttccccgcctgacgctcagggactactcgcacagactgggctacttccttcttcattcattcatcaagtatttattgagaaactgctaagtgccaaatgctttgttctgggcattgtaggggcagaaaggtgtgatattttcccttactcatcccaaaggtcacagcggacactcctacaaataaaatataggttagcaagagaaaagcataatagattgatttactcaatgttttatgtgacttgagagccttcaggaatgaagacacaaatactcagggaaatctttatttttatgtctcggtttgatgaagaatggacagccctggccgggtctggtggctcatgcctgtaatcccagcactttggaaggctgaggcagggggatcgcttgaggccagacatttaaggacagtctgggcaacatagtgagaccctgtctctacaaaaaattaaaaagccaggcaggtgcctgtggtcccagctactcgggaggctgaggtgggaggattgcttgagtccaggaggtcgaggttgcagtgagctgtgattgtgtcactgtactccagcccgggcaacagaaaaaaaaaaaaaggaataaggaatggacaactgtgtataaacgcgattagacaaaagggaatgatttaatgttaatagctgagtgtggaaacccagcaatgtctgttcagattcggattcttcttgttctctctgtgtggcattccctcctgctgggaggagggcaggaccccttctggaatgagagtcttatgacctagtatcaggcaaggtagatcagagaattcctttatggccaggcccgacacagaaaggtgggggatgtttccagtaatatttgtagttacttttttttctttttttttttcttttgagacagagtctccctctgtcaccaggctggagtgcagtggcgcgatctctgctcactgcaacctccgccgcccaggttcaagcgattctcctgcctcagcctcccaagtagttgggactacaggcgcacgccaccatgcccagctaatttttgtatttttagtagagatggggtttcaccatgttggccaggatggtcttgatctcttgacctcgtgatccgcccacctcagcctcccaaagtgctgggattacaggcatgagccactgtgcccagccaatatttgtagttgctataactcaccttagggaggaggatttttagtttctatggcctgccttgcaggagaaaaacaggagaaagaaggggggcaggagaaggtcagagagatactttgcttctgaggctcttccagtgtcctttggttcaaagtactcagcatgcccaagtgccatatttttaggcatcgctttctgagccccaacagcaccttcactcagatggccactgggtgtctcaaacataacccagaccaagcaccggccactttccacatctcagataatgacaactctcctaggtgctcaagccaaaactgtgcagtcctgcctgctctttccctcactccccacatccaactcctcagcaaatcctgtgttctctaccttcaacagccattctaattctggctgcctctccctccccgctcttgccgcgtttgtgacatctcgcctggatagtggcagcaggctcctcactggtctccagcctccactgacattgattctcaccacagaagccagagtatgccttgaaatcgctcaggtccctcctcacagccctgtctagagtaacagccctcccagatttacagagccccatcccaccccttctacccccacctcctactgtctgcccctccccaggcctcccagcctcactggccttcttgcaggtcctcaagcacaacaggcctgagggccactgcgctgactgttccctctgcctggaattggcatggctggctccctcatttccttcaagtatttgtccaatgttactttctcagtgaggcctaccctgaccactctatttgcaattgcaacctccctactcccacaatttcccatctcccttaccctcctctgtttttccatgccacttattatcttctaacacatttattatggtgtacagtattaactgaataaaatttagtaggggagacaggcaataaacaagaaaataaaagcatgagcataggaaagtttactctagcagtgagtgctctgatggaaataacaccccagggatgggacagagactgcagggcaggttgctttacaatggtcccagaggagaccactgagcagagactcaaatctgtgtccagaggcgtcctgaggagtggagctgcggttgggggtgggaaggaaggccattctaggctgcaggaactgcaagggcaaaggctctgaggcgggagccaggttcatgggcagatgtttgaggacacctccggcttccagggccttccagaagttccagtctcttgggtttggttgtgcattcctgcgaccttcaccgcaggcctcctcctccacccactagtgcagagcctgggggctgccggtgggtttcaggccagggaagcagaaatgggtaatttccagaggcagaaatcagccgaccccggtggcccggtgggtggccaacaaagcttggctggccctcgcgggctgtgtaggagcccaccctagggaggtacccagagacatccctggtttggctctgccgggaaagtgggccgagcagggagagggggaccagagaggaagagatggacagagttttccggacggtgggctgggtccgaggcccgcggaccgtccgaggggggcctctgggttcgaggccgcccgcaccgaccagtgctgtggctcgggcagttcaccgccctctcgggcctcagtttcccgccctggcagacctcgaggcggcctcggagatcccgggcctggcgaatactgggcggggaggggcgttaactccagcctcccgggcggggtctcccggctcccgcggccacgttgcagcccaggcggaggcgcgggatctcgagctgggatcgccctcttgggcttcggtgcgatcggcggcgggaggtgagagtgggcccggcgggctccgggaggaggtggccccagggaaggtgtggccgcggggaagtggcggcgaacagccccgacgcgaggacggggaaaccaaggcggcagccagggagaccctgaccgaggtgacctctgtttagggcgacaaccgggttggggctccccgcagtggccactggcccggcggtcccgcacccccagcccgcctctcctccaacaaaagaatccaggaagacggtggggcgggcgggaggcccggtgtgcggtggcctggcccccctactggtggagaggagggagcgcccttccccagacgcgggggaggggaggggtcatggccccacgggctgcccaccccctccctgtgccccagtgctgggcccaggacccccagtgaggccactcctctggcaaacatctgtgatctcttcccccttcctgggccccccctactggaatggcgtctctccccatccaggggcctggcttgtttttctccataacccttagcattaccggtccttatgttatctcttatttcactaattattctttcattaatttattagtatttattttgtttgcctacagtgtgtttccccctgtgggaatgtaggctccaggagggcgggagacttcgatttgtccactgatgtatccccattaattcaacagatccctcctgagggcctctctgagccctgcacggtgctgggtattggggttctcctgggaacttagctgagccccaccctagacattctggggctgggaacagtgctgtaaacacatatgacatcgtcgtgggatgaaggaaacaaaccagaaatgggggggtctactggtcaggtgaccttaggtcaggccaccttggtggtcagggccaccttagatgatatggtgatcatggaaggcctcccagattaggtgacttcagttaaagccaggaagtgctagaagggaaaagctaggaaccatgagggcatgtgtagctctgacctggactcaggcagggagctggggtctgaagagtaaaggtcaagacaaggggacccatccccttaagctgctcaggggttcctggctgggtggatgggtggggggattctcaggggtcagggaaggcttcccggtggaggctgtggtttcattaggcctcgaaggtggagtaggagttctcattctttgggataagctgactgggcttgagaattgttttgcaggttccctgggaaccaggtggtcgaagggctgagctgtgtggccagacaagaggtccctgccctcccccagtgagccctgctggtaagtgggtacagtgtgagggatttgggagacgaagctctgcgtctcattggccatgtaaccttgggcaagttcccctcactgcgctgggccttggttttccatgagtaaggacagctggactaagtgccgttcatgatgctgggggcacccacattcaatggctgtggttagctcttctcagctgtaccctgggtttgtgccacactcttgtgtacagagtagctccccatctggccctgaaggctgcagattgagacagaaaaataatgttttatctgaggaattggagcccctttaaataatcaggcccagacatactgaaacgcaacagctgtcaagtcttactcctcccttgagctaaagaattatctctttttctttttttttcttttcttttcttcatgtcagatcggtaatgtgcctacatggtaacaaggttcgagggtggcacagctcacacatgcatgtgaacacccaatcatcacgctcatgaactacaaaaggatcaagaattacctcttgaagccacttgctatgtggctctagagtgacaccaagtagccataaaatgctgtacactggacaccctatagttcataccctatagttcaacaatgtatagccaatcactaatcaatgttatttctttttttttttttgagatggagtttctctcttgtcacccaggtggagtgcaatggcacaatcttggctcactgcaacctctgcctcctgggatcaagcaattctcctgcctcagcctcccgagtagctgggattacaggcacccaccaccgtgcctggctaatttttgtatttagagacggggtttcaccatgttggccaggctggtctccaactcctgagctcaggtgatccacccacctcggcctcccaaagtgctgggattacagatgtgagccaccgcaccccaccaatcaatgttatttctataaaccaaggagaattcctgccaaacaactttgtcatccttgcccccttctgcctataaaaacctgtaggaaaggcccaacgcagcacaccccacggcaacttagaagtttgttctgggcagttatccttactctcgctcaagtaaactctttaaagttatatttgtgcctcagcttctgcctgtaggtcaataagattcaacagctatatgcaaataagaggccagtagaggcccaggagggtcatggaaaccctggaagcttggcctcagagttggagttgagaggaccccagatgaggggatagtttaagcacagtggtttcgatgggtctggggtccatttcagctcagctggggcctgtttctttggattttagaaagccgtgcccaggtcctgccatgcctcctgtctgatgcaatctcgttattcttttctcgaagtccgccagtgtccagttttttttgcatgatcctcacgacatccctttgagagaaaaggaaggaaagacgagcccacttctcaggagactttagggaccttagggacacagcaagcgagtaggagtcccagggctggggtccaggttgcctctggagccggtgctgttccccaggagggcacggaaccacctccctctctgatctgctgccatctctcttgcctcacagttcccgtgggagccatgaagctgaacgagaggagtgtagcccactatgcactcagcgactccccagcggaccacatgggcttcctgcgcacctgggggggcccagggaccccaccgacccccagtggcactggccgaagatgctggtttgtcctcaagggcaacctgctattctcctttgagagtcgcgagggccgggccccactgagcctggtggtgctggaaggctgcacagtggaactggccgaggctcccgtgcccgaggagtttgcctttgccatctgctttgatgcccctggagtgcgcccacacctgctggccgcagaagggccggcggcccaggaggcctgggtgaaggtgctgtcccgggcaagctt

SEQ ID NO: 724 - DNA, 127 bp, Homo Sapiens
  misc_feature (88)..(88): n is a, c, g, or t
  misc_feature (91)..(91): n is a, c, g, or t
  misc_feature (102)..(102): n is a, c, g, or t
gagagcacatgcacactgtcagggctagcctgcctgcttacgcgcgctgcggattgttgctccgttgtacctgctggggaattctccncgntactgcttganatcttccaccccttacaaaatcaga

SEQ ID NO: 725 - DNA, 404 bp, Homo Sapiens
  misc_feature (58)..(58): n is a, c, g, or t
  misc_feature (246)..(246): n is a, c, g, or t
  misc_feature (329)..(329): n is a, c, g, or t
  misc_feature (354)..(354): n is a, c, g, or t
  misc_feature (360)..(360): n is a, c, g, or t
  misc_feature (380)..(380): n is a, c, g, or t
aactcacacacaatggaaagacatgccaagatatcgatgaatgtctggagcagaatgngcactgtggacccaatcgcatgtgcttcaacatgagaggaagctaccagtgcatcgatacaccctgtccacccaactaccaacgggatcctgtttcagggttctgcctcaagaactgtccacccaatgatttggaatgtgccttgagcccatatgccttggaatacaaactcgtctccctcccatttnggaatagccaccaatcaagatttaatccggctggttgcatacacacagggtgggagtgatggcatcccgggacaactttcctncatgggtaggttgagggaacagatngtttcntttttgcctttgaggggatngaaaaccttgaaaggagtgggtgt

SEQ ID NO: 726 - DNA, 2053 bp, Homo Sapiens
ctttatctgaaacttgattgtcttaaatgtatttgtggagaaatataattattgtatattttgtgtaacagaatcagtgagaataagctggtcgcaaactgtcttgcctagagagagggcagtggcatacagctgcagaagcgcgacacgggcctgctgagtgttccgtttcatttcaaattaggtcattctgtcttgattttgatatggatgtttcagaagaccctagcagatgtccctgtttaacttgaaaccatagatcagaaaactaagttcatatttcaattttacagagatttgaatagaaaaagtaatcaagttaaaacctgcaaagctaaaattgaactacttgggagctatgatccacaaaaacaacttattattgaagatccctattatgtaagtacagttcacgttttagggctaatatgaagacccaacacatttgtatcctgccatattaaataacagatgagattgtgttaaggatgtttttgttatgcaggttttgccattttcttctttttcctgtccatttaggggaatgactctgactttgagacggtgtaccagcagtgtgtcaggtgctgcagagcgttcttggagaaggcccactgaggcaggttcgtgccctgctgcggccagcctgactagaccccaccctgaggtcctgcatttctcagtcggtgtgtaatcacgttccagggcccaaagccagctctttgttcagttgacttactgtttcttaccttaaaaagtaattgtagatggaaatcagttgtgtttggcaggagaatcaataaaaatgtttgattcagacagcttatggggtattttaagcattcttagactagttgaacatctcactttgccccagttacaaaaatagtagaacaagcaacataaaacaatgaaggaaaacctcacttgaaggcccaggtcaacatctaagcctgttgagacttagataatcgagtctacctcttcagtaggtttgtgtggatggcctggaggcaggtgcttgctccccagtgctacctctctcttccctagggccttttgtggattgacagtagtcccctccgtagagctcacagtctagattagaagtgttttaatttctacacacccatagtgcacacttgtatattgaaaagatagggaagagagaaacatttatggaatcagtcgttggcaccttcaatacttcatgatttttgtcgagtttacttcatgaggaggtcagcccattggctcccatctgaaccactttgcctctgaaacttaattacatccagaaagaaggacacttgtatgctagtctatggtcagttgaggaatatgactgtttttatatgcacatgtaacccaaatgtccaatataaattggcttattttttaaaataattttaaaagttgggaaaagtgttattatttggcatgcttaaatattgaataagtattcttcatcagcatttaataaatgtataggcagatgtaaggtaatttctgtgtattttgagataatgtcaaaatcatgaatatttcaaaataaactggggagttataaaaatacaactagagatataaatctgtgtctgtcctgttgttgattgacaggtaggaagcatttgcaaaacattgtattgtcctttttacatgatctgtgatgttaggcgtgcgtgccatattttagtcttcaggggataaggaagtaagacatgatgaaaagtcagcacgactgctgccccatgtcatcatgtctagtttctgaaggaagtttgaggttctacagctggaactgtccttgcccagtaccatcctctggacatgttgcctctacgctgtgccctcctgtgcagtgatcgactgcctggccaggacatctgcactcctgacctcagtatcatgagggtcccaggcagtgcatgggaggagacacgtttgatcctttgactccctagtatctttgaggataagcttgtttgcccagatgaaaagtgagtagtttcccactgtacccatgtggaagtgcccagggctgtcttcatag

SEQ ID NO: 727 - DNA, 642 bp, Homo Sapiens
cctgtcatcgagtgactgatttccgcctttcagagcctcagcaggttaaaaaacaaataggacatggagacagtggaagccactgtgcactcctgctacggaaagacggctgtgccttgttgaagatgatactatatgattcgctaccagagtggggccatccctgcttcaggctgttcctagatgtttaaaagaacattccaaacgacgttaagaaactttgtgctgccattggtgtattcctttccaaatcttttctaaaatgttagaattcagaccacagttcctgagctttggatgcaaactccttggccctgaatccctggaagccctcccctgtggatggtatcagccatcacagcaggatgtgctttaagaatccaaatgaattcagttataccacgtggcgggacttttaaacttgagctgagcttactcatttctggccgactattaatcctatagctaaatcatgtacgtcaaggacggggaaaaaaatccaacctgggtaaccacacaacaaacactaaataaaaccaaggtaatgtggtaaccacacaacaaacactaaattaaaccaaagtactgtatggggcatctctgtgctgcttagtaaaacttgaagtgttcttatgtcgcgaa

SEQ ID NO: 728 - DNA, 6837 bp, Homo Sapiens
ccgcgcgccatccgccaccctactggacacgggcgagagcgtcgccgccgtagcctccggagaagacaagggcatcgccgcctcagccgccgccgccgccgttttcgcctgcagctgctcaccggatcctcagtcttccacaatgaaccctgtttacagccccgtgcagcctggggctccttatggcaaccctaagaacatggcctacacgggttaccccacagcctatccagcagctgcccctgcctacaatcccagcctgtaccccaccaatagtcccagttatgctccagagtttcagttcctgcattcagcttatgcaactctgctgatgaaacaggcctggccacagaactcgtcttcctgtggcactgaaggcaccttccacctcccagtggacaccgggaccgagaaccgaacttaccaagcatcctctgcggctttcagatatactgcggggacaccatacaaggtcccaccgacccagagtaacactgctccacccccctactccccatcacccaacccctatcagacggccatgtatccaatcagaagtgcctacccccagcagaatctgtatgcccagggagcctactacacacagccggtgtatgctgcccagcctcatgtcatccaccacaccacggtcgtccagcccaacagcattccctctgctatctacccagcacctgttgccgccccgaggaccaacggtgtggccatgggcatggtggcaggcaccaccatggcaatgtcagcaggtaccctgctgactacaccccagcacacggcgattggggcacaccctgtctccatgccaacatatagggcccaaggaacccctgcgtacagctacgtgcccccacactggtaaagcctgcagcccatccaaatctggagtcacacattgtatgcaactactcaagtcttacaccggtgctggagcagttccctagcagcaccacctctatttgcaagaagagacaacggaagtgcaagggtcactttatgcatctttaatggttttgatttttatttttggtttttgtaaaagctgctttttctaatctcctgcctctccccaactgtccccctcttagcccctgcccttccagctctatccccttcctcctacctgaccaggccatgtcctctctgctcttccctaagtgtcctgtccctggggatcccagtctagaggcaagcagagagtagggtttattgcagtggttcatctgaaggctggattccatttgaagagcataaacagatgtggtccagggtaggaactcagagctgttgagcaggctacatctctaggggagtgttctggttgttttttcttaagcaagattagttcaggacattcccatgtcccagacacaaatgaaatgtctcctgagaaccattgcaacagaccaagaacaaaaccacctgagtatgtaggcgtgttattagcagcttaataccccaggctgagaacctggggaaaaaagtctttagaatttgggggagggtggggggagggagggcattgtggggaaggagagggaagaagggaggagcggtgcttgcctcatggctttggtttgaaaggtctctggccaaagcatctggccctggaccttctgatttgcacagtgatgttaactgacctggcacttcctcaaaaggtgattttgtccttagacctgccaagcggctgcagggtggtaggatcccagcatcccgaggccttggaaggccggatgccctgtgtcatccagacttcagcctctgagctgtcatggacccactctgatgaggagcttcctcctgattggagtgggaacctagggcatttctctcccttttcttttgcccttcccagtgccaggactcacctgtctgaccatagagcttgcaggcaggccaagctcttggttacctgtgccattcatggcccaagtgaaggaaccacattccaggtgggtgctggcagctctgaaggtgaggatagtgaaggaaaagcaatagcaataaacatttcatagactcatggaactgaagggaccttagcaatcatctcatccatttccctatttggcagatgaggaaactgaggcccagagaagcggaaaggacttccctagaccttacagtaaattagcattaaatgcagccttcctacctagtgggcaccttgcttacaaaaatttacctagggacggattggcttggttttgtaaaaatttaagtcggcagcgcccatacctggtgagtctggaatggtctctgggctcctgtttctgctcttttcctccacggactccaaaggcgggggttgaagactgggcagaggctacatgggggcggatggcaggaacagaaattgcaaatgaagaaatagcatttggaaattctgtgaagacatctggaacttccgtcctgtacctgactccacctccaggagaaggagcaggtggactggccgaaaaggagaggccatgcttttaggacagtagcccctcatcccgagaggagaggaagaggaggaagacagtgggagtcatcaggagaggagaatgaggatgaggcccaggagacaggctcatctgggagaagagggacccctgggacgaggaggtccctgctagtctcagccaggagcctggattgcccagcagcagcctccggcacccagcgcttggctgggccagcagcccctctgggggtggggcacgaacattttattgtgaaaaatgggatcattgacaacatttgggactttaaaaaactgctttcatttaaaattcatgcaaacttggacatatccttaccccaacctcccatgtctccctaagggagggaaaaatcaggaaacccttgggttggaaggagctcagaagctgtctagccattcccaggagggtaaagcccatcagcctccttggcctagagccaggagtttgggggcccaccttcctgggcttccaaggaactttaggaccagtaagaaaaaattcagctgttctaaattatctgttctgggtgctgatgaggtttcactttaaaacaatagaaagttttccagtgttaattcactttttgcaaatacctccttccaccctctttggttttgtaaaggtgggtgaaggttgttctagattatgtcatacgtgtttgaaaaatgccaaaataataataatgataataataatagaaacctttggatttgtcaggtgcatcacagaggtcaaagcacttcacggcctttcatgtactcgccctgagagggacagggttagagttattacagtcaattgacaaatgaggaaacaggttatggaagggaacaggcccacagtgagcagcatgctggtatccgccaggcttcccagaaccctgctgcctccatgtgggctggggtggaaccacagagaggagaaaggaagaagaggagacctaggaatgaccttgtaacttttgttctttcaacaccagtaagtaaaactaacagctggacctcacagttcacagaacagttgaacataaattatctggtttaacccgatgaaatagaggttatttctcctatttgatccataaggaaatcaaggcttggaaaagtcaagtgacttgctaataagtgacagagccactcgaatcccaggctgtctgctgtctcgttcccctccatctgatccccacacaggctcacgtactgaagcatctgtgctctgtgccctatcttagcacctactatgtaattcaagagcaaaggggggccccaaggtgaaaataaggcactgaaaggctgtggtctggaagagcccaggtccagcacccctttttcagtatgagccccagttcagccggcctcagcctcttgctgtgatggagatccacaagcctagccaagcttggggagtcactgcaaaaggactgagcccaggagagcggggacagtcatgtgcctccggtaggatgggcacagttactggtaaggtcacagagatctagtgggaggtaccataggtagatacctccaaagattctagatggcacggtggtcaagctagacaaaaagtcagagctggaagggccgtctcattgaaggcaggcaagcaagagaggacaagggatgtagccgcctgacagtgagctacagcactggccccaggatgcaaacccctctctcctcctcatgccactgcctctccccaagtgcaacacctatggccaggatcaggggtacagatggctcgttaccagccaacccttttgaattcttctacttctacctgaccccctctcctcactggcctggggtcaagaagtttgagtctgggagctggattgcctgcaaatagtgaaagcctgaaacataatggtttgccatgttttgaaaaaaaatgcatatttaatttcttcctcatgagataggacagttgctgttctttcttacctggcaatgaccctaaaatgtatatcctctttcctgaatatttagcagagacacacacacctgtccagagcgtttttggtatgcaaagtactttgacattggttgccaaagtcctccattttatagatgaaaaaactaaggctcaggaggcttgagacttgctaaaaggtcacacagcttggaagtgattcttcaaatcctctgctctttctgctgccacctgctgggtctcttggcaagcatggagggaggggctaactgtactttatagagctgggaagcccagtctctgagctgagcagatttgtatgaactgctttgggccaggacctgtaatgagccctggggagggacccagaggcacatctaactggcagcacaaggaggatgagaatttgcaactaaaggcctcacttggacaaaacactttggggtcacaatgcccaggaccgaagacatgttcaaggacagcacgaggcatctttctattgggagacccatgtccttggtaagcctgcacacctggcttcctaatccctgagagcctgcccactgtccagatccagtgagttggtacaaaacgtacagactgaagtccctgggcttgcttttcccatgggtgaggaccagaaccagactctgagcatccttacccctggccacccgaattgttccaagtttgaggtaccccgttcccagagatctgggggtccttctttggagggcttgctttgttctgatggccttcagaaaggaatcacatgaagtataaaaggacaggccccttggtcaccaagttttggctcctcatacagataggactcatccaggttcccagcgaggcactgactaagcgaggctcagagcttccatatcaaattcctcagctttgttctgtgcccagagggggtgggccccattctgggccctgtgaactttgtcttatatatcaccatctgtatcagaattcctcctcaattgcagttaagtgaaaatacgtggaagtctgcttttccatcctgtattctcccacatcactactggctgtgcggcccccgctgcttgccaagcttgggaatccagagaggggcagtagtagagtgggccagttgggacccacccgcagagctgaagaaacacgccagactaactgatgggattccacaccggagcctctgagcgcacaggcaggcatgccaagggggctgcagggtttgtcctttacttatctgcccctttcctagaaaactcctcgtttctgaaattaggcattatatggttccaggacccagccttcaaaattcctggcaggccagcttcaacattccatggccagccctgcctaagccagacttgggtcccagtccctcagtctctccagtggatatcttctgtggtgcatgctgttgagtccaacccaaaggccaaccgaggcacacaggagttgggactggctgccacaaagctagaaagggacaaaacagcacttgcttccctatggccacatggatagtccctggatatccttgctgtggtagaggtcctctacccattccagccactgatagcagggggattttccttcctaaggagaacagatgtaacagctttgcaaagtaccggcccataggaatcaaatgggtgagatcagctttgggcctgaccccagcaagaccagcatctccagaccccagcctttctcctcaggcctaagagagtcagggaaagagaggagactgtcccagagaccttctcctcgggtcagccagatagtctggatctatggtgtgactcaagctcctccttacccagggtgggtaaggccaggcctctagctacttggagttgtctgtaataatcttgaaaggcccaagggcctgtccccatcctgacttaaaggcatctgcttccctgtttcatatcacatgacggagaaacctgttctcatggcatgtaacatccctgtgaagagagcgttgtatatgattttgtattttttaattcattttaatctacaggttggaatctaatttttaaattttattggaactcacattttaaaaagaaataaaatttaaaataataataataataataataataataaacctttgaccagtgtcttccaagtagtttgatcaaagaatttataggtgttttcaaaacacagtccggagtgtaaagattggaaagccccatggccttgcctgtgtgtatgaagtgtaaatctggttttgttttgttgttttggattcttttgggtttttgttttgttttgaagatcagacagtgatcactctgaaagattgaagccaagaatttgtaactatggtatttactgtaagctgtagaacactcaataactattaaaaaaaaaattccccccc

SEQ ID NO: 729 - DNA, 536 bp, Homo Sapiens
ccacttataaatccctgtaggacaggattcacgtctcattgacatgctcttagaaatttacagtgcgtacacagtaggcaatccatacatgcccattcagtacacatttactggccgtcttgggacatgaacatcaaattaggtattgatgaaattttggcccgatgataaagaatatcttaggctaaaagtaatgggaaaattaaattgtttgcaggatgtttcagcactactccctacttagctagatttatctcctctttcttctctgtgtgtcagtttgcaaacaagaactgcccttttctctttgaaaaaaaatgaacactaaaggcagagattttcatttggctgtcttggtattcccacaaccaagcatggtacgtggttcaagaaatggctgtttaatcacagcagtaactcccagtaggaaagattctcaaaggaatagttcttttaaaaaaaaaaaaaaaaaaaaaaaaaaaaaattcccaaaatagggtggtcccccaaaggggcaagggaaagtttgtggtacc

SEQ ID NO: 730 - DNA, 360 bp, Homo Sapiens
  misc_feature (3)..(3): n is a, c, g, or t
  misc_feature (295)..(295): n is a, c, g, or t
  misc_feature (304)..(304): n is a, c, g, or t
  misc_feature (310)..(310): n is a, c, g, or t
  misc_feature (315)..(315): n is a, c, g, or t
  misc_feature (322)..(322): n is a, c, g, or t
  misc_feature (330)..(330): n is a, c, g, or t
  misc_feature (342)..(342): n is a, c, g, or t
  misc_feature (348)..(348): n is a, c, g, or t
gcngcgagaatcacttgaacctgggaggtggaggttgcagtgagccaagatcacgccattgcactccagcctgggcaacaagagtgaaactccgtctcaaaaaaaaaaaaaaaagatgtttttcatttttttcatgttatctatccaagcactgttccatggtcagcaagtcatatttcataatgtggattttccaaaataattattgaatacagctattctatggctacttttagtgtttttgtggtatgtggtgtgggagtgtttatggaattaccagtatcttaaattttcnaaggaagcntccgtnggacngtccacnccctcaanatgaaagtctgncactcnacatgaattagg

SEQ ID NO: 731 - DNA, 569 bp, Homo Sapiens
tgacgatgtcctccatcgtgatgaaggcagagagcagagacatcccgatctggggaactctgatccagtatatacggcctgtgttcgtgtcccggtcagaccaggattctcgcaggaaaacagtagaagaaatcaagagacgggcgcagtccaacggaaagtggccacagataatgatttttccagaaggaacttgtacaaacaggacctgcctaattaccttcaaacctggtgcattcatccctggagcgcccgtccagcctgtggttttacgatatccaaataaactggacaccatcacatggacgtggcaaggacctggagcgctggaaatcctgtggctcacgctgtgtcagtttcacaaccaagtggaaatcgagttccttcctgtgtacagcccttctgaggaggagaagaggaaccccgcgctgtatgccagcaacgtgcggcgagtcatggccgaggccttgggtgtctccgtgactgactacacgttcgaggactgcagctggccctggcggaaggacagctccgtctccccgctgacacttgccttttagaatttgcag

SEQ ID NO: 732 - DNA, 434 bp, Homo Sapiens
tttttttttttttattttttaaatttttaaattttaaccaccaccaccacagccttttattatgtgcttgccaggcactgtgctaaagctttacaaacattgcttcagttattccaacaaccctgaggtagatattttcaacatgcctccctccacccatgttattatagttgaggaaactgaggctcagagaggttaagtaaatcaaccaaggtcaaacccagctggtaagtagtgaagctagaaattcaaaccaactatatgtgactccaaaatccatgcctttaaacactaacctagattgtttaccattgaaagttaaaggacatatgctccttcccaaaatatgagaatagattttcagtgggaaagcaggggggagccatatgtaaattctttcatcagctatgggactcaaactcttggaggagtgg

SEQ ID NO: 733 - DNA, 473 bp, Homo Sapiens
  misc_feature (88)..(88): n is a, c, g, or t
  misc_feature (438)..(438): n is a, c, g, or t
  misc_feature (451)..(451): n is a, c, g, or t
ggggaagtaggacttcaacatggcggctgcggcactggcggtggctacggtgacggcctggcccggagcgggcagagttggaggttgnggcgttcgctctccctaggggctggggggagctcagcggggaccgagcctgggaggccggccggtgccagcacctttcggcttctgagacggcggcagcagcggcattcaggttctaaatggcttctaagaagttgggtgcagattttcatgggactttcagttaccttgatgatgtcccatttaagacaggagacaaattcaaaacaccagctaaagttggtctacctattggcttctccttgcctgattgtttgcaggttgtcagagaagtacagtatgacttctctttggaaaagaaaaccattgagtgggctgaagagattaagaaaatcgaagaagccgagcggnaagcagagtgcanaattgcggaagcagaagctaaa

SEQ ID NO: 734 - DNA, 210 bp, Homo Sapiens
  misc_feature (81)..(81): n is a, c, g, or t
  misc_feature (113)..(113): n is a, c, g, or t
gcccggagaacggggaggaatatgctgtggagctcctctgccatataaacaaaaagaggaaatctttcaaacatggctgangcaaagacccactggcttggagcagccctgtntcttatccctttaattttcctcatctctggggctgaagcagcttcatttcagagaaaccagctgcttcagaaagaaccagacctcaggttggaaaat

SEQ ID NO: 735 - DNA, 444 bp, Homo Sapiens
atcattgtgcacgatggccccagcactgctccagcccctctgtcaccccgcccttcggctcccttcgcagtggtggccctcctcctttccagagacgtcccccgagagacacgaagcagcagtgagagcctcatcttctctgggaaccagggcagggggcaccagcgccctctgcccccctcagagggtctctcccctcgacccccaaattcccccagcatctcaatcccttgcatggggtgcaaggcctcgagcccccatggtttgggctccccgctggtggcttctccaagactggcgaagcggctgagaggcactggccccacagcggggcagcaggatctctgtgcagtcagccagaccagtgtctgatgtcagctatatgctagagaagcagccagtccctcctgcactccagcaaatccagccatcagtcatcttcca

SEQ ID NO: 736 - DNA, 472 bp, Homo Sapiens
tttttttttttttttttaaaagtgatcatgttttaattatgggctaaaaatgactaatacagtaagcttgaatttaaaaaattaagtctaaataaattgctagggaattccacaatgggagtcaatgaaaatttttctctacatacaatatgatcattaacagactagttcttatttggaatgataaggcaaaaatagtaaaaccacacttttcctataaaaagttacacattatcttctgtagggatagctatcgtacatgaagaaacaaagatgtgatcactctattgcacacccagaaacattagagaatctggtcttagaatgatctagtcatcttcttcctctccatcgtcttcagcatctcgtttcctcttctcccctcgaagacctccttcttcctcttcttcctcttcttccccttcttcaacatagtcatcatcatcttcttcatcctgaatttcttctttca

SEQ ID NO: 737 - DNA, 685 bp, Homo Sapiens
ttttttttttttttttgatgatgaaatattttaattaaggtttatttcaatagcaaaaatgacttcaagattttgcgtgaattattttttaaacaaaactatatgaaaaatatgtacaaatcagtcatcaatgtcattgacatttttatgaacaagtttcaaatgaaaaatatcccatcataacaaaggtacataaataaataaatgctgacactacaaggctcggagctccgggcactcagacatcatgagttggtccttgcacccccggaatttaattctctacttctatgctcttttatttctctcttcaacatgtgtagcatatgttgctaccagagacaactgctgcatcttagatgaaagattcggtagttattgtccaactacctgtggcattgcagatttcctgtctacttatcaaaccaaagtagacaaggatctacagtctttggaagacatcttacatcaagttgaaaacaaaacatcagaagtcaaacagctgataaaagcaatccaactcacttataatcctgatgaatcatcaaaaccaaatatgatagacgctgctactttgaagtccaggaaaatgttagaagaaattatgaaatatgaagcatcgattttaacacatgactcaagtattcgatatttgcaggaaatatataattcaaataatcaaaag

SEQ ID NO: 738 - DNA, 459 bp, Homo Sapiens
  misc_feature (426)..(426): n is a, c, g, or t
  misc_feature (454)..(454): n is a, c, g, or t
taattcccttccctaggccttctttgagaatttctttgtctctttttttcagcaactattttcagacactctattcttcattctatagagcgacatatctcaaaagcgtatctcaaactttaatatgcatatgaataatctggggaccttattaaaaatgtatattctgattcagtaggtctagagtggggtcgaaatactgcttatttttgcttctttgatgttcatgatggaaaattttaagttacatacgtggttcacattatatttctactggtcagcactgctatagttggaagcagacatttcaaaaactaacaaagcttaggattcagggtctctcatttaattgggcatcttccaaggcttgtgatgagctctagcaagtttgcatttgcaattttgtatacttttccataaataggncattccaaatttgaataggcttcaaacntcaca

SEQ ID NO: 739 - DNA, 252 bp, Homo Sapiens
  misc_feature (198)..(208): n is a, c, g, or t
gagaagacgacagaagggggcatgaggtggtgcttctggggtgttctgtttcttgatctggttgccggttacctgggtgctttccgtttgtgaacattcttggagctgtacacttttgatctgggcacttttctgtgtgtatgttatacttcaataaaaagttgggctttgtgactagcaaaaaaaaaaaaaaaaaannnnnnnnnnnggaaaaaaaaaaaaaaaaaaaaaaaaaaaaagtcgtatcgatgt

SEQ ID NO: 740 - DNA, 504 bp, Homo Sapiens
gtggcctaccatggtttcaacgggtaacggggaataagggttcgattcggagctgcggagccgggctggcaggagcaggatggcggcggcggcggctgcaggcgaggcgcgccgggtgctggtgtacggcggcaggggcgctctgggttctcgatgcgtgcaggcttttcgggcccgcaactgggtaatgctgcgggctggggctgctgggtctccgcgggggtggccgggggctttcgtgtggaacccggcgggggcagtctagaggaaggtgggggcccctgtgcaccccctgactcgtgttgcttccacgtgcgcgcacaggtctacgcgtctattcctgtttccgagtgcgtgcgcacgccattcccagggcgctgggcctttgctgtgcaaggaggtgctccgtgggcctccgccagacccaaaaagtccggcgtgactcgggagagaattccaaaggggaggaacgggagcaggggtgagaggacggagagagagtgt

SEQ ID NO: 741 - DNA, 328 bp, Homo Sapiens
aaaaaatctattaaatccctttccatcgatcagctctgcttctttgcccagaggcatattcacgtctactggagttgacattctgctgctctgtcaactagtgggggtctgaaatgacagacgagaatttggaggttggcaccagacgagtatatcagactgatcatcgttttggttgcagattcctggatttccctagcaggctggcctctcatgcgagggcttatacaggcagtgcattgcaaaccaaaagggaacagagctaattctggtggtgtggatggggtaaaacagtcttcccccctagaatgtcaatggtaccgagctc

SEQ ID NO: 742 - DNA, 664 bp, Homo Sapiens
  misc_feature (624)..(624): n is a, c, g, or t
  misc_feature (644)..(644): n is a, c, g, or t
  misc_feature (647)..(647): n is a, c, g, or t
  misc_feature (661)..(661): n is a, c, g, or t
gggggagtctgggttggactggcggccgtggagtttgtgacatacgaggtgacacccctcgagtcacttcccttcaactccagctggagcgcctgcttggctttgggttcgttctgcagccttcgccccgctcctagcctcagggccggactccagcgcagagcccagcccagcgcagcctaccagcagccacccagccgcccagccgcccagccccgcacgaaacccggccagagcttcctagcagcccgagccatgaacaccgaaatgtatcagacccccatggaggtggcggtctaccagctgcacaatttctccatctccttcttctcttctctgcttggaggggatgtggtttccgttaagctggacaacagtgcctccggagccagcgtggtggccatagacaacaagatcgaacaggccatggatctggtgaagaatcatctgatgtatgctgtgagagaggaggtggagatcctgaaggagcagatccgagagctggtggagaagaactcccagctagagcgtgagaacaccctgttgaagaccctggcaagcccagagcaactggagaagttccagtcctgtctgagccctgaagagccaactcccgaatcccanaagtgcccgaggccctgggnggntccgccggggtaantgg

SEQ ID NO: 743 - DNA, 536 bp, Homo Sapiens
  misc_feature (34)..(34): n is a, c, g, or t
  misc_feature (50)..(50): n is a, c, g, or t
tttttgcacacaagttaaaggtagtctccatgtngggagggctttcaatngctgcaaacatgttctctggaagtcttctctcccatggacccacttggtccatctgcaaagctctgccctgtaaggctcccaatctgtcaggacctatcagcgaggatgtctcagaggagcagagtgcccaaaccctggatttctcctgctgctgcttctgttctctcttcacatgagtgtgataccatccatatcctaaacttcaacatcgacattaaggccacaacagttctcaggaccagactcttcctcaacagcatttttcaaatggctcctcctctgaagatctccagattggcaattcatcccatgtgtaagaatgttgctccaattcccctcatctacacttactatatctgcctttatccagttgccaccccaaggattttcccgtcttttgcagcatccatcccataatgggtgctctcaactacgccaggggacacctccccatggagcattctgtaactggcactaaggcatgg

SEQ ID NO: 744 - DNA, 489 bp, Homo Sapiens
ctgtctcccaggctggagtgcagtagcatgatctcagctcactgcaacctccacctcccaggctggtctcgaactcctgacctcgagtgatccattcgcttcagtctcccaaagtgctgggattacaggcttgagcaccacgcctggctccatccactattttgaggattcctttaacctttcttgtttattgaatttcatctttcctctatcacatcttccttttcgtagaaacatccagtagctttctagaatagggcatggaagttagatttttttaagatattgcaagtttattttagcccccattctgggatataatttatagcagtgacgtgtgttgactttttttttttctaagaacaaaatttctgataaaaaattctgaattgacatcataactaagaagcacatgactagagaaatctgtatcagaatttataatatatttaagctagcctaaagtcagtattaatggtttaaagaaag

SEQ ID NO: 745 - DNA, 224 bp, Homo Sapiens
  misc_feature (76)..(76): n is a, c, g, or t
  misc_feature (85)..(85): n is a, c, g, or t
  misc_feature (127)..(127): n is a, c, g, or t
  misc_feature (195)..(195): n is a, c, g, or t
  misc_feature (197)..(197): n is a, c, g, or t
  misc_feature (221)..(221): n is a, c, g, or t
cccgccccgtggcgcccgagtgcactgaagatggcggctgctgtaggacggttgctccgagcgtcggttgcccganatgtgagtnccattccttggggcatttctgccactgcagccctcaggcctnctgcatgtggaagaacgagcttgacaaatttattgtgttctggttccagtcaagcaaaattattcagnancagttcctcatgccatggacctantgt

SEQ ID NO: 746 - DNA, 646 bp, Homo Sapiens
  misc_feature (618)..(618): n is a, c, g, or t
gtacattggaaaacccttccgaacttctcagagagcatcatttctgtccctgcttccagcacctcaggctctccgagccgtgtgatttatgccaagcttggtggtgagatcctggactacagggacttggcagcccttcctaaaagtaaggccatctatgacatcgaccgccccgacatgatctcctactcaccctacatcagccactctgcaggggacaggcagagctacggcgagtcccctcagttgctctcgccaacgccgaccgagggggatcaggatgaccggtcctacaagcagtgccggacctccagcccaagctccactgggtcggttagcctcgggcgctacactccgacctcacggtcaccacagcactacagccgtccagctggtactgtgagtgtgggtaccagtagctgcctctccctgtcccaacacccaagccctacatccgtgttcagacatcattacatcccctacttccgaggcagtgaaagtggccggagcacccccagcctctccgtgctctctgacagcaagccgcccccctccaactaccaacaggcacctcgccacttccacgtcccagacactggcgtagaagatacatctatnggaaacccctatctacgatcacatactt

SEQ ID NO: 747 - DNA, 477 bp, Homo Sapiens
tttttttttttttagagttcatgaaaatataaagggttttatttattctaatccaacaagatatatgcccaaatatatagtcatcaaacataaaattcaggggcactggagatatatataatattagatgattataccaatagctagactttgaactccagttattattaacataaaaattacagtatgactactaaataattagtacagccaatgtggtaaatacattaaattacaaatatttacatttgaacatagctcattttacaaataaatgttttaagccccaactgtccaactttcactgaaacactaaatgttgctgaacaaaaagtctgcaataaatactccctccagtgagtgggggaaatgattttacatacactctgtgttacaatgaatgtctgagtatatatttaaaactttaaactcctcatgtgattattgaaaccttgtattctggaaaaactcatattg

SEQ ID NO: 748 - DNA, 5542 bp, Homo Sapiens
ctgactgcactggtgatggtccctggcaatccaacctggcaccatcgcagttggagtactatgcatcttcaccagatgaaaaggctctagtagaagctgctgcaaggattggtattgtgtttattggcaattctgaagaaactatggaggttaaaactcttggaaaactggaacggtacaaactgcttcatattctggaatttgattcagatcgtaggagaatgagtgtaattgttcaggcaccttcaggtgagaagttattatttgctaaaggagctgagtcatcaattctccctaaatgtataggtggagaaatagaaaaaaccagaattcatgtagatgaatttgctttgaaagggctaagaactctgtgtatagcatatagaaaatttacatcaaaagagtatgaggaaatagataaacgcatatttgaagccaggactgccttgcagcagcgggaagagaaattggcagctgttttccagttcatagagaaagacctgatattacttggagccacagcagtagaagacagactacaagataaagttcgagaaactattgaagcattgagaatggctggtatcaaagtatgggtacttactggggataaacatgaaacagctgttagtgtgagtttatcatgtggccattttcatagaaccatgaacatccttgaacttataaaccagaaatcagacagcgagtgtgctgaacaattgaggcagcttgccagaagaattacagaggatcatgtgattcagcatgggctggtagtggatgggaccagcctatctcttgcactcagggagcatgaaaaactatttatggaagtttgcagaaattgttcagctgtattatgctgtcgtatggctccactgcagaaagcaaaagtaataagactaataaaaatatcacctgagaaacctataacattggctgttggtgatggtgctaatgacgtaagcatgatacaagaagcccatgttggcataggaatcatgggtaaagaaggaagacaggctgcaagaaacagtgactatgcaatagccagatttaagttcctctccaaattgctttttgttcatggtcatttttattatattagaatagctacccttgtacagtattttttttataagaatgtgtgctttatcacaccccagtttttatatcagttctactgtttgttttctcagcaaacattgtatgacagcgtgtacctgactttatacaatatttgttttacttccctacctattctgatatatagtcttttggaacagcatgtagaccctcatgtgttacaaaataagcccaccctttatcgagacattagtaaaaaccgcctcttaagtattaaaacatttctttattggaccatcctgggcttcagtcatgcctttattttcttttttggatcctatttactaatagggaaagatacatctctgcttggaaatggccagatgtttggaaactggacatttggcactttggtcttcacagtcatggttattacagtcacagtaaagatggctctggaaactcatttttggacttggatcaaccatctcgttacctggggatctattatattttattttgtattttccttgttttatggagggattctctggccatttttgggctcccagaatatgtattttgtgtttattcagctcctgtcaagtggttctgcttggtttgccataatcctcatggttgttacatgtctatttcttgatatcataaagaaggtctttgaccgacacctccaccctacaagtactgaaaaggcacagcttactgaaacaaatgcaggtatcaagtgcttggactccatgtgctgtttcccggaaggagaagcagcgtgtgcatctgttggaagaatgctggaacgagttataggaagatgtagtccaacccacatcagcagatcatggagtgcatcggatcctttctataccaacgacaggagcatcttgactctctccacaatggactcatctacttgttaaaggggcagtagtactttgtgggagccagttcacctcctttcctaaaattcagtgtgatcaccctgttaatggccacactagctctgaaattaatttccaaaatctttgtagtagttcatacccactcagagttataatggcaaacaaacagaaagcattagtacaagcccctcccaacacccttaatttgaatctgaacatgttaaaatttgagaataaagagacatttttcatctctttgtctggtttgtcccttgtgcttatgggactcctaatggcatttcagtctgttgctgaggccattatattttaatataaatgtagaaaaaagagagaaatcttagtaaagagtattttttagtattagcttgattattgactcttctatttaaatctgcttctgtaaattatgctgaaagtttgccttgagaactctatttttttattagagttatatttaaagcttttcatgggaaaagttaatgtgaatactgaggaattttggtccctcagtgacctgtgttgttaattcattaatgcattctgagttcacagagcaaattaggagaatcatttccaaccattatttactgcagtatggggagtaaatttataccaattcctctaactgtactgtaacacagcctgtaaagttagccatataaatgcaagggtatatcatatatacaaatcaggaatcaggtccgttcaccgaacttcaaattgatgtttactaatatttttgtgacagagtataaagaccctatagtgggtaaattagatactattagcatattattaatttaatgtctttatcattggatcttttgcatgctttaatctggttaacatatttaaatttgctttttttctctttacctgaaggctctgtgtatagtatttcatgacatcgttgtacagtttaactatcaataaaaagtttggacagtatttaaatattgcaaatatgtttaattatacaaatcagaatagtatgggtaattaaatgaatacaaaaagaagagcctctttctgcagccgacttagacatgctcttccctttctataagctagattttagaataaagggtttcagttaataatcttattttcaggttatgtcatctaacttatagcaaactaccacaatacagtgagttctgccagtgtcccagtacaaggcatatttcaggtgtggctgtggaatgtaaaaatgctcaacttgtatcaggtaatgttagcaataaattaaatgctaagaatgattaatcgggtacatgttactgtaattaactcattgcacttcaaaacctaacttccatcctgaatttatcaagtagttcagtattgtcatttgtttttgttttattgaaaagtaatgttgtcttaagatttagaagtgattattagcttgagaactattacccagctctaagcaaataatgattgtatacatattaagataatggttaaatgcggttttaccaagttttcccttgaaaatgtaattcctttatggagatttattgtgcagccctaagcttccttcccatttcatgaatataaggcttctagaattggactggcaggggaaagaatggtagagacagaaattaagactttatccttgtttgcttgtaaactattattttcttgctaatgtaacatttgtctgttccagtgatgtaaggatattaagttattaagctaaatattaattttcaaaaatagtccttctttaacttagatatttcatagctggatttaggaagatctgttattctggaagtactaaaaagaataatacaacgtacaatgtctgcattcactaattcatgttccagaagaggaaataatgaagatatactcagtagagtactaggtgggaggatatggaaatttgctcataaaatctcttataaaacgtgcatataacaaaatgacacccagtaggcctgcattacatttacatgaccgtgtttatttgccatcaaataaactgagtactgacaccagacaaagactccaaagtcataaaatagcctatgaccaactgcagcaagacaggaggtcagctcgcctataatggtgcttaaagtgtgattgatgtaattttctgtactcaccatttgaagttagttaaggagaactttatttttttaaaaaaagtaaatggcaaccactagtgtgctcatcctgaactgttactccaaatccactccgtttttaaagcaaaattatcttgtgattttaagaaaagagttttctatttatttaagaaagtaacaatgcagtctgcaagctttcagtagttttctagtgctatattcatcctgtaaaactcttactacgtaaccagtaatcacaaggaaagtgtcccctttgcatatttctttaaaattctttctttggaaagtatgatgttgataattaacttacccttatctgccaaaaccagagcaaaatgctaaatacgttattgctaatcagtggtctcaaatcgatttgcctccctttgcctcgtctgagggctgtaagcctgaagatagtggcaagcaccaagtcagtttccaaaattgcccctcagctgctttaagtgactcagcaccctgcctcagcttcagcaggcgtaggctcaccctgggcggagcaaagtatgggccagggagaactacagctacgaagacctgctgtcgagttgagaaaaggggagaatttatggtctgaattttctaactgtcctctttcttgggtctaaagctcataatacacaaaggcttccagacctgagccacacccaggccctatcctgaacaggagactaaacagaggcaaatcaaccctaggaaatacttgcattctgccctacggttagtaccaggactgaggtcatttctactggaaaagattgtgagattgaacttatctgatcgcttgagactcctaataggcaggagtcaaggccactagaaaattgacagttaagagccaaaagtttttaaaatatgctactctgaaaaatctcgtgaaggctgtaggaaaagggagaatcttccatgttggtgtttttcctgtaaagatcagtttggggtatgatataagcaggtattaataaaaataacacaccaaagagttacgtaaaacatgttttattaattttggtccccacgtacagacattttatttctattttgaaatgagttatctattttcataaaagtaaaacactattaaagtgctgttttatgtgaaataacttgaatgttgttcctataaaaaatagatcataactcatgatatgtttgtaatcatggtaatttagatttttatgaggaatgagtatctggaaatattgtagcaatacttggtttaaaattttggacctgagacactgtggctgtctaatgtaatcctttaaaaattctctgcattgtcagtaaatgtagtatattattgtacagctactcataattttttaaagtttatgaagttatatttatcaaataaaaactttcctatat

SEQ ID NO: 749 - DNA, 562 bp, Homo Sapiens
gagaatataacagcactcccaaagaactgggtactcaacactgagcagatctgttctttgagctaaaaaccatgtgctgtaccaagagtttgctcctgsctgctttgatgtcagtgctgctactccacctctgcggcgaatcagaagcagcaagcaactttgactgctgtcttggatacacagaccgtattcttcatcctaaatttcttgtgggcttcacacggcagctggccaatgaaggctgtgacatcaatgctatcatctttcacacaaagaaaaagttgtctgtgtgcgcaaatccaaaacagacttgggtgaaatatattgtgcgtctcctcagtaaaaaagtcaagaacatgtaaaaactgtggcttttctggaatggaattggacatagcccaagaacagaaagaaccttgctggggttggaggtttcacttgcacatcatggagggtttagtgcttatctaatttgtgcctcactggacttgtccaattaatgaagttgattcatattgcatcatagtttgctttgtttagcatcacattaaagttaaactgt

SEQ ID NO: 750 - DNA, 577 bp, Homo Sapiens
caccactgctttagaggccagatttttctggaggggattcctctacacatgctacctccagttagcaggaggggaaggaagggttgggagtcttggggagtctcaccatcaactcctcctcctgctgctgttccatttgcctcagacatggagttggagctgctgcggggcagccaggccatcatgctgcgctcagcggacctgacaggactggagaagcgtgtggagcagatccgtgaccacatcaatgggcgcgtgctctactatgccacctgcaagtgatgctacagcttccagcccgttgccccactcatctgccgcctttgcttttggttggggggcagattgggttggaatgctttccatctccaggagactttcatgtagcccaaagtacagcctggaccacccctggtgtgtacctagtaagattaccctgagctgcagctgagcctgagccaatgggacagttacacttgacagacaaagatggtggagattggcatgccattgaaactaagagctctcaagtcaaggaagctgggctgggcagtatcccccgcctttagttctccac

SEQ ID NO: 751 - DNA, 624 bp, Homo Sapiens
ctcggcacgagggcgccgcgtgcagaggtgctcaagcctcctcgcggtgcgcagtcagtgccgccgcgcccggcctcccgcacgccccgcaggtagcgcccccgcccgcggcccagagtgcgctcgcgccggcaccagctcccggataaacggcgcgccgcgcggagatgacagccgaggagatgaaggcgaccgagagcggggcgcagtcggcgccgctgcccatggagggagtggacatcagccccaaacaggacgaaggcgtgctgaaggtcatcaagagagagggcacaggtacagagatgcccatgattggggaccgagtctttgtccactacactggctggctattagatggcacaaagtttgactccagtctggatcgcaaggacaaattctcctttgacctgggaaaaggggaggtcatcaaggcttgggacattgccatagccaccatgaaggtgggggaggtgtgccacatcacctgcaaaccagaatatgcctacggttcagcaggcagtcctccaaagattccccccaatgccacgcttgtatttgaggtggagttgtttgagtttaagggagaagatctgacggaagaggaagatggcggaatcattcgca

SEQ ID NO: 752 - DNA, 352 bp, Homo Sapiens
ttttttttttttttttttgaattttcacaaaggtgtaaatttattcctaagcagttaaaatgaaaatttgagtttgaaagggtagcatgctgatacattaagaggaaaaagacaagtttaagattttaaactgtgtccacagaagaataaacaatctaaatcttttctcccccgttaggtcaatattgaaggaggggctatagccttgggccaccctcttggagcatctggctgtcgaattcttgtgaccctgttacacacactggagagaatgggcagaagtcgtggtgttgcagccctgtgcattgggggtgggatgggaatagcaatgtgtgttcagagagaatgaatt

SEQ ID NO: 753 - DNA, 476 bp, Homo Sapiens
  misc_feature (265)..(265): n is a, c, g, or t
  misc_feature (291)..(291): n is a, c, g, or t
  misc_feature (399)..(399): n is a, c, g, or t
  misc_feature (425)..(425): n is a, c, g, or t
  misc_feature (430)..(430): n is a, c, g, or t
  misc_feature (469)..(469): n is a, c, g, or t
cttttttttttttttttaacacaaagcatggctgatcctagaacatgataactcagtaacctagtgtggtaaatgctaaacttgatctaagggttggtgctcctgggtgaggtttaaagttttttttctccctacctcccttactccctccttccctcccctccctttatttcttcctcttttctttcattctttccttccttttgttctttctttcaatctccctccccctccccttcccctttccctttaatttaaagagggnctggtaagcatccctacttttctatnatcttaagttatcaataggactaaattaggaaaaaaaatttaggcattggttaattatggagataaatggaactataaacctaaatatttaccagaaaagagcagagncggaactaaaaggatcagggaatccngggtnacatcaggtcatacagcagggtttcaaacccctctcccnaactaaa

SEQ ID NO: 754 - DNA, 467 bp, Homo Sapiens
agaggcttgacagagctgttacttatgtgtgagggctttattctcaggcagtagtttattcatcatttggtaagcccctccccacactcctctaatttaaacaagtagtgaaggcttatcttaaactgtgtagtaccttagacttggcatttatttttgatagagcagagataaaatattttgatggaaggaaatcaattttctgtaactgatgatgtgaaaattttattttctgggaaattatatagccattcaaaaattcaaagtatgttattatgattggttacaagagaataatgttacatgtttaattgtaatatttgtctcctatcattttcttccctttcagtcataataaatgatttacaaaacccaaaaaaaaaaaaaaaaaaaaaaaactcgagggggggcccggtacccaattcgccctatagtgagtcgtattacaattcactggccgtcgttta

SEQ ID NO: 755 - DNA, 352 bp, Homo Sapiens
tttttttttttttttttttttttttttgactcaatctgcctttattaaaaaaccttacaaaagatgtatttaaatgcttgaaaaaattaactttatgctctatgtacagataaatttctcttactgtacaactaaatatggttatatcctttgtttaaaaaatattttttcccccactaattacacttcgggtgtagttccacgtcaatgatctttccgctcttctgggaatgtgtcctaagagctgccgggtgggtggaaatagccctacacagcgccacttttttgctcagtcgggtttattaaaattgtttggggtttggggtttttttcctccgttttcgttttctga

SEQ ID NO: 756 - DNA, 339 bp, Homo Sapiens
ttttttttttttttttttttttttggggggtttcttttcagggttttatttttcaaaatatacaatttaagtttttatttcacaaccgtagttttgtatatttattccaaaatctttaaatagctccgcagcaaacagtacaaatcacaagggccgtcaaactgcttttttttagcctttacacttggcgagttttttaagtttcaagtagtaatggtttgggggtaaaaaaggaaccaaaaacaggaggaaacaacattttttacataagctcaacatgtaggattagaaagggccgtctgaccagctccttggtctgggaccagactaaaaacatgt

SEQ ID NO: 757 - DNA, 509 bp, Homo Sapiens
  misc_feature (11)..(11): n is a, c, g, or t
  misc_feature (44)..(44): n is a, c, g, or t
  misc_feature (80)..(80): n is a, c, g, or t
cggagcgcgcncgcgggatgttcgcggagcgcggtcggagcggnaggaggcgcgccgccgagatttggaagacccttagnagctccaccggaggggcggccgctctagaactagcggaggcccccgactgcaggaattcgacacgagctggcatggcggcctgcattggagcggcgcactgggctggaatgggcctaggccggggtttccaagccgccaggactctgctgcccccggcggcctctatcgcctgcagggtccacgcggggcctgtcccgccgcagagcactgggccttccgagcccggagcgctccacccgccgccgaaaccgggcatcgtggacacgcgccgccccgtggaaccggaacgcaggttcttgactcctgaattcattcctcgaacgggaagaacagatcctctgagagctcaaacggaacgagaagatatcgtacgaaggagacgagtactgcacatgtcagagtgctatgttggaaggatgcgtccgggt

SEQ ID NO: 758 - DNA, 6478 bp, Homo Sapiens
agagcgagcaggggagagcgagaccagttttaaggggaggaccggtgcgagtaaggcagccccgaggctctgctcgcccaccacccaatcctcgcctcccttctgctccaccttctctctctgccctcacctctcccccgaaaaccccctatttagccaaaggaaggaggtcaggggaacgctctcccctccccttccaaaaaacaaaaacagaaaaacccttttccaggccggggaaagcaggagggagaggggccgccgggctggccatggagctgctgtgccacgaggtggacccggtccgcagggccgtgcgggaccgcaacctgctccgagacgaccgcgtcctgcagaacctgctcaccatcgaggagcgctaccttccgcagtgctcctacttcaagtgcgtgcagaaggacatccaaccctacatgcgcagaatggtggccacctggatgctggaggtctgtgaggaacagaagtgcgaagaagaggtcttccctctggccatgaattacctggaccgtttcttggctggggtcccgactccgaagtcccatctgcaactcctgggtgctgtctgcatgttcctggcctccaaactcaaagagaccagcccgctgaccgcggagaagctgtgcatttacaccgacaactccatcaagcctcaggagctgctggagtgggaactggtggtgctggggaagttgaagtggaacctggcagctgtcactcctcatgacttcattgagcacatcttgcgcaagctgccccagcagcgggagaagctgtctctgatccgcaagcatgctcagaccttcattgctctgtgtgccaccgactttaagtttgccatgtacccaccgtcgatgatcgcaactggaagtgtgggagcagccatctgtgggctccagcaggatgaggaagtgagctcgctcacttgtgatgccctgactgagctgctggctaagatcaccaacacagacgtggattgtctcaaagcttgccaggagcagattgaggcggtgctcctcaatagcctgcagcagtaccgtcaggaccaacgtgacggatccaagtcggaggatgaactggaccaagccagcacccctacagacgtgcgggatatcgacctgtgaggatgccagttgggccgaaagagagagacgcgtccataatctggtctcttcttctttctggttgtttttgttctttgtgttttagggtgaaacttaaaaaaaaaattctgcccccacctagatcatatttaaagatcttttagaagtgagagaaaaaggtcctacgaaaacggaataataaaaagcatttggtgcctatttgaagtacagcataagggaatcccttgtatatgcgaacagttattgtttgattatgtaaaagtaatagtaaaatgcttacaggaaaacctgcagagtagttagagaatatgtatgcctgcaatatgggaacaaattagaggagactttttttttcatgttatgagctagcacatacacccccttgtagtataatttcaaggaactgtgtacgccatttatggcatgattagattgcaaagcaatgaactcaagaaggaattgaaataaggagggacatgatggggaaggagtacaaaacaatctctcaacatgattgaaccatttgggatggagaagcacctttgctctcagccacctgttactaagtcaggagtgtagttggatctctacattaatgtcctcttgctgtctacagtagctgctacctaaaaaaagatgttttattttgccagttggacacaggtgattggctcctgggtttcatgttctgtgacatcctgcttcttcttccaaatgcagttcattgcagacaccaccatattgctatctaatggggaaatgtagctatgggccataaccaaaactcacatgaaacggaggcagatggagaccaagggtgggatccagaatggagtcttttctgttattgtatttaaaagggtaatgtggccttggcatttcttcttagaaaaaaactaatttttggtgctgattggcatgtctggttcacagtttagcattgttataaaccattccattcgaaaagcactttgaaaaattgttcccgagcgatagatgggatggtttatgcaagtcatgctgaatactcctcccctcttctcttttgccccctcccttcctgcccccagtctgggttactcttcgcttctggtatctggcgttctttggtacacagttctggtgttcctaccaggactcaagagacaccccttcctgctgacattcccatcacaacattcctcagacaagcctgtaaactaaaatctgttaccatctgatggcacagaaggatcttaattcccatctctatacttctcctttggacatggaaagaaaagttattgctggtgcaaagatagatggctgaacatcagggtgtggcattttgttcccttttccgttttttttttttttattgttgttgttaattttattgcaaagttgtattcagcgtacttgaatttttcttcctctccacttcttagaggcattcagttagcaaagaggttggagcaacaactttttttttttttttttgcacaattgtaattgacaggtaatgaagctatttgttaaaatatttgcctttttaagtaaaaaagaaaaatcagaacagggctatttgaagaattattttatacacagattctgccttgtttcatagtatgagggttgaagacggaaaacaatctaagggtctctcatttttttaattttgttttgttcagtttggtttttttttttttttgcgctgctaagaagctaaagtcatccatccttattcacgttgacagtacctagctgtaatgtttcacagagtgtgctgctattttataaacatttttataatatattattttactgcttaaattccaagtcctgaagtagatggttgagatatgagttcttcgtactggaaaagcccttccgtagtttgttttcttctggtagcatattcatggttgtttttttttttcttttttggttttttggttttttttttttcctctgatcacattcttcaaagacggagtattcttacctcaggtttactggacaaaatcaataactacaaaaggcaatgattcacgcttttgttttcataatacctcacaaccgtacagtttctgcttgggagcccattcgcatgaggaatacagaagcagtgtgagcagggctgactccctctcaggtggaaggcagggcggtctcactcccagggacctttttggtcatggaggccatcgggctcccagttagaccctggtatcctcatcatgatggaaaaaatacattgaaccaagggatcctccctccccttcaaggcagacgttcagtacaaacatttatgcggtaggctcagatgtcgtaatttgcacttaggtaccaggtgtcaggaaacagactaaaaagaattccaccaggctgtttggagatcctcatcttggagctttttcaaaagcggggcttcatctgcaaagggccctttcatcttgaagtttttcccctccgtctttcccctcccctggcatggacaccttgtgtttaggatcatctctgcaggtttcctaggtctgaatctgcgagtagatgaacctgcagcaagcagcgtttatggtgcttccttctccctcctctgtctcaaactgcgcaggcaagcactatgcaagcccaggccctctgctgagcggtactaaacggtcgggttttcaatcacactgaattggcaggataagaaaaataggtcagataagtatgggatgatagttgaagggaggtgaagaggctgcttctctacagaggtgaaattccagatgagtcagtctcttgggaagtgtgtttagaagggttcaggactttgtgagttagcatgaccctaaaattctaggggatttctggtgggacaatgggtggtgaattttgaagttttggagagggaagtggagcagccagcaagtaagctagccagagttttctcaagagccagctttgctcagcacactctcctgggccccaaggagtcccacggaatggggaaagtgggaaccctggagttcttgggaatcttggagcctaaagagaaaccgaggtgcaaattcatttcatggtgactgacccttgagcttaaacagaagcagcaaatgaaagaaccggacaaataaggaagggcacaagcctacccgactctatttacagtctgtaactttccactcttcctgtagtcccgaggcccctgggtccttctagcttttctctttcccatccttggggccttgtgtgatgatgggtgtggggctgccgatgggaaagtcgggggttgttaggcttttctgcctgctcctgcttaaacacaagaaggaatcctggattttgccctctccttagctcttagtctctttggtaggagttttgttccagaggagctctcccccttggatttgaacttgctctttttgttgttgttgttctttctcttctttttcttacctcccactaaaggggttccaaattatcctggtctttttctaccttgttgtgtttctatctcgtctttacttccatctgtttgtttttttctccatcagtgggggccgagttgttcccccagcctgccaaattttgatccttcccctcttttggccaaatcctagggggaagaaatcctagtatgccaaaaatatatgctaagcataattaaactccatgcgggtccataacagccaagaagcctgcaggagaaagccaagggcagttccctccgcagaacaccccatgcgtgctgagaggcgagctccttgaagaaggggctgttcttccaggaggccttattttgaactgcctcaggaccccactggagagcacagcatgccttactactgggtcatccttggtctatgtgctctgtactggaggctctgttctgcctcttatcagccaggtcaggggcacacatggcttaagtgacaaagccagaggagaagacaaccctgacagcatcacgctgcatcccattgctagcaggattggcaactcttcagacggagctgcgcttccctgcagtctagcacctctagggcctctccagactgtgccctgggagctctgggactgaaaggttaagaacataaggcaggatcagatgactctctccaagagggcaggggaattttctctccatgggccacaggggacagggctgggagaagaaatagacttgcaccttatgtcatgtaaataattgattttctagttcaagaagataatattggtagtgtgggaattggaggtaggaaggggaggaagtctgagtaagccagttggcttctaagccaaaaggattcctctttgtttatctctgagacagtccaaccttgagaatagctttaaaagggaaattaatgctgagatgataaagtccccttaagccaacaaaccctctgtagctatagaatgagtgcaggtttctattggtgtggactcagagcaatttacaagagctgttcatgcagccatccatttgtgcaaaatagggtaagaagattcaagaggatatttattacttcctcataccacatggcttttgatgattctggattctaaacaacccagaatggtcatttcaggcacaacgatactacattcgtgtgtgtctgcttttaaacttggctgggctatcagaccctattctcggctcaggttttgagaagccatcagcaaatgtgtacgtgcatgctgtagctgcagcctgcatcccttcgcctgcagcctactttggggaaataaagtgccttactgactgtagccattacagtatccaatgtcttttgacaggtgcctgtccttgaaaaacaaagtttctatttttatttttaattggtttagttcttaactgctggccaactcttacatccccagcaaatcatcgggccattggattttttccattatgttcatcacccttatatcatgtacctcagatctctctctctctcctctctctcagttatatagtttcttgtcttggactttttttttcttttctttttctttttttttttgctttaaaacaagtgtgatgccatatcaagtccatgttattctctcacagtgtactctataagaggtgtgggtgtctgtttggtcaggatgttagaaagtgctgataagtagcatgatcagtgtatgcgaaaaggtttttaggaagtatggcaaaaatgttgtattggctatgatggtgacatgatatagtcagctgccttttaagaggtcttatctgttcagtgttaagtgatttaaaaaaataataacctgttttctgactagtttaaagatggatttgaaaatggttttgaatgcaattaggttatgctatttggacaataaactcaccttgacct

SEQ ID NO: 759 - DNA, 396 bp, Homo Sapiens
  misc_feature (162)..(162): n is a, c, g, or t
  misc_feature (185)..(185): n is a, c, g, or t
ctggggggtccctgcatcttgtactgcggcccctccaacaagtcggtggatgtcctggcaggactgctcctgagaaggatggagctgaagcccctccgtgtgtacagtgagcaggctgaggcagcgaggttcccagtgccacgtgtgggcagcaggaagctntcaggaagagcccccgggagagngcctgaaccagagcctcaggagcatcaccctgcaccaccggatccggcaggcccccaacccttactcgtcggaaatcaaggcctttgacacccggctgcagagaggggagctcttctccagggaggacctggtctggtacaagaaggtctttgtgggaggctcggaagttcgagctggaccggcatgaggtcatcctctgcacctgccctt

SEQ ID NO: 760 - DNA, 4045 bp, Homo Sapiens
gcagccagagctcagcagggccctggagagatggccacggtcccagcaccggggaggactggagagcgcgcgctgccaccgccccatgtctcagccagggcttccttcctcggctccaccctgtggatgtaatggcggcccctgctctgtcctggcgtctgcccctcctcatcctcctcctgcccctggctacctcttgggcatctgcagcggtgaatggcacttcccagttcacatgcttctacaactcgagagccaacatctcctgtgtctggagccaagatggggctctgcaggacacttcctgccaagtccatgcctggccggacagacggcggtggaaccaaacctgtgagctgctccccgtgagtcaagcatcctgggcctgcaacctgatcctcggagccccagattctcagaaactgaccacagttgacatcgtcaccctgagggtgctgtgccgtgagggggtgcgatggagggtgatggccatccaggacttcaagccctttgagaaccttcgcctgatggcccccatctccctccaagttgtccacgtggagacccacagatgcaacataagctgggaaatctcccaagcctcccactactttgaaagacacctggagttcgaggcccggacgctgtccccaggccacacctgggaggaggcccccctgctgactctcaagcagaagcaggaatggatctgcctggagacgctcaccccagacacccagtatgagtttcaggtgcgggtcaagcctctgcaaggcgagttcacgacctggagcccctggagccagcccctggccttcaggacaaagcctgcagcccttgggaaggacaccattccgtggctcggccacctcctcgtgggcctcagcggggcttttggcttcatcatcttagtgtacttgctgatcaactgcaggaacaccgggccatggctgaagaaggtcctgaagtgtaacaccccagacccctcgaagttcttttcccagctgagctcagagcatggaggagacgtccagaagtggctctcttcgcccttcccctcatcgtccttcagccctggcggcctggcacctgagatctcgccactagaagtgctggagagggacaaggtgacgcagctgctcctgcagcaggacaaggtgcctgagcccgcatccttaagcagcaaccactcgctgaccagctgcttcaccaaccagggttacttcttcttccacctcccggatgccttggagatagaggcctgccaggtgtactttacttacgacccctactcagaggaagaccctgatgagggtgtggccggggcacccacagggtcttccccccaacccctgcagcctctgtcaggggaggacgacgcctactgcaccttcccctccagggatgacctgctgctcttctcccccagtctcctcggtggccccagccccccaagcactgcccctgggggcagtggggccggtgaagagaggatgcccccttctttgcaagaaagagtccccagagactgggacccccagcccctggggcctcccaccccaggagtcccagacctggtggattttcagccaccccctgagctggtgctgcgagaggctggggaggaggtccctgacgctggccccagggagggagtcagtttcccctggtccaggcctcctgggcagggggagttcagggcccttaatgctcgcctgcccctgaacactgatgcctacttgtccctccaagaactccagggtcaggacccaactcacttggtgtagacagatggccagggtgggaggcaggcagctgcctgctctgcgccgagcctcagaaggaccctgttgagggtcctcagtccactgctgaggacactcagtgtccagttgcagctggacttctccacccggatggcccccacccagtcctgcacacttggtccatccatttccaaacctccactgctgctcccgggtcctgctgcccgagccaggaactgtgtgtgttgcaggggggcagtaactccccaactccctcgttaatcacaggatcccacgaatttaggctcagaagcatcgctcctctccagccctgcagctattcaccaatatcagtcctcgcggctctccagggctccctgccctgacctcttccctgggttttctgccccagcctcctccttccctcccctccccgtccacagggcagcctgagcgtgctttccaaaacccaaatatggccacgctccccctcggttcaaaaccttgcacaggtcccactgccctcagccccacttctcagcctggtacttgtacctccggtgtcgtgtggggacatccccttctgcaatcctccctaccgtcctcctgagccactcagagctccctcacaccccctctgttgcacatgctattccctggggctgctgtgcgctccccctcatctaggtgacaaacttccctgactcttcaagtgccggttttgcttctcctggagggaagcactgcctcccttaatctgccagaaacttctagcgtcagtgctggagggagaagctgtcagggacccagggcgcctggagaaagaggccctgttactattcctttgggatctctgaggcctcagagtgcttggctgctgtatctttaatgctggggcccaagtaagggcacagatccccccacaaagtggatgcctgctgcatcttcccacagtggcttcacagacccacaagagaagctgatggggagtaaaccctggagtccgaggcccaggcagcagccccgcctagtggtgggccctgatgctgccaggcctgggacctcccactgccccctccactggaggggtctcctctgcagctcagggactggcacactggcctccagaagggcagctccacagggcagggcctcattatttttcactgccccagacacagtgcccaacaccccgtcgtataccctggatgaacgaattaattacctggcaccacctcgtctgggctccctgcgcctgacattcacacagagaggcagagtcccgtgcccattaggtctggcatgccccctcctgcaaggggctcaaccccctaccccgacccctccacgtatctttcctaggcagatcacgttgcaatggctcaaacaacattccaccccagcaggacagtgaccccagtcccagctaactctgacctgggagccctcaggcacctgcacttacaggccttgctcacagctgattgggcacctgaccacacgcccccacaggctctgaccagcagcctatgagggggtttggcaccaagctctgtccaatcaggtaggctgggcctgaactagccaatcagatcaactctgtcttgggcgtttgaactcagggagggaggcccttgggagcaggtgcttgtggacaaggctccacaagcgttgagccttggaaaggtagacaagcgttgagccactaagcagaggaccttgggttcccaatacaaaaatacctactgctgagagggctgctgaccatttggtcaggattcctgttgcctttatatccaaaataaactcccctttcttgaggttgtctgagtcttgggtctatgccttgaaaaaagctgaattattggacagtctcacctcctgccatagggtcctgaatgtttcagaccacaaggggctccacacctttgctgtgtgttctggggcaacctactaatcctctctgcaagtcggtctccttatccccccaaatggaaattgtatttgccttctccactttgggaggctcccacttcttgggagggttacattttttaagtcttaatcatttgtgacatatgtatctatacatccgtatcttttaatgatccgtgtgtaccatctttgtgattatttccttaatattttttctttaagtcagttcattttcgttgaaatacatttatttaaagaaaaatctttgttactctgtaaatgaaaaaacccattttcgctataaataaaaggtaactgtacaaaataagtacaatgcaacaaaa

SEQ ID NO: 761 - DNA, 454 bp, Homo Sapiens
  misc_feature (452)..(452): n is a, c, g, or t
ctgaaaataatttaaaaagcttaaaagttacataggcatcttcaaaagaacacaatgggattcattttattgttgacttttggacaccagtgtcagactttattgaaaacaaacccatgtaaaaacaaagttaaaatgaaaaatggcacctgaaaaataaattattttatataaaacaaatcaataacttaaaacacactaatatacaaaaggtctaaccatctactgtacaacatgggaatcggttaagagagcctcccctcccccaaagcaagtcactgtaaacggaacatcacatggtcatggtcaaagaggtggccccaaaccaacggaaaaggcttctcttctggtggaagaaaaatccagtcctgtcaaagtctccgttagcctaacctagggtactgggcggtgacttaccagtgagaaaaaaaaaatttggttttttaaatggncc

SEQ ID NO: 762 - DNA, 318 bp, Homo Sapiens
  misc_feature (107)..(107): n is a, c, g, or t
  misc_feature (194)..(194): n is a, c, g, or t
  misc_feature (299)..(299): n is a, c, g, or t
tcctgcagaataccatttgatcctattaagaattgtccaaatgttggagcatttgattgaaaaatccttcttagccattttaaagatagctttccaatgattagacnaattgattctttctgtgactcatcagttcctatcctgtaaaattcatgtcttgctgttgatttgtgaataagaaccagagcttgtanaaaccactttaatcatatccaggggtttgcaagaaacaggtgcttaacactaattcacctcctgaacaagaaaaatgggctgtgaccggaactgtgggctcatcnctggggctgtcattggtgc

SEQ ID NO: 763 - DNA, 477 bp, Homo Sapiens
  misc_feature (75)..(75): n is a, c, g, or t
  misc_feature (447)..(447): n is a, c, g, or t
  misc_feature (462)..(462): n is a, c, g, or t
cggaagtggtgtctcaaccactataaagcctctctgtgcccgtccggtaattggtgaggacagcctgccagagtntgtctctggacactatgggcacacgactcctcccagctctgtttcttgtcctcctggtattgggatttgaggtccaggggaccaacagccccagcaagatgagatgcctagcccgaccttcctcacccaggtgaaggaatctctctccagttactgggagtcagcaaagacagccgcccagaacctgtacgagaagacatacctgcccgctgtagatgagaaactcagggacttgtacagcaaaagcacagcagccatgagcacttacacaggcatttttactgaccaagttctttctgtgctgaagggagaggagtaacagccagaccccccatcagtggacaagggggagagtcccctacttccctgatnccccaggttcagacntgaggatcccccttt

SEQ ID NO: 764 - DNA, 2517 bp, Homo Sapiens
ttcctccaggagtctctggtgcagctggggtggaatctggccaggccctgcttaggcccccatcctggggtcaggaaatttggaggataaggcccttcagccccaaggtcagcagggacgagcgggcagactggcgggtgtacaggagggctgggttgacctgtccttggtcactgaggccattggatcttcctccagtggctgccaggatttctggtggaagagacaggaaggcctcccccccttggtcgggtcagcctgggggctgagggcctggctgtcagccactcttcccagaacatatgtcatggcctcagtggctcatggggaagcaggggtgggcgagcttaggctagagcaagtcctgtgggagatggcagaggcctggtctgagaggcaactcggatgtgccctccagtggccatgctcccctccatgcgtctcccctgccctcctggagccctgcaggtcaatgtttaacagaaaccagagcagcggtggattaatgcgcaagggctcagccccccagccctgagcagtgggggaatcggagactttgcaacctgttctcagctctgcctcccctggccaggttgtcctcgaccagtcccgtgccatggcagcccacctgcttcccatctgcgccctcttcctgaccttactcgatatggcccaaggctttaggggccccttgctacccaaccggcccttcaccaccgtctggaatgcaaacacccagtggtgcctggagaggcacggtgtggacgtggatgtcagtgtcttcgatgtggtagccaacccagggcagaccttccgcggccctgacatgacaattttctatagctcccagctgggcacctacccctactacacgcccactggggagcctgtgtttggtggtctgccccagaatgccagcctgattgcccacctggcccgcacattccaggacatcctggctgccatacctgctcctgacttctcagggctggcagtcatcgactgggaggcatggcgcccacgctgggccttcaactgggacaccaaggacatttaccggcagcgctcacgggcactggtacaggcacagcaccctgattggccagctcctcaggtggaggcagtagcccaggaccagttccagggagctgcacgggcctggatggcaggcaccctccagctggggcgggcactgcgtcctcgcggcctctggggcttctatggcttccctgactgctacaactatgactttctaagccccaactacaccggccagtgcccatcaggcatccgtgcccaaaatgaccagctagggtggctgtggggccagagccgtgccctctatcccagcatctacatgcccgcagtgctggagggcacagggaagtcacagatgtatgtgcaacaccgtgtggccgaggcattccgtgtggctgtggctgctggtgaccccaatctgccggtgctgccctatgtccagatcttctatgacacgacaaaccactttctgcccctggatgagctggagcacagcctgggggagagtgcggcccagggggcagctggagtggtgctctgggtgagctgggaaaatacaagaaccaaggaatcatgtcaggccatcaaggagtatatggacactacactggggcccttcatcctgaacgtgaccagtggggcccttctctgcagtcaagccctgtgctccggccatggccgctgtgtccgccgcaccagccaccccaaagccctcctcctccttaaccctgccagtttctccatccagctcacgcctggtggtgggcccctgagcctgcggggtgccctctcacttgaagatcaggcacagatggctgtggagttcaaatgtcgatgctaccctggctggcaggcaccgtggtgtgagcggaagagcatgtggtgattggccacacactgagttgcacatattgagaacctaatgcactctgggtctggccagggcttcctcaaatacatgcacagtcatacaagtcatggtcacagtaaagagtacactcagccactgtcacaggcatattccctgcacacacatgcatacttacagactggaatagtggcataaggagttagaaccacagcagacaccattcattccatgtccatatgcatctacttggcaaggtcatagacaattcctccagagacactgagccagtctttgaactgcagcaatcacaaaggctgacattcactgagtgcctactctttgccaatccccgtgctaagcgttttatgtggacttattcattcctcacaatgaggctatgaggaaactgagtcactcacattgagagtaagcacgttgcccaaggttgcacagcaagaaaagggagaagttgagattcaaacccaggctgtctagctccgggggtacagcccttgcactcctactgagtttgtggtaaccagccctgcacgacccctgaatctgctgagaggcaccagtccagcaaataaagcagtcatgatttactt

SEQ ID NO: 765 - DNA, 2571 bp, Homo Sapiens
ctttaccattcttccatggaagaagacaaaattcatctgagtgtagaaactaactatgctatggctcaggcccctctgggtatttctcctcaggaactgctcacctgtggggagagtgacttgtggtctgcttacccaaaataattcaatactcaaggctgggtggactctacagggcaatggtgtgactgaccagctctttcattgaagacatagaaagtacaagcagacccttctggcaggagctctaacatcaggcttccaatctagatttcatcagtaataaacattttggtttctatctcaggactcccaaatcgttcaattggacttgaactcagaagggaaactggatgttacttattgaactccaggtacacattatgtttcattaaaaaatatctatacaattatgacatcaagtagatgtcattggctactagaattatgtgggaaaacccttgtttgagtaagaggacttactatgtaaatatttttgaaaaagtggagttctggccgggcgcagtggctcatgcctataatcccagcactttgggaggccgaggtgggtagattacctgaggtcaggagttcgagaccagcctgactaacacggtgaaaccctgtctctaattaaaaaaaaaaaaaaatttgctaggcatggtggtacatgcctgtaatcccagctatttgggaggctgaggcagcagaatcacctgaacccaggaggtggaggctgcagtgagccgagatcatgccactgcactccagcctggactacaagagtgaaagcccgttctcaaaaaaaaaaaaaaaaaaaaaaaagtcctttcttcagtgaactctcatagggagggccaacagataaagtcagtaagagtgacactaacctggttaaggaagtgtgtggtttctcagagcacaccctgttctcatgctcctcccactcactgcccaatctttcctctccttcacttccaggctatctttagagaacttcagaatacaataatgaaaaccatgtctttgatcattaaacaccaaaaagtaactctgctactctcctcagcttcaggcaccaccactgacctgggacagtgaatcgacaatgccgtcttctgtctcgtggggcatcctcctgctggcaggcctgtgctgcctggtccctgtctccctggctgaggatccccagggagatgctgcccagaagacagatacatcccaccatgatcaggatcacccaaccttcaacaagatcacccccaacctggctgagttcgccttcagcccataccgccagctggcacaccagtccaacagcaccaatatcttcttctccccagtgagcatcgctacagcctttgcaatgctctccctggggaccaaggctgacactcacgatgaaatcctggagggcctgaatttcaacctcacggagattccggaggctcagatccatgaaggcttccaggaactcctccgtaccctcaaccagccagacagccagctccagctgaccaccggcaatggcctgttcctcagcgagggcctgaagctagtggataagtttttggaggatgttaaaaagttgtaccactcagaagccttcactgtcaacttcggggacaccgaagaggccaagaaacagatcaacgattacgtggagaagggtactcaagggaaaattgtggatttggtcaaggagcttgacagagacacagtttttgctctggtgaattacatcttctttaaaggcaaatgggagagaccctttgaagtcaaggacaccgaggaagaggacttccacgtggaccaggtgaccaccgtgaaggtgcctatgatgaagcgtttaggcatgtttaacatccagcactgtaagaagctgtccagctgggtgctgctgatgaaatacctgggcaatgccaccgccatcttcttcctgcctgatgaggggaaactacagcacctggaaaatgaactcacccacgatatcatcaccaagttcctggaaaatgaagacagaaggtctgccagcttacatttacccaaactgtccattactggaacctatgatctgaagagcgtcctgggtcaactgggcatcactaaggtcttcagcaatggggctgacctctccggggtcacagaggaggcacccctgaagctctccaaggccgtgcataaggctgtgctgaccatcgacgagaaagggactgaagctgctggggccatgtttttagaggccatacccatgtctatcccccccgaggtcaagttcaacaaaccctttgtcttcttaatgattgaacaaaataccaagtctcccctcttcatgggaaaagtggtgaatcccacccaaaaataactgcctctcgctcctcaacccctcccctccatccctggccccctccctggatgacattaaagaagggttgagctggtccctgcctgcaaaaaaaaaaaaaaaaaaaaaaaaaaaaaaaaaaaaaaaaaaaaaaaaaaaaaaaaaaaaaaaaaaaaaaaaaaaaaaaaaaaaaaaaaaaaaaaaaaaaaaaaaaaaaaaaaaaaaaa

SEQ ID NO: 766 - DNA, 417 bp, Homo Sapiens
aaaaatttttaatttttattgtttttttttttttttaagagacgaggtctcgctctgttgcccaggctggagtgcagtggcgcaatcgtggctcactataatcttgaactcctaggcccaagtaatcctcccacttcagcctccctagtagccaggattacagggattactcagatccttttctcaagttgatttaaaaattttatttttcaatagatagcacattcatatagttcaaacatattaagaaagagttaagacctaggtggcaattctctctcctgtcctccccacccccacagtaacctctgtaaatttcatccattcagactccttttatgcatttataagctaacaaaaagagaaattcctttgccctctttagacaaaaatgtagccagcacattacttatattg

SEQ ID NO: 767 - DNA, 665 bp, Homo Sapiens
cagtcacgttacacaccagatttcacttccacagcaggctttattgttctgtcgtctgggacctagcaggtgacccctgtggcaaggttacttctcatttgtccggcaatggctagtaaactctgccttgctgggtcagggtcatggaggggatgaaacgtgataacacgaggaagcagcctgggcttcagagtcagcagatcctggtctggtcccagctcagtgtgtgggaaccttggtcaccgaacgtccctgtgtgaatttgttaccatcacattaaagtagggggtataattgatagcagtccaaaccccacaggagtaccctgaggacagagtgagacgaggtatagagaagtgcttactatggcatctggcacaaggaggactcctgatcaatactaatactcatttatccattgtggttaacctgtttaagggactccgcatgcagatgaggcttgggatgtgtatgtacactatctttttgcacctcttttattggtctgtgtcggttttcccctcccaaagctgggggcagggttgggctttataaaacttgagcctctctgtggactgggttctcagcaagttaccgtcctgcatcatgccccctgttggtgtccagctcattcctctgaatcccgtccgtagggactgggtctt

SEQ ID NO: 768 - DNA, 350 bp, Homo Sapiens
  misc_feature (220)..(220): n is a, c, g, or t
  misc_feature (326)..(326): n is a, c, g, or t
acctctgcagagagaatggccagcaggaaggcggggacccggggcaaggtggcagccaccaagcaggcccaacgtggttcttccaacgtcttttccatgtttgaacaagcccagatacaggagttcaaagaagccttcagctgtatcgaccagaatcgtgatggcatcatctgcaaggcagacctgagggagacctactcccagctggggaaggtgagtntcccagaggaggagctggacgccatgctgcaagagggcaagggccccatcaacttcaccgtcttcctcacgctctttggggagaagctcaatgggacagaccccgnggaagccatcctgagtgccttccg

SEQ ID NO: 769 - DNA, 415 bp, Homo Sapiens
tttttttttgtacatttggaacagtgacaataaatgagacccctttaaactgtcttattttccaccaagattgagaaccagatgttctctacacactatcactgttcaatagagctttcttcagtgatggaaatgctctgtaatctacactgttcagtacaggtagctacggagcatctgaaatatggctagaaactacatttttgttttgattaatttaaatagccatacagttgctaccatactggtcacggcagctgtagactgactgggtccatagttcatcacctcaaaattctttcaaaatttattatctctttctctccttacatgtttatttcccaggcctaccctggtgattagaacagctgaagggcctttcttgttaggctgtccatgccctaaggatgggttc

SEQ ID NO: 770 - DNA, 416 bp, Homo Sapiens
gttttgttttttttttgtagagatgaggtttcaccatgttggccgggctggtctagaactcctgagctcaggcaatccacccaccttggcctcccaaaaagctgggattacaggtgtgagccaccacgcccagccagcctttgatatgtcgaggaaggcctccaagcagcaagcaccctcaacttcctgaaactgcagaaatcagtaatgataaagatgtgcctggttagttcccaaagtcaaagagccaaatgggcctgccatgagagtgccttccgacataacaggtatggaacacacacccacacactccatgagacgacgtcatcagcactgtagggccctagattatttcagtacaataactacttacacttcacagacagtactaagtccaaacatgcttactaaaatca

SEQ ID NO: 771 - DNA, 788 bp, Homo Sapiens
ctgccgggccagcgctgcgctgggcggggggtgcatggcgctgcccctggacccaggatttataaagtgcgaggccgggaccggctgcgcgctctcgtctgcccccgctgtccctggcggcgccaaccgaatgcgccccgcctgatccgtgtccgacatgctgcgccgcgctctgctgtgcctggccgtggccgccctggtgcgcgccgacgcccccgaggaggaggaccactgtcctggtgctgcggaaaagcaacttcgcggaggcgctggcggccacaagtacctgcttggtggagttctatgccccttggtgtggccactgcaaggcttctggcccctgagtatgccaaagccgctggaaagctgaaggctaaggttccgagattcaggttggccaaggtggaccgccacggaaggagtctgaccttggccccagcaagtaacggcgttgcgcggatatacccaaccatcaagttcttcaggaactggagaccacgggcttcccccatggactatcagctggcagagaggcttgatgactcgtgaactggctgaagaagcgcacgggccggtttgcacaacctgtcctgacggcgcagttgcgagtcctttgggggagtccaacgaggtgggtgtatcgggtctcaagggccgtggttcggatcttgcaggagttttgacggcgggaaaggcctttgttgctccatttgggtccttcacagtgatgttccaataccgtcgacagtggtgctcttcgaggttgacgcgacactccggtctacagg

SEQ ID NO: 772 - DNA, 408 bp, Homo Sapiens
  misc_feature (11)..(12): n is a, c, g, or t
ttttttttttnnttttagaggttttttttttttttttagtaaaccacagcaaagtttattcatgtgccagggacataaagatacattaattgtttgtttttctaggctgccagtataagcttttcaaaatgtttaaagtaaataaaaccaataatacagctagataccacattgcaaagaaccctaatgctatttatcagctttaaaatactttcaactgaaatcaattacattttaatatacacatattatatagaaattacctatagctcttttaaaaatcctatgacattaacatgaaactttattagaatttaagattctatatgcagacctgataaagccttaaatttaattattttggagtaatgtcttcttaagaaatggtagataggataaaataattta

SEQ ID NO: 773 - DNA, 430 bp, Homo Sapiens
  misc_feature (121)..(121): n is a, c, g, or t
  misc_feature (142)..(142): n is a, c, g, or t
  misc_feature (161)..(161): n is a, c, g, or t
  misc_feature (201)..(201): n is a, c, g, or t
  misc_feature (223)..(223): n is a, c, g, or t
  misc_feature (392)..(392): n is a, c, g, or t
  misc_feature (430)..(430): n is a, c, g, or t
tttttttttttttaactaaaataattattttagtcaaagagtaacaacagaggttactgttgggtgtttaaagttaggaagagagtagttcagacacttagagaaacatttttgttaaaanaaaaaaaaaggagagtgcacncataaaaccatcacatggncttagcctcataataattctctttttggagacccggaatncagtgtgggctctgcagaagcncagagatccagttaaaaggcagactagatttagaactacttatataaataaagtcagtcttctaatataatcctatgatagatttctataattttatgtttgatttggcattccgtttttaatctcctcctactagtgagaggtgaaaccagctggacttcctgggtcnagtggggacttggggaacttttctgtctagctagaggn

SEQ ID NO: 774 - DNA, 365 bp, Homo Sapiens
ttttttttttttttttttttttttcagtgttctcacatctttttaatcattcatattgacttaatcaggttgacaaaatctcagggttggtctgggatcattcacaaatcagaattactcagagaaattttcacagcagttgcagcagcacaaactctaacgctgatttaaattaataactgttattattgaacaaacttgaaaaaggaatttcatatagaacattacatttctccctgacactaccgtatcataaaaattaaaaatgatataaacatgttttaaagtcatagtggtagaacagccacactacagtgcggcattgttagaagttcgctctcaagttgactcagcttagtaaagca

SEQ ID NO: 775 - DNA, 608 bp, Homo Sapiens
gcctttctggtgaaggaaggttgctatgaaactttttttcttggtggaaatggccaagtttaggcactctgctttttgccttacactaatgcttagaaagctgtcttttcagtggtgttgcagcccccagatgtgtggccaacctctgctgcaaaggaatctcttgctgagtccaggccaccaatcaggcaaatagcccatacatttgatcgttgtaaaccatgaagtcttttcttgcaagacgtttttcttctgctgtggtatcttgcccttaaaaattagttttcattaaaaagaaatttgattgaaaatagaaacatctacagctcagatactgatctctttctagtgggctttgtaaaccacttgactttgctaatggctattctccaatttgttccaataagctaagggcttttcatacacaggacaactccatgtggttgattttactggcatgtcttggtgacgaagagttggccaagtgaatgatgcatcttttacttggagctctccagcctttgtcatagttcccagaccttttttccttgtggtcatccaggaggtgatcaattacatgtgcacagtgctaggacgggaggcagagc

SEQ ID NO: 776 - DNA, 500 bp, Homo Sapiens
  misc_feature (320)..(320): n is a, c, g, or t
  misc_feature (395)..(395): n is a, c, g, or t
  misc_feature (409)..(409): n is a, c, g, or t
ggttgggggtaagaaggagaaaaggaagggtataagttatttttaagacaagcaatacaacagaaagaaaaatgtatttatagtcctgtcagtctattttaaaaacagatggctataatctatagttttaaatgtacacaggttgaaaaaaaaaatcacagggcactctaagtcagggttcccttttccaaagagaaggcttgaaactcagaaaaaatacaaatacttgtacaggttatggccagaaaatatatggaaatatgtacaatttcaaatactaagcaaaacgaacaaaaccctcatagtactcttataatttngaagtttaaaataattggcttatgggataacgattattccttcattcttaaatttcctgcactttgaataacccntgaaattaactccnttttaagaggtgctgaggctgagcaaggcagctcacgcctgtaatcccagcactttggggaggtcgaggggaggaggaccggcttgagccc

SEQ ID NO: 777 - DNA, 2509 bp, Homo Sapiens
ttccagcgttgcgagacggtcggttccaagtgggcctgggcgcgggggagaggcgggtctgtcctcgggaactgcaaggccctgtgagcgggaggactgggatcccggccgcggctgctggaagcgtcgaagctcagcgggccgcggacatgacctgtgcttagaactcatcctggcccgcagagcctgccgcgagtccctggcgtcccctgtggcgggctcttggagccactttcccgagcggaagtcagcccgcggctcggactccggcgggacctgctcggaggaatggcgccgccgggttcaagcactgtcttcctgttggccctgacaatcatagccagcacctgggctctgacgcccactcactacctcaccaagcatgacgtggagagactaaaagcctcgctggatcgccctttcacaaatttggaatctgccttctactccatcgtgggactcagcagccttggtgctcaggtgccagatgcaaagaaagcatgtacctacatcagatctaaccttgatcccagcaatgtggattccctcttctacgctgcccaggccagccaggccctctcaggatgtgagatctctatttcaaatgagaccaaagatctgcttctggcagctgtcagtgaggactcatctgttacccagatctaccatgcagttgcagctctaagtggctttggccttcccttggcatcccaagaagcactcagtgcccttactgctcgtctcagcaaggaggagactgtgctggcaacagtccaggctctgcagacagcatcccacctgtcccagcaggctgacctgaggagcatcgtggaggagattgaggaccttgttgctcgcctggatgaactcgggggcgtgtatctccagtttgaagaaggactggaaacaacagcgttatttgtggctgccacctacaagctcatggatcatgtggggactgagccatccattaaggaggatcaggtcatccagctgatgaacgcgatcttcagcaagaagaactttgagtccctctccgaagccttcagcgtggcctctgcagctgctgtgctctcgcataatcgctaccacgtgccagttgtggttgtgcctgagggctctgcttccgacactcatgaacaggctatcttgcggttgcaagtcaccaatgttctgtctcagcctctgactcaggccactgttaaactagaacatgctaaatctgttgcttccagagccactgtcctccagaagacatccttcacccctgtaggggatgtttttgaactaaatttcatgaacgtcaaattttccagtggttattatgacttccttgtcgaagttgaaggtgacaaccggtatattgcaaataccgtagagctcagagtcaagatctccactgaagttggcatcacaaatgttgatctttccaccgtggataaggatcagagcattgcacccaaaactacccgggtgacatacccagccaaagccaagggcacattcatcgcagacagccaccagaacttcgccttgttcttccagctggtagatgtgaacactggtgctgaactcactcctcaccagacatttgtccgactccataaccagaagactggccaggaagtggtgtttgttgccgagccagacaacaagaacgtgtacaagtttgaactggatacctctgaaagaaagattgaatttgactctgcctctggcacctacactctctacttaatcattggagatgccactttgaagaacccaatcctctggaatgtggctgatgtggtcatcaagttccctgaggaagaagctccctcgactgtcttgtcccagaaccttttcactccaaaacaggaaattcagcacctgttccgcgagcctgagaagaggccccccaccgtggtgtccaatacattcactgccctgatcctctcgccgttgcttctgctcttcgctctgtggatccggattggtgccaatgtctccaacttcacttttgctcctagcacgattatatttcacctgggacatgctgctatgctgggactcatgtatgtctactggactcagctcaacatgttccagaccttgaagtacctggccatcctgggcagtgtgacgtttctggctggcaatcggatgctggcccagcaggcagtcaagagaacagcacattagttccagaagaaagatggaaattctgaaaactgaatgtcaagaaaaggagtcaagaacaattcacagtatgagaagaaaaatggaaaaaaaaaactttatttaaaaaagaaaaaagtccagattgtagttatacttttgcttgtttttcagtttccccaacacacagcagatacctggtgagctcagatagtctctttctctgacactgtgtaagaagctgtgaatattcctaacttacccagatgttgcttttgaaaagttgaaatgtgtaattgttttggaataaagagggtaacaataggaacaaaaaaaaaaaaaaaaaaaa

SEQ ID NO: 778 - DNA, 274 bp, Homo Sapiens
accaattacacagtggtggacttcagaaatagagcaactgctctgatatccttaggaaaggcagcagctgggtttggtgggtgaaagcagcccaagccaagagagatgtttctttctagtggcaatttcttctcagaaggggcacccaaggcctaaatactgatggatgccatccccatcagactatggactgaaagatacagtgtctttgtcacccaaattcttgtccttagactgtggcatcatcattctctgggaacttgttagaaatgct

SEQ ID NO: 779 - DNA, 649 bp, Homo Sapiens
aaaaatatgtaagttagaatagtaattctaaggcactgtcgtttgcttacacattctaacatatttctaataagaaagtacctgctttcttaagagaaaaagggataagttaccaaaagcagcacgttctcctgggctcataccccggattcatccatgaggccacttccattgtaaagcttttagcatctcttgatttctcttcacactgaggcacaaaggcctgctacttataggcattacttcatttttccttatgaagggtactataccaacacagactttatagtatgtttaaaaatcccaactgcaagatacacaggatgctgtaggcctgatttcctgttgtagaacctccagccctgtgttgaatgaggaggtgcaaatatatagacccttaagatcagaccacagcaggcattcaggtggaggggatgaactccattcattccagctgtgcagtgggacatctgcgccctccgcatctcggctcattcctcatctgagccactcaagagggcggtctggtaaagtgtcatctgaattcagcttctgaattccaatgattcctcccccttctgtgtctcttcatcccgagtcaaaaggcagtaaacaagagaatagtgacggccaaatgctgaggcagcag

SEQ ID NO: 780 - DNA, 368 bp, Homo Sapiens
tcggcccggaagtgcccggctgaagcggccgggcgccgattggtgtctttgagtctagtctttgttcggggctgtccaaaggattctagctgttgcacctgttcctccctgcgcgtaagatagaggataaatctcctggcaaagcccagaatgaccacagccctggaacctgaggaccaaaaaggacttctgataattaaggcagaggaccattactggggacaggattccagctcacaaaagtgcagtcctcacaggagggaactctatagacaacacttcaggaagctctgctatcaggatgcacctggaccccgtgaagctcttacccagctgtgggagctctgccgtcggtgggtgaggccaga

SEQ ID NO: 781 - DNA, 689 bp, Homo Sapiens
  misc_feature (557)..(557): n is a, c, g, or t
  misc_feature (581)..(581): n is a, c, g, or t
acgtgtcccgcgcttggcgcagcaggaagcggcggcgaacgcggcctgaattcccggcgccggccccagctcctctgccgctgccgccatgctcgacttcttcaccattttctccaagggcgggcttgtgctctggtgcttccagggcgttagcgactcatgcaccggacccgttaacgcgttgattcgttccgtgctgctgcaggaacggggaggtaacaactccttcacccatgaggcactcacactcaagtataaactggacaaccagtttgagctggtgtttgtggttggttttcagaagatcctgacactgacatatgtagacaaattgatagatgacgtgcatcggctgtttcgggacaagtaccgcacagagatccaacagcaaagtgctttaagtttattaaatggcacttttgatttccaaaatgacttcctgcggctccttcgtgaagcagaggagagcagtaagatccgtgctcccactaccatgaagaaatttgaagattctgaaaaggccaagaaacctgtgaggtccatgattgagacacggngggaaaagcccaaggaaaaagcanagaatagcaaaaaaaagggggccaagaaggaaggttctgatgggtcctttgctaccagcaaaccagtccctgcagaaaagtcagtcttccagtggtcctgagaacgag

SEQ ID NO: 782 - DNA, 1660 bp, Homo Sapiens
aaaatgtgcttcttacaggaatataaatagtttctggaaaggacactgacaacttcaaagcaaaatgaagttctttctgttgcttttcaccattgggttctgctgggctcagtattccccaaatacacaacaaggacggacatctattgttcatctgtttgaatggcgatgggttgatattgctcttgaatgtgagcgatatttagctccgaagggatttggaggggttcaggtctctccaccaaatgaaaatgttgcaatttacaaccctttcagaccttggtgggaaagataccaaccagttagctataaattatgcacaagatctggaaatgaagatgaatttagaaacatggtgactagatgtaacaatgttggggttcgtatttatgtggatgctgtaattaatcatatgtgtggtaacgctgtgagtgcaggaacaagcagtacctgtggaagttacttcaaccctggaagtagggactttccagcagtcccatattctggatgggatttcaatgatggtaaatgtaaaactggaagtggagatatcgagaactacaatgatgctactcaggtcagagattgtcgtctgactggtcttcttgatcttgcactggagaaggattacgtgcgttctaagattgccgaatatatgaaccatctcattgacattggtgttgcagggttcagacttgatgcttccaagcacatgtggcctggagacataaaggcaattttggacaaactgcataatctaaacagtaactggttccctgcaggaagtaaacctttcatttaccaggaggtaattgatctgggtggtgagccaattaaaagcagtgactactttggtaatggccgggtgacagaattcaagtatggtgcaaaactcggcacagttattcgcaagtggaatggagagaagatgtcttacttaaagaactggggagaaggttggggtttcgtaccttctgacagagcgcttgtctttgtggataaccatgacaatcaacgaggacatggggctggaggagcctctattcttaccttctgggatgctaggctgtacaaaatggcagttggatttatgcttgctcatccttacggatttacacgagtaatgtcaagctaccgttggccaagacagtttcaaaatggaaacgatgttaatgattgggttgggccaccaaataataatggagtaattaaagaagttactattaatccagacactacttgtggcaatgactgggtctgtgaacatcgatggcgccaaataaggaacatggttattttccgcaatgtagtggatggccagccttttacaaattggtatgataatgggagcaaccaagtggcttttgggagaggaaacagaggattcattgttttcaacaatgatgactggtcattttctttaactttgcaaactggtcttcctgctggcacatactgtgatgtcatttctggagataaaattaatggcaattgcacaggcattaaaatttacgtttctgatgatggcaaagctcatttttctattagtaactctgctgaagatccatttattgcaattcatgctgaatctaaattgtaaaatttaaaattaaatgcatgtcctcaaaacaaaaaaaaaaaaaaaaaaaaaaaaaaaaaa

SEQ ID NO: 783 - DNA, 372 bp, Homo Sapiens
  misc_feature (287)..(287): n is a, c, g, or t
ccagtcaccaagacaggcatctcaaatcggctgattctgcatctggaaactgccttcatcttgaaagaaaagctccaggtcccttctccagccacccagccccaagatggtgatgctgctgctgctgctttccgcactggctggcctcttcggtgcggcagagggacaagcatttcatcttgggaagtgccccaatcctccggtgcaggagaattttgacgtgaataagtatctcggaagatggtacgaaattgagaagatcccaacaacctttgagaattgagagntgatggaactgttgaatcaaatcgaaggttgaagccaccccagtttaacctcacagagcctgccaagcttggaagtttaagtttt

SEQ ID NO: 784 - DNA, 372 bp, Homo Sapiens
tgagacctgcgactggcccagtcgcccctggggccctttgccactcccttggcaaggagagccgagacctcagttcccggcttctcttgcggggcacagatgggggctccggaggtggcgcccaggctctgagctaccctaggtctgcagactagcgggcattggccagagacatggcccagccactggccttcatcctcgatgtccctgagaccccaggggaccagggccagggccccagcccctatgatgaaagcgaagtgcacgactccttccagcagctcatccaggagcagagccagtgcacggcccaggaggggctggagctgcagcagagagagcgggaggtgacaggaagtagccagcagacac

SEQ ID NO: 785 - DNA, 2441 bp, Homo Sapiens
tctgattgacttcaagaaggagtcagagatcagcttaagggcaaaggctggaagcagagcgaactgggagcagagcacacagagccgtggagcgagagatgccggccctgggctgggccgtggctgccatcctgatgctgcagacggccatggcggagccctccccggggactctgcccaggaaggcaggggtgttttcagacctaagcaaccaagagctgaaggcagtgcacagcttcctctggtccaagaaggagctgaggctgcagccctccagtaccaccaccatggccaagaacaccgtgtttctcatcgagatgctgctgcccaagaagtaccatgtgctgaggtttctggataaaggtgaaaggcatcctgtgcgggaagcccgtgccgtcatcttctttggtgaccaggagcatcccaatgtcaccgagtttgctgtggggcccctgccagggccctgctacatgcgagcactgtcccccaggcctgggtaccagtcctcctgggcatcgaggcccatctccacagcagagtatgccctcctctaccacaccctgcaggaagccaccaagcccctgcatcagttcttcctcaataccacaggcttctcattccaagactgccatgacagatgcctggccttcaccgatgtggccccccggggtgtggcttctggccagcgccgcagttggcttatcatacagcgctatgtagaaggctactttctgcaccccactgggctggagctcctcgtggatcatgggagcacagatgctgggcactgggccgtggagcaggtgtggtacaacgggaagttctatgggagcccagaggaactggctcggaagtatgcagatggagaggtggacgtggtggtcctggaggacccgctgcctgggggcaaggggcatgacagcacagaggagccgcccctcttctcctcccacaagccccgcggggacttccccagccccatccatgtgagcggcccccgcttggtccagccccacggccctcgcttcaggctggagggcaacgctgtgctctacggcggctggagctttgccttccggctgcgctcctccttcgggctgcaggtcctgaacgtgcacttcggcggagagcgcattgcctatgaggtcagcgtgcaagaggcagtggcgctgtatggaggacacacacctgcaggcatgcagaccaagtacctcgatgtcggctggggcctgggcagcgtcactcatgagttagcccccggcatcgactgcccggagaccgccaccttcctggacactttccactactatgatgccgatgacccggtccattatccccgagccctctgcctctttgaaatgcccacaggggtgccccttcggcggcactttaattccaactttaaaggtggcttcaacttctatgcggggctgaagggccaggtgctggtgctgcggacaacttcaactgtctacaattatgattacatttgggactttatcttctaccccaacggggtgatggaggccaagatgcatgccactggctacgtccacgccaccttctacacccccgaggggctgcgccacggcactcgcctgcacacccacctgattggcaacatacacactcacttggtgcactaccgcgtagacctggatgtggcaggcaccaagaacagcttccagacactgcagatgaagctagaaaacatcaccaacccctggagcccaagacaccgcgtggtccagccaactctggagcagacgcagtactcctgggagcgccaggcggccttccgcttcaaaaggaagctgcctaagtacctgctctttaccagcccccaggagaacccctggggccacaagcgcagctaccgcctgcagatccactccatggccgaccaggtgctgcccccaggctggcaggaggagcaggccatcacctgggcaaggtaccccctggcagtgaccaagtaccgggagtcggagctgtgcagcagcagcatctaccaccagaacgacccctggcacccgcccgtggtctttgagcagtttcttcacaacaacgagaacattgaaaatgaggacctggtggcctgggtgacggtgggcttcctgcacatcccccactcagaggacattcccaacacagccacacctgggaactccgtgggcttcctgctccggccattcaacttcttcccagaggacccctccctggcatccagagacactgtgatcgtgtggcctcgggacaacggccccaactacgtccagcgctggatccctgaggacagggactgctcgatgcctcccccttttagctacaatgggacctatagacctgtgtgaccagcccccagttcctcccccagttcctcccaggaagcccaggagcctcactggggcagacaataaaccctcagagcctcaaaaaaa

SEQ ID NO: 786 - DNA, 329 bp, Homo Sapiens
  misc_feature (44)..(44): n is a, c, g, or t
taacggggccgtggaaaacgggcagccggacaggaagccgccgncctgcgcgcacccatccgcaacctggaggtcaagttcaccaagatatttatcaacaatgaatggcacgaatccaagagtgggaaaaagtttgctacatgtaacccttcaactcgggagcaaatatgtgaagtggaagaaggagataagcccgacgtggacaaggctgtggaggctgcacaggttgccttccagaggggctcgccaatgggccaggctggatgccctgaagtcgtgggcggctgctgcaccagctggctgaccctggtggagagggaccgcgccac

SEQ ID NO: 787 - DNA, 474 bp, Homo Sapiens
  misc_feature (390)..(390): n is a, c, g, or t
  misc_feature (395)..(395): n is a, c, g, or t
  misc_feature (404)..(404): n is a, c, g, or t
  misc_feature (435)..(435): n is a, c, g, or t
  misc_feature (454)..(454): n is a, c, g, or t
atcagccttgtaactacagtatctttagataagattcctctttccagtcagtcctgggaaatgtttctgttgcagagttaggcggtagatgggaagctgtgatggcagagctactatctaataaagtaacaactcgtagttgaggcttcctttctgtgtgtgatgggggatagggagttagctcccctgttgtctcagcactaagaaattgaggtcaggccaggcgcggtggttcactccttttattccagcactggggtggccaaagtgggcagattgcttgcgctctggagctcgagaccagcctgggcaacgtggtgaggccctgtctctaccaaaggtacaaaaaaaaagctgggcgtggtgggtgcatgcttgtcccagctactngggangctgaggtnggaggattcgcttgagcctggggaggttgangttgcagtgagctgagatngcaccactgcaatccaaggt

SEQ ID NO: 788 - DNA, 387 bp, Homo Sapiens
cgagcggccgcccgggcaggtacgcgggatgcttgaatgttttagatgtaacctttgacatatttagaactctcctcctatacaatgtttattctcagatatagaggttatgtcattttataaagacttcattgataagatggcttttattcatactaatcctcccaatgttaccccttccatcttccaagaagaaaaaaaatgcctgaatattcagaatagatatttctgatttgaaaattctaaagaattaaattggaaaagtatttcatttacttagtgctctgaatttacttttacagttttctgcagtcagtatcattaaaatggttaagtttacatttgaactgaaaatatgtataaaatctagcaattcacaaaaatgcc

SEQ ID NO: 789 - DNA, 440 bp, Homo Sapiens
aaatgaaacaagcctttgctgaattggagagctggtattccaatgctgctagagttcttggagcaaaatattgccaagtttaatggatcgagaagtggcgttgcttgctgaaatggacaaagtgaaagctgaagcaatggaaattttgctcagccgacaaaagaaggctgaacttctaaagaagatgactcatgtggctgttcaaatgtcagagcagcaattggttgagctcagagctgatatcaagcactttgttagtgaacgtaaatatgatgaggatctgggacgagtagcccggttcacctgtgatgtagagaccctaaagaagagcattgattcatttggacaagtgtctcatccaaagaacagctattcgaccagatcccgatgtagctcagttacatctgtgtccttgagtagcccaagtgatgcctctgctg

SEQ ID NO: 790 - DNA, 568 bp, Homo Sapiens
  misc_feature (8)..(9): n is a, c, g, or t
  misc_feature (40)..(43): n is a, c, g, or t
  misc_feature (45)..(55): n is a, c, g, or t
  misc_feature (57)..(62): n is a, c, g, or t
  misc_feature (67)..(67): n is a, c, g, or t
  misc_feature (396)..(396): n is a, c, g, or t
  misc_feature (451)..(451): n is a, c, g, or t
  misc_feature (548)..(548): n is a, c, g, or t
  misc_feature (554)..(554): n is a, c, g, or t
  misc_feature (562)..(562): n is a, c, g, or t
gttaaaanncagagaactccaataataatggtttaaaaannnngnnnnnnnnnnngnnnnnnaggangggtagctgagcagattattttgagaggtgggtgatatgtgagagagaaatctggaaccttcttctgggtagatacaggataagatagatacagggtaaaatgttgagcactttgtacatgctttgagagcataatctttgtcatctgtttttttcccctagacaatatcaggttaccgtcaacattaatccatttaaaaggacatggactgttgccattaatacttttggattccatataacccttaacacaataacttctagaaaatgtgtgtgccgtagacacaaagaagggaacaatagacaccagggtatacttgagggtgganggtggcaggagggtgaagattgaaaagctgcctattgcgtgttatgctggttccngggtgacaaattacctgtacaccacacccctgtgacacacaattactcatgtaacaaccctgtgcatgtaccctgaacctgaaataaaattggaagnaaaaantgtgtaanatattt

SEQ ID NO: 791 - DNA, 451 bp, Homo Sapiens
  misc_feature (14)..(14): n is a, c, g, or t
  misc_feature (17)..(17): n is a, c, g, or t
  misc_feature (138)..(138): n is a, c, g, or t
  misc_feature (229)..(229): n is a, c, g, or t
  misc_feature (273)..(273): n is a, c, g, or t
  misc_feature (309)..(309): n is a, c, g, or t
  misc_feature (315)..(315): n is a, c, g, or t
cattaaaaatgatnttnttttaaaggcaagagaaatcttgtagtgctaactgccttgagctgccaattacctatttctgagaatttggtgactcttattggtaatgatggcatttacaacatttggcatttccccttnttcagctcagttaccatagaatacttccaagctttactacttcctcatgtaagtcatttcagttatgccaggatatttgatgattttgttnatgtagaattaggtaacaaagccaattatgctatccttattatngaaggattaatcttatgacttaacataagctttggntatatntggtgtagtctttggctaagtacccattaaggctagtagcaaacacttggaaggtggctaactgggactgggaatacgtgtctcaacttgagaaaccaaatagtgcgaagggactcagggtggccagacctgtgac

SEQ ID NO: 792 - DNA, 595 bp, Homo Sapiens
tctgatatttatgggaagtatggtctaaaaaagtcccttatttttttatttattacactggagcagttactggggaaatattattctgaacatctaacaccacatatcagtgatggtttacagtagtgtagtacctaagatcattttcctgaaagccaaaccaaacaacgaaaaacaagaacaactaattcagaatcaaatagagtttttgagcatttgactatttttagaatcataaaattagttactaagtattttgatcaaagcttataaaataacttacggagatttttgtaagtattgatacattataataggacttgcctatttttatttttaaggagaaaaacaccactcattttataaaatatagtacagctcctataaggcttgtttgatcccaaatggtgcttatcttgattgaacattcagaacaaggatattattttcagtgattttgtgagatcagctgaaccacttatgataataataataaaaaaaactgctttgccctcccgtcagttgtacatggcctggaaattttaaaatttttaatataaacttttcatccagtgagtttcataacttttacgcg

SEQ ID NO: 793 - DNA, 3365 bp, Homo Sapiens
ctggtccgtccaggctccttcccatcctcacacccgcgcctttctccctgcggccccggctcgctgctccagctgcccagctcttcccccgcccggccgcaccataaagcgcccggccgctgccgcggagcccagcagccagctccccagcaccgcacggcggggacgcgagcgcgcccccgacggcagcccggacgccgagcacgggtcacctgcggcgccggcccgggcgccgaccgaggttcaacgcacggcccggggacccccaggcggggccaacgccgccgtcgcccccggcctcgcggggagcaggaagagccaacatgctggccccgcgcggagccgccgtcctcctgctgcacctggtcctgcagcggtggctagcggcaggcgcccaggccaccccccaggtctttgaccttctcccatcttccagtcagaggctaaacccaggcgctctgctgccagtcctgacagaccccgccctgaatgatctctatgtgatttccaccttcaagctgcagactaaaagttcagccaccatcttcggtctttactcttcaactgacaacagtaaatattttgaatttactgtgatgggacgcttaaacaaagccatcctccgttacctgaagaacgatgggaaggtgcatttggtggttttcaacaacctgcagctggcagacggaaggcggcacaggatcctcctgaggctgagcaatttgcagcgaggggccggctccctagagctctacctggactgcatccaggtggattccgttcacaatctccccagggcctttgctggcccctcccagaaacctgagaccattgaattgaggactttccagaggaagccacaggacttcttggaagagctgaagctggtggtgagaggctcactgttccaggtggccagcctgcaagactgcttcctgcagcagagtgagccactggctgccacaggcacaggggactttaaccggcagttcttgggtcaaatgacacaattaaaccaactcctgggagaggtgaaggaccttctgagacagcaggttaaggaaacatcatttttgcgaaacaccatagctgaatgccaggcttgcggtcctctcaagtttcagtctccgaccccaagcacggtggtgcccccggctccccctgcaccgccaacacgcccacctcgtcggtgtgactccaacccatgtttccgaggtgtccaatgtaccgacagtagagatggcttccagtgtgggccctgccccgagggctacacaggaaacgggatcacctgtattgatgttgatgagtgcaaataccatccctgctacccgggcgtgcactgcataaatttgtctcctggcttcagatgtgacgcctgcccagtgggcttcacagggcccatggtgcagggtgttgggatcagttttgccaagtcaaacaagcaggtctgcactgacattgatgagtgtcgaaatggagcgtgcgttcccaactcgatctgcgttaatactttgggatcttaccgctgtgggccttgtaagccggggtatactggtgatcagataaggggatgcaaagcggaaagaaactgcagaaacccagagctgaacccttgcagtgtgaatgcccagtgcattgaagagaggcagggggatgtgacatgtgtgtgtggagtcggttgggctggagatggctatatctgtggaaaggatgtggacatcgacagttaccccgacgaagaactgccatgctctgccaggaactgtaaaaaggacaactgcaaatatgtgccaaattctggccaagaagatgcagacagagatggcattggcgacgcttgtgacgaggatgctgacggagatgggatcctgaatgagcaggataactgtgtcctgattcataatgtggaccaaaggaacagcgataaagatatctttggggatgcctgtgataactgcctgagtgtcttaaataacgaccagaaagacaccgatggggatggaagaggagatgcctgtgatgatgacatggatggagatggaataaaaaacattctggacaactgcccaaaatttcccaatcgtgaccaacgggacaaggatggtgatggtgtgggggatgcctgtgacagttgtcctgatgtcagcaaccctaaccagtctgatgtggataatgatctggttggggactcctgtgacaccaatcaggacagtgatggagatgggcaccaggacagcacagacaactgccccaccgtcattaacagtgcccagctggacaccgataaggatggaattggtgacgagtgtgatgatgatgatgacaatgatggtatcccagacctggtgccccctggaccagacaactgccggctggtccccaacccagcccaggaggatagcaacagcgacggagtgggagacatctgtgagtctgactttgaccaggaccaggtcatcgatcggatcgacgtctgcccagagaacgcagaggtcaccctgaccgacttcagggcttaccagaccgtggtcctggatcctgaaggggatgcccagatcgatcccaactgggtggtcctgaaccagggcatggagattgtacagaccatgaacagtgatcctggcctggcagtggggtacacagcttttaatggagttgacttcgaagggaccttccatgtgaatacccagacagatgatgactatgcaggctttatctttggctaccaagatagctccagcttctacgtggtcatgtggaagcagacggagcagacatattggcaagccaccccattccgagcagttgcagaacctggcattcagctcaaggctgtgaagtctaagacaggtccaggggagcatctccggaactccctgtggcacacgggggacaccagtgaccaggtcaggctgctgtggaaggactccaggaatgtgggctggaaggacaaggtgtcctaccgctggttcctacagcacaggccccaggtgggctacatcagggtacgattttatgaaggctctgagttggtggctgactctggcgtcaccatagacaccacaatgcgtggaggccgacttggcgttttctgcttctctcaagaaaacatcatctggtccaacctcaagtatcgctgcaatgacaccatccctgaggacttccaagagtttcaaacccagaatttcgaccgcttcgataattaaaccaaggaagcaatctgtaactgcttttcggaacactaaaaccatatatattttaacttcaattttctttagcttttaccaacccaaatatatcaaaacgttttatgtgaatgtggcaataaaggagaagagatcatttttaaaaaaaaaaaaaaa

SEQ ID NO: 794 - DNA, 399 bp, Homo Sapiens
  misc_feature (352)..(352): n is a, c, g, or t
  misc_feature (369)..(369): n is a, c, g, or t
  misc_feature (376)..(376): n is a, c, g, or t
gagtttttttttttttttttttttttttttttttttttttatttttataacattttatataactcataaaacagtgtttgtataaaaattcacacaaagttgctagagagcatacaatttccaaaaatgtcctgggtttttgttacattcagtttcctaaggatgcactccaatctatggtaaaatgcagacatgatgcgagatttcattatctttggtaaaactattctcattattttgtctcctcacagtattaagtctgatatccactttgtgcagggtctgctattactaggatgtcagaaaaacattaaggctggatctacgagaggcaagtatttccccaacagcngtaatagccccttgggncctcaanccccactttcatggtatctatta

SEQ ID NO: 795 - DNA, 444 bp, Homo Sapiens
atcgatctcggcacccgacacctataggggcctggctcccagctggtgctgaagctcgtcagttcaccatccgccctcggcttccgcggggcgctgggccgccagcctcggcaccgtcctttcctttctccctcgcgttaggcaggtgacagcagggacatgtctcgggagatgcaggatgtagacctcgctgaggtgaagcctttggtggagaaaggggagaccatcaccggcctcctgcaagagcttgatgtccaggagcaggacatcgagactttacatggctctgttcacgtcacgctgtgtgggactcccaagggaaaccggcctgtcatcctcacctaccatgacatcggcatgaaccacaaaacctgctacaaccccctcttcaactacgaggacatgcaggagatcacccagcactttgccgtctgccacgtggac

SEQ ID NO: 796 - DNA, 393 bp, Homo Sapiens
  misc_feature (375)..(375): n is a, c, g, or t
tttgttttaaaactttaaggtatgctgtttctttttgatattgttgatttctttaggtgtaatagtggcatttacaacgttgagagaaacatactgaaatactaagaagttaactgatcttatggccaggatgtgcttcacacaattcagacaggtagagagaggaggaggaagcaaggagctataagataaatctctgacagctgaagacattggtcatgggttggtgatggatagatgagagtccattttactgtttgctctacttttgtatagttggaattctccatgataaactgttttaataaaactccccccaccccaaatgaggcttctgcagaactttgctgcccatacggaacaaagcccccttcngatgtgttaaggtgagca

SEQ ID NO: 797 - DNA, 666 bp, Homo Sapiens
  misc_feature (620)..(620): n is a, c, g, or t
tggcacgaggagagattctaactattgcttttaccttcagtgtgaactagtgtggtaacaactttgaaaaggcaggccgggtgcggtggctcacgcctgtaatcccagcactttgggaggccaaggcgggtggatcacttgaggtcagaagtttgagaccagcctggccaacatggcgaaaccccatctctactaaaaatacaaaaaactagccgggtatggtggcacatgcctgtgatcccggctacccaggaggctgaggcaggagaatcgcttgaacctgggaggcggaggttgcagtgagccgagattgcgccactgcactccagcctgggcaacagagtgaaactctgtctcaaaaaaaaaaattgaaaaggcaaatgtgattgaatatctgaaaagctttaaaagtggcctttctgttacgtctgtggcacaaatggctcatgagcgcaggacacttatggtcttgtgtcctatacttcatgtgtgatgccaccagaaatgttatggattccgtattgaacacactgagagtggtatgagccctcaggactgcaccacagagtaaacacaaccttgatatggtggcgaatatgtgtgactttcttggttcattngtggttggggacaaaatcgaagtatttgtctaaatagtcaatattc

SEQ ID NO: 798 - DNA, 437 bp, Homo Sapiens
cacgaggccttccccgccttccatacctccccggctccgctcggttcctggccgccccgcagcccctgcccaggtgccatggccgcattgtaccgccctggcctgcggcttaactggcatgggctgagccccttgggctggccatcatgccgtagcatccagaccctgcgagtgcttagtggagatctgggccagcttcccactggcattcgagattttgtagagcacagtgcccgcctgtgccaaccagagggcatccacatctgtgatggaactgaggctgagaatactgccacactgaccctgctggagcagcagggcctcatccgaaagctccccaagtacaataactgctggctggcccgcacagaccccaaggatgtggcacgagtagagagcaagacggtgattgtaactccttctcagcgggacacggg

SEQ ID NO: 799 - DNA, 579 bp, Homo Sapiens
agttccaggcacgtcttcagcggcgccaggaacgctgcagtgcctcatgggagttgcagtgtcaaaaaggggagatcgacgcctgcgcggccaactgggatcccacgcggcctcgacgggagccgggagtaggcggactcccaggccgggctcgcgctctggatccctgaatcctggcctttcctggcctggactgccgcgcctgtggcctggaagagccatgctagaccagagagtctgtacctgcaaccctggcggcgtccgagcccaatggcggagtctgggagacaaagaagtcctcgccgccggccgctggaggattctgccagtagtgaagtcagggatgggcccgagagacgcttggaaagaggacaaggaagggaagtgagtaggagtacgaaaacgcatgactttggctgggtatgtgtggctcctgtctgtgatcccagcactttgggaggccaaggcgggggaggatcacttgagcccaggaattcgataccagcctgggcaacatagtgagaccccgtttttatttctattttcattttctcctgagatggagtcttgctctgtcaa

SEQ ID NO: 800 - DNA, 392 bp, Homo Sapiens
  misc_feature (230)..(230): n is a, c, g, or t
  misc_feature (311)..(311): n is a, c, g, or t
tttttttttttttggtaatttgtattttattttagttaatttaaaagatagtttaaaaaaaagatagttaatagaatatcagaaatagtgaacattatcatttccataaatgcaagagcgtgtacatttttccacacactgagtactatctagattttctatgataaactctgaccacttcttcaggcaattcatgtacttacttattatcactaaggataaaggttctngaaccattaggaacaagggtcccatcttcacacaagttacttaactgctgggaggctctatttcatcttatgtaaactacngataatacctactcacctcaagggtgtatcaagggttttatgtaagctaaatttgtagaaagcagttaagcacagtgccag

SEQ ID NO: 801 - DNA, 739 bp, Homo Sapiens
tgtagcgaggctgggtttgaatcggccgaggccacatctttgtgctgcctggttggcttcacggcggctgtggccacaaggaaggcaacgggcccacggagtgttcctggccccgaaggttcttcccagtgatgactctgcctggccttttccccaccagccccatgcttgtgccatccctcaccctgatgtgtcgcgaggctctccagcgtctctgttcatccccagcccgcccagcttcctgcccctcgccaaccagcagctcttccggctctcctcgacggacctcaccctcctcattgcctggccgctcagccgggccctctctctgggaaccataccctctctgactcgacgcagactccggctatctgttcagcgtgtagccgcccaccatctcaggtgtctcgatctggggagtttcctgtttcagattacttctctcttctgtcggggatgctgcccctcctccccagtcccttccccagctgcttccggtggccggctcggtggctccagcctccggctctctgcgccactgcaggcccctcatcagccctgccctggctcaacctgaagggacagaagctgctgctgttcccgtcaccccctggagaggccccaccaagcccagcagctcagatgagccctcgctcctaacggcgctcttaccatggagcggccatgttccggaagctgccccgccggacgtgagcagcccggttgactacgggcccta

SEQ ID NO: 802 - DNA, 440 bp, Homo Sapiens
ctccaggcctctggacaggggggagcagccgcctggaccgaagctacagctatagctacagcagtggcccaggcccattctacaataaagggctcatctctgaagaggagctcggggccagtgtggcttccctgagcagtgagaacccatatgccaccatccgggacctgcccagcttgccagggggcccccgggagagcagctacatggagatgaaaggccctccctcaggatctccccccaggcagcctcctcagttctgggacagccagaggcggcggcaaccccagccacagagagacagtggcacctacgagcagcccagccccctgatccatgaccgagactctgtgggctcccagccccctctgcctccgggcctaccccccggccactatgactcacccaagaacagccacatccctggacattatgacatg

SEQ ID NO: 803 - DNA, 450 bp, Homo Sapiens
ttttttttttttttttgttggttagatatgattaataactagtaccaacatggcattgttaacaaagaatacattattattattataaggtactcatgagtaaagaacaatgaataatatacatctaattttttaatactcaatgcacaatcaacatttctgatcaacagtataaaccatataaaagagaattctgcttttcatttgtacaaatactgctttcatcattgcaaaactttcaaggttaaaacgtaccatatgttgaagctataaagctattgcttgaatgtttctaaaacgaagttattgctgtctgttgttaatcggttacattgtcacctctaataccagtcatcaaatccataggatctcttaatttccaagagattgtattgtacagcaagattatttttgtggccaaatcaggtcataggattcctttttttttaa

SEQ ID NO: 804 - DNA, 475 bp, Homo Sapiens
  misc_feature (130)..(130): n is a, c, g, or t
  misc_feature (246)..(246): n is a, c, g, or t
  misc_feature (417)..(417): n is a, c, g, or t
gtggaagaaaggaatactcctcctttccattgtagtctagagttaagatttcaaatccataaattagaggacctaaaattagagggcaattaactgctcattcattgggcccccagtcagcacgggggtntggaagagatcgggaataatagcgcagaccaatgagcctagggagatgctttcatcgtctctccttccctcaagtgttctggaacctatcatttgaattagccgagtcaggcaggngggggcggggaatccttccgcccttcttaggaggggctgcattgcagggggagagtgaactgacagactcagtcactgaagagggaaaaggagtgagaagacaaagcccgtcaaagccccaacagcttttgtatttctcccagcccggcgccagacccccggaactccccnaagcactcccttccatcttttgaacaccgccagttaatttgattgataacaggaagct

SEQ ID NO: 805 - DNA, 513 bp, Homo Sapiens
agcctagtcccgcccctgcgttgcggcgcttctcccaggccccaccttccatccagtgccctggaccctcggctgggtagcgccaccagagcgaccaaacgtcccgcgccttccaggccgcactccagagccaaaagagctccatggcggcggcggccaagcccaacaacctttccctggtggtgcacggaccgggggacttgcgcctggagaactatcctatccctgaaccaggcccaaatgaggtcttgctgaggatgcattctgttggaatctgtggctcagatgtccactactgggagtatggtcgaattgggaattttattgtgaaaaagcccatggtgctgggacatgaagcttcgggaacagtcgaaaaagtgggatcatcggtaaagcacctaaaaccaggtgatcgtgttgccatcgagcctggtgctccccgagaaaatgatgaattctgcaagatgggccgatacaatctgtcaccttccatcttcttctgtgccacgcccc

SEQ ID NO: 806 - DNA, 3175 bp, Homo Sapiens
cagatcgggaagaaaaatatggaatgtgttttaccgctgactgaacacaaccaaatgaactgtcctgacagtagtttgcaaaccagcagctagcagtttgtccagcctctaacattgtccagcactttccagagcaaactcactgtttacaagaactcttggccttacgaagtttataacctcaagctttgtttatttaaaatattcctgcaaaagaaaagtacccggcacccactttccaaaatggccatggatgagtatttgtggatggtcattttgggtttcatcatagctttcatcttggccttttctgttggtgcaaacgatgttgccaactcctttggtacagccgtgggctctggtgtggtgaccttgaggcaggcatgcattttagcttcaatatttgaaaccaccggctccgtgttactaggcgccaaagtaggagaaaccattcgcaaaggtatcattgacgtgaacctgtacaacgagacggtggagactctcatggctggggaagttagtgccatggttggttccgctgtgtggcagctgattgcttccttcctgaggcttccaatctcaggaacgcactgcattgtgggttctactataggattctcactggtcgcaatcggtaccaaaggtgtgcagtggatggagcttgtcaagattgttgcttcttggtttatatctccactgttgtctggtttcatgtctggcctgctgtttgtactcatcagaattttcatcttaaaaaaggaagaccctgttcccaatggcctccgggcactcccagtattctatgctgctaccatagcaatcaatgtcttttccatcatgtacacaggagcaccagtgctcggccttgttctccccatgtgggccatagccctcatttcctttggtgtcgccctcctgttcgctttttttgtgtggctcttcgtgtgtccgtggatgcggaggaaaataacaggcaaattacaaaaagaaggtgctttatcacgagtatctgacgaaagcctcagtaaggttcaggaagcagagtccccagtatttaaagagctaccaggtgccaaggctaatgatgacagcaccatcccgctcacgggagcagcaggggagacactggggacctcggaaggcacttctgcgggcagccaccctcgggctgcatacggaagagcactgtccatgacccatggctctgtgaaatcgcccatctccaacggcaccttcggcttcgacggccacaccaggagcgacggtcatgtgtaccacaccgtgcacaaagactcggggctctacaaagatctgctgcacaaaatccacatcgacaggggccccgaggagaagccagcccaggaaagcaactaccggctgctccgccgaaacaacagttacacctgctacaccgcagccatttgtgggctgccagtgcacgccacctttcgagctgcggactcatcggccccagaggacagtgagaagctggtgggcgacaccgtgtcctactccaagaagaggctgcgctacgacagctactcgagctactgtaacgcggtggcagaggcggagatcgaggcggaggagggcggcgtggagatgaagctggcgtcggagctggccgaccctgaccagccgcgagaggaccctgcagaggaggagaaggaggagaaggacgcacccgaggttcacctcctgttccatttcctgcaggtcctcaccgcctgtttcgggtcctttgctcacggcggcaatgacgtgagtaatgccatcggtcccctggtagccttgtggctgatttacaaacaaggcggggtaacgcaagaagcagctacacccgtctggctgctgttttatggaggagttggaatctgcacaggcctctgggtctgggggagaagagtgatccagaccatggggaaggacctcactcccatcacgccgtccagcggcttcacgatcgagctggcctcagccttcacagtggtgatcgcctccaacatcgggcttccagtcagcaccacgcactgtaaggtgggctcggtggtggccgtgggctggatccgctcccgcaaggctgtggactggcgcctctttcggaacatcttcgtggcctggttcgtgaccgtccctgtggctgggctgttcagcgctgctgtcatggctcttctcatgtatgggatccttccatatgtgtgatttgtcttcttccagctgcaaacagctaaagggatggtctggtgttggcgtgtgggagacatgtgtgctcgtgccgcacatacacatcctggccgtgcacggctctctcatgaccagctctctgcctcccttccaggaggctccatcccacactgttcacccaggctgcggagactcaccttcccgagctaacttaactactgtacataataatatgtattaaactggtatcgtggtgatataatgtggtgcagttacttatatattaaatatctattgtatccatagaataggcagcattatttcaaacatattcaagttgggagtggagatcattgcctagaagtcaatattcaataaatcttgtacataactatttcgatggcaaatgttaagccttctaaaaggaaagtgtagattggaaaatgattttttttccaaatgatgtttttgccttctaatatactgtaaggtaatgagcttcagaacaggcaacctgaccctgcagaggtcgcgtgctgtgggatgacagcgggacgggagctcacaagtgctttcactgaagatttgttcatatactgtgtattgattgttgtgtaatatatcatcattgcttttgtaaatacgtaaaactgtaattttttaatggtgtgcttcccttatactttttgatcagagaattttggaaagtaccaaagaagcaggggaatcattggccagtgttacgttttcacattgtctgtctcccaccctcactgatcacgcctgccccagagcagtgtgtggcggtgacaccgtcacccagcatgcgccacgccgtcgtcccaccagcagtgccaccgccaccacaccccagatcccacccaccttgcagtggctttcttgtcatcagagtagagaatgcacaggtgttggtgagggcgtgtggctgagcactacatgtcaagtcagagtcagtttctatccaattctc

SEQ ID NO: 807 - DNA, 3516 bp, Homo Sapiens
atgttttataagtattgacattacacagtgttaacaatgcatccacagagcttggctgaagaggaaataaaaacagaacaggaggtggtagagggcatggatatctctactcgctccaaagatcctggctctgcagagagaacagcccagaaaagaaagttccccagccctccacattcttccaatggccactcgccgcaggacacatcaacaagccccattaaaaagaaaaagaaacctggcttactgaacagtaacaataaggagcaggatggacggaatgatttctactgctgggtttgtcaccgggaaggccaagtcctttgctgtgagctctgtccccgggtttatcacgctaagtgtctgagactgacatcggaaccagagggggactggttttgtcctgaatgtgagaaaattacagtagcagaatgcatcgagacccagagtaaagccatgacaatgctcaccattgaacagttatcctacctgctcaagtttgccattcagaaaatgaaacagccagggacagatgcattccagaagcccgttccattggaacagcaccctgactatgcggaatacatcttccatccaatggacctttgtacattggaaaagaatgcgaaaaagaaaatgtatggctgcacagaagccttcctggctgatgcaaagtggattttgcacaactgcatcatttataatgggggaaatcacaaattgacgcaaatagcgaaagtagtcatcaaaatctgtgaacatgagatgaatgaaatcgaagtatgtccagaatgttatctagctgcttgccaaaaacgagataactggttttgtgagccttgtagcaatccacatcctttggtctgggccaaactgaaggggtttccattctggcctgcaaaagctctaagggataaagacgggcaggtcgatgcccgattctttggacaacatgacagggcctgggttccaataaataattgctacctcatgtctaaagaaattcctttttctgtgaaaaagactaagagcatcttcaacagtgccatgcaagagatggaggtttacgtggggaacatccgcaggaagtttggggtttttaattactctccatttaggacaccctacacacccaacagccagtatcaaatgctgctcgatcccaccaaccccagcgccggcactgccaagatagacaagcaggagaaggtcaagctcaactttgacatgacggcatcccccaagatcctgatgagcaagcctgtgctgagtgggggcacaggccgccggatttccttgtcggatatgccgcgctcccccatgagcacaaactcttctgtgcacacgggctccgacgtggagcaggatgctgagaagaaggccacgtcgagccacttcagtgcgagcgaggagtccatggacttcctggataagagcacagcttcaccagcctccaccaagacgggacaagcagggagtttatccggcagcccaaagcccttctctcctcaactgtcagctcctatcacgacgaaaacggacaaaaccaccaccaccggcagcatcctgaatcttaacctggatcgaagcaaagctgagatggatttgaaggagctgagcgagtcggtccagcaacagtccacccctgttcctctcatctctcccaagcgccagattcgtagcaggttccagctgaatcttgacaagaccatagagagttgcaaagcacaattaggcataaatgaaatctcggaagatgtctatacggccgtagagcacagcgattcggaggattctgagaagtcagatagtagcgatagtgagtatatcagtgatgatgagcagaagtctaagaacgagccagaagacacagaggacaaagaaggttgtcagatggacaaagagccatctgctgttaaaaaaaagcccaagcctacaaacccagtggagattaaagaggagctgaaaagcacgtcaccagccagcgagaaggcagaccctggagcagtcaaggacaaggccagccctgagcctgagaaggacttttccgaaaaggcaaaaccttcacctcaccccataaaggataaactgaagggaaaagatgagacggattccccaacagtccatttgggcctggactctgattcagagagcgaacttgtcatagatttaggagaagaccattctgggcgggagggtcgaaaaaataagaaggaacccaaagaaccatctcccaaacaggatgttgtaggtaaaactccaccatccacgacggtgggcagccattctcccccggaaacaccggtgctcacccgctcttccgcccaaacttccgcggctggcgccacagccaccaccagcacgtcctccacggtcaccgtcacggccccggcccccgccgccacaggaagcccagtgaaaaagcagaggccgcttttaccgaaggagactgccccggccgtgcagcgggtcgtgtggaactcatcaactgtccagcagaaggagatcacacagagcccatccacgtccaccatcaccctggtgaccagcacacagtcatcgcccctggtcaccagctcggggtccatgagcacccttgtgtcctcagtcaacgctgacctgcccatcgccactgcctcagctgatgtcgccgctgatattgccaagtacactagcaaaatgatggatgcaataaaaggaacaatgacagaaatatacaacgatctttctaaaaacactactggaagcacaatagctgagattcgcaggctgaggatcgagatagagaagctccagtggctgcaccagcaagagctctccgaaatgaaacacaacttagagctgaccatggcggagatgcggcagagcctggagcaggagcgggaccggctcatcgccgaggtgaagaagcagctggagttggagaagcagcaggcggtggatgagaccaagaagaagcagtggtgcgccaactgcaagaaggaggccatcttttactgctgttggaacaccagctactgtgactacccctgccagcaagcccactggcctgagcacatgaagtcctgcacccagtcagctactgctcctcagcaggaagcggatgctgaggtgaacacagaaacactaaataagtcctcccaggggagctcctcgagcacacaatcagcaccttcagaaacggccagcgcctccaaagagaaggagacgtcagctgagaaaagcaaggagagtggctcgacccttgacctttctggctccagagagacgccctcctccattctcttaggctccaaccaaggctctgaccattcccggagtaataaatccagttggagcagcagtgatgagaagaggggatcgacacgttccgatcacaacaccagtaccagcacgaagagcctcctcccgaaagagtctcggctggacaccttctgggactagcagtgaatcgggacacaaaccacccaccccattgggagaaaaacccagacgccaggaaaaaaaaaaaaaaaa

SEQ ID NO: 808 - DNA, 352 bp, Homo Sapiens
tttttttttttttttttttttttttttttttttttttttttttttttgacattgttctactgttttattgactcgttgcatttacaagttttgctaatgatacacagtctacacttactaataaattatactcacagggtttttagggatgggactttgtttcaatattttataataaaagattataggagttattacagacaatgatagaaaagtttgaggcatcgtgacaaaatagtgcaaaagcctaagttatccaaaagatgtagggatcataatttataaagactgtggtagtgtccctgggaaatgcttacaatgagataccaagcagtcaaaacggaatttaacc

SEQ ID NO: 809 - DNA, 5064 bp, Homo Sapiens
gagaaggggaccttcaggtccaggcaaagggggaacttctgtcgtgggaacgaaaaagaaagaggatttacagggtggggggacagaggggcagcaggaaccagaagggagacagtggcggtcgcaccggggccgatccgagagttccccttagagaacggagctcacgggcggggaggcctcacctgctagtaggacgcagaaagacagaaggcgaaggagaccccctgccgtagccatcttgcctctctgctgagcggaagcccccgttcggctcctgtctgttagcggcctctctaggctaccactgacaccgtctctgtggcccggagcctaagagaccggaagttcgtgtttccaggcgcttccggaaaccgcgggagagggtcgctgacgtggaggcgtccgaagggcagcagggtgtgtcggggctcggattaagacatcggagtcggagacctgagagatgttaaccaaattcgagaccaagagcgcgcgggtcaaagggctcagctttcaccccaaaagaccttggatcctgactagtttacataatggggtcatccagttatgggactatcggatgtgcactctcattgacaagtttgatgaacatgatggtccagtgcgaggcattgacttccataagcagcagccactgttcgtctctggaggagatgactataagattaaggtttggaattacaagcttcggcgctgtcttttcacattgcttgggcacttagattatattcgcaccacgttttttcatcatgaatatccctggattctgagtgcctccgatgatcagaccatccgagtgtggaattggcaatctagaacctgtgtttgtgtgttaacagggcacaaccattatgtgatgtgtgctcagttccaccccacagaagacttggtagtatcagccagcctggaccagactgtgcgcgtttgggatatttctggtctgaggaaaaaaaacctgtcccctggtgcggtggaatcggatgtgagaggaataactggggttgatctatttggaactacagatgcagtggtgaagcatgtactagagggtcacgatcgtggagtaaactgggctgccttccaccccactatgccccttattgtatctggggcagatgatcgtcaagtgaagatctggcgcatgaatgaatcaaaggcatgggaggttgatacctgccggggccattacaacaatgtatcttgtgccgtcttccaccctcgccaagagttgatcctcagcaattctgaggacaagagtattcgagtctgggatatgtctaagcggactggggttcagactttccgcagagaccatgatcgtttctgggtcctagctgctcaccctaaccttaacctctttgcagcaggccatgatggtggtatgattgtgtttaagctggaacgggaacggccagcctatgctgttcatggcaatatgctacactatgtcaaggaccgattcttacgacagctggatttcaacagctccaaagatgtagctgtgatgcagttgcggagtggttccaagtttccagtattcaatatgtcatacaatccagcagaaaatgcagtcctgctttgtacaagagctagcaatctagagaatagtacctatgacctgtacaccatccctaaagatgctgactcccagaatcctgatgcgcctgaagggaaacgatcctcaggcctgacagccgtttgggtcgctcgaaatcggtttgctgtcctagatcggatgcattcgcttctgatcaagaatctgaagaatgagatcaccaaaaaggtacaggtgcccaactgtgatgagatcttctatgctggcacaggcaatctcctgcttcgagatgcggactctatcacactctttgacgtacagcagaagcggactctggcatctgtgaagatttctaaagtgaaatacgttatctggtcagcagacatgtcacatgtagcactactagccaaacacgccattgtgatctgtaaccgcaaactggatgctttatgtaacattcatgagaacattcgtgtcaagagtggggcctgggatgagagtggggtatttatctataccacaagcaaccacatcaaatatgctgtcaccactggggaccacgggatcattcgaactctggatttacccatctatgtcacacgggtgaagggcaacaatgtatactgcctagacagggagtgtcgtccccgggtactcaccattgatcccactgagttcaaattcaagctggccctgatcaacagaaaatatgatgaggtactgcacatggtgaggaatgccaaactagttggccagtctattattgcttatctccagaagaagggctatcctgaagtggcactgcattttgtcaaggatgagaaaactcgctttagtctggcactggagtgtggaaacattgagattgctctggaagcagccaaagcactggatgacaagaactgctgggaaaagctgggagaagtggccctgctgcaggggaaccaccagattgtggaaatgtgctatcagcgtaccaaaaactttgacaaagtttccttcctgtatcttatcactggcaacttagaaaaacttcgcaagatgatgaagattgctgagatcagaaaggacatgagtggccactatcagaatgccctatacctgggtgatgtgtcagagcgtgtgcggatcctgaagaactgtggacagaagtccctggcctatctcacagctgctacccatggcttagatgaagaagctgagagcctaaaggagacatttgacccagagaaggagacaatcccagacattgaccctaatgccaagctgctccagccacctgcacctatcatgccattggataccaattggcctttattgactgtatccaaaggattttttgaaggcaccattgccagcaaagggaagggaggagcactggctgctgacattgacattgacactgttggtacagagggctggggagaggatgcagagctgcagttggatgaagatgggtttgtggaggctacagaaggtttgggggatgatgctcttggcaagggacaggaagaaggaggtggctgggatgtagaagaagatctggagctccctcctgagctggatatatcccctggggcagctggtggggctgaagatggtttctttgtgcccccaaccaagggaacaagtccaactcagatctggtgtaataactctcagcttccagttgatcacatcctggcaggctctttcgaaacagccatgcggctccttcatgaccaagtaggggtaatccagtttggcccctacaagcaactgttcctacagacatacgcccgaggccgcacaacctatcaggctctgccctgcctaccctccatgtatggctatcctaatcgcaactggaaggatgcagggctgaagaatggtgtaccagctgtgggcctgaagcttaatgacctcatccaacggttgcagctgtgctaccagctcaccacagttggcaaatttgaggaggctgtggaaaaattccgttccatccttctcagtgtgccacttcttgttgtggacaataaacaagagattgcagaggcccagcagctcatcaccatttgccgtgagtacattgtgggtttgtccgtggagacagaaaggaagaagctgcccaaagagactctagaacagcagaagcgcatctgtgagatggcagcctatttcacccactcaaacctgcagcctgtgcacatgatcctggtgctgcgtacagccctcaatctgttcttcaagctcaagaacttcaagacagctgccacctttgctcggcgcctactagaactcgggcccaagcctgaggtggcccaacagacccgaaaaatcctgtctgcctgtgagaagaatcccacagatgcctaccagctcaattatgacatgcacaacccctttgacatttgtgctgcatcatatcggcccatctaccgtggaaagccagtagaaaagtgtccactcagtggggcctgctattcccctgagttcaaaggtcaaatctgcagggtcaccacagtgacagagattggcaaagatgtgattggtttaaggatcagtcctctgcagtttcgctaaggccccctttgtgtgcatgggtcagtcaccatatgttccccccagagaatgtgtctatatcctccttctaacagcaccttccccctgcagctactcttcagatctggctctctgtaccctaaaacctagtatctttttctcttctatggaaaatccgaaggtctaaacttgacttttttgaggtcttctcaacttgactacagttgtgctcataattgtccttgcctttccagcttaattattttaaggaacaaatgaaaactctgggctgggtggagtggctcatacctgtaatcccagcactttgggaggctacggtgggcagatcatctgaggccaggagttcgagacctgcctggccaacatggcaacaccccgtctctaataaaaatataaaaattagcctggcatggtagcatgcgcctatagtcccagctgctcaggaggctgaggcatgagaatcgcttgaacctaggaggtggaggttgcattcaactgagatcataccacttcattccagcctgggtgacagagcaagactctgtctcaaaaaaaaaaaaaaaaaaaaaaaaaaaaaaaaaaggaaaactctgtgatggacatttgtttagtaaatcccttcagtatttatccctcctttccccacagcagctttctttcctgtcaactagaaaggagcaggatgtaataaatacattttggtgtgactaggccacaccaactcttaatcatctcccattttccttagacatttaaatttcaaggcaggtaccctctgtgtactcagaaatttgaagaagttatttggttttccaaaatgcacactgcgggttattgatttgttctttacaactattgttctcatatttctcacactaaataaatctctatgagagcttcttgaaaaaaaaaaaaaaaaagcg

SEQ ID NO: 810 - DNA, 14770 bp, Homo Sapiens
gggacaccatcatttgggtttttaaaagcttcagcttctccagcatctttgcattgtgaatatcttcctgcttctagtcaaagctttctctctagtgattggaatgctgctgtaagcctattagaggtgcctgaggatatcaccttttacaaggaagccgtgtgtgcttgagaggatctttttaaatgcattatggctcatgcagcctcacaattaaagaaaaacagggatttagaaatcaatgctgaagaagagcctgagaaaaaaaggaaacaccgcaaacggtcccgggatcggaagaaaaagtctgatgccaatgcaagttacttaagagcagctcgagctggacaccttgaaaaggccctcgactacataaaaaatggagttgacatcaacatttgcaatcagaatgggttgaacgctctccaccttgcttccaaagaaggccatgtagaggttgtttctgagctgctgcagagagaagccaatgtggatgcagctacaaagaaaggaaacacagcattgcacatcgcatctttggctgggcaagcagaggtggtaaaagtcttggttacaaatggagccaatgtcaatgcacaatctcagaatggtttcacgccattgtatatggcagcccaggaaaatcacctggaagttgtcaagtttcttcttgacaatggtgcaagccagagcctagccacagaggatggcttcacaccattggcagtggctttgcaacaaggtcacgaccaagtcgtttcgctcctgctagagaatgacaccaaaggaaaagtgcgtctcccagctcttcatatcgcggcccgcaaagacgacacaaaagccgccgccctgctgctgcagaatgacaacaatgcagatgtggaatcaaagagtggcttcactccgctccacatagctgctcactatggaaatatcaatgtagccacgttgctgttaaaccgagcggctgctgtggatttcaccgcaaggaatgacatcactcctttacatgttgcatcaaaaagaggaaatgcaaatatggtaaaactattgctcgatcgaggagctaaaatcgatgccaaaaccagggatggtctgacaccactgcactgtggagcaaggagtggccacgagcaggtggtagaaatgttgcttgatcgagctgcccccattctttcaaaaaccaagaatggattatctccattgcacatggccacacaaggggatcatttaaactgcgtccagcttctcctccagcataatgtacccgtggatgatgtcaccaatgactacctgactgccctacacgtggctgcccactgtggccattacaaagttgccaaggttctcttggataagaaagctaaccccaatgccaaagccctgaatggctttacccctcttcatatcgcctgcaagaagaatcgaattaaagtaatggaactccttctgaaacacggtgcatccatccaagctgtaaccgagtcgggccttaccccaatccatgttgctgccttcatggggcatgtaaatattgtatcacaactaatgcatcatggagcctcaccaaacaccaccaatgtgagaggagaaacagcactgcacatggcagctcgctccggccaagctgaagttgtgcggtatctggtacaagacggagctcaggtagaagctaaagctaaggatgaccaaacaccactccacatttcagcccgactggggaaagcagacatagtacaacagctgttgcagcaaggggcatctccaaatgcagccacaacttctgggtacaccccacttcacctttccgcccgagaggggcatgaggatgtggccgcgttccttttggatcatggagcgtctttatctataacaacaaagaaaggatttactcctcttcatgtggcagcaaaatatggaaagcttgaagtcgccaatctcctgctacagaaaagtgcatctccagatgctgctgggaagagcgggctaacaccactgcatgtagctgcacattacgataatcagaaagtggcccttctgcttttggaccaaggagcctcacctcacgcagccgcaaagaatggttatacgccactgcacatcgctgccaaaaagaaccagatggacatagcgacaactctgctggaatatggtgctgatgccaacgcagttacccggcaaggaattgcttccgtccatctcgcagctcaggaagggcacgtggacatggtgtcgctgctcctcggtagaaatgcgaatgtgaacctgagcaataagagcggcctgaccccactccatttggctgctcaagaagatcgagtgaatgtggcagaagtcctcgtaaaccaaggggctcatgtggacgcccagacaaagatgggatacacaccactgcatgtgggctgccactatggaaatatcaagattgttaatttcctgctccagcattctgcaaaagttaatgccaaaacaaagaatgggtatacgccattacatcaagcagcacagcaggggcatacgcatataataaatgtcttacttcagaacaacgcctcccccaatgaactcactgtgaatgggaatactgcccttggcattgcccggcgcctcggctacatctcagtagtggacaccctgaagatagtgaccgaagaaaccatgaccacaactactgtcacagagaagcacaaaatgaatgttccagaaacgatgaatgaagttcttgatatgtctgatgatgaagttcgtaaagccaatgcccctgaaatgctcagtgatggcgaatatatctcagatgttgaagaaggtgaagatgcaatgaccggggacacagacaaatatcttgggccacaggaccttaaggaattgggtgatgattccctgcctgcagagggttacatgggctttagtctcggagcgcgttctgccagcctccgctccttcagttcggataggtcttacaccttgaacagaagctcctatgcacgggacagcatgatgattgaagaactccttgtgccatccaaagagcagcatctaacattcacaagggaatttgattcagattctcttagacattacagctgggctgcagacaccttagacaatgtcaatcttgtttcaagccccattcattctgggtttctggttagctttatggtggacgcgagagggggctccatgagaggaagccgtcatcacgggatgagaatcatcattcctccacgcaagtgtacggcccccactcgaatcacctgccgtttggtaaagagacataaactggccaacccacccccacatggtgaaaggagagggattagcagtaggctggtagaaatgggtcctgcaggggcacaatttttaggccctgtcatagtggaaatccctcactttgggtccatgagaggaaaagagagagaactcattgttcttcgaagtgaaaatggtgaaacttggaaggagcatcagtttgacagcaaaaatgaagatttaaccgagttacttaatggcatggatgaagaacttgatagcccagaagagttagggaaaaagcgtatctgcaggattatcacgaaagatttcccccagtattttgcagtggtttcccggattaagcaggaaagcaaccagattggtcctgaaggtggaattctgagcagcaccacagtgccccttgttcaagcatctttcccagagggtgccctaactaaaagaattcgagtgggcctccaggcccagcctgttccagatgaaattgtgaaaaagatccttggaaacaaagcaacttttagcccaattgtcactgtggaaccaagaagacggaaattccataaaccaatcacaatgaccattccggtgcccccgccctcaggagaaggtgtatccaatggatacaaaggggacactacacccaatctgcgtcttctctgtagcattacagggggcacttcgcctgctcagtgggaagacatcacaggaacaactcctttgacgtttataaaagattgtgtctcctttacaaccaatgtttcagccagattttggcttgcagactgccatcaagttttagaaactgtggggttagccacgcaactgtacagagaattgatatgtgttccatatatggccaagtttgttgtttttgccaaaatgaatgatcccgtagaatcttccttgcgatgtttctgcatgacagatgacaaagtggacaaaactttagagcaacaagagaattttgaggaagtcgcaagaagcaaagatattgaggttctggaaggaaaacctatttatgttgattgttatggaaatttggccccacttaccaaaggaggacagcaacttgtttttaacttttattctttcaaagaaaatagactgccattttccatcaagattagagacaccagccaagagccctgtggtcgtctgtcttttctgaaagaacgaaagacaacaaaaggactgcctcaaacagcggtttgcaacttaaatatcactctgccagcacataaaaaggagacagagtcagatcaagatgatgagattgagaaaacagatagacgacagagcttcgcatccttagctttacgtaagcgctacagctacttgactgagcctggaatgattgaacggagtacaggagcaacaagatccctccccaccacttactcatacaagccattcttttctacaagaccataccagtcctggacaacagctccgattacagtgcctgggccagccaagtcaggcttcacttccttatcaagttcttcctctaatacgccatcagcttctccgttaaaatcaatatggtctgtttcgacaccttctccaatcaaatccacattaggcgcgtcaactacatcttcagttaaatccattagtgacgtggcatctccaattagatccttacggacaatgtcttcgccgataaaaactgtggtgtcacaatctccatacaatatccaggtttcctctggtaccctggctagagctccagcagtcacggaagctacgcccttaaaagggctggcatccaattctacgttttcctctcgaacctctccagtgactacagcagggtctcttttggagaggtcatcaattactatgacaccccctgcctcccccaaatcaaacattaatatgtattcctcaagtttgccatttaagtcaattattacatcagcagcaccgctaatatcttcacctttaaagtcagtggtgtctccagttaaatcacgagttgatgtcatttcatcagccaaaattacaatggcatcttctctctcatcacctgtgaagcagatgcctggacatgcagaggtagcattagtcaatggatctatttcccctctaaaatatgcatcatcctcaactttaattaatggatgcaaagccactgccacgttacaggaaaaaatttcttctgctacaaactctgtgagctctgtggtcagtgcagccactgacacagttgagaaagtgttttctaccacgactgcaatgccattttccccactcaggtcatatgtttctgcagcaccatcagcttttcagtctctaagaactccttccgcaagtgcactctatacatcccttgggtcgtcaatatctgcaactacctcatctgtaacttcatcaattataacagtgccagtatactctgtagtcaatgttttgccagaaccagcattaaagaaacttccagactctaattcatttacaaaatcagcagcagccttgctgtcacccattaaaacattgactacggagacacatcctcagcctcacttcagtcgaacttcatctccagttaagtcatctttgttccttgcaccctctgcccttaagttgtctacaccatcttctttatcttccagtcaggagatactaaaagatgtagctgaaatgaaagaggacctaatgcggatgaccgcaatactacagacagatgtgcctgaggagaagccattccaacctgaactcccaaaggaagggagaatagatgatgaagaacctttcaaaattgtagagaaagtaaaggaagacttagtgaaagttagtgaaatccttaaaaaggatgtatgtgtagataataaaggatcacccaaatcaccaaagagtgacaaaggacactctcctgaagatgactggatagaatttagttcggaagaaatccgggaagccagacaacaagctgctgcgagccagtctccatctctgccagagagagtgcaagtaaaagcaaaagccgcctccgaaaaggattataacttgaccaaagttattgattacctaacaaatgatattgggagtagttcactgacaaacttaaaatacaagtttgaggatgcaaagaaggatggtgagggaggacagaaaagagttttaaaaccagcaattgctttgcaggaacacaaactcaaaatgcctccagcctccatgaggacttccacctctgagaaagaattgtgtaaaatggctgattccttttttggaacagatactattttagagtctcctgatgacttttctcaacacgaccaagataaaagtcccttgtctgacagtggctttgaaacaagaagtgaaaagacaccttcagccccacaaagcgctgaaacgactggtcctaaaccactttttcatgaagttcccatccctcctgttattacagaaacaagaactgaagtggttcatgttatcaggagctatgatccctcagctggggatgttccccagacccaaccagaggagcctgtgtcacctaaaccttcacctacttttatggaattggaaccaaagcccaccacctctagtattaaagaaaaggttaaagcatttcaaatgaaagccagtagtgaagaagatgaccacaatcgggttttaagcaaaggcatgcgtgttaaagaagagactcacataaccacaaccaccagaatggtttatcattctccaccaggcggtgaaggtgcatctgaaagaattgaagaaaccatgtcagtccatgacatcatgaaggcctttcagtccgggcgggatccttccaaagaactggcaggtctgtttgaacataagtcggcagtgtctccagatgttcacaagtctgctgctgaaacctcagcccagcatgcagagaaggacaaccaaatgaaacccaaactggagcgtataatagaagtccacatcgaaaaaggtaaccaagctgagcccactgaagtcattattagagaaaccaaaaagcatccagaaaaagaaatgtatgtatatcagaaagacttatcccggggagatattaacctaaaagattttctgccagaaaaacacgatgcttttccttgttcagaggaacagggtcagcaagaagaagaagaacttactgctgaagagtcattgccttcttatctggagtcttccagagtaaacactcctgtgtcccaagaagaagatagccgccctagttctgctcaactcatatctgatgactcttataaaacattgaagcttttgagtcaacactcaatagaataccatgacgatgagttgtcagaactaagaggggagtcttacaggtttgctgagaaaatgcttctgtcagaaaagctagatgtgtctcattctgatactgaggaatcggttacagaccatgcaggaccccctagctcagagttacaggggtctgataagcggtccagagaaaaaatagccactgcccccaaaaaagaaattctctccaaaatctataaagatgtttctgaaaatggtgtaggtaaagtgtctaaagatgagcattttgataaagtgacagtgttgcactattctggcaatgttagtagtccaaaacatgccatgtggatgcgctttactgaggacagattagacagaggtagagagaagttgatatatgaagatagggtggacaggactgtgaaggaggctgaagaaaaactgactgaagtgtcacagttttttcgtgacaaaactgaaaagctaaatgatgaactgcagtccccagagaaaaaggcacgccctaaaaatggcaaagaatattcttctcaaagccctaccagtagcagccctgagaaagtgctactgacagaactgctggcatccaatgatgagtgggttaaggcaagacagcatggccctgatggacaaggcttccccaaggccgaggagaaggcacccagtctgcccagcagcccagagaagatggttctctcccaacagactgaggacagcaagtccacagtggaagccaaaggaagtatttcacagagcaaagcaccagatgggccccagtctggattccagctcaaacaatctaaactcagttccattagattaaaatttgaacaaggcacacacgcaaaaagtaaggacatgtctcaagaagacagaaagtcagatggccagtccagaatcccagttaaaaaaatacaggagagcaagctacccgtctaccaagtttttgctagagaaaaacagcagaaggccatagacctcccagatgaaagtgtatctgtgcaaaaagattttatggtattaaaaaccaaagatgagcatgcccaaagcaacgaaattgttgtaaatgattctggctctgataatgtgaaaaaacagagaactgaaatgtcaagtaaagcaatgcctgactctttttctgagcagcaggctaaagacttggcatgtcatataacctcagatttagcaactaggggaccatgggacaaaaaggtctttagaacatgggagagttcgggagccactaacaataagtctcagaaagaaaaactttcgcatgtacttgttcatgatgtaagagagaatcacattggtcaccctgagagtaaaagtgttgatcaaaagaatgaatttatgtctgtgactgagagagaacgcaaattgttaacaaacggctctctctcagaaattaaagaaatgactgtaaaatctccctccaaaaaagtcttatatagggaatatgttgtgaaagaaggggaccatccaggcggattgcttgatcagccttccaggaggagcgagagctcagcagtgtcacacattcccgtcagagttgctgatgagaggagaatgctgtcttctaatattcccgatggtttttgtgaacagtcggcatttccaaaacatgaactatcacaaaaattgtcccagtcaagcatgagtaaagagacagttgagacacagcactttaattctatagaagatgaaaaagttacctattcagaaatcagcaaagtttccaaacaccagagttatgtaggtttatgcccacctctcgaggaaaccgaaacctcccccaccaaatctcctgattctttagagtttagcccaggaaaggaatctccctctagtgatgtattcgaccacagtcccattgatggattggaaaaactcgcaccactagcccagacagagggagggaaagagataaaaactttacccgtttatgtcagttttgtacaagtggggaagcaatatgaaaaggagatacaacaaggaggtgtaaaaaaaatcataagtcaggaatgtaagacagtacaagaaaccagggggaccttttatacaactagacagcaaaagcaacctccttctccccaaggtagtccagaagatgatactctagagcaagtatcctttctagacagctctgggaaaagccctttaaccccagaaacacccagttcagaggaagtgagttatgaatttacatctaagacacctgactcgctcatagcttatataccaggcaaacccagcccaattcccgaggtttctgaggagtcagaggaggaggaacaggccaagtcaacctcccttaagcagactacagtggaggaaacagcagttgagcgtgaaatgcctaatgacgtgagcaaagactctaaccaaagacccaaaaataacagagttgcctatattgaatttccccctcctccaccactggatgcggaccagattgagtcagataagaagcatcattatctcccagaaaaagaggttgacatgattgaagtcaatctgcaagatgagcatgacaagtaccagctggctgaacctgtcattagagtgcagccaccttcaccagttcctcccggggcagacgtcagtgattcaagcgatgacgaatctatttatcagccagtcccagttaaaaaatataccttcaaattaaaggaagtggacgatgaacaaaaagaaaaacccaaagcttctgctgaaaaggcttccaaccagaaagaactggaaagtaatggatctggaaaagataatgaatttggccttggccttgattcacctcagaatgaaattgcccagaatgggaacaacgaccagtccatcacagagtgttccattgccaccacagcagagttttctcatgacacggatgccacagagatcgactctctggatggctatgacctgcaagatgaagatgatggcttgacagagagtgattctaaactcccaattcaagccatggaaattaagaaagatatctggaacacagagggcattctgaagccagctgaccgctcttttagccaaagtaaacttgaagttatcgaggaggagggaaaggtgggaccagatgaggacaagccaccttctaaaagttcttcatctgaaaagactcctgataagactgatcagaagtcaggggcccagttcttcacactggaaggcagacatcctgacagatcagtgtttcctgatacttacttcagttacaaagtagatgaagaatttgccactccttttaaaacagtagctaccaaaggtctagattttgacccttggtctaataaccgaggggatgatgaagtttttgacagtaaatcacgggaagatgaaactaagccatttgggctggcggtagaagaccgctctccagcaacaacccctgatacaacgccagccagaacgccaactgatgaaagtaccccaactagtgagcctaaccccttcccatttcatgaaggaaaaatgtttgagatgactcgcagtggtgcaattgacatgagcaagagggattttgttgaagagaggctccaatttttccagattggtgagcatacttctgaagggaagtcaggggaccagggggaaggggataaaagtatggtcactgccacaccacagccacagtcaggggacaccactgtagaaaccaatctagagagaaatgtagagacacctacagtggaacctaaccccagcatcccgaccagcggagagtgtcaggaaggcacatccagtagtggctccctggagaaatcagcagcagccactaacacctctaaagttgaccccaagttgcgcacgcctataaaaatgggaatttctgcatccaccatgaccatgaagaaagaaggccctggagaaataacagataagatagaagcggtgatgaccagttgtcagggattagaaaatgaaactataacaatgatttcaaatacagccaatagccagatgggcgttaggccccatgaaaaacatgattttcaaaaagataactttaataacaacaacaatttggattcttccactatacagacagataacattatgagtaatatagttctgacagaacattctgcacccacttgtaccacagagaaagataacccagtgaaagtctcatcaggaaaaaagacaggggtactacaaggacactgtgtaagagataagcagaaagttcttggagaacagcaaaaaacaaaggaattgatagggattaggcaaaaatccaaacttcccataaaggccacttcaccaaaagataccttcccaccgaaccatatgtcaaacactaaagcaagtaaaatgaagcaggttagtcaatccgagaaaaccaaagcccttactacttcttcatgtgtagatgtaaagtccagaattccagtgaaaaacacacccagggataacataattgcagttagaaaagcatgtgccacacaaaagcaagggcagccagagaaaggcaaggccaaacagcttccatccaagttgccagtaaaggtaagatccacctgtgtcactaccaccaccaccactgccaccaccaccaccactaccaccactaccaccaccaccagctgcacagttaaagttaggaaaagtcagctcaaggaagtatgtaaacattccattgaatattttaagggaattagtggtgagaccttaaagcttgtggaccgcctctctgaagaagaaaaaaagatgcagtccgagttgtccgatgaggaagaaagtacctcaagaaacacgtcgttgtccgagacttcccggggtggccagccttcggttacaacgaagtctgctagagataagaaaacagaggcagcacctttaaaatcaaagagtgaaaaggccggcagtgagaaaaggagcagtagaaggactggtccacagagtccatgtgaacggacagatatcaggatggcaatagtagccgatcacctgggacttagttggacagaactggcaagggaactgaatttttcagtggatgaaatcaatcaaatacgtgtggaaaatccaaattctttaatttctcagagcttcatgttattaaaaaaatgggttaccagagacggaaaaaatgccacaactgatgccttaacttcggtcttgacaaaaattaatcgaatagatatagtgacactgctagaaggaccaatatttgattatggaaatatttcaggcaccagaagttttgcagatgagaacaatgttttccatgaccctgttgatggttggcagaatgagacatcaagtggaaacctagagtcctgcgctcaagctcgaagagtaactggtgggttactagatcgactggatgacagccctgaccagtgtagagattccattacctcatatctcaaaggagaagctggcaaatttgaagcaaatggaagccatacagaaatcactccagaagcaaagacaaaatcttactttccagaatcccaaaatgatgtaggaaaacagagtaccaaggaaactctgaaaccaaaaatacatggatctggtcatgttgaagaaccagcatcaccactagcagcatatcagaaatctctagaagaaaccagcaagcttataatagaagagactaaaccctgtgtgcctgtcagtatgaaaaagatgagtaggacttctccagcagatggcaagccaaggcttagcctccatgaagaagaggggtccagtgggtctgagcaaaagcagggagaaggttttaaggtgaaaacgaagaaagaaatccggcatgtggaaaagaagagccactcgtaacagcgaacggtcagtcaaggatcataagtttttactgccagtattgagaaattcgtggaagaaatgtcagcaggaagtaaaaattcaccgagaagtgtgtgtgtgttcgctgcttccacacattaatggcatgattttttttatgcaaaaagaaaagaaaagaaaaccacccacattttaatttagcatgagccaatttacagagcatggaaatcactttcatttccggattggcgcgtgtgcaattagcaatgcagtgtatatacaagaagccatgctgttaacagtttatctcaagtaatttggtgtcatttacaaaaggaagaaattcttgccatcagaagggacagaaggagatggaatgatcaaatcacagagaaacactaaaattactaaatctacaacagctcgccttatttttcttggacccaaactgtcagggtataaacactatttgtttcttttttaaaacatcgatagttttgctgtaaataataacactgtataaattctaacagaaaaatagaataaaatgttgataaggcactgcctcttagaacacaaacagaatattgcaaatgcatttaacaaataggggtctcaagtgacttcaccctagaagaggagggagggattctgggtgggggtgactcttcactgattcttgtatattagcaattataatgtttgtatatgcaaaactgctagcttgattttaaaaaaaaacaaatctttaaaatctgctgcaaatttaaataattcccaaaatgaggaattctgtagttctgtgaaaaatttttttcttcagaatactaatattttgatgcatgtgtatcaccttattttgattaaatcttttccaattttgcaaacactacagtatactgcaacacaaaagattttatctgtaaacacaaagcccttcatctaatatttgttgctattgccaatttttcaatgaaatgacctaaaaacaacaaaaaaaaataacctatacggtagttgctttagggggtggggggatgctatctgttagtgcttaaaagggggtaaatgcttgccgctttagaggtggatggtgctcataaaaggccccagtcgggggtatttaaaaaggactgaacagaaatccttagctagtagaatggcagcacgctgtaaaattattactgtattgtgtactggctataagatgtagacacctttcagtaagccaatcatttgtaaccattctagcagtgtcatattaggttaataaggctgctgtgttttaaagggcatttttatttgggttttggtgaaattctttaatttgttgattatattcacataaaatcagcattcattgacacatagctctaatgacatatgtatgaaaaaccatacactggatgacctagtcgattatttaagcataaaataaattgtgttaaactcttcacct

SEQ ID NO: 811 - DNA, 3040 bp, Homo Sapiens
gcctctcttcttgcgctgctcagctgggaacatcgtctcaccaggggcagcagcgacgcgctgcacagccagacaggagctggttgcggggcatggaagcagcctccttggcagccgggagaggagcaagcgcacgccactgcccgtgacccaggcgtccggctgctgtcccctgccggggagctcatccacgcagaggtctctccctgtcctccctgcgagcttttcctctgcagagcccagtggagccagccatgtaccgcggcaacgcttgctgaccccagtgaggagagaggcctgaatccgagggccctggcacctgtgagctcttggctgtcacctgccccaagcctcgcacctccgctccacagcagtccccacaggagacaaccctgacgggagcatggagctgctgtccacgccccacagcattgagatcaacaacatcacctgcgactccttccgcatctcctgggccatggaggacagtgacctggagagggtcacccattacttcattgaccttaacaagaaggagaataagaattccaacaagttcaagcaccgggacgtccccaccaagctcgtggccaaggcagtgccactgcccatgacggtgagaggccactggttcctgagcccccgcacggagtacagtgtggccgtgcagacggcagtgaagcagagcgatggggagtacctggtgtccggctggagcgagacggtggagttctgcactggggattatgccaaggagcacctggctcagcttcaggagaaagctgagcagatcgcaggccgcatgctccgcttctccgtcttctaccgcaaccatcacaaggagtacttccagcatgccaggacccactgcgggaacatgctgcagccttacctgaaggacaacagcggcagccacggctcccccaccagcggtatgctccacggggtcttcttcagctgcaacacggagttcaacacgggccagcccccgcaggactccccctacggccgctggcgcttccagatcccagctcagcgcctcttcaatcccagcaccaacctctactttgcggacttctactgcatgtacacggcctaccactacgccatcctggtgctggcgcccaaaggctccctgggggaccgcttctgccgcgaccgcctgcccctcctggacattgcttgcaacaagttcctgacctgcagcgtggaggatggggagctggtcttccgccacgcccaggacctcatcctggagatcatctacactgagcccgtcgacctgtccctgggcaccctgggggagatcagtgggcaccagctcatgagtctgtctactgccgatgccaagaaggaccccagctgcaagacctgcaacatcagcgtgggccgctagggactcctggggagctggggggcgagggagagatgagcggaaggtggaggtgggtagcccaggttcagggagctggctttctctctcctgcccccctgctccctccactctgcccagctgccctcccctcgccccttggcattggaggcaacagacggtggtcctcttggtaagtgtggcccacacccagcctggtggacatggaaaggcttctcagcctctgtagttggcagctgggctggacttctggagaacttcccctttcctctggtttccttgtcctactgttctttgcctcgtccaggtctctatctcccaaagacctgcccacctcctgggctctcccagggaagcccctctgggccaaagcccatgggtagcttggctgcctccagaagagatgcagagagctgtggggcgatctttcttagtcccactcaccccactcagggccaaccacagaatgccccctccctgctgagctgggtctctggggcttcccactccaggcctggatcccttccttctataaatagtctcctgcaccaccgtgactccctggctgctccttgccccaaagaaccctcttcctgcatgggagagctgtccctccttctccacctgcccaccgggacactccccctgctctctagaaaggaactctctttcttctcttggcactgggggcgtcaggctgtcggatgttccttccttccataccccagcataccttctccttgcttagagtgcaggggtctgagacagcagccactggggttgaggagggggaggagacccctgagacccagaggtgccccttcctcagctgggagtgggccgcctcatgctctgctggggcctggcatggaacgtgagacctgtaagctgtcccgcgggccccggcaccccgcccagctgtgcactttgctcactcgctctgccatggtgccatgactgtactgtgcccatgcgtgacctggactgtggaccctctgctgctccgcctctcccctccccactggctctgtctgctctcctgccaccctgctggccgggagcccctccccggggagttcttggtgaagtccttcccgggcctccttgtgtttttgcctcattcctactgtcacacaggtcacgagggtggactccctacaatcaacaaagcaaacagagagcctgtgggaggggctgacagcagcagccggctgtttgggggatgatggaggtgacatcaggcagaggagagtgcagcctcacagtgactttctcagaggtgacagagatgatggatgagcagctggattttcgtgatgaaggacggaagcagcagcgggccggcaaggccatacctcggtgagggacaggtggacaacggtcacctatctgtagccaggggcagttgtgtggccagctgtctctctgggatgagtcaggaggcctggaggcttggggagaggtgtggagaaggagagaacatggcccaggccctttccttccccctgtgctgacagcattgctgtgggggtggcccactgccctcccctggccctcatgtccccccggggctggggtccgcctgcctgtgctgtgcttgcgacgtgcatcaataaaccaccatggcctgagggccctgctcgtctc

SEQ ID NO: 812 - DNA, 366 bp, Homo Sapiens
ctggacggctgccgctgactgtaacatgtaaagcaggcactgagcaccacctgcctggcagtccagggcatggagaggcctggtacatggggctgaaggcacagacagcaccctgcttgtgacttcactggcccaactcatcctggaccccttgagcaagaccatggctggattccaggaactggtggagtggaagtggatccaggaaaatgccgtgtgaagggaggactcagatgcactccctgtggtctgggctcaaccagccaaaagagcaacaaagactccagaacccactctacctcctcaatcccttggccatctgtggagccccagagcctgcgggctgtggcaaggcctgtttcctgc

SEQ ID NO: 813 - DNA, 7133 bp, Homo Sapiens
ccagcatgtatcagccgaggtggagctgcggggccctggcatgaaagggtcctcactgagcagcgagtcgtcccccgtgtcctctccggccaccaaccacagctcccccgccagcacacccaagcgcgtgcccatgggccctatcatcgtcccccctgggggccacagcgtgcccagcaccccccccgtggtgaccatcgctccaaccaaaaccgtgaatggtgtctggaggagtgagagccggcaggatgccggtcccaggagcagcagtggaggtcgggaacgcctcattgtggagcccccgctccctcaggagaaggcagggggaccagccatcccctcgcacctgctcagcaccccctaccccttcggcctctcccccagctcagttgtgcaggattcccgcttcccgccactcaacctccagcggcccgtgcaccacgtggtgccccccagtaccgtgaccgaggactacctgagaagcttccggccctaccacaccaccgacgacctccgcatgtcctcactgcctcccctcggcctggacccggccactgctgcagcctactaccaccccagctacctggccccacaccccttcccccacccggccttcaggatggacgactcctactgcctgtctgccctgaggtccccgttctaccccatccccacccccggctccctgcccccactgcacccatcagcgatgcacctgcacctctctggggtccgctaccctcccgagctctcccactcatccctggcagcgctgcactcggagcgcatgtctggcctcagcgcggagaggctgcagatggacgaggagctaaggcgggagagggagcgcgagcgcgagcgcgagcgtgagcgtgaggctgaccgcgagcgggagaaggaacgtgagcgcgaacgcgagaaggagcgcgagcaagagaaggagcgtgagcgtgagaaggagcgcgagcgcgagctggagcgccagcgggagcagcgggcccgggagaaggagctgctggccgccaaggccctggagcccagcttcctgcccgtggccgagctgcatgggctgcgtggccatgccactgaggagcggggcaagccctcggagcagctgaccccaacccgagcagagaagctgaaggatgccagcctgcaggcgcccaagcccgtccaacaccccttgcatccggtgcccaccccacaccacacggtgcccagcctcatctccaaccatggcatcttctctctgcctagcagcagtgctgccacagccctgctgatccagcgcaccaatgaggaggagaagtggctggcgcggcagcggcggctgcggcaggagaaggaggaccggcagtctcaggtgtccgagttccggcagcaggtgctggagcagcacctggatatgggccggcccccggtgccggcggaggcagagcacaggccggagagcaccaccaggccaggaccaaaccgtcacgagccaggtggccgtgaccctccgcagcactttggggggccaccacctctgatttcgcccaagccccagctccatgctgcacccacggccctctggaaccccgtgtccctgatggacaacaccttggagacgcggcgggccgaaagccactctctgcacagccacccggctgcatttgagcccagccgccaggcagccgtgccgctggtgaaggtggagcgggtcttctgcccggagaaagcagaggaggggccacggaagcgtgagcctgcccctctggacaagtaccagccacctccgccgccaccacgagagggagggagcctggagcaccagcccttcctgcccgggcccgggcccttcctggctgagctcgagaagtccacccagaccatcctgggccagcagcgggcctccctcccacaggcggccaccttcggggagctcagcggacccctgaagcctggctcgccctaccggcccccagtgccacgggcccccgaccctgcctacatctatgatgagtttctgcagcagcgccggaggctggtcagcaagctggacctggaggagcgcaggcggcgggaggcccaggagaaagggtactactacgacctcgatgactcttacgacgagagcgatgaggaggaggtcagggcccacctccgttgcgtggccgagcagccgcccctcaaactggacacgtcctctgagaagctagagtttttgcaactttttggcttgaccacccaacagcagaaggaggaattggtggcccagaagcggaggaagcggcggaggatgctgcgagagagaagcccgtcgcccccaacaattcagagcaagcggcagacgccttcaccgagactggcgctgtctacccgctacagccctgatgagatgaacaacagtcccaacttcgaagaaaagaagaagttcctgaccatcttcaacctgacccacatcagcgctgagaagaggaaagacaaagagagacttgttgaaatgctccgtgccatgaagcagaaggcactgtcagcagcagtggccgactccttgacaaactctccgagggacagtcctgccgtctccctgagtgaaccagccacgcagcaagcctctctggatgtggagaagccggttggtgttgctgcttccttgtctgacatcccaaaggccgcggagcctgggaagctggaacaggtccggccccaggagctgtcgagagtccaggagctagctcctgccagcggggagaaggccaggctgagcgaggcccctggaggcaaaaagagtctgagcatgcttcactatatccggggcgctgcacccaaggacattcctgtgccgctgtcccacagcaccaatgggaagagcaagccgtgggagccctttgtggcagaagagtttgcacatcagttccacgagtcagtgctgcagtccacccagaaggccctgcagaagcataaagggagcgtggctgtgctgtctgcagagcagaaccacaaggttgacacgtccgtccactacaacattcctgagctgcagtcctccagccgcgcccctccaccccagcacaatgggcagcaggagccccccactgcaaggaagggccccccaacccaggagttggaccgggactcggaggaggaggaagaggaggatgatgaagatggagaagatgaggaggaagtccccaagcgcaagtggcaagggatcgaggccgtttttgaagcttaccaggaacacatagaagagcaaaatctggagcggcaggtgttacagacacaatgtagacgactggaggcccggcactacagcctcagcctgacggcagagcagctctcccacagcgtggcggagttgaggagccagaaacagaagatggtctcagaacgggagcggctccaggcagaactggaccacttacgaaagtgccttgccttgcctgcaatgcactggcctaggggctacctgaagggatatcccaggtgacggtttcccttgcactaggccgaacctatagtatagaaatattatctattttattaccttgaatatttaatatttttcactgggaggtttgaagcttacaaaatgagaatgtgccatgcatgaagcaaaggattccaggctccagaaaaaatgaatgaactcaccttgacgtcaatgcaattgaatcaccgttgtcattcagcgagcaaccaatgtaggattgcccacagtttttctttttaaaggtggttttcgcccttcctctcccacattatttcttaatctgaacatgaaggctccattagcaacactaaaacttgatcattaacagccccctgtgcatatgagtggatcaaaccggttctgttctttcttgtgttgccatgttactatgcctcaagcccagtttgcttttgccgcagcgatggggccagtctcattcctccccaggagtgaaacttgcttcagctgaaaaggttgggtgcattgtcagtaaaaagggcttatttgtttcattttactttcctgcaaaattttcttcaaagcaacaagtcctaggagcacacaaagcaacccaaaggcttttccctggaaaagctctttcttacctaaagataaaaccaattcacaaactgaaggtagctttttattactccgtggggagcatgtacagagctctgtgtatacacagcttcacacccaccagattgttactacagtgggttgggttttcatacagacgtaaattttgagagaaaagtcaaaggtgcttcagccttgtactgtgtatatatattaaaaaaaaaaacaaagttttgtatgtttttattactttaactattgttataaaaagcctgccatttttaatatgtggtttgggggatttttgtttgttgggggttttgtttgttgttttggttttttttgggcaaaaaaaaaaaaaaccttgcttttagtgtttgtactgctgctggtcaggacattaaaatattgaagtgtttttaaaaattaaagaagaagaaaagtaaaagagcttaccactggcgcctatgcgatcacttcatttttagtttgagttgcaccagaagctgccgtagaaagccatgcgctactgcttacctcctccactccccctgcctgcccccagcatctggacaagctaatagcaaatattacccattgctatcaagggaggagggggtagtctgtagaacccatgtgtgacagtcatgtgcacacatgggcgggggcttttaaaaacctttcaggaagtcaatgatttctgtgattgatataattctaaggtgtctgagagcaggtacagaataggaacttcagaggctttgtttaaacgcaaagctttgtaaaagccacaaggtctgagctgaacccctcctttttgaacttactgtgacaagcacaggaacggtcagaaactgggctcatcacaccaaggcaaagcaacgggcgagtcttcctccttgtcctagttactgcctatggaggcagtgtttagatcaggaaggcctctcttgctcccaagggccctcaccagaggccagggctgccagtcactggtctggggggtggaggcctgagctgagggcagggtgcctgacctgtgtgccggctgctcactgctgtgaccagcagccgagcccttggccctagcccttgctgcgcagaacagcttgctggcagctggcatcgtgtcgctttatctgcccccgcacagtttgctttgtacgtctgccaagaatcttccagttattagcaaactcagacgaatgtaccgccagtattatcagcagtcaacaagcaccttcctctccacagaagcagctggaagagaactcgaggggctgtgctgcaggcctcccctcgaaagacactgggaggtcaacatgttccacaggtgttcagagggagtctgctacaaactatcagggcaaaatctcactggatttctccactgaaaacctacttgaggtttctggtctgaaggcttaagagtcccatcttagcacttccgctctcaggcctcctcctccatcacagatgtctggatgcttttggaaatggccttggctaaagtaaaagggaaaagtagatccgataacttaaaaacgtagctcatcccttaccatccaaggggcactcccttggttggattttctatgacagcacaggggacaggtggcacaccatgagaggtctgcccagggtgggagcagtgtcactgtgctagcaatagttggcttctcccctgtcagtggaaaccccacttctgcccggcccttgagcttcttgcccactgtctccccatccttccacctacttgtggcgatctgagtactctactcttgctcaagaagtaatacgacaatcagaatacaaaccagtaaggcaacacgaataaactaagaaaaaggtaagaactgtctcaaaaacgaaagcacaccacccaagacacagtacccagtcatggtttccccatccaactattagtttcatactttgaaaacttactttcagattattctcaaagaacacagtagcacctaaatctgttttcaattgggcttaaaaattgacatgcaatctcttaagtaagttttttgttcagctacttcacactgagtacctcaaatctgctctggagtcaattatgccacctgtgtgtcaggatgcacgtgaaagccctcggctcggtccttagaccatcttcctacattacctggaagggagctgccatctgtccctctgcagagggataccttccaatagtaaattatctggttcctcactgaaacaagttatttttgcttcatatagtcagagtcagactgacatgataaaatatcatgttcctaatctgttgtctcagataagtgaccaagacgggactttccacattttagtctacattctaatcttaaaggaataaagcactgaattgggactaacattctgataggttgcacccttaagagtattcagagagcatcaaaaggagcccacaccttcagcagtgaaggattctaacacagggaatctgcagtttgtagcagaatggtattttcctcaagtagctcataatactgccaaatctcaaaagttaagctgaatttcacaccagatcctacccctttccctgagccacgtgtttcacacaagtgtagaaaatgccagggatccaccacaagatggagatggtcagcacaaaccgattctgttcctctttaaagtgtatattagccacttagcaatctctatattctttcaagtaaccaagctgttgactttcttactacttgcagtagcctgtccccaacttttccatccagtgcttaacctaaaaaactccttaactctgccttgacctgaggaagaccatgctaactggtgttattttgtatgtaccctgtgcttaattctataacagtaaaccccatacacaggtgggagggaggaacaccggtgcctcggtcactctgggggcagtttagatgctgtgaaattaaacctgttctaagtgtacttgtttgaattaattgtattgtaatattatttgttgaatgtagtaattaggtatttatgaatatattgctgtaatttctgacaacatccaaaaaataaaatcttcctaaattatgtt

SEQ ID NO: 814 - DNA, 649 bp, Homo Sapiens
  misc_feature (619)..(619): n is a, c, g, or t
  misc_feature (639)..(639): n is a, c, g, or t
  misc_feature (648)..(648): n is a, c, g, or t
gggggagaaggcagcggggcggcggcggcggcggcggcggcggctgtggaggccgcagtccgggtcctggcttcggcctcagccccaccatggtgacgcttgctgaactgctggtgctcctggccgctctcctggccacggtctcgggctatttcgttagcatcgacgcccatgctgaagagtgcttctttgagcgggtcacctcgggcaccaagatgggcctcatcttcgaggtggcggagggcggcttcctggacatcgacgtggagattacaggaccagataacaaaggaatttacaaaggagacagagaatccagtgggaaatacacatttgctgctcacatggatggaacatacaaattttgttttagtaaccggatgtccaccatgactccaaaaatagtgatgttcaccattgatattggggaggctccaaaaggacaagatatggaaacagaagctcaccagaacaagctagaagaaatgatcaatgagctagcagtggcgatgacagcagtaaagcacgaacaggaatacatggaagtccgggagagaatacacagagccatcaacgacaacacaaacagcagagtggtccttggtcctcttgaagctcntgttctagttgctgaggatncaactcagna

SEQ ID NO: 815 - DNA, 511 bp, Homo Sapiens
gctgggaccatctgctgggtccctcaggtgctatgccatgccgggcatgtgatgccgtttatctcactcagtcttcacaaacccatgagagatgcagtattattccctttatgcagatgaagaaactggggttaattgaggttgagtaccttgcccagggtcacacagtaagcgatagaacctggattcaaccccagtctggagccccatggtgcgtcacacgtatgatcatcctctgtcttgtatgtcttgtttggaaagggttggaaactcttgacatgaggaatggttgttattaatagcaggttttgaggaaaaccttctagaagagtcccagtatgggaagtggcagaggagacccctgcctccaacaaccagaatgccaggatgctcgagggaagacagacacctgcctccaccctggagcaagatgccactgactaccgcctccgaagcctgcggaaactcctggctcagcccgggaggcctgctggccccttctccaagcgga

SEQ ID NO: 816 - DNA, 457 bp, Homo Sapiens
tccatttcagctctttcactgggtacccaggctgtattttaagaaatttttgtgaaatcaacagcatatatattattaaagcaagtattttctgtccctagtctgtggtccagggaatgagcaataagatacaaatgaacggttgacaccataccataaagattaggaataagcatatcataaagattagcaataagttggatcatgattttacagtgagctcggttttagtaagccataaaaaggattttatggtgaaacataagcttaatataatctctttatcatgttccccctaataactgttcattactgcttcagttcattttgtttacacttgtcacatacatctctacagtacacagacacagacttatattttctatacattttttagcattgagttgcctttggatcaatatagaattagtagggatcagtgcaggaaataatatta

SEQ ID NO: 817 - DNA, 844 bp, Homo Sapiens
  misc_feature (656)..(656): n is a, c, g, or t
catgcaaaagtgttgttttttattttctttcttgggccagctgcagcttccaaccaagaaaacctcaaagcattagggaaggagcaggtgtggggctggggtggggagaatcccctaagctccagggcccagggtctaacctgagaggtcggggctgcaggaagctgggggaggctcccggggctgggggaagaggagcctgcccccagcagaaacagcaggtctcagcggctacatgtgctttagagcttggctgggggacaaaagtgggagagagagagaaaccggcctcatgactcagctggtcaggagatagggggccagatgctgaccccaaatccccggcagcacccctagcaaataggtctgtatcaaagattctgtccagctggttttgggggtgaagggcacctatgggggcttaaataaatggacagggggcaagggatgtagcgagaacagagggtgactgtccggccagcagcctgggcctctggcgcccctgcatgctgacccccggtgccacctgcccactgtggcccgcgggactccccagatgggaaaggagggaagctctccagcaagtctcggccccacctctctctgagcagatgggacaggaagacgggcactggggggggctggtggggctttanccaggtccttctcatcggccctggatggtcttcttgatgcgcagcaaccaatgtggtgagccaatggtccagccgggaagatggagtcgattccttcaaccacctcggtggagtggccacaattcggttcttgtggggccttaacatttttttatcaacctgcattcccgggattcaagaaaagtggg

SEQ ID NO: 818 - DNA, 426 bp, Homo Sapiens
ctttgaagggatcctggccttctactcccaggaggtacgagacctgttccagatgaagctttttgtggatacagatgcggacacccggctctcacgcagagtattaagggacatcagcgagagaggcagggatcttgagcagattttatctcagtacattacgttcgtcaagcctgcctttgaggaattctgcttgccaacaaagaagtatgctgatgtgatcatccctagaggtgcagataatctggtggccatcaacctcatcgtgcagcacatccaggacatcctgaatggagggccctccaaacggcagaccaatggctgtctcaacggctacaccccttcacgcaagaggcaggcatcggagtccagcagcaggccgcattgacccgtctccatcggaccccagcccctatctccaagaga

SEQ ID NO: 819 - DNA, 937 bp, Homo Sapiens
tcctgagcgggagaggctgtcaactgacccgcccattgcgttaagtgattggccttcttttctgcgcgcgcgtcggcaggctgcccagatcagtcctgccccgccccctcggagtcccgttcctcgtctccctcggtgttcgacgtcgccgcatgccagccgaccgatacggccggcggagacgaagactgctaacggggctgctgacatgccacactatgtcacggaggcatgcgcacgacgtgcgtctgtgaacgcaggtgaccaactcctgtacccatatcaaagtctcagaagagacatctggatgctccagcttaacatgaactgtacatggtgagcttacgtgagtccgaactgggaacccgccccagagagaagatcagcaagtaatcatgtctagcgtgtgaagcggtgaaccctatcactaaatgttcccaccacaaaacgaggaacacaacatagtaacgcgaaaaactcattgtggagccatgaaagggacaccaagtacctatatgtaacaaagcaaaatttacagattgacaatatctcccgtaggggaaacctttgaattagcacacgttaaacgaacgagcaaatggcaccagggagagtgatacaagatagaagggcacatagggctcgaaaagcgaactgaatggaaaaaaacgctccttcataccaaaaatagaaaaagaaagtatagggtagagaaaaagtggaaattcccaaccaaacaggaagatccagtcagaaaacacgccagaagagatttaaagaaagccaacccgtgaaaatcccgtaacacaaaattaaagccaacaacctctcacagaaacatatggggagacacgcctccttgaaagggccccacaattccaacggaaacagaacgggaaacacagagtacacctaattggaaatccaccaacaagga

SEQ ID NO: 820 - DNA, 847 bp, Homo Sapiens
ttaggctaggtacgaggctgggtggtgtttaacttggacacttcctccaaacaccccaggttcctttgcccaacctcctcgaatacagcctctctgggagtttccctctccccgactcagccgcgctggtccctgccttttcagcgctacctgccctccgtctgggacctggctcctttcctctcgccggtgtttcctctgccacccgctggaggggagtggctggaccccagcctccttgcctgcctgcccctgcctccccgcctcccctgcctggccctggctctgggcctgctgcaggctgcacctatgtgctgctggtcctggaggcctgagggcgaccacaagcagcctccgcctcctgctgctcctggactattctgctgctgggctagtcaggctgtgtgacccgtgacttgcgccctgtgcaagtggcttcgctgtgtgcgacgctgtctgccattgtggctctcgcttgtagcatgcgaagaggagagtgccagccgctgcatggggcccgggctcgggcctgggctgggggcctcctgaaaaaagccgagaggcgggactggaggcagtcagctgcccagcgggcaggacacggggtcccggcgcggaggatatacgggcgccagcatgggcttggatgcatagctggaaccaacatacgactgacaaggcagtacagacacagggcctggtctgaaaccaccatggaggtccccaatccaaaaactcgggagcccaaggcctacgatatccaacttgggacatcgcgctgtcgtgcatagtgggggccaacgatacatgactagaaaacgtcaagggcctggcacaaaaggccggc

SEQ ID NO: 821 - DNA, 228 bp, Homo Sapiens
cggtgcctctgcagcaagcgtggggcgcgggaacccgagcaggactctccagtcctcagtcaccttggacaaagaagtgtggatcctcagattccatcttttccaactccaaggtgccatggcagagaaggtgctggtaacatgtgtggggctggctacatttggcagccacacggtgcttggagctgctggaggctggctacttgcctgtggtcatcgataacttcc

SEQ ID NO: 822 - DNA, 228 bp, Homo Sapiens
tttttttttttttttttttttttttttttttgggttttctaataaacatttatttcaagggttatttgttaaacatttaattggtgagatttgaaaatgaacattattatttattagacccattttataggctcattcaaaattcttaacttttgagttcctgctttcttcacagcagggcactcactactttctggtatacaagaagaacagcttggccccactctt

SEQ ID NO: 823 - DNA, 697 bp, Homo Sapiens
tcaagcacagctatccatcagatgatctactttcagccttcctgagtcccagacaatagaagacaggtggctgtacccttggccaagggtaggtgtggcagtggtgtctgctgtcactgtgccctcattggcccccagcaatcagactcaacagacggagcaactgccatccgaggctcctgaaccagggccattcaccaggagcatgcggctccctgatgtccagctctggctggtgctgctgtgggcactggtgcgagcacaggggacagggtctgtgtgtccctcctgtgggggctccaaactggcaccccaagcagaacgagctctggtgctggagctagccaagcagcaaatcctggatgggttgcacctgaccagtcgtcccagaataactcatcctccaccccaggcagcgctgaccagagccctccggagactacagccagggagtgtggctccagggaatggggaggaggtcatcagctttgctactgtcacagactccacttcagcctacagctccctgctcacttttcacctgtccactcctcggtcccaccacctgtaccatgcccgctgtggctgcacgtgctccccacccttcctggcactctttgcttgaggatcttccgatggggaccaggaggaggcgccaagggtccgactctctggtggcacaattaccactgggctg

SEQ ID NO: 824 - DNA, 457 bp, Homo Sapiens
gcctggtggcgaattcggcacgaggatgagcccgccgagcccgggccgtcgacgggagcagcgcacttcgcgagccgccgacacacatggccacgccgctgcccggacgcgcggacgggcccgccacgccgctgtcgcccacgcgcctgtcgcgggtgcaggagaaggaggagctgcgcgagctcaacgaccgcctggcgcactacatcgaccgcagtacgcgcgctggagctggagaacgaccggctcctgctcaagatctcagagaaggaggaggtgaccacgcgcgaggtgagtggcgtcaacgcgctgtacgagtcgaagctggccgatgcccggagagtcctggatgagacggctcgagagcgtgcccggctgcagatagagattgggaagctgagggcagagttggacgaggacaacaagagcgccaagaagagggagggcgagcttacgg

SEQ ID NO: 825 - DNA, 510 bp, Homo Sapiens
gcggccgcgcctgcctgccccacctcgtaagggcctgtgacctcacgaggccagccgccgggcgctgcattcgagcggtggggctcctgtccgtgcgctttcctcccgcagccccggccgggattccgccctccgtccttgccacccgctcgccactcttccctaatcgctgttcattctccggtgcgctgtcccgccatggtctgaccccacttcaatcttaccttcggtccgtcctttgaacaccccgacccccgacccctttcttccaaaacattccatccttcttggcttctgctactcaataatggacagcagctcgaaggccatgtgtcccacggctttgctgaaatttgtctcgggttgcctttaaggagactgtcgtttccttttgaaagagatactttggttggtttggttttcttctgtgtgtttgtttttcctatgtatttatcgtatgcagttgggcaaaatacttaacgctccctgagtctcgattttctcattctt

SEQ ID NO: 826 - DNA, 787 bp, Homo Sapiens
ttcgtcagctggtgctcactgcgccgcgccagcgccagccgggactcacccgcagctccatgcttgtgcccggttcgactcgtccatcctccaagaagaggcagcccatgaggctcccagtccccactgagtgccaccctgaaggatgtcccagctctcctccaccctgaagcgctacacagaatcggcccgctacacagatgcccactatgccaagtcgggctatggtgcctacaccccatcctcctatggggccaatctggctgcctccttactggagaaggagaaacttggtttcaagccggtccccaccagcagcttcctcacccgtccccgtacctatggcccctcctccctcctggactatgaccggggccgccccctgctgagacccgacatcactgggggtggtaagcgggcagagagccagacccggggtactgagcggcctttaggcagtggcctcagcgggggcagcggattcccttatggagtgaccaacaactgcctcagctacctgcccatcaatgcctatgaccagggggtgaccctaacccagaaagctgggacagccaaatcagacctggcccggggatttctcccagcctccggacctcagatagctaccggatagaccccaggaacctgggccgagcccaatgctggcccggacgcccaaggaactctgcaccttgaggggctctacaagaagcaagtggcctgaatacctggtcgataccgggaatttggcggagggcgggcacaggggccccaggccaccaaaagc

SEQ ID NO: 827 - DNA, 333 bp, Homo Sapiens
  misc_feature (228)..(228): n is a, c, g, or t
  misc_feature (237)..(237): n is a, c, g, or t
  misc_feature (262)..(262): n is a, c, g, or t
  misc_feature (302)..(302): n is a, c, g, or t
  misc_feature (329)..(329): n is a, c, g, or t
ttttttttttttttttttaaagaatattgatcttatttatttgttttttgggttgataaataaagctaaatttaaaaatctgtaggtaatacactgtagtgggcataaatatttaagatcagtaaaggaaatcatcaaactattgtcattcatacatgaaacgtacaaagcaaatagttatgatttaaagattttaatacataattaaaaatcaacaattattacatngttatatancattgatactgttaggatatgtggntgtatatatttttctttccagtaaaatagtttcatgcttntaaaagtcaccctgggtcaacttgggncaag

SEQ ID NO: 828 - DNA, 765 bp, Homo Sapiens
tattcctttcgaggacaaacaattaaaccacatccaaggtcttaacttacagacagaaaccaaagttgccatttaaagcgtgagatattgtatacaagacatacactggggagaatgcttcaccatctgaagctcacaccactatggcccaatggacagctgtgcactctgcttgtgcttaagagcctggttgcggctgatgggaatgcgagtctgcataacaaaagaacagttgggttgcacatgcactgaagcattttatactgcatgggggggtatatattcttatgttgaagggaataggggaaatcatcaaagtccctcccacagagcattatgtctgcttgcatagaaacaccggagagaaagcggactcctctttgctcacgctcggtgaattctctgcagaccttggcagcgtgcttcagcacggtgtcctctgaactggcgccatggctcaccggaaaaggcattcgttcatcaagctcatagaggtggccatccacgttgctaaacagaataaaatggaaattcaccttgtcatctaccagacattggccttactgtgccacggcatcatggggctgtctgtatggcctcatttccttcaaagcatcttgctctgtctttaggaggacatttctttggtttaagaaagaaaactggtgcagacttatcccttgttaaaatcccagttggtctttgatatttggcccctgccggaattagggcccaatgggcccaaggaattccccaatggctgct

SEQ ID NO: 829 - DNA, 612 bp, Homo Sapiens
  misc_feature (238)..(238): n is a, c, g, or t
ttttccagcccccgcctggactggcccatcgaacgactggcgctcacagcccgggtgcatggtggggctttgggtgaacatgacaagatggtggcagcagccaccggcagcgagatcctgctatgggctctgcaggcggaaggcggtggctccgagataggggtctttcatctgggggtgcctgtggaggccttgttcttcgtcgggaaccagctcattgctacaagccacacagggncgcatcggggtgtggaatgccgtcaccaagcactggcaggtccaggaggtgcagcccatcaccagttatgacgcggcaggctccttcctcctcctgggctgcaacaacggctccatttactacgtggatgtgcagaagttccccttgcgcatgaaagacaacgacctccttgtcagcgagctctatcgggacccagcggaggatggggtcaccgccctcagtgtctacctcacccccaagaccagtgacagtgggaactggatcgagatcgcctatggcaccagctcagggggcgtgcgggtcatcgtgcagcacccggagactgtgggctcggggcctcagctcttccagaccttcactgtgcaccgcaagcc

SEQ ID NO: 830 - DNA, 224 bp, Homo Sapiens
aaggccagcagataaaaaataatttttaaaaacctcgtgagactgatttgccgcagaccgggaggaggaagaagcaagcgtggaaggtgctaacggaggaacctaaacctccatcctctttccctgggaggttaagaactacagggagaggcgagagagactatgaccgccctacggctagagtagccacgaagagaacacttccggggcggggctatctggcc

SEQ ID NO: 831 - DNA, 1086 bp, Homo Sapiens
catagttatagaataacaaggttataggccatctggggaatgtgatggaactatcaccaagtagtaattctgctggaagaataaaataaggctctctgagtacgaatatacaggaaggaattatttaaaataggtatgatgtacaatcacatgacattgtattaagcactcaaaaacaggcatattaattaaaaagccagctaaaaggcatttgaacatatataacaaatcttacagtccacaaagttcatgtataacggtaattttaagtacttcactttcaaccacagaagaaagtgaacaggtgagggatgcctctcaaagaatattaactttagtgtctatgacaaaaactaataagagctttacattgaaaatggacttacactagctgatagaaccatgtagtggacagggcaaccacacttaaagacaaaaccaacagtgccgagcaagctaacaacagtactggcctttccaatcctctttctttcctggtaccaccacactgtgccaaattacctcttcaattacccaaaatcatcagaatcttgctggttttcccagatcctcaaaaaggaatgacagagaaaccaatagagcaaacctcaaccaagatgatttttaccagttaaacgcgtcaaatgtggcttaaccaagtacaagagaaacccaggatgcatacatagtgctccattcccatgggaaggaatagacacatcaaacattatccaacaggggtttctgtatggatttgtgtacatggggtatgaaccgagaaatttactgtcttctgagaagggcccccgtactctgactgattttgaggggctaaccacgaccattggtctccatagtaggcatgtccactaaagctgtcctacggtatacacgtctatttaagggggacgagcccaaaacgtagcttctaggacagatgttctatccagataccctagaaagtcaatgacagttccctattaaagaattcttagcggttggttgagcacagaatgccaactatgtcctatgtcggtaacaaacgagtaaagcacaatcaaggggtgggttcacgtcaaactagga

SEQ ID NO: 832 - DNA, 377 bp, Homo Sapiens
  misc_feature (236)..(236): n is a, c, g, or t
  misc_feature (302)..(302): n is a, c, g, or t
  misc_feature (339)..(339): n is a, c, g, or t
  misc_feature (346)..(346): n is a, c, g, or t
ttgagcagggaaacactgaggtcaactacaagccacaggccctttccccagcctcagttcacagctgccctgttgcagggaggcggtggccttctgttgctagaccgagcctgtgggatataccaaggcagaggagcccatagccatgaggagcctcggggccctgctcttgctgctgagcgcctgcctggcgttgaggctggccctgtgcaacgccgcccgacaacatccaagtncaggaaaacttcaatatctcttcggatctatggggaagtggtacaacctgggccatcggtttccanctgcccttggttgaaagaagatcattggacaggattnacagttnagcacgttggtttttggggaagaagggcgtt

SEQ ID NO: 833 - DNA, 460 bp, Homo Sapiens
ttttttttttttttttttttctgaagtacaaacatttaatattgcttaaaaaaaaacaggcatgtttgggtggcagggaaatgaaatgggggaatcccacactgttacctcccaaacccaaggcttacatgcaataggatagaatggtataaaagcccttttatactgggggttatacaaggaattgaagttgattgcttaaaaaaagaaaaggatttgactaagggcagggtttaggtgaaagtagtaactgtaggcccatttctggagctggctttcatcaaaagtcaatttggcaggtgagcatccaagatgaagtgtccttattctccacactccatccccctaattcggctcttacaatctcacgcgccttcctcttccaagatggtccctgagcctttaggcagggaggttggggtgaacatgctgcatcaatgtgttttctacttttttaagc

SEQ ID NO: 834 - DNA, 601 bp, Homo Sapiens
  misc_feature (513)..(513): n is a, c, g, or t
  misc_feature (531)..(531): n is a, c, g, or t
  misc_feature (553)..(553): n is a, c, g, or t
  misc_feature (566)..(566): n is a, c, g, or t
tcatgactctacacagataccatgatgagagtatattaaagaaatttaggaaagcacctggttcctttctccccatgcctgccttctgctccctccccagctggtttgggctcaaattgtccctggagactagggtttatgttagggtattgatagattagagcaggtggttgaagagatcttctctggtcagacttggaagaatttccaaaagtgaagttagccccaagacttccctagggttgatgtactttatgatccagatgctaaacttcttagaatgaaaatatgcttcaacacttaagtagcatacactgccctacaaacctcagagagcacttttccccaagttcttgtttttatttttgaaagtactcacacagcacttactatgctccaaacactcctctaagcactttacacatattagctcattcagtccccagacagacgggatgaagtaggtattgttactgttcccattttacaggtgagagatttgaagctggggangctagtaactcacccaangtcacacggctcatacatggtnggactgagactcngatgcaggcatttgcacctcagctggatctaacat

SEQ ID NO: 835 - DNA, 537 bp, Homo Sapiens
  misc_feature (139)..(139): n is a, c, g, or t
  misc_feature (267)..(267): n is a, c, g, or t
  misc_feature (269)..(273): n is a, c, g, or t
  misc_feature (312)..(312): n is a, c, g, or t
  misc_feature (320)..(320): n is a, c, g, or t
  misc_feature (326)..(326): n is a, c, g, or t
  misc_feature (334)..(334): n is a, c, g, or t
  misc_feature (349)..(349): n is a, c, g, or t
  misc_feature (359)..(359): n is a, c, g, or t
  misc_feature (361)..(361): n is a, c, g, or t
  misc_feature (367)..(367): n is a, c, g, or t
  misc_feature (376)..(376): n is a, c, g, or t
  misc_feature (384)..(384): n is a, c, g, or t
  misc_feature (393)..(393): n is a, c, g, or t
  misc_feature (397)..(397): n is a, c, g, or t
  misc_feature (403)..(403): n is a, c, g, or t
  misc_feature (417)..(417): n is a, c, g, or t
  misc_feature (419)..(419): n is a, c, g, or t
  misc_feature (437)..(437): n is a, c, g, or t
  misc_feature (441)..(441): n is a, c, g, or t
  misc_feature (450)..(450): n is a, c, g, or t
  misc_feature (452)..(452): n is a, c, g, or t
  misc_feature (456)..(457): n is a, c, g, or t
  misc_feature (459)..(459): n is a, c, g, or t
  misc_feature (470)..(470): n is a, c, g, or t
  misc_feature (472)..(473): n is a, c, g, or t
  misc_feature (475)..(477): n is a, c, g, or t
  misc_feature (480)..(482): n is a, c, g, or t
  misc_feature (485)..(490): n is a, c, g, or t
  misc_feature (492)..(492): n is a, c, g, or t
  misc_feature (498)..(498): n is a, c, g, or t
  misc_feature (504)..(504): n is a, c, g, or t
  misc_feature (508)..(508): n is a, c, g, or t
  misc_feature (512)..(512): n is a, c, g, or t
  misc_feature (514)..(514): n is a, c, g, or t
  misc_feature (521)..(522): n is a, c, g, or t
  misc_feature (528)..(528): n is a, c, g, or t
  misc_feature (531)..(531): n is a, c, g, or t
  misc_feature (534)..(535): n is a, c, g, or t
cttgacagagccaggcttaggagcaacgtggctcaacgtatgtgacttctaaggactgccttccttctgatgaacttgtcctctcaaacctgtgcacagtgggactgtgcccagaacgcccgttactagtctcaatggnatggttccctgacctagaagggaggctgctttttactgaaggccaaagcaatggaaggccaagggtgaccaggtgctcagctttttcagcagtttcatttttcatactgtcagctgaagacaaccaanannnnntttcacacacacacacacacacacacacacacacacacngggtgttntctcantgaaacangtttttctcagtganggggctcatntnagggtnccccccccngtggaaanattttaatntganaatttnttcccccccccccntngggaattgtgaaaattcnaaanggtctccantngggnntnacccgggtggntnncnnnaannnggnnnnnncnttctcntctctntctncccntncctcctnntttttnccnctnncc

SEQ ID NO: 836 - DNA, 510 bp, Homo Sapiens
cttttataccttcgatctttatttttatacgagaactctcttttcacccccgtaagcacaggcaactgattctccaatgtgaaatatccttagaaaataaaccaatttcctgtgtaccaattaaagctcacagtaacaaattttataagaagaaaaggctgtaattttattttcaaatttttggaagtttttcagaaaaaaataaaatgacaagaacacataaaaatattgaaattattcattgaactataaacacttagcagaggaagggacttttgatgtatttgaatccacctccttctgaaagcaggaatcacttctaaatgtctctcatatctttcttcaaggagtggttttccaggaggttcccagcctcctcaaatctttcccaagtttgatgcacttcacctcataaaaataatatatatatatatatatattttttttttttgagacagggtcccgctctgttgtccaagattgagtgcagcagcatgatcaggactcact

SEQ ID NO: 837 - DNA, 676 bp, Homo Sapiens
  misc_feature (554)..(554): n is a, c, g, or t
  misc_feature (610)..(610): n is a, c, g, or t
  misc_feature (624)..(624): n is a, c, g, or t
  misc_feature (638)..(638): n is a, c, g, or t
  misc_feature (644)..(644): n is a, c, g, or t
  misc_feature (658)..(658): n is a, c, g, or t
  misc_feature (667)..(667): n is a, c, g, or t
  misc_feature (672)..(672): n is a, c, g, or t
aaactgtggggccttattacctttgcagtaagttatcttcttcatgatatatgtgaattattttatgtgcagattgtgttttgggattgtcagatctaaacttatattcttgctggctaatgtgctgatagccaggtctgaaacttgatgtgctatccagacacatatgatcagaaaagatctagagtgcaaagaggtgtctgaggagcaaaatgtggttttaatgttgtggaaagatcacttgcaagtatataagactgtataaagaagaggactgtgtgcaagtggggtgaaaaaaaaggatacgcgaatgtgcatatgactgaatagggaggaaggtcagggctagaaaggaggctacataaaaaggggcaatggagagtgcacaggaaagacacaggggaaggtcaagtcgagcaaggtagaaacaggagtagctagagccattgggaatccattttgaaacaagaaggagttttgaaagggaataggaaagtaagtgtcttgaagtaaaagataatatggatggagaaagaagaaatctggatgatagngatgataaaattttttaagaatgaagcaggtcagtgttgaatggaaggatttccanatttaagaaggganttcccttggaagantgcccnttgggatgccttcntcaaatgtnggagngttt

SEQ ID NO: 838 - DNA, 605 bp, Homo Sapiens
tttttttttgctaataacagtcttttattatttatattcctgcaatagtaatagcaacatactgtacttgcatatatcacattttatccaaggacctcaaagtcattctatcaagcagcacggtgttggaaactcaagattccacagcatgttaggtatacttacttatggaataggaaatagattcccaacaatagagccaaaataaaagaccaaagagacaagcctatatatttctcgtggtttataagtttctgaatttccaaatttgccactggtattttaacctacctacaatgttgactctactaaaattgatttttacatgtcaggaataagatgaggatcaacgaacaaatgcacagtctgtcttttctatagttcaatagtccatctttgaatagcacataatggaatgtcagaagtggttttttaataatgtatgtttacacttcattgatttataacaatcatggctatggttcttgggtagaggagaatgttttatactggaatgacatacatatgtaggtaaaatatgatagatctatatattttagcacatctacatttaacacaaaagcaaaagtgcctcaatccattga

SEQ ID NO: 839 - DNA, 10476 bp, Homo Sapiens
ggatcctccctcctcggcctcccaaagtgccaggattacaggagtgagccaccacacccagccccatctcttttcatcatggtactaattcctgcccgtccacccacaaaagcactgtagtcgttcccgagtatagaggcctgtgagcctccactagggagagggctcctgcagagatcagataaattgatcacaatggctggggtggtggcaatgtgctaatgctctctttcttccactcaagatatcctctgtctccctcagcctgtgagctttttctccagtgtgctctgccagtgggggccctgcctgagagcccctgcagctgcagaggacagtttctttctgctgaaccatcgcagctatgccccagcccctaccctggaggggtccccaggggccatgggcagcacctcctgtatagggctgtctgggagccactccagggccacagaaatcttgtctctgactcagggtattttgttttctgttttgtgtaaatgctcttctgactaatgcaaaccatgtgtccatagaaccagaagatttttccaggggaaaaggtaaggaggtggtgagagtgtcctgggtctgcccttccagggcttgccctgggttaagagccaggcaggaagctctcaagagcattgctcaagagtagagggggcctgggaggcccagggaggggatgggaggggaacacccaggctgcccccaaccagatgccctccaccctcctcaacctccctcccacggcctggagaggtgggaccaggtatggaggcttgagagcccctggttggaggaagccacaagtccaggaacatgggagtctgggcagggggcaaaggaggcaggaacaggccatcagccaggacaggtggtaaggcaggcaggagtgttcctgctgggaaaaggtgggatcaagcacctggagggctcttcagagcaaagacaaacactgaggtcgctgccactcctacagagcccccacgccccgcccagctataaggggccatgccccaagcagggtacccaggctgcagaggtgccatggctgagtcacacctgctgcagtggctgctgctgctgctgcccacgctctgtggcccaggcactggtgagtctcccccagcctcccctctcctaggcagctccaccactcactgagcactgctttgtgctaggcattaacccaagtctgtcctcattttaaagacaaggcagctggggttcagagagggttcagagcttatccaaggtcacacagctggcgggtccaggagcaggtggaacccagagctgtctgacgtccacatgtttaatggcctcacactcccagcaaaactgggtctagagggtgggtgaaatcatgatgccaggtgtgtagcctggatcctgattaaggttgctctggccccaaaccacagctgcctggaccacctcatccttggcctgtgcccagggccctgagttctggtgccaaagcctggagcaagcattgcagtgcagagccctagggcattgcctacaggaagtctggggacatgtgggagccgtgagtaccaccaaggatgcatggcaactgggggtctgaaatgaagggtgctgggtgggctctggatgggcaggaggagagtggagcccccataggggatggatgagatgaaatgggatgagatgaaatgagataggataaaatggaatgggatggatgcgatgggatacgatgacatagaatagatggagtcggatgaatgggatgggatgggatggatgggaggggaagggataggataggatgacatagaataaagatggatgggatgggatgggatgggatgggatgacacagaataaagatggatggattgggatggatgaatagaagagatggatgggataaattgatatggatgagatgggacaagttgggctggtgggcagctgcatgtgccttggagtgctctgttggcctcttcctaagagaacctccccattggagctgggagcctcccccactcatgtgtcctccaccttggggcccctccctccccaggatgacctatgccaagagtgtgaggacatcgtccacatccttaacaagatggccaaggaggccattttccaggtaatgatgcccagatcctggatgaaggttggggcccaagagatgagggacagagcagggaagagctgagccccctaaaggggccatttccaggctgaggaggaggcctgggtgcctgggaagtcccagctcctcctggctgggagcaggtcatggccctgagctcaatagcacagccagagatggtcttccctgaggggaagggcccctacatgtgcccaactacttaactccttggcactcgtgaactccagcaccctgggggattaggggtcagtctgccctggtggggccttgtgtccagggacttgggcggggtagacctcagagaggcccagctgacggccccctctggcctcccaggacacgatgaggaagttcctggagcaggagtgcaacgtcctccccttgaagctgctcatgccccagtgcaaccaagtgcttgacgactacttccccctggtcatcgactacttccagaaccagattgtgagggctgcaagctcacctcctgcctgcctccccacgcaggcccctgtgcccacccatgggggagccacacacacagcaccccagccagccagacacacacacacacacacacacacacagcacccaagccggccagacacaaacacacagcaccccagccagccggacacacacacacacacacacacacaacaccccagctggccggacacacacacacacagtaccccagctggccggacacacacacacacagcaccctatccagacacatacacacacacagtaccccagccagctggaaacacacacacacacagcactccatccagacacatacccacacagtaccccagccagccagacacacacacacacacacacacacacacacacacagagcacacacacagcaccccagctggccacacacacacacacacacaccctgtccacaaagggcctaggaaactacgtgcccttcagccatgcacccgaccatgggcccccaggttcaggtgcacacggtgggcctgtacgctcacacacccttacaccctcactctcacacacatgcttacacacttattcattctcacatatatgctcatgctcattcacacacaatcccgggccacctgccctaaagtccccacacagccctatctttgccttttgtccccccacatagagttctaaaccacagcacccccactaggcctgcttcctcccattccagtggtccctgagcccttgggccggcctgaataggggtgggcttccctcccagaccctaacactcccaccctgtgctgtgccccaggactcaaacggcatctgtatgcacctgggcctgtgcaaatcccggcagccagagccagagcaggagccagggatgtcagaccccctgcccaaacctctgcgggaccctctgccagaccctctgctggacaagctcgtcctccctgtgctgcccggggccctccaggcgaggcctgggcctcacacacaggtgagggaggcccccacagccagtaaagtggagatccagagggctagagccacctccgaagcccatgggcactgggccctgggagaggcagagccgggaaggtgataggaagctccaggcagggcctaagggaggagggagagaaagggaggaagagagaggggaggagagcctggaggactcttctcccagcacccagcctggcctccacctgattctttccccaggatctctccgagcagcaattccccattcctctcccctattgctggctctgcagggctctgatcaagcggatccaagccatgattcccaaggtgaggcatccagggcctcaagagcccaggagcacacgcatacctgtagctccctgcagctcccacctctctcccaactcacacccccgtcagacccagctggctgccagaagttaggaggggagagagccgcttgtgcattgcccccacccagggaccctgggctcaggctcaggcctggtaggtgccaggtacagttcatgcaacaaacattaagcccccactgtatggaggtgccagccaggagccaaagtacaaaaacggacaagacgcagctttgtcctccagcagctcaccatctgatggagaaagatccccagaggtctctgtagaaaggttgctttgatctttcaagaggggaatttccacagatagattccccatccttgcctgagtccaacttggagtcttccagacctgcagtggctattgtccaatggccccgccagcccagggctaccttgcccaaattggggcccaaatgaggaaaggccctgccccctcagcctttcccagattgggttgcgtgggccaccaggggcacaaggcagcaggtgaggttcctgctgaggcaggtggttcacttgagcccaggagttcaagaccagcttgggcaacatggcgaaaccccgtctctactaagaatacaaaaattagccagatgtgacaggtgcctgtagtcccagctactcgggaggctgaggcaggagaatcacttgaacccaggaggcggaggttgcagtgagccgacatcacgccactgtactctagcctgggtgacagagcaagactctgtctcaaaaaaaaagaaagaaggaaagatcactgcagagattgcagtgagaggtgatgggacagggacggagctgagggctggcctggggatgcatttgggaggtgggcccactgctatgggcatggatgggcctggagcgtgaggaccagggaggactccaaagtgacttttacacactggccagagcaaccagccctctgtaatgccagcagctgagatggggagactaaagaagaaaacaggtttgagcaaaaaaacagagagctccctcctggccatgttgagttcaagatgcctgtgtgaagtgcaggagaggagagtcaggcaagcagctgaatcccaagcattgggggaaggtcaggtccaccatgtcagtctgagagtcactagctgtgggccagagcctttggggccagacgtaggtctgaagctggctcctacactcagtgaccctgtgtgagtcccctgcatcccctggactctctgatccccagtgtccttatttgtgaatagccttgccctcccttctagaagagaatgagggaatgcgtaggaagtgcccagctgggtgctgggcagagagtggaggcttgccaagtgaaggtcccatgctggcctctctccgcccccgccccagggtgcgctacgtgtggcagtggcccaggtgtgccgcgtggtacctctggtggcgggcggcatctgccagtgcctggctgagcgctactccgtcatcctgctcgacacgctgctgggccgcatgctgccccagctggtctgccgcctcgtcctccggtgctccatggatgacagcgctggcccaagtgagcccactgccccctccttagcccaatgcccgctctcctcctccccctaccctgccactgcatgaccctctccctctgtggtcccactgcaatgcaccaaggaggacagaaaccaaacacctctgtagggtggccttgcctgctttccccctaatgctcacatctccagggtcgccgacaggagaatggctgccgcgagactctgagtgccacctctgcatgtccgtgaccacccaggccgggaacagcagcgagcaggccataccacaggcaatgctccaggcctgtgttggctcctggctggacagggaaaaggtatgggctgggcacatggggactcatggtcagggcccgttcaaggcagaaggctgagcccaggaaaggctttgcagccagagacacctaggatgggccagaatggagcacagacaggcagacaggatgtggggcagacaatggtgggactgtaagttagggcagagcctgctaagggttaggagtcgcctctggacaaagggctgtgggctccagaggaccagcaggccctcttcacgggctgagtgagcaccaggcaagccttcagaggcctggttatctaccaggagatgagtaatgctagggccagttcaagccaggaaagggactagccttctctccagggtcctgatccctttactgcccccacactcctcaaggtgtgactcactcaggacaaacccattggcaaaaggagagggctggacttgaaggtcctagggcccttgccaatactcagtcaatgacaggaaattcccttttttttttttttttttttttttttgagatggagttttgctcttgttgcccaggctggagtgcaatggcacaatcttggctcactgcaacctctgcctccgggttcaggcgattctcctgcctcagcctcttgagtagctgggattacaggcatgtgctaccaggcccggctaatttttgtatttttagtagagacaaggtttcaccatattggtcaggctggtctcgaacccctgacctgaagtgatctgcccgccttggcctcccaaagtgctgggattacaggcataagccactgcacccggacaggaaattcccttcttaaagcgagatcctgtcctgaggaaagccagctgatgctcttcccaggaggcagctgtccacactgtgctccctgctcagcaactcccaagcctcccgactgcccatcacatctggtctcaaggaccagatgaacgttaaggttccttctagaactgaaatggaggtggagggaggggagggtggtggctgagattccacccctctgcctgagtcctccgtctccagtgtcgcctgcttttctgatggaagtcctccatttcagcctggctccagtttgttaagggtttcaactgcagccagaggtgttccgtgagggctgatggaggagtcgggagggagccctagagtgatccagagatgtggagaggcccaggaccacacgacaggagagtcctgcaaagggacctccacagctgtgtgtctccctcagtgcaagcaatttgtggagcagcacacgccccagctgctgaccctggtgcccaggggctgggatgcccacaccacctgccaggtacacccaacccctcccaagttggtcctaggacttcccttggctcccagagcccccaccctttgggcccgtgatcctcagaggcctcactcccctgggtccaaggtggtcccaggtgcacgggccagggactgggaggcacccctctctgtttcagtgtaaaaaatcatgagagcatggaaaagggggatgggaagggagggatggcctgaggagtgcggctggatgtccattataggatggggctgtgttccctggccagtgtgtgctggtggggtgggggtacaaagtgggtgttctggagtgaacatctcacctcctcaggctctaaaccctaaggcctgtggctcagggagtggccgaggggtctacagagtcacactggtagcacccactaggcgggaggtggagtgagtgctgttctttcccggaagagctgggtgtggggagctgagggggcccaggcctcagccctggtgctgtccctgtgacaggccctcggggtgtgtgggaccatgtccagccctctccagtgtatccacagccccgacctttgatgagaactcagctgtccaggtgagtccaggcccccagttgcggggaggtaagggggcaggtcctgaccatcagggcatgggaggcccttctgctccccaagcaggaagaggcggccactcctgccggctgctccatcctccctctcaccgcacagctggaggctcctgagggcttctggctggccatcaggaaaacaccctttccggaccccgagcactgccccgcccagaaccccagtcactgagtgcccaacccccagcttcccccccaaccccccgccctgccctgtcccaggcctccctctcagagcttgccccagggactctctggccctcagggttcaatgtattctgaccaaggccaagctttcctggggctcagggaaaatcacactttgctacccgaagctgtatcccctcagatgccaggaaggccgtgatcatctgactccaccctcctgagacacattctctccctgactgtcctgttctaagtcagcggagcaccttaggatggaggggtggaggcgaggccagatgcagcctctgtgaacaggtgcctggaggctgggaaatgaccctgagagggcaggacacagcaaccgtgggcttaaggtgaccttgagagcaagcttggcccactttacaattctgttcagagccagcccctaacatggtggtcatttattcatttgttccctcattttaaaaaatgtaaggccaggcatggtggctcacgccggtaatcccagcactttgggaggccgaggcaggcagatcacctgaggtcaggagttcgagactagcctggccaacatggcgaaaccctgtctctactaaaaatattttttaaaaattagctgagcatggtggcaggtgcctgtaatcccagctactcaggacgcttaggcaggagaatcacttgaacctgggaggcgaaggttgcggtgtgctgagatcgtgccactgcactctagcctaggcaacagagcacaactctgtctcaggaaaaaaaaaaaaaaaaaaaaaggtatttctttgctgggcgcagtggctcacacctgtaatcccagcactttgggagaccgaggcgagtggatcacttgaggtcaggagttcaagaccagccttaccaacatgatgaaaccccgtatctactaaaaaaaaaaaaaaaaaaaaaaaaaaaattagccagatgtggtggcacacacctgtaatcccagctacttgggaggctgaggaggagaattgcttgaacctgggaggcggagattgcagcgagccaagattgcgcctctgcactccagcctgggtgacagagtgagactccgtctcaaaaaaaaaaaaaaaaaagtagtgggtgcctgtggccaggccacatcctagggtaggggctatggctgagccctgccctcctggagctcacagccaagtccacttcttccatctgaggcggggaagccagccctgttcctgaaaccctgcatcacaagcccctgtgggaggcagtggggaggggaggtcctcccccactcagacctgacccacagggaccagtttaatgtgtccttgccccagtgatgacagctggggatctgggggtggggagtcacccaggacccgggcagtcgcctttccccagctcctagggctcccggccttccctgctgaaacagcaagaccagtgggttggcgtgggaggcctgggcttcaaaccacctctgctatcacctggctgtgggtccccaggcaggacatacacacagtccctctctggccctcatcctcctcagctgcaaaggaaaagccaagtgagacgggctctgggaccatggtgaccaggctcttcccctgctccctggccctcgccagctgccaggctgaaaagaagcctcagctcccacaccgccctcctcaccgcccttcctcgggagtcacttccactggtggaccacgggcccccagccctgtgtcggccttgtctgtctcagctcaaccacagtctgacaccagagcccacttccatcctctctggtgtgaggcacagcgagggcagcatctggaggagctctgcagcctccacacctaccacgacctcccagggctgggctcaggaaaaaccagccactgctttacaggacagggggttgaagctgagccccgcctcacacccacccccatgcactcaaagattggattttacagctacttgcaattcaaaattcagaagaataaaaaatgggaacatacagaactctaaaagatagacatcagaaattgttaagttaagctttttcaaaaaatcagcaattccccagcgtagtcaagggtggacactgcacgctctggcatgatgggatggcgaccgggcaagctttcttcctcgagatgctctgctgcttgagagctattgctttgttaagatataaaaaggggtttctttttgtctttctgtaaggtggacttccagcttttgattgaaagtcctagggtgattctatttctgctgtgatttatctgctgaaagctcagctggggttgtgcaagctagggacccattcctgtgtaatacaatgtctgcaccagtgctaataaagtcctattctcttttatgagaaagaaaaagacaccagtcctttaaagtgctgcagtatggccagacgtggtggctcacacctgcaatcccagcaccttaggaggccgaggcaggaggatcc

SEQ ID NO: 840 - DNA, 635 bp, Homo Sapiens
tttttttttctaatggagacatataattgacctatgtttatgcatatatgttctctacacagtgaaactttttttaaaaagaatagtaaagaaaatgcggaagctctggctctccaaggcaaagtcaaaaaaaaaaaaaaaagcgggggggaatgcgaggaacattttattacacctcctgattttcactccttgagttttattttctccccttgtttatttgtttaatgctagaaactgtattcctaagagagcatacctctttcaggtgagcatgataattggaagattttgatacttagagtatgaacatataattaagaagtgattacctaataaagataacaatgtgactattttaattattttggtggcagggagttggttttacatcacccaaaaaaaaaaaaaagccctggtttcaaattcattggtaataaatatgctaactttctgaatcaaaatggagagcctctcaagaaaaagagctatgcagtcagcaatgacttaaattagtcaggatagcaggcatctggggttaaaggtgtttccaccattgtggtctcaccaccatatacgagtgggaccacagctggtgagcacttggttttgtcataggggtgcaaggtctctga

SEQ ID NO: 841 - DNA, 255 bp, Homo Sapiens
ataacgctggctgcaatccagccagccctctgccctttctgagcccgagggactgccacctccactgtgtgcacactcatttacgggacacatttcaggtatccaaggcagcagaggtgagtgggtcccccgagctctgtgaccttatgctccacactaactctggcagagcctccgtttcctcatagagcaaagaacagccaccatgcagctcttcctcctcttgtgcctggtgcttctcagccctcagggggc

SEQ ID NO: 842 - DNA, 698 bp, Homo Sapiens
tcgagctaggtacgaggccggtgttactcggccgaggctgtgtccaggagccgaatcagaaatgtcatcctcaggcacgccacgacttacctgtcctactcaccgatttgaagatgcaagtatactaagatcttcataaacaatgaatggcatgattcagtgagtggcaagaaatttcctgtctttaatcctgcaactgaggaggagctctgccaggtagaagaaggagataaggaggatgttgacaaggcagtgaaggccgcaagacaggcttttcagattggatccccgtggcgtactatggatgcttccgagagggggcgactattatacaagttggctgatttaatcgaaagagatcgtctgctgctggcgacaatggagtcaatgaatggtggaaaactctattccaatgcatatctgaatgatttagcaggctgcatcaaaacattgcgctactgtgcaggttgggctgacaagatccagggccgtacaataccaattgatggaaatttttttacatatacaagacatgaacctattggtgtatgtggccaaatcattccttggaatttcccgttggttatgctcatttggaagatagggcctgcactgagctgtggaaacacagtggttgtcaaaccagcagagcaaactcctctcactgctctccacgtggcatctttaataaaagaggc

SEQ ID NO: 843 - DNA, 389 bp, Homo Sapiens
  misc_feature (292)..(292): n is a, c, g, or t
  misc_feature (301)..(301): n is a, c, g, or t
  misc_feature (314)..(314): n is a, c, g, or t
  misc_feature (350)..(350): n is a, c, g, or t
  misc_feature (376)..(376): n is a, c, g, or t
ttttttttttttttaatggttatatgctttttatttgtgacatttgaatacccaagctcacatataactgatttcctaaatatcatttaattttatgttgcttttctaattgatttaattgttagttttccttatagtcaaatgcttaatacaatcataaatggaaccaaaaatatagtaaacatttctttttctgatgtatgtaaaaaagatacaggaaaattctgaaatcagatcactataagctagtaaaacaggtgaattatttgattagaaatgggactcttccttncataagttnacacaaatccttnatgtagtcactgaaaatgccttaactcagaattaantacctggtccagagggaaaacagccnggttataaaaggc

SEQ ID NO: 844 - DNA, 355 bp, Homo Sapiens
  misc_feature (2)..(2): n is a, c, g, or t
  misc_feature (15)..(15): n is a, c, g, or t
  misc_feature (29)..(29): n is a, c, g, or t
  misc_feature (86)..(86): n is a, c, g, or t
  misc_feature (301)..(301): n is a, c, g, or t
anttcggcacagcgnggggatacaactcnggagtcctctgagagagccaccaaggaggagcaggggagcgacggccggggcagaanttgagaccacccagcagaggagctaggccagtccatctgcatttgtcacccaagaactcttaccatgaagaccctcctactgttggcagtgatcatgatctttggcctactgcaggcccatgggaatttggtgaatttccacagaatgatcaagttgacgacaggaaaggaagccgcactcagttatggcttctatggctgccactgtggcgtgngtggcagaggatcccccaaggatgcaacggatcgctgctgtgtcactcatgact

SEQ ID NO: 845 - DNA, 1346 bp, Homo Sapiens
acttgagaatcacttgttagttcttggtaggaattcagttgggcaatgataacttttatgggcaaaaacattctattatagtgaacaaatgaaaataacagcgtattttcaatattttcttattccttaaattccactcttttaacactatgcttaaccacttaatgtgatgaaatattcctaaaagttaaatgactattaaagcatatattgttgcatgtatatattaagtagccgatactctaaataaaaataccactgttacagataaatggggcctttaaaaatatgaaaaacaaacttgtgaaaatgtataaaagatgcatctgttgtttcaaatggcactatcttcttttcagtactacaaaaacagaataattttgaagttttagaataaatgtaatatatttactataattctaaatgtttaaatgcttttctaaaaatgcaaaactatgatgtttagttgctttattttacctctatgtgattatttttcttaattgttattttttataatcattatttttctgaaccattcttctggcctcagaagtaggactgaattctactattgctaggtgtgagaaagtggtggtgagaaccttagagcagtggagatttgctacctggtctgtgttttgagaagtgccccttagaaagttaaaagaatgtagaaaagatactcagtcttaatcctatgcaaaaaaaaaaaatcaagtaattgttttcctatgaggaaaataaccatgagctgtatcatgctacttagcttttatgtaaatatttcttatgtctcctctattaagagtatttaaaatcatatttaaatatgaatctattcatgctaacattatttttcaaaacatacatggaaatttagcccagattgtctacatataaggtttttatttgaattgtaaaatatttaaaagtatgaataaaatatatttataggtatttatcagagatgattattttgtgctacatacaggttggctaatgagctctagtgttaaactacctgattaatttcttataaagcagcataaccttggcttgattaaggaattctactttcaaaaattaatctgataatagtaacaaggtatattatactttcattacaatcaaattatagaaattacttgtgtaaaagggcttcaagaatatatccaatttttaaatattttaatatatctcctatctgataacttaattcttctaaattaccacttgccattaagctatttcataataaattctgtacagtttcccccaaaaaaaagagatttatttatgaaatatttaaagtttctaatgtggtatttaaataaagtaatcat

SEQ ID NO: 846 - DNA, 743 bp, Homo Sapiens
tggacgagcgagtaagccgggaatggcagcgcgggggctccgcggaggcgccacgcacagtgtccaaagcatccttgcttcctcctggaaaccgcggccgccaggtgtgagctgcgcgctccgcgtctacgccaccgacccgtccgggcccgctgccacatcgatttcattcatttcgttccacaaatcgccgctccactcattagctgtggaaccttggggaaattacctactgtctccgagcctcggtttcctccattcttttctttctgtaagataaagatagtaggctgggcgcggtggttcacgcccgtaatcccaacactttgggaggctgcggcaagaggttcgcttaagccaaggagttcgaggccagcctgggcaaaaaagcaagacctcatctctacaaaaaatgcaaaaaactaaccgggcgtggaggctgcggcgggaagataacttaagcccgagaagtcggggctgcagtgagtcgtgatcacgccactgcactacaccctgagcgacagggcaagacactgcctaaaaaaataataataggctgggcgcggtggctcacgcctgtaatcccagcactttgggaggccgaggtgggcggatcacgaggtcaagagatcgagaccatcctggccaacatggtgaaacccgtctcactaaaaatcagaattagctggctggtgggggccctgtatccactggtggatctggcgagattgtgaccgagccag

SEQ ID NO: 847 - DNA, 434 bp, Homo Sapiens
ttattggtagttggttgttgtctatagtgacagccacgtgattttcttgatgatgaaaaggatgagaaggtcctttattccactttgaacaagtttgtgaatgtccaaataaggctccttgaaaatttctccttcaggggtaagtatcttcacataaccttctttttccagaatgaagagacgttgcgagccatccccactatgcagggcaccaacgggctgccgcagcccactcacaacctcctgaatacagaagcagttgtgtttgtgctttctgctgatctcttccactttgtcatattcttccatctggtccaagtagttagatgctggtcctctgacttgttttcttggaaaatctggaaagcacaacccaccatcttttcttgcatagtaaaagcaaaactcatccgcagttgtttgaaggaaacctg

SEQ ID NO: 848 - DNA, 700 bp, Homo Sapiens
attgctcggcatggtacatcatgcctggttatttcgtatttttagtagagacgaggtttctctatgttggtcaggctggtctcgaactcccgacctccggtgatccgcccgcctcgatgtccaaactgctgggattacaggcgttaaccaccgcgcccggctcaggagatttcctacatgctcaaaatttgtaatggcaaagagatggccacaaaccttgtgagagtggatggggagcgacctcggctctcttagtcccgcctggcccactagacactgcactgcatggtagaggccccgcccgaccagccccttaatcggctgttcgcgatcactatcttacctcgccaattcttggtccccgcccctgtcttccggtgttcaccctccttcacttcctgcgggtcccaggctcaggcccctcctccgccttgtttggagctaatcctaatctgaagcctggtagggctccgctccgccctatgtccgcgctcccctcctccacgagcaatgcagaatcagctcaggtccccgcctgccgcttgcgcccgcggtatacgcactgccccctcttcgtctgggcccatcaggcagtccattgggcccgcggcccctttatggcccgtctcgtcagcgcttatccttgagctgctttggccgtgctctagggagtcgggcgtgccgacctgagccttgagcc

SEQ ID NO: 849 - DNA, 403 bp, Homo Sapiens
tgataaatgcttccattagacagagataaattttaatctacccaatcataagtaaccaactatcatgattatataactactgactttccaacaggataagccaaagaaagcaactctataactgtaaccaatcaaataatttctttattgtgcttctacattttcccaataaaaacttgcacttgatgttatgtctctggaatactaacgctctttcagtcaggtgttccccaattcataaattgcttttcactcaaataaaccctttaaaattttgttgtgagtcagatgtttctttaacgcatggttgcaaaacgtgctgttagtaaggaacatgactgagatctacattcaggtcctagtgcagtttcttttgctgtcaccagggccatcttgctggctt

SEQ ID NO: 850 - DNA, 486 bp, Homo Sapiens
tttttttttttttttttttttttttttttttgggggtttccacaaaggcttttggttttattattattatttttaacaaacatacattggaaatagtaaaggtttctaattgaaaagagacctaatgcatagtttctctgcagcataaaaaaccacctgtttccaaacttcaaggttaggggctttgaaacattccctggtaaattatctccagctggctagctagttaggcatattggggcacattggtatcaaaggggattattttttgcatttagcaaatgagcgctattacttttttgatgtatttttaattcaaattgctcaaaagtcttgttatttcaagggagccttatgtcataccacaaatattgatacctcctagtggaaatggtggctgtgggctccctagtagagttaatggatgaaggctgagatacttagatactgcggacatcagggttatggagcaaagtgttatgaaca

SEQ ID NO: 851 - DNA, 1073 bp, Homo Sapiens
caactacggctaggtacgaggctgggtgtcggaggctccgttgcctgctcccggagggagacgcgctgccgaggagaacccagcgggagaacatttcaggataggaataggccaagtgctgagaagatgagtcttaggattgatgtggatacaaactttcctgagtgtgttgtagatgcaggaagaagtcacccttgggactcagcagaggcaggagatggaccctcgcctgcgggagaaacagaatgaaatcatcctgcgagcagtatgtgctctgctgaattctggtgggggcataatcaatggctgagattgagaacaaaggctacaattatgaacgtcatggagtaggattggatgtgcctccaattttcagaatgccatttagataagatgcagaaggagaaccactttgtgatttttgtgaaatcatggaacacagaggctggtgtgccacttgctaccttatgctccaatttgtaccacagagagagaacatccagcgatgtcatggattctcaggaagctctggcattcctcaaatgcaggactcagactccaacgaatattaatgtttccaattcattaggtccacaggcagctcagggtagtgtacaatatgaaggtaacataaatggtgtcagctgctgcttgatttgatacgcttgcggcttcagtatctggcagatactcaagcttcctgagtccacgtcgtgttgaatttcggtaaggttctcggacgacgtgtcacactggtgttgaagaccgacttccgaagtgtgttctggctttgccaatgctgaacgggggctatggtgctcttcgggtgtgccttgatgagacttggccaaggtgcctctggttgttcgcactgtgtggagccttgaaccttacgagggcttgagggcggtcctaattggagcggcgggcttaacggaacgggtgtccgggcccctcggtgctgggcgtcgtgtggctgtgctgtggaatgtccctggtgcctctgagtgctgtgacgggggccgtcgggggtgtttggcgtagggggggatcgtcgcggttcgcgttctcac

SEQ ID NO: 852 - DNA, 5886 bp, Homo Sapiens
gtgaggagggccggcggcggggcggacccctggcggtcctcctggctggggtccgcgcgctcgcggcagctccccgtggaggtcactgtccgtgccagtccctcccgctgtcccgccctctcccgctgccgccgccgccgccgccgcgcccgcctcagcgcccccactccgcgcttgggagcgaggagccgccagcgcccccgccccgccgccgccgcagcgccctcaggccgccattcgccaccgaaactttccagcgcccgcgctctctccgggactcggcggcggcggggcgggggcggcccgggggcggcgcgcggctgctccggggcgccgggccctcttcggccgccgcacggccgggactcggaggctgccggctggagggaggttcggagcgcggccgggcgcgcggcgccgccacaagttgcgctgctcgcgacgagatttccgtgagggtggaagaaaatcataccatatcagatgcctcgcagagcaccaggcccaccgtgaaaggctggtccctgcagacggcttcccatttttatgaccggatgctgggaagcctgctggtccacaggtccatacatgaagtcaccataaggagccctggcctccttgcagaaacatcgaggtgacatgtagcatgaccgagctcgctggcgcctcttcatcgtgctgccaccgccctgcaggaagaggggccatgcagtcagtcttgcaccactttcaacgtttgcgagggagagagggtggttcccacttcatcaacacctcatcgccgcgaggtgaggctaagatgagcataaccagtgacgaggtgaactttctggtgtatcggtatctccaggagtcaggtttttcccactcggctttcacgtttgggattgagagccacatcagccagtccaacatcaatgggacgctagtgccaccggccgccctcatctccattctccagaagggcctgcagtatgtagaggccgagatcagtatcaacgaggatggcacagtgttcgacggccgccccatagagtccctgtcactgatagacgccgtgatgcccgacgtggtgcagacgcggcagcaggcattccgagagaagctcgctcagcagcaagccagtgcggcggcggcggcggctgcggccacggcagcagcgacagcagccaccacgacctcagccggcgtttcccaccaaaatccatcgaagaacagagaggccacggtgaatggggaagagaacagagcacattcagtcaataatcacgcgaagccaatggaaatagatggagaggttgagattccatccagcaaagccacagtccttcggggccatgagtctgaggtgttcatttgtgcctggaatcctgtcagtgatttgctagcctccggatctggagactcaactgcaaggatatggaacctgaatgagaatagcaacgggggctccacccagctcgtgttgaggcactgtatacgagaggggggccatgacgtcccgagtaacaaagacgtcacctcactggactggaataccaatggaacactcttggctacgggttcatatgacggttttgcaagaatatggacggaagatggtaacctggccagcaccttaggccaacataaaggccccatctttgccttgaaatggaaccgaaaggggaattacattttgagtgctggtgtagacaaaacaacaataatttgggatgcccacacaggagaagccaaacagcagtttccttttcattcagcccctgcccttgatgtggactggcagaacaacacgacctttgcctcctgtagcacagacatgtgtatccatgtgtgcaggctcggctgtgaccgcccagtcaaaaccttccagggacacacaaacgaggtcaacgccatcaaatgggatccgtctggaatgttgctggcatcctgctcggatgacatgacattgaagatctggagcatgaaacaggaggtgtgcatccatgatcttcaggctcacaataaagagatctacaccatcaagtggagccccactgggcccgccaccagcaacccaaactccaacatcatgttggcaagtgcttcgtttgattctacggtgcgactgtgggacatagaacgaggcgtctgcacccacacgctcacgaagcatcaggagcctgtctatagcgtagctttcagccctgatgggaagtacttggccagtggatccttcgacaagtgcgtccatatctggaatactcagagtggaaatcttgtccacagctaccgaggcactggcggcatcttcgaggtgtgctggaacgcccgaggagacaaagtgggtgccagcgcgtccgacggctctgtgtgtgttttggatctgcggaagtaaccacaaaatattatcgaaaaaagaaaagaattctaatgaccagccgtgaatgtgtagggttgcagctctattctccaaaactgtaggaacttgacttgcgttagagtgtactctgaaaccaactcgtctctggccgcaggagtctatatgttttcgtaatcttcatcaagaagtttttaaaaggcaagcaaaaacagaagcaaatcatatcaaacggggatagaatggtttccactgaggacattcagcctgggaaggaggaagtcaccagctcgaggcgtgtggattggtttccacccggaacaggctctgtgatggctgaatggaaagaaacgtaaaaagctgtgccaaaaaaaaagcaaaatgctgtgataaaccaaacagggaagggggaaaaaccctcctccttgggatttttttttttttgttttccctaacaatttggacactacaattgctctcacaaaggaggttcaaagaccagtttgtaccgatgaaacgcgcaactttgtaatcccaacactttctattttctagaatcttctttgttcattgggtggtttttcagtcggctggaattctatcttctgggggccttccgtctgagatggaagctgtcttgggcttgttgtctcttccttctgttgctccctgcccctccccctgtctttccactctgtctggtgagctctgctttttcagtgcaccatcaagagatgcagccccgtggacatgaagacacaatctcccacggacagctttcccccttccgccctctcccaccctctcctccccttgcgctcgcgctcgcgctcgctttctcactggcgtgctctctttctctctctctctccctctgtacctttctcatagttgcttcagatcttaggtctcaagggcactttggcgcgtagtaagtgctttatgtaagaaggcagggcaggggggcctttttacaggagaaaaaaaaatgacttataagagaaagagcctggagtatttttggaaaaaaaaataatatttttatgttaaaacaattttaaaatcttaaaatggccatcagacatagagagctttgtgtgattcatgttttaaaaagaaccgaagaagccacaggcagggcctgagggagcccctggctttcccctcagcctcaggaaaggtggtcaggaaaactctggctggacaagggtcagtcttcggggtcagcagcgagattgctctgcagccagtgagggaggtccccgccatgccggctggaagaagaacctcgcatcttttggtgtgtatgcaccttggcagccagcaggaaagcagcgaagagccgcgcgccctctggcctcaagggagcattggcagaaccataaggtactgcagaagccgtcgaaaccgactgctcggctggattaggcgtgttggctacatctttcccacaaccgtataacgaccgatggtcatttctccaagagcaggcttggcgagtccttgcagagctgacatagaggcgcccgcatgtcacttagtctaacgctgacagaaatgaatgcagaaggaagattttcagtcctgaacgtgaattatagaggtagaacgtcgctaataatttctgccatcttcataatttctttgtctcacagaagactaggagaaagatcttttttaaataatctttttgctgtttttaaaaaattaaacaaggctttgtgttcctagaagagcttcatttcagtgaatctggtgacctccatctgcttgctgtcataacccgacacggacttatttttgtcattagcaagggggaaaaggccaaaggacaagggcctcttctcccattggttttcctgtgggcagaagggctgaggaagatggcccagcccgtgggggctgctgggtcaccagcagcgggtagggtgcaatctggtgtgtgttccagcagtgagacggtgttattgtgaaggtggcattcatctgcggagccaaaacccagccatcggggaagggtcagggcttctgtggaacttggaacgtgccaggaccacctgcaaaagccagggtgcgttgatcattctcagatcattgattggcctccacttgggtatgtgaattattcatgtcccagaagaccaaaaagtgctctggttctgagatgagtattttattcgtgttctgtttccgaaacacttagcaaagaaggtcacagtgatgtggagtcgccgcacccatctttgaagatagccagtgtccctggatgaggtgatgatttcccgtcccaaggactctgtgaagtttagagtacagtttgttggggtccaaaagacaccatctctaccccacccaaataaaaatgcactcatctctgtagaacatctgctgtcaaaggccagcctgtcgttagggcatggcttatgcttgacaaaccagtaacaactgtgggatggcgatggtgggatgtgtcgcaagcaattcactagacaatcttcacatgaatgtcggtagccagggtctctcccgagggatggctttagtcttgatgaatgtgaaccatgtcggaattgttaggtagaaacctgggctgggaggcctcggaccccaggctccatccctggcttccccagcctgcggccgcaagcaaaaccaagcgcgagatgcagctagcacccttcatatccatccccgttctcagcgggacaacaccatggacagccgttttcagagcctccagcatttgcacaccactactcaccctctctgctgctggcatgttggtagagtcatccctgtaatcaagaaatggcctgtggaatgttattgttcaacgttgtttacagctcttaaaacatggtgaggaatgcctaagtcttagtgaccaaacgtgaccttgaaagcagacatagcatgacagaccttcctagagtgtttggtcgggttcacagtgaccgagagtcaggtccagcacacacctgggaaagggatgctgccccaagggggaccaaaagggccggacgttacagggtgaaaccctctgacccctcgcgacaccgtaggacttgacttttgtttagtctttctaagaaatagatcatggagccaagtgaagtgcactttgtcaaatgtaagggtctgctttgttcttgttgcttttctgttttttaaccttttgttccgccatttaaaaaaagaaaaaaaaaaagcttatgtttcttgtcaaatgcagaaatgttccttccgccactcactgaagttttgcattctggcttgtgcagtttttattgtctgtgtcagacgtacagccagacatgttctctattggcatttttccgattctgttcagatgacagcgaccgccttttcattccccccgccacctgtactcaccctcacgctctttgaagaaaaaaaaaaaaaatcaccttgtgtgttgtagctcatttgtttcaagagagaatcaacagatcatattcagtgtcttgaataaattgctctattttgatattaaaaaaaaaaaa

SEQ ID NO: 853 - DNA, 463 bp, Homo Sapiens
agcccgggaggcggaggcgggaggcggcggcggcgcgcggagacgcagcagcggcagcggcagcatgtcggccggcggagcgtcagtcccgccgcccccgaaccccgccgtgtccttcccgccgccccgggtcaccctgcccgccggccccgacatcctgcggacctactcgggcgccttcgtctgcctggagattctgttcgggggtcttgtctggattttggttgcctcctccaatgttcctctacctctactacaaggatgggtcatgtttgtgtccgtgacagcgtttttcttttcgctcctctttctgggcatgttcctctctggcatggtggctcaaattgatgctaactggaacttcctggattttgcctaccataatacagtatttgtcttctattttggaacctttttattggaagcagccgccacatccctgcatgattttgattggcattac

SEQ ID NO: 854 - DNA, 644 bp, Homo Sapiens
gcctgagctccggctccggctggggcgcctgcgatgtctcaagatggcggagctgggcgaattaaagcacatggtgatgagtttcctgggtgtctgagctccagtgtgcttcttggctttgctggccggaacaatgagtggactggaagcactgagctcctgtgccaatggctctgcacctcctgaagtccagctgtgcccctagtgtccaggatgaacgatcaaatgatgctttacctgactgactgctttccccgtgaagaccctggggccctctgatctctcccttctctctttgccccctggcacctctcctgtaggctcccctggtcctctagctcccattcccccaacgctgttggcccctgtgcaccctgctgggccccaagcgtgaggtggacatgcacccccctctgccccagcctgtgcaccctgatgtcaccatgaaaccatatgcccttctatgaagtctatggggagctcatccggcccaccaaccttgcatccacttctagccagcggtttgaggaagcgcactttacctttgccctacacaccccagcaagtgcagcagattcttacatccagagaggttctgccaggagcaaatgtgatataccatacaggtgcagctagtgtcttgc

SEQ ID NO: 855 - DNA, 315 bp, Homo Sapiens
  misc_feature (115)..(115): n is a, c, g, or t
  misc_feature (195)..(195): n is a, c, g, or t
  misc_feature (288)..(288): n is a, c, g, or t
ctcgcaggccccgagaactgtcgcccttccacgatgtggctccgtgcctttatcctggccactctctctgcttccgcggcttgggcagggcatccgtcctcgccacctgtggtgnacaccgtgcatggcaaagtgctggggaagttcgtcagcttagaaggatttgcacagcctgtggccattttcctgggaatnccttttgccaagccgtcgtaccctcctatgtgcaacccaagatcccaaggcgggggcaagttactttcagagctatttaacaaaccgaaaggnggacattcctttaaagttttttgaaga

SEQ ID NO: 856 - DNA, 488 bp, Homo Sapiens
agccgggccccgcccgccgcagcgcggggctcctgcgtcccgagtgcgcggcggccggaccgggcgggcggagccgggcccgcggggctgctgcggggcgatcgggccgggccgctgccgcgccatggactcccgtgtccagcctgagttccagcctcactgagtggccacccccaaagtgctgccagccgaggaagcccccagcactgaccatgtctattatggaccacagccccaccacgggcgtggtcacagtcatcgtcatcctcattgccatcgcggccctgggggccttgatcctgggctgctggtgctacctgcggctgcagcgcatcagccagtcagaggacgaggagagcatcgtgggggatggggagaccaaggaacccttcctgctggtgcagtattcggccaagggaccgtgcgtggaggaaaaaaggccaagctgatgactccaacggcccgaagtccacggctgaaccaggatg

SEQ ID NO: 857 - DNA, 219 bp, Homo Sapiens
  misc_feature (42)..(42): n is a, c, g, or t
  misc_feature (79)..(79): n is a, c, g, or t
  misc_feature (85)..(85): n is a, c, g, or t
  misc_feature (131)..(131): n is a, c, g, or t
gtttttagccccggcctttttctagccaggctctcaactgtntcctgcgttgctgggaagttctggaaggaagcatgtnctccanaggttgggattcgtgtctggctctggaattgctactgctgcctctntcactcctggtgaccagcattcaaggtcacttggtacatatgaccgtggtctccggcagcaacgtgactctgaacatctctgagagcc

SEQ ID NO: 858 - DNA, 2722 bp, Homo Sapiens
gagcgggctgagggtaggaagtagccgctccgagtggaggcgactgggggctgaagagcgcgccgccctctcgtcccactttccaggtgtgtgatcctgtaaaattaaatcttccaagatgatctggtatatattaattataggaattctgcttccccagtctttggctcatccaggcttttttacttcaattggtcagatgactgatttgatccatactgagaaagatctggtgacttctctgaaagattatattaaggcagaagaggacaagttagaacaaataaaaaaatgggcagagaagttagatcggctaactagtacagcgacaaaagatccagaaggatttgttgggcatccagtaaatgcattcaaattaatgaaacgtctgaatactgagtggagtgagttggagaatctggtccttaaggatatgtcagatggctttatctctaacctaaccattcagagaccagtactttctaatgatgaagatcaggttggggcagccaaagctctgttacgtctccaggatacctacaatttggatacagataccatctcaaagggtaatcttccaggagtgaaacacaaatcttttctaacggctgaggactgctttgagttgggcaaagtggcctatacagaagcagattattaccatacggaactgtggatggaacaagccctaaggcaactggatgaaggcgagatttctaccatagataaagtctctgttctagattatttgagctatgcggtatatcagcagggagacctggataaggcacttttgctcacaaagaagcttcttgaactagatcctgaacatcagagagctaatggtaacttaaaatattttgagtatataatggctaaagaaaaagatgtcaataagtctgcttcagatgaccaatctgatcagaaaactacaccaaagaaaaaaggggttgctgtggattacctgccagagagacagaagtacgaaatgctgtgccgtggggagggtatcaaaatgacccctcggagacagaaaaaactcttttgccgctaccatgatggaaaccgtaatcctaaatttattctggctccagctaaacaggaggatgaatgggacaagcctcgtattattcgcttccatgatattatttctgatgcagaaattgaaatcgtcaaagacctagcaaaaccaaggctgagccgagctacagtacatgaccctgagactggaaaattgaccacagcacagtacagagtatctaagagtgcctggctctctggctatgaaaatcctgtggtgtctcgaattaatatgagaatacaagatctaacaggactagatgtttccacagcagaggaattacaggtagcaaattatggagttggaggacagtatgaaccccattttgactttgcacggaaagatgagccagatgctttcaaagagctggggacaggaaatagaattgctacatggctgttttatatgagtgatgtgtctgcaggaggagccactgtttttcctgaagttggagctagtgtttggcccaaaaaaggaactgctgttttctggtataatctgtttgccagtggagaaggagattatagtacacggcatgcagcctgtccagtgctagttggcaacaaatgggtatccaataaatggctccatgaacgtggacaagaatttcgaagaccttgtacgttgtcagaattggaatgacaaacaggcttccctttttctcctattgttgtactcttatgtgtctgatatacacatttccatagtcttaactttcaggagtttacaattgactaacactccatgattgattcagtcatgaacctcatcccatgtttcatctgtggacaattgcttactttgtgggttcttttaaaagtaacacgaaatcatcatattgcataaaaccttaaagttctgttggtatcacagaagacaaggcagagtttaaagtgaggaattttatatttaaagaactttttggttggataaaaacataatttgagcatccagttttagtatttcactacatctcagttggtgggtgttaagctagaatgggctgtgtgataggaaacaaatgccttacagatgtgcctaggtgttctgtttacctagtgtcttactctgttttctggatctgaagactagtaataaactaggacactaactgggttccatgtgattgccctttcatatgatcttctaagttgatttttttcctcccaagtcttttttaaagaaagtatactgtattttaccaaccccctctcttttcttttagctcctctgtggtgaattaaacgtacttgagttaaaatatttcgattttttttttttttttaatggaaagtcctgcataacaacactgggccttcttaactaaaatgctcaccacttagcctgtttttttatcccttttttaaaatgacagatgattttgttcaggaattttgctgtttttcttagtgctaataccttgcctcttattcctgctacagcagggtggtaatattggcattctgattaaatactgtgccttaggagactggaagtttaaaaatgtacaagtcctttcagtgatgagggaattgattttttttaaaagtctttttcttagaaagccaaaatgtttgtttttttaagattctgaaatgtgttgtgacaacaatgacctatttatgatcttaaatctttttt

SEQ ID NO: 859 - DNA, 431 bp, Homo Sapiens
  misc_feature (172)..(172): n is a, c, g, or t
  misc_feature (177)..(177): n is a, c, g, or t
  misc_feature (209)..(210): n is a, c, g, or t
  misc_feature (237)..(237): n is a, c, g, or t
  misc_feature (343)..(343): n is a, c, g, or t
ttttttttttttttcctgttacgccgtcaatgcagcaggcaattgaggggaatgacacagccctctcattcccggaacgtagtcaatctcggctctgcggatttcacagaacacactttgcctattgccggctccaacaagaagtaactttccaggaagctgccggccccgnacagnccaggactcgctgcctgagctgcgctggccgnnggggattcacccggggaggcggggccnttggggaaggctcgcggggaatacagcacactttcccctaaatccctcgtccgcgccgagtgcagggctctcagagttcacctagtcccacctctcacccacaacngtttataaatggggaaggtcagacaagttagtagcagactgggtctagaacccaggagttcgaatgcaatccgaggctcatatcgaga

SEQ ID NO: 860 - DNA, 637 bp, Homo Sapiens
cgtctagggtgtccgtcccgaggcgtcccggcatctccggcccgaatcccggagtggcgggtcgcgcctgcaccgaaggtcccggctcctgtgccctccctgcagccgtcagggaccgtcccccaactcccctttccgctcaggcagggtcctcgcggcccatgctggccgctggggacccgcgcagcccagaccgttcgcgggccggccagccggccaccatggtggccctgaggcctgtgcagcaactccaggggggctaaagggctcagagtgcaggccgtggggcgcgagggtcccgggcctgagccccgcgccatggccggggccatcgcttcccgcatgagcttcagctctctcaagaggaagcaacccaagacgttcaccgtgaggatcgtcaccatggacgccgagatggagttcaattgcgagatgaagtggaaagggaaggacctctttgatttggtgtgccggactctggggctccgagaaacctggttctttggactgcagtacacaatcaaggacacagtggcctggctcaaaatggacaagaaggtactggatcatgatgtttcaaaggaagaaccagtcacctttcacttcttggccaaattttatcctgagaatgctgaaa

SEQ ID NO: 861 - DNA, 148 bp, Homo Sapiens
ggaaaaggaacatataattgtatggatggtaggattaagttttgagtagttttgtaatcaagattttatgtaacatttgtaaagggaaaattagcacttttgtggttcttaagggaaaagaaacagaccttgtggagattataatttt

SEQ ID NO: 862 - DNA, 3197 bp, Homo Sapiens
tgtagctcgcgttgaagccgcacgtccggccccgatcccggcaccatgagcttcggctcggagcactacctgtgctcctcctcctcctaccgcaaggtgttcggggatggctctcgcctgtccgcccgcctctctggggccggcggcgcgggggcttccgtcgagtcgctgtcccgcagcaatgtggcctcctcggccgcctgctcctcggcctcgtcgctcggcctcggactggcctatgcccggccgccggcgtccgacgggctggacctgagccaggcggcggcgcgcaccaacgagtacaagatcatccgctccaacgagaaggagcagctgcagggcctcaacgaccgcttcgccgtgttcatcgagaaggtgcatcagctggagacgcagaaccgcgcgttggaggccgagctggcgcgctgcgacacccacgctgagccgtcgcgcgtcgggcagctcttccagcgcgagcctcgccacctgccgcagctggaggaggccagctcggctcgctcgcaggccctgctggagcgcgacgggctggcggaggaggtgcagcggctgcgggcgcgctgcgaggaggagagccgcggacgcgaacgccgagcgcgcctgaagcggcagcagcgcgacgtggacggcgccacgctggcccgcctggacctggagaagaaggtggagtcgctgctggacgagctggccttcgtacgccaggtgcacgacgaggaggtagccgagctgctggccacgctgcagcggtcgtcgcaggccgcggccgaggtggacgtgactgtggctaaaccagacctgaccgcggctctgagggagatccgcgcccagtatgagtccctggccgctaagaacctgcagtccgcggaagaatggtacaagtccaagtttgccaacctgaacgagcaggcggcgcgcacgaccgaggccatccgggccagccgcgaccagatccacgagtatcggcgcctgcaggcgcgcaccatcgagatcgagggcctgcgcggggccaacgagtccttggagaggcagatcctggagctggaggagcggcacagtgccgaggtagctggctaccaggatagcattgggcagctggagaatgatctgaggaacaccaagagtgagatggcacgccaccttcgggaataccaggacttgctcaatgtcaaaatggctcttgacattgagatagcagcttacaggaaactgctggaaggcgaggagacacgttttagcaccagtgggttaagcatttcggggctgaatccacttcccaatccaagttacctgctcccacctagaatcctcagtgctacaacctccaaagtctcatccactgggctatcacttaagaaagaggaggaggaggaggaggcatctaaggtagcctctaagaaaacctcccagataggggaaagttttgaagaaatattagaggagacagtaatatctactaagaaaaccgagaaatcaaatatagaagaaaccaccatttcaagccaaaaaatataattccattgctttgaaaaagttaatgcttaagagggaatgatatgcatttgacttgttaaacagcctattcctgaactataacacctgccaccactataaaatgtcttcaaggcttcagtctcatatttagtattgaatacttacattctctaataagaaaaccaccccttagattgaagtaaactgcagtctggagcaatacagatgagttatctaagaatacagctttctgaccttcagctcacgttcacagtgatcgatgattcaggtgcagaggaagtacaaactaaggtgctaaatctgagatcatcgtcatttgctgtgaactgaaattaaaactattcatgctacccagccattacccagctaaataatcttactctagatacctaaaacataagatcactgccagagataaactaatggtccacacccaattccactctgatagaattatttcacaaataataggtgtttgtttaatggacacttttcacctccttcaattccatatatccttttcttctatgtaggaaaaaaatagtctagtgtagtattcttcccttttaaacacattttggttcttgctcaaaagaacttacccccattcgcgctctgctcagtgggtaaaattagatgcatgttgaccatgtctatgattcgtgtaattacttatccctgcccatttcatattctttcaattctgtaggttaaaaaaatggcagtgatgaattttaagggtttcccccaacatataaaataatgcaaagaatccctagactttaggctttcagcttacacaaatctatttaattaggaaaaaaactattaaggatgtagcttttcacctttactttagaagcacagtaaatatcccaaactgtgatgaagccgaccttagatttagtagtgtaagctagaagaagtgagtgtttctatgagtggaaaaagccaaggtgtcatttatgtgtcagttcatttgtggtgatatagaattagctttttcatccccttacccttagaatccacgtattcagcttcccactagcctaggtcataaagaggcgttgctttcactctcctatgccttttacgagtgctaagtgtaggatattttgtcaccagaacacaactgtaccgccccaaagtaaaagaaaccacttctggtcaatcaacactaccagcgtatatataagaaagacatctttctcttttctaaaagacttccctaacacttaccccatggctgcacagttggtggggtcctgccggagaggaagagacactcagaccagagaaggggtgtgcatgcgcctactcgcttgctagaagtagattctggacagtcagctcttcatctgcccaactgtgtagcatctcgattgccagtcttcatgtgtgccaaggctgatgcaggatttgttctctgtccagcagtcacttcggccagagctgaagagttgccccgtctctgttccatgtctcctttaagagctctggtgataaggacatgatgcttttactgaactttcttatcctagcacatgcttcaatagttcaaggaacttgaaaaatacttttccttacctttaccccatccctgtctttactcctcacacttactgtaagacattagtaacataataaattaaaagtcacagatctca

SEQ ID NO: 863 - DNA, 587 bp, Homo Sapiens
acgcgtggggtggcggaggccgcaggccgcaggagtgctggtggaggggcttccagaaagaccctgcggcagcgccccccctcggctctccccgcaggagagcgggcacctgcgcggcgccgggtgaaggcgagagcctcggcgagccctctgcagcggagccccctgcccatttggttttggaaccaccgggaggaactgggccattctaacacccgttgctaccatgctggccacccgcctctccagacccctgtcacggctcccaggaaaaaccctaagtgcctgtgatagagaaaatggagcaagacgcccactattgcttggttctacttcctttatcccgattggccgtcggacttatgccagtgcggcggagccggttggcagcaaagctgtcctggtcacaggctgtgactctggatttgggttctcattggccaagcatctgcattcaaaaggcttccttgtgtttgctggctgcttgatgaaggacaaaggccatgatggcgtcaaggagctggacatcctagacagtgaccgattgagaaccgtacagctcaatgtctgcagcagcgaagaagtgg

SEQ ID NO: 864 - DNA, 4673 bp, Homo Sapiens
tttgctcctgctcctccgctcctcctgcgcggggtgctgaaacagcccggggaagtagagccgcctccggggagcccaaccagccgaacgccgccggcgtcagcagccttgcgcggccacagcatgaccgctcgcggcctggcccttggcctcctcctgctgctactgtgtccagcgcaggtgttttcacagtcctgtgtttggtatggagagtgtggaattgcatatggggacaagaggtacaattgcgaatattctggcccaccaaaaccattgccaaaggatggatatgacttagtgcaggaactctgtccaggattcttctttggcaatgtcagtctctgttgtgatgttcggcagcttcagacactaaaagacaacctgcagctgcctctacagtttctgtccagatgtccatcctgtttttataacctactgaacctgttttgtgagctgacatgtagccctcgacagagtcagtttttgaatgttacagctactgaagattatgttgatcctgttacaaaccagacgaaaacaaatgtgaaagagttacaatactacgtcggacagagttttgccaatgcaatgtacaatgcctgccgggatgtggaggccccctcaagtaatgacaaggccctgggactcctgtgtgggaaggacgctgacgcctgtaatgccaccaactggattgaatacatgttcaataaggacaatggacaggcaccttttaccatcactcctgtgttttcagattttccagtccatgggatggagcccatgaacaatgccaccaaaggctgtgacgagtctgtggatgaggtcacagcaccatgtagctgccaagactgctctattgtctgtggccccaagccccagcccccacctcctcctgctccctggacgatccttggcttggacgccatgtatgtcatcatgtggatcacctacatggcgtttttgcttgtgttttttggagcattttttgcagtgtggtgctacagaaaacggtattttgtctccgagtacactcccatcgatagcaatatagctttttctgttaatgcaagtgacaaaggagaggcgtcctgctgtgaccctgtcagcgcagcatttgagggctgcttgaggcggctgttcacacgctgggggtctttctgcgtccgaaaccctggctgtgtcattttcttctcgctggtcttcattactgcgtgttcgtcaggcctggtgtttgtccgggtcacaaccaatccagttgacctctggtcagcccccagcagccaggctcgcctggaaaaagagtactttgaccagcactttgggcctttcttccggacggagcagctcatcatccgggcccctctcactgacaaacacatttaccagccatacccttcgggagctgatgtaccctttggacctccgcttgacatacagatactgcaccaggttcttgacttacaaatagccatcgaaaacattactgcctcttatgacaatgagactgtgacacttcaagacatctgcttggcccctctttcaccgtataacacgaactgcaccattttgagtgtgttaaattacttccagaacagccattccgtgctggaccacaagaaaggggacgacttctttgtgtatgccgattaccacacgcactttctgtactgcgtacgggctcctgcctctctgaatgatacaagtttgctccatgacccttgtctgggtacgtttggtggaccagtgttcccgtggcttgtgttgggaggctatgatgatcaaaactacaataacgccactgcccttgtgattaccttccctgtcaataattactataatgatacagagaagctccagagggcccaggcctgggaaaaagagtttattaattttgtgaaaaactacaagaatcccaatctgaccatttccttcactgctgaacgaagtattgaagatgaactaaatcgtgaaagtgacagtgatgtcttcaccgttgtaattagctatgccatcatgtttctatatatttccctagccttggggcacatcaaaagctgtcgcaggcttctggtggattcgaaggtctcactaggcatcgcgggcatcttgatcgtgctgagctcggtggcttgctccttgggtgtcttcagctacattgggttgcccttgaccctcattgtgattgaagtcatcccgttcctggtgctggctgttggagtggacaacatcttcattctggtgcaggcctaccagagagatgaacgtcttcaaggggaaaccctggatcagcagctgggcagggtcctaggagaagtggctcccagtatgttcctgtcatccttttctgagactgtagcatttttcttaggagcattgtccgtgatgccagccgtgcacaccttctctctctttgcgggattggcagtcttcattgactttcttctgcagattacctgtttcgtgagtctcttggggttagacattaaacgtcaagagaaaaatcggctagacatcttttgctgtgtcagaggtgctgaagatggaacaagcgtccaggcctcagagagctgtttgtttcgcttcttcaaaaactcctattctccacttctgctaaaggactggatgagaccaattgtgatagcaatatttgtgggtgttctgtcattcagcatcgcagtcctgaacaaagtagatattggattggatcagtctctttcgatgccagatgactcctacatggtggattatttcaaatccatcagtcagtacctgcatgcgggtccgcctgtgtactttgtcctggaggaagggcacgactacacttcttccaaggggcagaacatggtgtgcggcggcatgggctgcaacaatgattccctggtgcagcagatatttaacgcggcgcagctggacaactatacccgaataggcttcgccccctcgtcctggatcgacgattatttcgactgggtgaagccacagtcgtcttgctgtcgagtggacaatatcactgaccagttctgcaatgcttcagtggttgaccctgcctgcgttcgctgcaggcctctgactccggaaggcaaacagaggcctcaggggggagacttcatgagattcctgcccatgttcctttcggataaccctaaccccaagtgtggcaaagggggacatgctgcctatagttctgcagttaacatcctccttggccatggcaccagggtcggagccacgtacttcatgacctaccacaccgtgctgcagacctctgctgactttattgacgctctgaagaaagcccgacttatagccagtaatgtcaccgaaaccatgggcattaacggcagtgcctaccgagtatttccttacagtgtgttttatgtcttctacgaacagtacctgaccatcattgacgacactatcttcaacctcggtgtgtccctgggcgcgatatttctggtgaccatggtcctcctgggctgtgagctctggtctgcagtcatcatgtgtgccaccatcgccatggtcttggtcaacatgtttggagttatgtggctctggggcatcagtctgaacgctgtatccttggtcaacctggtgatgagctgtggcatctccgtggagttctgcagccacataaccagagcgttcacggtgagcatgaaaggcagccgcgtggagcgcgcggaagaggcacttgcccacatgggcagctccgtgttcagtggaatcacacttacaaaatttggagggattgtggtgttggcttttgccaaatctcaaattttccagatattctacttcaggatgtatttggccatggtcttactgggagccactcacggattaatatttctccctgtcttactcagttacatagggccatcagtaaataaagccaaaagttgtgccactgaagagcgatacaaaggaacagagcgcgaacggcttctaaatttctagccctctcgcagggcatcctgactgaactgtgtctaagggtcggtcggtttaccactggacgggtgctgcatcggcaaggccaagttgaacaccggatggtgccaaccatcggttgtttggcagcagctttgaacgtagcgcctgtgaactcaggaatgcacagttgacttgggaagcagtattactagatctggaggcaaccacaggacactaaacttctcccagcctcttcaggaaagaaacctcattctttggcaagcaggaggtgacactagatggctgtgaatgtgatccgctcactgacactctgtaaaggccaatcaatgcactgtctgtcctctcctttttaggagtaagccatcccacaagttctataccatatttttagtgacagttgaggttgtagatacactttataacattttatagtttaaagagctttattaatgcaataaattaactttgtacacatttttatataaaaaaacagcaagtgatttcagaatgttgtaggcctcattagagcttggtctccaaaaatctgtttgaaaaaagcaacatgttcttcacagtgttcccctagaaaggaagagatttaattgccagttagatgtggcatgaaatgagggacaaagaaagcatctcgtaggtgtgtctactgggttttaacttatttttctttaataaaatacattgttttcctaaaaaaaaaa

SEQ ID NO: 865 - DNA, 303 bp, Homo Sapiens
  misc_feature (27)..(27): n is a, c, g, or t
ttcctgctacatgggcatttgcatcanaaacaagtgcagcttctaatcctttcaattgaaccactgcattggaatcagtgacaaattttttgatcaatcctaaaaatttggaccactctgggctcttttcatcctttattttctggaagatcttcagggcctcttcatacccacttaaccttgctttccacagcttgtgttcacatttctgatcaactggcagtttcaaccactcactgtcatctcccattgtgcttccaggttttccttagaattaagagtatttcctcagctgggtcagaa

SEQ ID NO: 866 - DNA, 242 bp, Homo Sapiens
cccgtttacagatttcattacagatggacactgtttcaaggtgcactggcatgcactgtctaaaacggtttcatgctgtaccccagaaggcattcagtttcacagtggagggctgtattgagttggtattctggatgatacaatttttagggctagaaagtttagagtgttggctggctcacaggctgcaaaggaaataatggtggagtccagaccacagcagtaatttcaattactaacac

SEQ ID NO: 867 - DNA, 530 bp, Homo Sapiens
atttttccactagctgtccaacatcattccaggtatactttctattaggtcttgaaaagtcaggatttaattctaactgattggcaagggagtagcatgacctagatagtccaagagtctgcaatggggtaaaatgaatcatgttgtagcctgattcttttgcaaccctaagtctgctttcccattcatcaaaaggtcccaaacacttagctaaaaatgtctgaagagtaacacagtccaagggtagcacatgattatcagcaccaacacgtaaaatggggtccacaactatgtaacctccaccacttttctcatttccttgaaggaaataatactgaaatgaacccgattgttgcagattaagtttacagtatttatcagaatcatcttctctttctgttggattttcccaatcctgagaacggaatttttctctattaaatgtttctccaggaaatgggtaatttgtatacacggtaactgcttttccctgtaaagttgggcctaatcggaactgtagctcataccct

SEQ ID NO: 868 - DNA, 759 bp, Homo Sapiens
atgcggggccagggccgcaaggagagtttgtccgattcccgagacctggacggctcctacgaccagctcacgggccaccctccagggcccactaaaaaagcgctgaagcagcgattcctcaagctgctgccgtgctgcgggccccaagccctgccctcagtcagtgaaaacagcgtggacgatgaatttgaattgtccaccgtgtgtcaccggcctgagggtctggagcagctgcaggagcaaaccaaattcacgcgcaaggagttgcaggtcctgtaccggggcttcaagaacgaatgtcccagcggaattgtcaatgaggagaacttcaagcagatttactcccagttctttcctcaaggagactccagcacctatgccacttttctcttcaatgcctttgacaccaaccatgatggctcggtcagttttgaggactttgtggctggtttgtccgtgattcttcggggaactgtagatgacaggcttaattgggccttcaacctgtatgaccttaacaaggacggctgcatcaccaaggaggaaatgcttgacatcatgaagtccatctatgacatgatgggcaagtacacgtaccctgcactccgggaggaggccccaagggaacacgtggagagcttcttccagaagatggacagaaacaaggatggtgtggtgaccattgaggaattcattgagtcttgtcaaaaggatgagaacatcatgaggtccatgcagctctttgacaatgtcatctag

SEQ ID NO: 869 - DNA, 1724 bp, Homo Sapiens
gaattccggcgcaggcgcccgagccgagcgccgagcagggagcgggcggccgcgctccgggccggggtcccgggggagcagatcctcagaatggcccttggtgctgcaggcgcggtgggctccgggcccaggcaccgagggggcactggatgactctccaggtgcaggaccctgccatctatgactccaggtcttcagcacccacccaccgtggtacagcgccccgggatgccgtctggagcccggatgccccaccaggggcgcccatgggccccccgggctccccgtacatgggcagccccgccgtgcgacccggcctggcccccgcgggatggagcccgcccgcaagcgagcagcgcccccgcccggcagagccaggcacagagccagggccagccggagcccaccgcccccgcgcggagccgcagtgccaagaggaggaagatggctgacaaaatcctccctcaaaggattcgggagctggtccccgagtcccaggcttacatggacctcttggcatttgagaggaaactggatcaaaccatcatgcggaagggggtggacatccaggaggctctgaagaggcccatgaagcaaaagcggaagctgcgactctatatctccaacacttttaaccctgcgaagtctgatgctgaggattccgacggcagcattgcctcctgggagctacgggtggaggggaagctcctggatgatcccagcaaacagaagcggaagttctcttctttcttcaagagtttggtcatcgagctggacaaagatctttatggccctgacaaccacctcgttgagtggcatcggacacccacgacccaggagacggacggcttccaggtgaaacggcctggggacctgagtgtgcgctgcacgctgctcctcatgctggactaccagcctccccagttcaaactggatccccgcctagcccggctgctggggctgcacacacagagccgctcagccattgtccaggccctgtggcagtatgtgaagaccaacaggctgcaggactcccatgacaaggaatacatcaatggggacaagtatttccagcagatttttgattgtccccggctgaagttttctgagattccccagcgcctcacagccctgctattgccccctgacccaattgtcatcaaccatgtcatcagcgtggacccttcagaccagaagaagacagcgtgctatgacattgacgtggaggtggaggagccattaaaggggcagatgagcagcttcctcctatccacggccaaccagcaggagatcagtcctctggacagtaagatccatgagacgattgagtccataaaccagctcaagatccagagggacttcatgctaagcttctccagagaccccaaaggctatgtccaagacctgctccgctcccagagccgggacctcaaggtgatgacagatgtagccggcaaccctgaagaggagcgccgggctgagttctaccaccagccctggtcccaggaggccgtcagtcgctacttctactgcaagatccagcagcgcaggcaggagctggagcagtcgctggttgtgcgcaacacctaggagcccaaaaacaagcagcacgacggaactttcagccgtgtcccgggccccagcattttgccccgggctccagctcactcctctgccaccttggggtgtggggctggattaaaagtcattcatctgggaattcc

SEQ ID NO: 870 - DNA, 527 bp, Homo Sapiens
ttttttttatttattcaataaatatttattaagcacctactacatgctggtactacaagccaggtatagatgcttgggatgtattaatgagcaaaacaaaaccagtagcaaacttgtacacgcagataagggtttcaaatattgttggcatgggccaggtgcaatggatcacacctgtaatcccagcactttgggattataggcatgaaccaatgcacccggcctcaaccttttcatttttaacagactgtagctccgagttacttctcagtgtgtgggcaagattgggagggatgtctgcaagcttccttcccttcagcaaatgctcagaatagctccattagcgttcatggaaattctgcacatgcatcaaggagaaaacagccacaaataacacagcctgctttccaaatctccaaagcacatctctgcaatcattctactttccaactatcaccactgaaggctttcagccagagagcaatttgttttcaacttactctgggttcctaagttagcagaactct

SEQ ID NO: 871 - DNA, 322 bp, Homo Sapiens
  misc_feature (128)..(128): n is a, c, g, or t
  misc_feature (236)..(236): n is a, c, g, or t
  misc_feature (245)..(245): n is a, c, g, or t
  misc_feature (266)..(266): n is a, c, g, or t
  misc_feature (314)..(314): n is a, c, g, or t
ttttttttgaacggtaatgggagccacatgttggccagatgtgcctgggagggaccgtcagaatgcggaggcccaggccctgcccccgcgcagccccgcccccagcgaccagaccggcgtggcgctgnctaggcagagtttactttctcgcgtttcccaaagtcgtgtgcaaggacgtgggtggccccagccaggttcaggccgcggtcccttcccaggcccaccctcagtaggtntgcgtctgngtgtggatgacgcgcggggtntgggacttctgggtcccctgcatcacctggacctccagccgccgggcntgctcctt

SEQ ID NO: 872 - DNA, 179 bp, Homo Sapiens
taagctcacaaagccacttccattcattaaagaccctgagcaggttggagagcatttatagtcacagctgagtctgtgaatataaccaacaactgtgatgacccctctgttaataaataacttggacatcagcaaaaaaaaaaaaaaaaaaaaaagggggggggggaaaggttaaaaaa

SEQ ID NO: 873 - DNA, 10211 bp, Homo Sapiens
gagaggtcgttttcccgtccccgagagcaagtttatttacaaatgttggagtaataaagaaggcagaacaaaatgagctgggctttggaagaatggaaagaagggctgcctacaagagctcttcagaaaattcaagagcttgaaggacagcttgacaaactgaagaaggaaaagcagcaaaggcagtttcagcttgacagtctcgaggctgcgcctcagaagcaaacacagaaggttgaaaatgaaaaaaccgagggtacaaacctgaaaagggagaatcaaagattgatggaaatatgtgaaagtctggagaaaactaagcagaagatttctcatgaacttcaagtcaaggagtcacaagtgaatttccaggaaggacaactgaattcaggcaaaaaacaaatagaaaaactggaacaggaacttaaaaggtgtaaatctgagcttgaaagaagccaacaagctgcgcagtctgcagatgtctctctgaatccatgcaatacaccacaaaaaatttttacaactccactaacaccaagtcaatattatagtggttccaagtatgaagatctaaaagaaaaatataataaagaggttgaagaacgaaaaagattagaggcagaggttaaagccttgcaggctaaaaaagcaagccagactcttccacaagccaccatgaatcaccgcgacattgcccggcatcaggcttcatcatctgtgttctcatggcagcaagagaagaccccaagtcatctttcatctaattctcaaagaactccaattaggagagatttctctgcatcttacttttctggggaacaagaggtgactccaagtcgatcaactttgcaaatagggaaaagagatgctaatagcagtttctttgacaattctagcagtcctcatcttttggatcaattaaaagcgcagaatcaagagctaagaaacaagattaatgagttggaactacgcctgcaaggacatgaaaaagaaatgaaaggccaagtgaataagtttcaagaactccaactccaactggagaaagcaaaagtggaattaattgaaaaagagaaagttttgaacaaatgtagggatgaactagtgagaacaacagcacaatacgaccaggcgtcaaccaagtatactgcattggaacaaaaactgaaaaaattgacggaagatttgagttgtcagcgacaaaatgcagaaagtgccagatgttctctggaacagaaaattaaggaaaaagaaaaggagtttcaagaggagctctcccgtcaacagcgttctttccaaacactggaccaggagtgcatccagatgaaggccagactcacccaggagttacagcaagccaagaatatgcacaacgtcctgcaggctgaactggataaactcacatcagtaaagcaacagctagaaaacaatttggaagagtttaagcaaaagttgtgcagagctgaacaggcgttccaggcgagtcagatcaaggagaatgagctgaggagaagcatggaggaaatgaagaaggaaaacaacctccttaagagtcactctgagcaaaaggccagagaagtctgccacctggaggcagaactcaagaacatcaaacagtgtttaaatcagagccagaattttgcagaagaaatgaaagcgaagaatacctctcaggaaaccatgttaagagatcttcaagaaaaaataaatcagcaagaaaactccttgactttagaaaaactgaagcttgctgtggctgatctggaaaagcagcgagattgttctcaagaccttttgaagaaaagagaacatcacattgaacaacttaatgataagttaagcaagacagagaaagagtccaaagccttgctgagtgctttagagttaaaaaagaaagaatatgaattgaaagaagagaaaactctgttttcttgttggaaaagtgaaaacgaaaaacttttaactcagatggaatcagaaaaggaaaacttgcagagtaaaattaatcacttggaaacttgtctgaagacacagcaaataaaaagtcatgaatacaacgagagagtaagaacgctggagatggacagagaaaacctaagtgtcgagatcagaaaccttcacaacgtgttagacagtaagtcagtggaggtagagacccagaaactagcttatatggagctacagcagaaagctgagttctcagatcagaaacatcagaaggaaatagaaaatatgtgtttgaagacttctcagcttactgggcaagttgaagatctagaacacaagcttcagttactgtcaaatgaaataatggacaaagaccggtgttaccaagacttgcatgccgaatatgagagcctcagggatctgctaaaatccaaagatgcttctctggtgacaaatgaagatcatcagagaagtcttttggcttttgatcagcagcctgccatgcatcattcctttgcaaatataattggagaacaaggaagcatgccttcagagaggagtgaatgtcgtttagaagcagaccaaagtccgaaaaattctgccatcctacaaaatagagttgattcacttgaattttcattagagtctcaaaaacagatgaactcagacctgcaaaagcagtgtgaagagttggtgcaaatcaaaggagaaatagaagaaaatctcatgaaagcagaacagatgcatcaaagttttgtggctgaaacaagtcagcgcattagtaagttacaggaagacacttctgctcaccagaatgttgttgctgaaaccttaagtgcccttgagaacaaggaaaaagagctgcaacttttaaatgataaggtagaaactgagcaggcagagattcaagaattaaaaaagagcaaccatctacttgaagactctctaaaggagctacaacttttatccgaaaccctaagcttggagaagaaagaaatgagttccatcatttctctaaataaaagggaaattgaagagctgacccaagagaatgggactcttaaggaaattaatgcatccttaaatcaagagaagatgaacttaatccagaaaagtgagagttttgcaaactatatagatgaaagggagaaaagcatttcagagttatctgatcagtacaagcaagaaaaacttattttactacaaagatgtgaagaaaccggaaatgcatatgaggatcttagtcaaaaatacaaagcagcacaggaaaagaattctaaattagaatgcttgctaaatgaatgcactagtctttgtgaaaataggaaaaatgagttggaacagctaaaggaagcatttgcaaaggaacaccaagaattcttaacaaaattagcatttgctgaagaaagaaatcagaatctgatgctagagttggagacagtgcagcaagctctgagatctgagatgacagataaccaaaacaattctaagagcgaggctggtggtttaaagcaagaaatcatgactttaaaggaagaacaaaacaaaatgcaaaaggaagttaatgacttattacaagagaatgaacagctgatgaaggtaatgaagactaaacatgaatgtcaaaatctagaatcagaaccaattaggaactctgtgaaagaaagagagagtgagagaaatcaatgtaattttaaacctcagatggatcttgaagttaaagaaatttctctagatagttataatgcgcagttggtgcaattagaagctatgctaagaaataaggaattaaaacttcaggaaagtgagaaggagaaggagtgcctgcagcatgaattacagacaattagaggagatcttgaaaccagcaatttgcaagacatgcagtcacaagaaattagtggccttaaagactgtgaaatagatgcggaagaaaagtatatttcagggcctcatgagttgtcaacaagtcaaaacgacaatgcacaccttcagtgctctctgcaaacaacaatgaacaagctgaatgagctagagaaaatatgtgaaatactgcaggctgaaaagtatgaactcgtaactgagctgaatgattcaaggtcagaatgtatcacagcaactaggaaaatggcagaagaggtagggaaactactaaatgaagttaaaatattaaatgatgacagtggtcttctccatggtgagttagtggaagacataccaggaggtgaatttggtgaacaaccaaatgaacagcaccctgtgtctttggctccattggacgagagtaattcctacgagcacttgacattgtcagacaaagaagttcaaatgcactttgccgaattgcaagagaaattcttatctttacaaagtgaacacaaaattttacatgatcagcactgtcagatgagctctaaaatgtcagagctgcagacctatgttgactcattaaaggccgaaaatttggtcttgtcaacgaatctgagaaactttcaaggtgacttggtgaaggagatgcagctgggcttggaggaggggctcgttccatccctgtcatcctcttgtgtgcctgacagctctagtcttagcagtttgggagactcctccttttacagagctcttttagaacagacaggagatatgtctcttttgagtaatttagaaggggctgtttcagcaaaccagtgcagtgtagatgaagtattttgcagcagtctgcaggaggagaatctgaccaggaaagaaaccccttcggccccagcgaagggtgttgaagagcttgagtccctctgtgaggtgtaccggcagtccctcgagaagctagaagagaaaatggaaagtcaagggattatgaaaaataaggaaattcaagagctcgagcagttattaagttctgaaaggcaagagcttgactgccttaggaagcagtatttgtcagaaaatgaacagtggcaacagaagctgacaagcgtgactctggagatggagtccaagttggcggcagaaaagaaacagacggaacaactgtcacttgagctggaagtagcacgactccagctacaaggtctggacttaagttctcggtctttgcttggcatcgacacagaagatgctattcaaggccgaaatgagagctgtgacatatcaaaagaacatacttcagaaactacagaaagaacaccaaagcatgatgttcatcagatttgtgataaagatgctcagcaggacctcaatctagacattgagaaaataactgagactggtgcattgaaacccacaggagagtgctctggggaacagtccccagataccaattatgagcctccaggggaagataaaacccagggctcttcagaatgcatttctgaattgtcattttctggtcctaatgctttggtacctatggatttcctggggaatcaggaagatatccataatcttcaactgcgggtaaaagagacatcaaatgagaatttgagattacttcatgtgatagaggaccgtgacagaaaagttgaaagtttgctaaatgaaatgaaagaattagactcaaaactccatttacaggaggtacaactaatgaccaaaattgaagcatgcatagaattggaaaaaatagttggggaacttaagaaagaaaactcagatttaagtgaaaaattggaatatttttcttgtgatcaccaggagttactccagagagtagaaacttctgaaggcctcaattctgatttagaaatgcatgcagataaatcatcacgtgaagatattggagataatgtggccaaggtgaatgacagctggaaggagagatttcttgatgtggaaaatgagctgagtaggatcagatcggagaaagctagcattgagcatgaagccctctacctggaggctgacttagaggtagttcaaacagagaagctatgtttagaaaaagacaatgaaaataagcagaaggttattgtctgccttgaagaagaactctcagtggtcacaagtgagagaaaccagcttcgtggagaattagatactatgtcaaaaaaaaccacggcactggatcagttgtctgaaaaaatgaaggagaaaacacaagagcttgagtctcatcaaagtgagtgtctccattgcattcaggtggcagaggcagaggtgaaggaaaagacggaactccttcagactttgtcctctgatgtgagtgagctgttaaaagacaaaactcatctccaggaaaagctgcagagtttggaaaaggactcacaggcactgtctttgacaaaatgtgagctggaaaaccaaattgcacaactgaataaagagaaagaattgcttgtcaaggaatctgaaagcctgcaggccagactgagtgaatcagattatgaaaagctgaatgtctccaaggccttggaggccgcactggtggagaaaggtgagttcgcattgaggctgagctcaacacaggaggaagtgcatcagctgagaagaggcatcgagaaactgagagttcgcattgaggccgatgaaaagaagcagctgcacatcgcagagaaactgaaagaacgcgagcgggagaatgattcacttaaggataaagttgagaaccttgaaagggaattgcagatgtcagaagaaaaccaggagctagtgattcttgatgccgagaattccaaagcagaagtagagactctaaaaacacaaatagaagagatggccagaagcctgaaagtttttgaattagaccttgtcacgttaaggtctgaaaaagaaaatctgacaaaacaaatacaagaaaaacaaggtcagttgtcagaactagacaagttactctcttcatttaaaagtctgttagaagaaaaggagcaagcagagatacagatcaaagaagaatctaaaactgcagtggagatgcttcagaatcagttaaaggagctaaatgaggcagtagcagccttgtgtggtgaccaagaaattatgaaggccacagaacagagtctagacccaccaatagaggaagagcatcagctgagaaatagcattgaaaagctgagagcccgcctagaagctgatgaaaagaagcagctctgtgtcttacaacaactgaaggaaagtgagcatcatgcagatttacttaagggtagagtggagaaccttgaaagagagctagagatagccaggacaaaccaagagcatgcagctcttgaggcagagaattccaaaggagaggtagagaccctaaaagcaaaaatagaagggatgacccaaagtctgagaggtctggaattagatgttgttactataaggtcagaaaaagaaaatctgacaaatgaattacaaaaagagcaagagcgaatatctgaattagaaataataaattcatcatttgaaaatattttgcaagaaaaagagcaagagaaagtacagatgaaagaaaaatcaagcactgccatggagatgcttcaaacacaattaaaagagctcaatgagagagtggcagccctgcataatgaccaagaagcctgtaaggccaaagagcagaatcttagtagtcaagtagagtgtcttgaacttgagaaggctcagttgctacaaggccttgatgaggccaaaaataattatattgttttgcaatcttcagtgaatggcctcattcaagaagtagaagatggcaagcagaaactggagaagaaggatgaagaaatcagtagactgaaaaatcaaattcaagaccaagagcagcttgtctctaaactgtcccaggtggaaggagagcaccaactttggaaggagcaaaacttagaactgagaaatctgacagtggaattggagcagaagatccaagtgctacaatccaaaaatgcctctttgcaggacacattagaagtgctgcagagttcttacaagaatctagagaatgagcttgaattgacaaaaatggacaaaatgtcctttgttgaaaaagtaaacaaaatgactgcaaaggaaactgagctgcagagggaaatgcatgagatggcacagaaaacagcagagctgcaagaagaactcagtggagagaaaaataggctagctggagagttgcagttactgttggaagaaataaagagcagcaaagatcaattgaaggagctcacactagaaaatagtgaattgaagaagagcctagattgcatgcacaaagaccaggtggaaaaggaagggaaagtgagagaggaaatagctgaatatcagctacggcttcatgaagctgaaaagaaacaccaggctttgcttttggacacaaacaaacagtatgaagtagaaatccagacataccgagagaaattgacttctaaagaagaatgtctcagttcacagaagctggagatagaccttttaaagtctagtaaagaagagctcaataattcattgaaagctactactcagattttggaagaattgaagaaaaccaagatggacaatctaaaatatgtaaatcagttgaagaaggaaaatgaacgtgcccaggggaaaatgaagttgttgatcaaatcctgtaaacagctggaagaggaaaaggagatactgcagaaagaactctctcaacttcaagctgcacaggagaagcagaaaacaggtactgttatggataccaaggtcgatgaattaacaactgagatcaaagaactgaaagaaactcttgaagaaaaaaccaaggaggcagatgaatacttggataagtactgttccttgcttataagccatgaaaagttagagaaagctaaagagatgttagagacacaagtggcccatctgtgttcacagcaatctaaacaagattcccgagggtctcctttgctaggtccagttgttccaggaccatctccaatcccttctgttactgaaaagaggttatcatctggccaaaataaagcttcaggcaagaggcaaagatccagtggaatatgggagaatggtggaggaccaacacctgctaccccagagagcttttctaaaaaaagcaagaaagcagtcatgagtggtattcaccctgcagaagacacggaaggtactgagtttgagccagagggacttccagaagttgtaaagaaagggtttgctgacatcccgacaggaaagactagcccatatatcctgcgaagaacaaccatggcaactcggaccagcccccgcctggctgcacagaagttagcgctatccccactgagtctcggcaaagaaaatcttgcagagtcctccaaaccaacagctggtggcagcagatcacaaaaggtcaaagttgctcagcggagcccagtagattcaggcaccatcctccgagaacccaccacgaaatccgtcccagtcaataatcttcctgagagaagtccgactgacagccccagagagggcctgagggtcaagcgaggccgacttgtccccagccccaaagctggactggagtccaagggcagtgagaactgtaaggtccagtgaaggcactttgtgtgtcagtacccctgggaggtgccagtcattgaatagataaggctgtgcctacaggacttctctttagtcagggcatgctttattagtgaggagaaaacaattccttagaagtcttaaatatattgtactctttagatctcccatgtgtaggtattgaaaaagtttggaagcactgatcacctgttagcattgccattcctctactgcaatgtaaatagtataaagctatgtatataaagctttttggtaatatgttacaattaaaatgacaagcactatatcacaatctctgtttgtatgtgggttttacactaaaaaaatgcaaaacacattttattcttctaattaacagctcctaggaaaatgtagacttttgctttatgatattctatctgtagtatgaggcatggaatagttttgtatcgggaatttctcagagctgagtaaaatgaaggaaaagcatgttatgtgtttttaaggaaaatgtgcacacatatacatgtaggagtgtttatctttctcttacaatctgttttagacatctttgcttatgaaacctgtacatatgtgtgtgtgggtatgtgtttatttccagtgagggctgcaggcttcctagaggtgtgctataccatgcgtctgtcgttgtgcttttttctgtttttagaccaattttttacagttctttggtaagcattgtcgtatctggtgatggattaacatatagcctttgttttctaataaaatagtcgccttcgttttctgtaaaaaaaaaaaaaaaaaaaaaa

SEQ ID NO: 874 - DNA, 525 bp, Homo Sapiens
tctgaggaccccattggaatagcggatgaggggcgccatctttaaaacctaaacaggcatttggacaacacattattgtacaccacaaatatctaacagaccataaaatacaactgtttgtaagtattttaataacttgatactgctctgcttttcttcgtttttaaaaattcacttctccatttatgtattgctatatgtgtcgcatgagaattctattactttctctaagacgttttactgtttttctgactcttacttcaagggaataaaacctcctctttacccgcaagaaagttttagctgaattaattaatgtatgatggagactctttttcaagtgttaaccaatatattggtgtagaagcctccagtctcttaaatttttgtttgcccagtgcttgaacagtggtatctcgtagttgcttgaattggcatttccctgcctactgaaattatcttttaatatgtttattagtaatttgtatttcctctactatgaataccagtttttatccttgcacg

SEQ ID NO: 875 - DNA, 187 bp, Homo Sapiens
  misc_feature (84)..(84): n is a, c, g, or t
  misc_feature (92)..(92): n is a, c, g, or t
  misc_feature (95)..(95): n is a, c, g, or t
  misc_feature (130)..(130): n is a, c, g, or t
gtttttggcgctcggtccggtcgcgtccgacacccggtgggactcagaaggcagtggagccccggcggcggcggcggcggcgcncgggggcnacncgcgggaacaacgcgagtcggcgcgcgggacgaanaataatcatgggccagactgggaagaaatctgagaagggaccagtttgttggcggaa

SEQ ID NO: 876 - DNA, 676 bp, Homo Sapiens
  misc_feature (265)..(265): n is a, c, g, or t
tcttgtgctggtctgttaaatcctgccctcctggtgctagatccagttgtgcctcaggggcagaggaaacaaaacacagctatcctgttggcctgtgtgtggttttgaagttgtactttctctgtgggtgccagttaaatattggagagcaaggaatgtggacttgtatggctttgaaccaagagagggttatgagcctacggattgaggttaaaatccaagaaccaacatttagagcttgtgcttttctctcattccatcactntgtaatgatgatacttaacatgagcagggtgaatgacaggtactgacgaagtccaacacaaaggtataatacagcctgttgtctaaagccaaggagtcataaaaccatgagaaataaataggaatcaatagttagtagtgacattggtgctctctagaaatctcagcatgagctgctatagaataccctcccagcaacaaaacctaatcagtaaggccagctagacccaatggctcatgcctgtaatcccaacactttgggaggcaaggtgggaggatggttgtgtccagaagttcgagacagcctggacaacatagtgagatcctatctctataaaaatcaaaattagcaggctggggtgctactatagtccggaaagggagggagggggggtggttaccggggtgggtg

SEQ ID NO: 877 - DNA, 7258 bp, Homo Sapiens
ttcaataggaagcaccaacagtttatgccctaggactttgttcccacaatcctgtaacatcatatcacgacacctaacccaatccttatcaagccctgtcaaaaacggactttaaaccaagctgcaaattttcagtaatctggccttgcctttccccctctgatagcaccatcaaacaaacccccttactgccgaaagcaataagcccggctttgttccatccactggttgtgttggtgatatctggggactgccactgaacagacgcacagagggagcccctacaggcaggggtttttctgtctgtgcttcttgggagagtatgtctcgtacatttgtcgcgtgatgaagacttcacagctccatccagcgaccagactcacagctccatccagctgcggcaagggggtctgaggcagtcttaggcaagttggggcccagcgggagaagttgcagaagaactgattagaggacccaggaggcttcagagctgggctgaggtagagagtctcctgtgcgccttctctcctctctgcaattcggggactccttgcactggggcaggccccggcaggtgcatgggaggaagcacggagaatttacaagcctctcgattcctcagtccagacgctgttgggtcccctccgctggagatcgcgcttcccccaaatctttgtgagcgttgcggaagcacgcggggtccgggtcgctgagcgctgcaagacaggggagggagccgggcgggagagggaggggcggcgccggggcgggccctgatatagagcaggcgccgcgggtcgcagcacagtcggagaccgcagcccggagcccgggccagggtccacctgtccccgcagcgccggctcgcgccctcctgccgcagccaccggtgagtgccgcggtcctgagatccccgggccggatgcgcggcggccccagctcccgagcgtctgcctgccccgccctgggctgcccgggctccctgggctccccggcggctgcacggagtcaaggcgccccgtcccgggcgtcccccgcgggtgccgatccaggctgcccggagtccggagcccatagaggagagagacagctggggagcctggtcaccgcgggcatctcccctgcgctgcagtcgcccgcctggcctgccttcccgttcctccgcctcttgccctgacttctccttcctttgcagagccgccgtctagcgccccgacctcgccaccatgagagccctgctggcgcgcctgcttctctgcgtcctggtcgtgagcgactccaaagtgagtgcgctcttgctttgactgatgctgcccaaggacctctgatcagcaccaggggagaggaggggctgctcagggagctggggtctccggattccatccacagcagggccagactctccccaggaaatgggacagggtggcagcggaggcttgagaaccacgggggttggcactggctggcaagggaggaagagggccaccgggactgccccagcctgcgggcatctggtagatgaagcttaatccatttctcctggctggaaaccatggtcttccatttgagaactagatacgaacagggtgaggcgagagggagagggaagagtgggttttgggattggggccagtttaccctcaccctggatccctggagcatgggacctttgatgaagcctcctcccgaatctcttccagggcagcaatgaacttcatcaagttccatgtgagtatccacccctacaacagttggctgcacagacaagttgggaaggcttcaggggacactcccctccctgccctctgctgcagcgtgcgccaccccttaccacttccactccccctcgcttaccccacctttgttctctccagcgaactgtgactgtctaaatggaggaacatgtgtgtccaacaagtacttctccaacattcactggtgcaactgcccaaagaaattcggagggcagcactgtgaaataggtatggggatctccactgcaactgggagagaaatttggggacagggagggatgggtgggaggcaagagcaggcaggagttaggagctggaggtagggtgggtgacatcttcatccctatgtgacaagcataaacacacacacacgctcacgaaacagtggccacacaaatgtgaggtggggttggaaggagaccctgtccagtcttctggcaggtctgaaacgacatctttaaaatgtccgttggcagccgggcatggtggctcacgcttgtaatcccagcattttgagaggtcaagtttgagtggatcatttaggtcaggagttcaagaccagcctggacaacatggtgtaaccctgcctctactaaaaatgcaaaaatcagcctggcatggtggtggatgcctgtagtcccagctacttgggaggctgaggcaggagaattgcttgaacatgggaggccagatctcagtgagctgagatcacaccactgcactccaactgggcgacagagcaagactccatctcaaaaaaaaaaaaaaataaaagttagttggaatgttcttctctttctcatattctctcatcctcctgtccccttgtagataagtcaaaaacctgctatgaggggaatggtcacttttaccgaggaaaggccagcactgacaccatgggccggccctgcctgccctggaactctgccactgtccttcagcaaacgtaccatgcccacagatctgatgctcttcagctgggcctggggaaacataattactgcaggtgaggtgggggcaacaaggaccaaaagccctccctacagcttcccagaaaccttgttaccatccccttctcccagagggctggccatagcacaagagaagtgcggcctctggttgagtcttccctgaggggaggaggcagggaaggccctctgggttggaatgacatcccctatctttctgtgttgtgccaggaacccagacaaccggaggcgaccctggtgctatgtgcaggtgggcctaaagccgcttgtccaagagtgcatggtgcatgactgcgcagatggtgagcatcactgacctgctgatgacaggtgggtggaaggggacaaacttacatgtccccttattccatcacaggaggactgaggaggtggggggtgcccgagagggatgctttctcctacctgcctccctaagacatccctctgtttgtcctccaggaaaaaagccctcctctcctccagaagaattaaaatttcagtgtggccaaaagactctgaggccccgctttaagattattgggggagaattcaccaccatcgagaaccagccctggtttgcggccatctacaggaggcaccgggggggctctgtcacctacgtgtgtggaggcagcctcatgagcccttgctgggtgatcagcgccacacactgcttcatgtacggccctgggtttctcctcttcgactcttctgccccaccccaagcacatccctttctccttcccagcaaagtgttccgcctcatttctccctcatctgcccctgtccatgcgcccatggccttggggacaagtcgtgctttgaggcctctagggagggaaggaagaagtggcatgatttcatgggactaagctgtttgatgggtatcttcttccacagtgattacccaaagaaggaggactacatcgtctacctgggtcgctcaaggcttaactccaacacgcaaggggagatgaagtttgaggtggaaaacctcatcctacacaaggactacagcgctgacacgcttgctcaccacaacgacattggtgagggggaacgcccgcgactactgtggccataatggcttggggagagtgggacccagggagagactggagctgagttgaagctgccggtggggcaggggtggggcgagggaccttgaagcctcgatatacatgacaaaggatggcagggaagagttccatgaagtctgaggggcctggtgctcctctggagagaccctgaatttccccaacaagtagccctcttgcgagtggaaacagccctgtgggtatatggcttgggctgggaaggccctgtttatatgaattagaaaaagacacaccttcctttgtgggatgcagcctctgtctgtgctaggatatagaacttggagaatggagccttgggatggattccagcctaactacctcagggggatcctctagagtgcagctgggagtttttgcagaaacgacctgtacagctgtatgcagtggctctggccatccaagcctttttcaacacctggaacaaagcccttggggcatggggcaggggaggtttccaggtgataagcgaccagcagacctccctggatgactgacctagggataggcatagctacttcctcggcacttggaggggacagatggggaccgcctaaccagtagtgatctttctcctctgaccctctgtcctcccccagccttgctgaagatccgttccaaggagggcaggtgtgcgcagccatcccggactatacagaccatctgcctgccctcgatgtataacgatccccagtttggcacaagctgtgagatcactggctttggaaaagagaattctagtaagtgacaattgcgactgacttagaaggtcctgaggagtgttttgacctgaaaatgagcccagtgtgatcaagggaagactgcagagttagaggtgggagcactgaggcggtggcagatgggtccagggatggatgaagagtgttgtttagggagcgatgggctgcaaaggtaaatagatggtaggggctataggtggaggtaaatggctcagatttgcatggagagagaataatgggcctctccctgggtgatgatactttatggtgtcccctctctggcgagacgtcccacgtggaggcagataaatcttgatgcaaacgcctccctgttttctccacctagccgactatctctatccggagcagctgaaaatgactgttgtgaagctgatttcccaccgggagtgtcagcagccccactactacggctctgaagtcaccaccaaaatgctgtgtgctgctgacccacagtggaaaacagattcctgccaggtgagtgttccaagcatctctctccacctcttccatatctccccagagctcctgggcttgttccagccagcttaagggtgtctctctctagccaaagccctaagtagccagaatcaggagctcaggtctttgagggtttaaaccagtccttatgtgtttgccagacattaccaaaaaaatcccagctctgcgctagtcacttcagactgggggcacgagatcctagaaagaggaaacagtaaaagacaatgtaactcagtgcccagggtgtgttgtgaactataaatgatcaggtgttcaggagagggaggtgagtgccaacctgagggtcagggaggggaggctttaaaggaaatgtgacttgataggcatttgaagaggcagagggaagaaaggaaggtgtttcagttgaaagatacaaaactgagaaggaggctggcatattccgggtggggaggagaactagggtctgggagtgtggatggaatagtggcagatgacagggcttttaaagccaagcaggggattttccaacttcgatgtggtagaaatggggctgcgtcaggcacagtggctcatgcctgtaatcccagcattgggctaggccgtagtcgatggatcattgaggccagagttgagaccggcctggaccaacatggtgaaaccctgtgtctactaaaaaatgcaaaaaaaaaaattagccaggtgtggtggtgcctgcctgtaatcccagctaatcaggaggctgagacatggaatcgcttgagcacaggaggcaagtttgacgtgagctgagatcacgtcattgcacgccagcctgggcgacagagcgagattctgtcctcccgccgaaaaaagaaagaaaatgggaagtcgctaaggactttgactgggaaactcttccctctctctggtatggttgggtgatgggatcagaaatcccctcctcacttctctagggctcatcttttgtatctttggcgtcacagggagactcagggggacccctcgtctgttccctccaaggccgcatgactttgactggaattgtgagctggggccgtggatgtgccctgaaggacaagccaggcgtctacacgagagtctcacacttcttaccctggatccgcagtcacaccaaggaagagaatggcctggccctctgagggtccccagggaggaaacgggcaccacccgctttcttgctggttgtcatttttgcagtagagtcatctccatcagctgtaagaagagactgggaagataggctctgcacagatggatttgcctgtgccacccaccagggtgaacgacaatagctttaccctcaggcataggcctgggtgctggctgcccagacccctctggccaggatggaggggtggtcctgactcaacatgttactgaccagcaacttgtctttttctggactgaagcctgcaggagttaaaaagggcagggcatctcctgtgcatgggtgaagggagagccagctcccccgacggtgggcatttgtgaggcccatggttgagaaatgaataatttcccaattaggaagtgtaacagctgaggtctcttgagggagcttagccaatgtgggagcagcggtttggggagcagagacactaacgacttcagggcagggctctgatattccatgaatgtatcaggaaatatatatgtgtgtgtatgtttgcacacttgtgtgtgggctgtgagtgtaagtgtgagtaagagctggtgtctgattgttaagtctaaatatttccttaaactgtgtggactgtgatgccacacagagtggtctttctggagaggttataggtcactcctggggcctcttgggtcccccacgtgacagtgcctgggaatgtacttattctgcagcatgacctgtgaccagcactgtctcagtttcactttcacatagatgtccctttcttggccagttatcccttccttttagcctagttcatccaatcctcactgggtggggtgaggaccactccttacactgaatatttatatttcactatttttatttatatttttgtaattttaaataaaagtgatcaataaaatgtgatttttctgatgacaaatctccctggtgcttgtatgggaaggagttggagtacataaaaaggagaaaataacaaaggtgg

SEQ ID NO: 878 - DNA, 759 bp, Homo Sapiens
tttaattttttttttttatattaaacagttaatttcagtaacatggtagggcaacaatataatcctcagataagtcagcaaaccagtgacaagaaatggacaaccactccttctacaggcttccgggagacaggcaggctgggcttggtgggcccccggggtgggtaacatcttaaggaatcctatcatggtttggtgttatattatgctaaactggtgaaaaacaaaccacttcatggcagacaatcattcttaggtcaaacacaagcaacgacactatttaggaaatcaattcctcacaacattttatcccggaattatagcagtactggtgactactaacatctaattctggtgagaaatataatggcattggtaagcggacttggtgaagagcttggaaaagacccttttagaaattatttaaatggatcactcttataacaacattttattaaatctcagaatctactaatgtgacagacaaagggtatgcttaacagagtctctacactacggggtataatggctagaccatttcgggcatttaaatgacctcccagaatattacaccaagccccggagaactagtgagcgtcttactacggaccgggtaaaatacccaaagctacaaaagggtaaagaaacccaaacaacagacaggagtacccgggaaaaaccctaagagcactggcaagacgaccaataaaaacggaaagagaaagggacctcccaaagggggaatcacgggacccaata

SEQ ID NO: 879 - DNA, 582 bp, Homo Sapiens
gcggccgcccggagacaccgagctcggccaccgcccgccccagcaatggctgcaccatgcacgtgaacggcaaagtggcgctggtgaccggcgcggctcagggcataggcagagcctttgcagaggcgctgctgcttaagggcgccaaggtagcgctggtggattggaatcttgaagcaggtgtacagtgtaaagctgccctggatgagcaatttgaacctcagaagactctgttcatccagtgcgatgtggctgaccagcaacaactgagagacacttttagaaaagttgtagaccactttggaagactggacattttggtcaataatgctggagtgaataatgagaaaaactgggaaaaaactctgcaaattaatttggtttctgttatcagtggaacctatcttggtttggattacatgagtaagcaaaatggaggtgaaggcggcatcattatcaatatgtcatctttagcaggactcatgcccgttgcacagcagccggtttattgtgcttcaaagcatggcatagttggattcacacgctcagcagcggtgaggctacaacaaccgtcatatctca

SEQ ID NO: 880 - DNA, 367 bp, Homo Sapiens
agcggccgctccagccagccccgcaggatgaagggaggacacgagggtcggtgtagttctagaagcccgcactcacactagcgcgtcctccgtcccgagccgccacccgatatcccgacgctctgaggggatggcggcccctaaccggcggtttatagcctggccccgcccccggcccccaggggggctgtgcgtcacttcctgaggcacgtacgctcgcgaggtgctctgacagatcgccccgggggcggggatgcgcgcgcagcgggcggggccctctgcggagggcgctgcgggcgaggcgaaggccaaggggaaaggcgccaaggcagcaggtgccccgaggagccgcgcgatgggcgcactg

SEQ ID NO: 881 - DNA, 618 bp, Homo Sapiens
ccgccagttccttcctgctccctgaaatgaccagtgcctccctgaggacaggcacatcaggtctcagccaaccttcccttccaaacataactcagctagaccctctggtctctaaatagtatctcttctctttgtctttttctgtttcaggcctccagttaccaactcctgtctggtttcatgtccttttctatctggcagtgggaataatgtttttagtgaacactgttctctgggtgacaatacgtaaagaactgaaaagaaagaaaaagtgggatttagaaatctctttggattctggtcatgagaagaaggtaatttccagccttcaagaagacagacatttagaagaagagctgaaatgtcaggaacaaaaagaagaacagctgcaggaaggggtgcaccggaaggagccccagggggccacgtagcagcggctcagtgggtggccatcgatctggaccgtcccctgcccacttgctccccgtgagcactgcgtacaaacatccaaaagttcaacaacaccagaactgtgtgtctcatggtatgtaactcttaaagcaaataaatgaactgacttcaactgggatacatttggaaatgtggtcatcaaagatg

SEQ ID NO: 882 - DNA, 1347 bp, Homo Sapiens
gtttcccaggcatttctcctcgcgggactaccaggggtagtgggacacttagcctctctaaaagcacctccacggctgtttgtgtcaagcctttattccaagagcttcacttttgcgaagtaatgtgcttcacacattggcttcaaagtacccatggctggttgcaataaacattaaggaggcctgtctctgcacccggagttggtgccctcatttcagatgatttcgagggtgcttgacaagatctgaaggaccctcggactttagagcaccacctcggaacgcctggcacccctgccgcgcgggcacggcgacctcctcagctgccaggccagcctctgatccccgcgaggggtcccgtagtgctgcagggggaggctggggacccgaataaaggagcagtttccccgtcggtgccattatccgacgctggctctaaggctcggccagtctgtctaaagctggtacaagtttgctttgtaaaacaaaagaagggaaagggggaaggggaccctggcacagatttggctcgacctggacataggctgggctgcaagtccgcggggaccgggtccagaggggcagtgctgggaacgcccctctcggaaattaactcctcagggcaccgctcccctcccatgcgccgccccactcccgccggagactaggtcccgcgggggccaccgtgtccaccgcctcgcggccgctggccttgggtccccgctgctggttctcctccctcctcctcgcattctcctcctcctctgctcctcccgatccctcctccgccgcctggtccctcctcctcccgccctgcctcccgcgcctcggcccgcgcgagctagacgtccgggcagcccccggcgcagcgcggccgcagcagcctcctccccccgcacggtgtgagcgcccgccgcgccgaggcggccggagtcccgagctagccccgcggccgccgccgcccagaccggacgacaggccacctcgtcgcgtccgcccgagtccccgcctcgccgccaacgccacaaccaccgcgcacggccccctgactccgtccagtattgatcgggagagccggagcgagctcttcggggagcagcgatgcgaccctccgggacggccggggcagcgctcctggcgctgctggctgcgctctgcccggcgagtcgggctctggaggaaaagaaaggtaagggcgtgtctcgcggctccccgccgcccccggatcgcgccccggaccccgcagcccgcccaaccgcaccgcgcaccggcttcgcccgcgcccccgcccgtcctttcctgtttccttgagatacacgtcgccgccgaccgggaccgcgggaggaa

SEQ ID NO: 883 - DNA, 3259 bp, Homo Sapiens
gacgcgcgccgggagccggcggccgggccagccggcgccggggcccagtgcgccgcgctcgcagccggtagcgcgccagccgtaggcgtcgctcggcagccgcggggccctaggcgtgccggggagggggcgagggcggccaggcgcctgccgccccggaggcaggatgagcatcgagatcccggcgggactgacggagctgctgcagggcttcacggtggaggtgctgaggcaccagcccgcggacctgctggagttcgcgctgcagcacttcacccgcctgcagcaggagaacgagcgcaaaggcaccgcgcgcttcggccatgagggcaggacctggggggacctgggcgccgctgccgggggcggcacccccagcaagggggtcaacttcgccgaggagcccatgcagtccgactccgaggacggggaggaggaggaggcggcgcccgcggacgcaggggcgttcaatgctccagtaataaaccgattcacaaggcgtgcctcagtatgtgcagaagcttataatcctgatgaagaagaagatgatgcagagtccaggattatacatccaaaaactgatgatcaaagaaataggttgcaagaggcttgcaaagacatcctgctgtttaagaatctggatccggagcagatgtctcaagtattagatgccatgtttgaaaaattggtcaaagatggggagcatgtaattgatcaaggtgacgatggtgacaacttttatgtaattgatagaggcacatttgatatttatgtgaaatgtgatggtgttggaagatgtgttggtaactatgataatcgtgggagtttcggcgaactggccttaatgtacaatacacccagagcagctacaatcactgctacctctcctggtgctctgtggggtttggacagggtaaccttcaggagaataattgtgaaaaacaatgccaaaaagagaaaaatgtatgaaagctttattgagtcactgccattccttaaatctttggagttttctgaacgcctgaaagtagtagatgtgataggcaccaaagtatacaacgatggagaacaaatcattgctcagggagattcggctgattcttttttcattgtagaatctggagaagtgaaaattactatgaaaagaaagggtaaatcagaagtggaagagaatggtgcagtagaaatgcctcgatgctcgcggggacagtactttggagagcttgccctggtaactaacaaacctcgagcagcttctgcccacgccattgggactgtcaaatgtttagcaatggatgtgcaagcatttgaaaggcttctgggaccttgcatggaaattatgaaaaggaacatcgctacctatgaagaacagttagttgccctgtttggaacgaacatggatattgttgaacccactgcatgaagcaaaagtatggagcaagacctgtagtgacaaaattacacagtagtggttagtccactgagaatgtgtttgtgtagatgccaagcattttctgtgatttcaggttttttcctttttttacatttacaacgtatcaataaacagtagtgatttaatagtcaataggctttaacatcactttctaaagagtagttcataaaaaaatcaacatactgataaaatgactttgtactccacaaaattatgactgaaaggtttattaaaatgattgtaatatatagaaagtatctgtgtttaagaagataattaaaggatgttatcataggctatatgtgttttacttattcagactgataatcatattagtgactatccccatgtaagagggcacttggcaattaaacatgctacacagcatggcatcacttttttttataactcattaaacacagtaaaattttaatcatttttgttttaaagttttctagcttgataagttatgtgctgccttggcctattggtgaaatggtataaaatatcatatgcagttttaaaactttttatatttttgcaataaagtacattttgactttgttggcataatgtcagtaacatacatattccagtggttttatggacaggcaatttagtcattatgataataaggaaaacagtgttttagatgagagatcattaatgcatttttccctcatcaagcatatatctgcttttttttattttgcaattctctgtattctatgtctttaaaaatttgatcttgacatttaatgtcacaaagttttgtttttttaaaaagtgatttaaacttaagatccgacattttttgtattctttaagattttacacctaaaaaatctctcctatcccaaaaataatgtgggatccttatcagcatgcccacagtttatttctttgttcttcactaggcctgcataatacagtcctatgtagacatctgttcccttgggtttccgttctttcttaggatggttgccaacccacaatctcattgatcagcagccaatatgggtttgtttggtttttttaattcttaaaaacatcctctagaggaatagaaacaaatttttatgagcataaccctatataaagacaaaatgaatttctgaccttaccatatataccattaggccttgccattgctttaatgtagactcatagttgaaattagtgcagaaagaactcagatgtactagattttcattgttcattgatatgctcagtatgctgccacataagatgaatttaattatattcaaccaaagcaatatactcttacatgatttctaggccccatgacccagtgtctagagacattaattctaaccagttgtttgcttttaaatgagtgatttcattttgggaaacaggtttcaaatgaatatatatacatgggtaaaattactctgtgctagtgtagtcttactagagaatgtttatggtcccacttgtatatgaaaatgtggttagaatgttaattggataatgtatatataagaagttaaagtatgtaaagtataacttcagccacatttttagaacactgtttaacatttttgcaaaaccttcttgtaggaaaagagagctctctacatgaagatgacttgttttatatttcagattttattttaaaagccatgtctgttaaacaagaaaaaacacaaaagaactccagattcctggttcatcattctgtattcttactcactttttcaagttatctattttgttgcataaactaattgttaactattcatggaacagcaaacgcctgtttaataaagaactttgaccaag

SEQ ID NO: 884 - DNA, 288 bp, Homo Sapiens
  misc_feature (2)..(2): n is a, c, g, or t
  misc_feature (14)..(14): n is a, c, g, or t
  misc_feature (60)..(60): n is a, c, g, or t
  misc_feature (66)..(66): n is a, c, g, or t
tntcggcggaagtnatcgctgtgtgaatcgtgggtgggatggccgcgggccgcctctttntaagtnggcttcgagcacccttcagttccatggccaagagcccactcgagggcgtttcctcctccagaggcctgcacgcggggcgcgggccccgaaggctctccatcgaaggcaacattgctgtgggaaagtccacgtttgtaaagttactcacgaaaacttacccagaatggcacgtagctacagaacctgtagcaacatggcagaatattccaggcttgcttggca

SEQ ID NO: 885 - DNA, 440 bp, Homo Sapiens
ttttctaaaaaaatttttttaatcagtttaaaagttcgaggaaaaagaaaatcaatcagaaaagcaactataccaaaacagggttatccaagtgagcttctctcacttccttagatggacttcagcttataggatgacacgagatgcgagtaagaagctatttgcgcatttcagctgcgtgacttgtgtctgcgttgctttcctttctttcttctgtggactgagaatgctagtgcctttgaatttgtctttacaggacctgagggtcttttgatggtaagagaatgaatgatcattgctgccttgagttctgtgtgatccgtcaggcctcgcctccaggatggcaattgtagcctgagatgacgtagcccaagttgcacagcagagttgctgttctggaaacactgtgccgagtgaccaccgaccttcacagtgctagt

SEQ ID NO: 886 - DNA, 1837 bp, Homo Sapiens
tgacccccgcacaggcgcatttctcctgggaggaatcctctactcctggcagtttcctcatttcaacgccctgagctggggcctccgtgaagactactcccggggcggctactgcatgatgtcggtcacccacccgggcctgtgccggcgcgtggcgctgcgccactgcctggccctgctcgtgctgtccgcagcagcccctgtgctggacatcaccacatggaccttccccatcatggcccttcccatcaatgcgtacatctcctacctcggcttccgcttctacgtggacgcagaccgcaggagctcgcggagactgttcttctgcagcctgtggcacctgccgctgctgctgctgctcatgctcacctgcaagcggccgagcggaggcggggacgcagggccccctcccagctgagagcactgggacgcccaccgcccctttccctccgctgccaggcgagcatgttgtggtaattctggaacacaagaagagaaattgctgggtttagaacaagattataaacgaattcggtgctcagtgatcacttgacagttttttttttttttaaatattacccaaaatgctccccaaataagaaatgcatcagctcagtcagtgaatacaaaaaaggaattatttttccctttgagggtctttatacatctctcctccaaccccaccctctattctgtttcttcctcctcacatgggggtacacatacacagcttcctcttttggttccatccttaccaccacaccacacgcacactccacatgcccagcagagtggcacttggtggccagaaagtgtgagcctcatgatctgctgtctgtagttctgtgagctcaggtccctcaaaggcctcggagcacccccttcctggtgactgagccagggcctgcatttttggttttccccaccccacacattctcaaccatagtccttctaacaataccaatagctaggacccggctgctgtgcactgggactggggattccacatgtttgccttgggagtctcaagctggactgccagcccctgtcctcccttcacccccattgcgtatgagcatttcagaactccaaggagtcacaggcatctttatagttcacgttaacatatagacactgttggaagcagttccttctaaaagggtagccctggacttaataccagccggatacctctggcccccaccccattactgtacctctggagtcactactgtgggtcgccactcctctgctacacagcacggctttttcaaggctgtattgagaagggaagttaggaagaagggtgtgctgggctaaccagcccacagagctcacattcctgtcccttgggtgaaaaatacatgtccatcctgatatctcctgaattcagaaattagcctccacatgtgcaatggctttaagagccagaagcagggttctgggaattttgcaagttatcctgtggccaggtgtggtctcggttaccaaatacggttacctgcagctttttagtcctttgtgctcccacgggtctgcagagtcccatctgcccaaaggtcttgaagcttgacaggatgttttcattactcagtctcccagggcactgctggtccgtagggattcattggtcggggtgggagagttaaacaacatttaaacagagttctctcaaaaatgtctaaagggattgtaggtagataacatccaatcactgtttgcacttatctgaaatcttccctcttggctgcccccaggtatttactgtggagaacattgcataggaatgtctggaaaaagcctctacaacttgttacagccttcacatttgtacaa

SEQ ID NO: 887 - DNA, 543 bp, Homo Sapiens
ttattttttttttttttttttttttttggctctagagggggtagagggggtgctatagggagttgcttggaggttggcggccggggctgaaggctagcaaaccgagcgatcatgtcgcacaaacaaatttactattcggacaaatacgacgacgaggagtttgagtatcgacatgtcatgctgcccaaggacatagccaagctggtccctaaaacccatctgatgtctgaatctgaatggaggaatcttggcgttcacagagtcagggatgggtccattatatgatccatgaaccagaacctcacatcttgctgttccggcgcccactacccaagaaaccaaagaaatgaagctggcaagcacttttcagcctcaagctttacacagctgtccttacttcctaacatctttctgataacattattatgttgccttcttgttccccacttggatatttaaagaatgtccaatacaccgttgaaaggtgcttggaacctgcttggcttccttggttagagcccaccacccaccataggcccagcc

SEQ ID NO: 888 - DNA, 339 bp, Homo Sapiens
gggggccctgcgcgtgagcagctgcagcggcagaggcagcatccagcggcggcgccagcagttccagtccgttgctttactttttgcttcaccgacatagtcattatgccgaagagaaagtctccagagaatacagagggcaagatggatccagtaactaaacaggagcccacaagacggtctgccagattgtcagcgaaacctgctccaccaaaacctgaacccaaacgaagaaaaacatctgctaagaaagaacctggagcaaagattagcagaggtgctaaagggaagaaggaggaaaagcaggaagctggaaaggaaggcacagaataactggaa

SEQ ID NO: 889 - DNA, 416 bp, Homo Sapiens
  misc_feature (295)..(295): n is a, c, g, or t
  misc_feature (305)..(305): n is a, c, g, or t
ctcaaacaaagtgagctatttggataacaaagcatacccagtggtctgctagtaaaccagctctttgtgtgggaagggacaaatgaaaaaattcccaaatttgtagcatttgttgacttccatggtgtgaatactcccacatggcgtgatttcaggcttatagttggctcatacacgttcctgcatatttaataattggccctcaccagactgtaggagctagctccaatgcactattgactgtacccttcatagcggggcacaatgttgcccttttaatagtcattttttaaantgggggttantaaactacttttgtgttctttatagtttttttaaggtaattatagaaagtgatgaatatatctggctggggcgcagtggctcacatctgtaatcctagtactttggaagcc

SEQ ID NO: 890 - DNA, 423 bp, Homo Sapiens
actacgctttgcaacctaccttggtaccctcaacccttctacccccaccttccctctgcagtgcaaggcttgaaaaacaggccatcccaccaatcagcaggcctccccgggaaactcgctccgcccctcagccgcattgggccgaggcgcgctcccccgcggcccgccgggtcccagccactgagcatgcccagcgcctcgactgctgagtgcccagccagcatcctgcagtgcctgggagcctgaggccgaggagggtcccggcgtagtaaaggggcggcaaccccaaacgggccaggcatcaaaatgagacagcattaaaccgagtgacatctctgtgggtccttagtgccaggcgagcaagcagggacaaactgcttgtttataggtcggcttaaaaaattaaaaaactctggggagcgt

SEQ ID NO: 891 - DNA, 4646 bp, Homo Sapiens
gtctgtgtcctaatcttctcttttaatggggataccactcaggttggattagggcccatcctaacaatcccattttaacttagttacctcttcagggcctatcttcaaatatactcacattttgaggtacaggtagatggttagggcttcagcatgaatttttgtggggacataattcaaccctccacacataattaccaatttctgaatgtctttctggttaagttgcataaaaacgtttatctacttgaactctaggatgatagttaaaaaaaaaaatgttggccaggcgcagtgatggatgcatatgatcccagcactttgggaggccgaggtgggcagattgcttgagttcaggagttcaagaccagcctggcaacatggtgaaatcctgtgtctacaaaaaatgcaaaaattagctggacatgatggcatgtgcctttggttccagctacttaggaggctgaggtaggaggatggcttgagcccaggaggcggaggttgcagtgagccaaaatcgtgccaccgcactctagcctgggcaacagagccagaccatatctcaaaaaaaaaaaaaaaaagtttatctacaaaaatgcttttgtgcctcttacatacaacccttccagaggaaaggcctagctgagagtaagagatggttgaaaaaaatgcaatgttatgattgctgaacagggcacgactgtttttgtaattttggagaaaataattaaagcctggcacctggggaggcttgatccctggaagcctcctcttgctgaaggaaaattcccagtgctgcctttccatgtgctgtgagtgctttgagttcagactgacaacagagtgggtctagcttctatgctttccatgaagatctcccacaaatgtcatccatgctcatgagatggatcaacttgtatcctgaacaagcaaaactgtttgggactcactgccttcaggcagtcccttggaagccaaggactctgggaacttttcagatgggactggaaacacttgggcaggagttcccctggtaggaggtctgttcacctgtacagcctaatggatgtcctgcttgaggtgccctaatattgcaaattctttgtttacaggggtaccacctgtgcccctgggactgtgcttctgtacatgaccacaactctcatgatgtcccctcagccctggaaagcatttgggttagcttccgcttactggtcagagttatactgtgcctgaattgatgcctcaggtcaggttgaaaaaaaaaaaaaaggttcagacagcaattaagggctgggcacggtggctcatgcctgtaatcccgacactttgggaggctgaggtgggcagatcacctgaggtcaggagtttgagaccagcctgaccgacatggtgaaaagtaaaaatacaaaaataaaaaaattagctgggtgtggtggtgtgcacctgtagtcccagctactcgggaggctgaggcaggagaatcgcttgaacccaggaggtggaggctgcagtgagccaagatcacgccactgcactccagcctgggtgacagagcaagactccatctcaacaacaacaacaaaaaggaattaaggaggaagccacctggcttcctaagatagactttatggttaatgggatttattttagctggttaagtccaggacccctaccaggaagaactgaggtccatatttgaggttggtctcacccttttgcatgtggtcctactaataataattttgctgtaaagaagcctcaataaggagatggactgtgtgaaaagagatgagaaagcaggcctgtttgcaaggctggcccttggctggcatctgaaagcttggatttcaggagggttctcattactccctaaatgataagagtggctcactgtgcctaaactgttcgtacaaacaatgtgggttatgcccaacatctgctttccttctgggagtcagattttcatatgtgttaggcagaggatgaggtgagcagctcccaatgagaaccctgaacactgagtctgtaatgagcttcccttgtatacaacattgcacatgggttgtcacaactgattgctggaggaattgtgtcctatgtgactctgctgggagaggactgtgggaggcttacacctggtttccctggactttgtccatgcgcttttttcctttgctgattttgcttcctagcctttcgctgtagtaaaacatagccatgagtatgactacaggctgagtctgtgaatctcctagtacatcatcagactaggaggtggtggtgttggcaccccccagcacagggcacaagggagacttgcagggtgtttgtcatgttccctttctcaatctgggtgtggtttacagatttgttcagtttgtgaaaattcactgagctctatgaacaattataatatgtacatttttttctgtaagtgtattaaatttcaataaaaagaattcacactataggggtacaaaataacttaatttttcaaagtcttccttttattcagccaacattttagtaagtacccttttttttttaccaagcactgctctgggagcttgggacatggggtagaaaggacggcatcattgtcctcattgtccttcagcttagctgcaaggcaggtgaaggatgcttatagtatggttgatttttgctgggctctatgaaggatcagagggtgctaaggaggcacagagaaagagcttttaacgtgggtattttactgttccagggttgccactcaagtacctacagaacaaacgggtgtagctgtaaactgtggcaaactgaaagcatgtaggcacagagtaagtagctagagctgatttttttcaggaaaggccacaaatcccaacttttatgagctcctcttttaaatgctgtaaatgttttacaatggcggggcgcggtggctcacgcctgtaatcccagcatttgggaggccgaggggcagatcacttgaggtcaggagttcaagaccagcctggccaacatggtgaaacctcttctctactaaaattacaaaaattagccgggcatggtggtgcatgcttgtaattccagctgctagggaggccgaggcgggaggattgcttgaacccgggaagcagaggttgcagtgagctgagatcgtgccactgcactccagcctgggcgacagagcaagattccgtcacacacacaaaaaaaaggcgtggggggaggccaaacaaaaccccgcaagacacatttggctatgacctgccagtttgctaggcattcttccaaccttccctccctctgaccaagaaactgagtgtccactattttaggccctgggaaattcagtagcgaggaggccagacagcttcgttgcatcatggggggctctggtactgtgcttctccaacttcaggatgtgtaggaatcacctgagcagtcttgttgagaggcggacactgactcgggaggtctggggtagggcctgaacgtttgcctttgcggttctaacaagctctcaggtgatggcgatgctactgttccctggccccgaggtagaggaagatttaagtaaaagcttcctggaggaggcgcaagtgaaccgcaggagctttcccggacgcccgagaagggagaaaccccgaaggaattcctcctctctcggggctgggtctccgcatccacgccgggtttggtttcccaggctatcccacgtgttcgggcgtccgtgtcaatcaggttttccccggctgggtccgggtttaaaggctgctgctgcgcagggcgctcccatggtgccgcgcggcgggcgggtttggattttaaatccccgcggccaatcagtggcgcgcaggcttttgtaacgttcccagcgccgcgtttgaattcggggaggagcggagcggttgcggaggctctgctcggatcgaggtctgcagcgcagcttcgggagcatgagtgctgcagtgactgcagggaagctggcacgggcaccggccgaccctgggaaagccggggtccccggagttgcagctcccggagctccggcggcggctccaccggcgaaagagatcccggaggtcctagtggacccacgcagccggcggcgctatgtgcggggccgctttttgggcaagggcggctttgccaagtgcttcgagatctcggacgcggacaccaaggaggtgttcgcgggcaagattgtgcctaagtctctgctgctcaagccgcaccagagggagaagatgtccatggaaatatccattcaccgcagcctcgcccaccagcacgtcgtaggattccacggctttttcgaggacaccgacttcgtgttcgtggtgttggagctctgccgccggagggtgagtgtcgctgctggggaactggaactgcctgcggggcagttggagcgcccagacctggagctgctggaaagagtacccagcaagggagagcctgggacttggagctgctagagaagggtgctgggagcctcccgcttacgtatggaaagtgtctttggtaagggcttcttggctctgggagctgctagaggagggggttccagtgaagtggagtctgagtcatgttgctgatagggaagtcagcttctggacgcgaggtgctggggggaggggtgctggtaatggacg

SEQ ID NO: 892 - DNA, 2787 bp, Homo Sapiens
agagcggaggccgcactccagcactgcgcagggaccgccttggaccgcagttgccggccaggaatcccagtgtcacggtggacacgcctccctcgcgcccttgccgcccacctgctcacccagctcaggggctttggaattctgtggccacactgcgaggagatcggttctgggtcggaggctacaggaagactcccactccctgaaatctggagtgaagaacgccgccatccagccaccattccaaggaggtgcaggagaacagctctgtgataccatttaacttgttgacattacttttatttgaaggaacgtatattagagcttactttgcaaagaaggaagatggttgtttccgaagtggacatcgcaaaagctgatccagctgctgcatcccaccctctattactgaatggagatgctactgtggcccagaaaaatccaggctcggtggctgagaacaacctgtgcagccagtatgaggagaaggtgcgcccctgcatcgacctcattgactccctgcgggctctaggtgtggagcaggacctggccctgccagccatcgccgtcatcggggaccagagctcgggcaagagctccgtgttggaggcactgtcaggagttgcccttcccagaggcagcgggatcgtgaccagatgcccgctggtgctgaaactgaagaaacttgtgaacgaagataagtggagaggcaaggtcagttaccaggactacgagattgagatttcggatgcttcagaggtagaaaaggaaattaataaagcccagaatgccatcgccggggaaggaatgggaatcagtcatgagctaatcaccctggagatcagctcccgagatgtcccggatctgactctaatagaccttcctggcataaccagagtggctgtgggcaatcagcctgctgacattgggtataagatcaagacactcatcaagaagtacatccagaggcaggagacaatcagcctggtggtggtccccagtaatgtggacatcgccaccacagaggctctcagcatggcccaggaggtggaccccgagggagacaggaccatcggaatcttgacgaagcctgatctggtggacaaaggaactgaagacaaggttgtggacgtggtgcggaacctcgtgttccacctgaagaagggttacatgattgtcaagtgccggggccagcaggagatccaggaccagctgagcctgtccgaagccctgcagagagagaagatcttctttgagaaccacccatatttcagggatctgctggaggaaggaaaggccacggttccctgcctggcagaaaaacttaccagcgagctcatcacacatatctgtaaatctctgcccctgttagaaaatcaaatcaaggagactcaccagagaataacagaggagctacaaaagtatggtgtcgacataccggaagacgaaaatgaaaaaatgttcttcctgatagataaaattaatgcctttaatcaggacatcactgctctcatgcaaggagaggaaactgtaggggaggaagacattcggctgtttaccagactccgacacgagttccacaaatggagtacaataattgaaaacaattttcaagaaggccataaaattttgagtagaaaaatccagaaatttgaaaatcagtatcgtggtagagagctgccaggctttgtgaattacaggacatttgagacaatcgtgaaacagcaaatcaaggcactggaagagccggctgtggatatgctacacaccgtgacggatatggtccggcttgctttcacagatgtttcgataaaaaattttgaagagttttttaacctccacagaaccgccaagtccaaaattgaagacattagagcagaacaagagagagaaggtgagaagctgatccgcctccacttccagatggaacagattgtctactgccaggaccaggtatacaggggtgcattgcagaaggtcagagagaaggagctggaagaagaaaagaagaagaaatcctgggattttggggctttccagtccagctcggcaacagactcttccatggaggagatctttcagcacctgatggcctatcaccaggaggccagcaagcgcatctccagccacatccctttgatcatccagttcttcatgctccagacgtacggccagcagcttcagaaggccatgctgcagctcctgcaggacaaggacacctacagctggctcctgaaggagcggagcgacaccagcgacaagcggaagttcctgaaggagcggcttgcacggctgacgcaggctcggcgccggcttgcccagttccccggttaaccacactctgtccagccccgtagacgtgcacgcacactgtctgcccccgttcccgggtagccactggactgacgacttgagtgctcagtagtcagactggatagtccgtctctgcttatccgttagccgtggtgatttagcaggaagctgtgagagcagtttggtttctagcatgaagacagagccccaccctcagatgcacatgagctggcgggattgaaggatgctgtcttcgtactgggaaagggattttcagccctcagaatcgctccaccttgcagctctccccttctctgtattcctagaaactgacacatgctgaacatcacagcttatttcctcatttttataatgtcccttcacaaacccagtgttttaggagcatgagtgccgtgtgtgtgcgtcctgtcggagccctgtctcctctctctgtaataaactcatttctagcag

SEQ ID NO: 893 - DNA, 520 bp, Homo Sapiens
tttttttgtatttttagtagagccttaccatgttgcccaggctggtcaccaactcctgagctcaggcaatccgcctgcctcggcctcccaaagtgctgggattacaggcgtgagctcccacgcctggctctatcaaggttttcaaagccctttgcagatctgccaggtatggggatgggcacgagtggatggactgtctgaagcgaacactcccatctcccaggtactcgggaggcctggccccacctaataaccatatgtccattctccaggtgggcctcgacaaaggtgaactctgcaactctcagctgcctttgctcggagaagagcacctcacagcatggccagaagctcagggctgcccacgtcaagccctcaccagcgcgtccttcagcgccccgggaacaacgcttccccctgcaggcggggagcagccacgcacaaatgcttggcactgcagggcacacacaggagccgcagccatggagcgcagagcaccctgctcacctgcctccaccag

SEQ ID NO: 894 - DNA, 359 bp, Homo Sapiens
tgacctgggaccaagggccagatcagacgcgcgcgaggttcggggagctcggccaggctgctggtacctgcgtccgcccggcggacaggctgctttggtttgtgacctccaggcaggacggccatcctctccagaatgaagatcttcttgccagtgctgctggctgcccttctgggtgtggagcgagccagctcgctgatgtgcttctcctgcttgaaccagaagagcaatctgtactgcctgaagccgaccatctgctccgaccaggacaactactgcgtgactgtgtctgctagtgccggcattgggaatctcgtgacatttggccacagcctgagcaagacctgttccccgccttt

SEQ ID NO: 895 - DNA, 9645 bp, Homo Sapiens
aagcttcagagtgctctcctccactagggcatcttccagatctgcctacaactgcaccccatcccgaaggcgaggggttctctgtaacaggtggaaaactgaggcccacagcaggcatcaggggagacgagctccttaccagccgcccaactgagacaggagccaggagacttagtgccccttcctggggttccaatgctggaggaccatcctctgagcagctccaccctcagcatctcaattccctccctctctagggccctcagcctcatacagcacaggcgagagtccctgggaactgtgggagccagggaatgtggaccccagaggcaaagctgggagtgctcacaaggacgattgtcccaaactgtcagggccccagcacccagtctgagaagctctgggaacaagtggccccgtagacgccagacacacagagcctgagctgggctcattctccagatagaagttcttcctcctattgccctgacacctggcacgcggcctgctcgatgtcccatctcacccatctgcgccctcccccagctgggcaccagcaccctggctgttgaaggccagtcggggagatggatgaggaagtgactcctcaaggggcccttgtggttcctcccccagagctattcctggcctgggcgcctctccaccctccagtcctcctgcttgacctgaccccacagctgggaatcgtttgctgggggtggggcagcccctgactatataagcctggacctaggtgtcccaggcaccctagagcccaggccccccaacggctgacccctgcacactccaccctggccccccagccagtccagcaatgatggaaaaaaacacctccgagggccctgcctgcagtccagaggagaccgcatctgaatctgccaaggtgcccacagcagagcctcccggagaagtggcagtatcagagtccaccagagaagagcaggtgcccaagccgcacggccctgccccacaggcccctacagcctccacagccactaagcctgcacccccaagtgaaggtgactgaaggtggggcagggggaggagggaggcaggcatgtcaggggtggaggggagctcttggccatgaacctcttcatctccccagatgtccccagtgccccactgctgctgaccctggatgatgtgagcagcagctctgtgactgtgagctgggagcccccagagaggctggggaggctgggcctccagggctatgtgctggagctctgcagagagggaggtgagtcgtctgggctaagtcttgcatacatccaggggaggttgtcatggagggctgcagggacaagtgcacaggccctgtggttggtcagtctgggagagatacagaaggaggggatgcgagcagtaggctcctcaacccacccacctgccctttcttgctccaccagcaggagagcaagaaagggtaggtgggtgggttgaggggctcccttgtcctcagctccaaggagcttctgagtaagggaagggtaagggggcactgggttctcctttggtgagaagggaaggaagtgctaagtctcagaggaccccgaactgtaggaagtggaaagggaggagctggagaggggaatgttagcgtaagagacagtgaggagaaagcgggaatggggtggggggtgtggggccacatccctgctgccactgtccccctccatggcccaagtccagcctggcctctgcctctgcccctaccttgctgtgtgactttgcaaatgtgtccaaccctctctgggcttcaacaacctcatctctagccacaatttcagggctctaacatcaggtgtctttgatgccatttgacaagaagtcagggaaggcaaacaaggggaaaatgaggcccagagagggaggctgatttccccagatcacaagcaggaaaagaagccccatggagaggggcgcctgtggccacattgcaaagacctcacactctctccatcccctcaggctcggagtgggtgcctgtgagtgcccggcccatgatggtgacccagcagactgtgcggaacctggctctgggagacaagttcctcctgcgcgtgtctgcagttcgtcctgcaggggctggcccgccggccatgctggaccagcccatccacatccgagagaacattggtaaagcccatcctggccttcagctacccagcccttcccaaacaccttatctaatggagaaactgaggccagcaggtagagggaaccagccagtcatttcccccgtcccacgctcacatgcacaagccacacgctatcaccatcttgccttaagaaagttccaggttcctcagcagtaaggggcctctggaggtctaagaagccatttccctgagtggtccagcccccacgcttgagaaggggctcagaaacaaaagtccagttccctgggtcacctgctcaatgctaagagtccatctgttctatctcccatctaatctcaatctctccagtggccataaatgctcattttctacccatttcctgtggcctgggttccagattctctcaaaggtcttgaaacagagagaaggcgctgcttgccccttgttccaccatggccctagtggaaagaaaaagaaggtctgcaaaaggcccatgaagacttctccaccgcagagggcatacctcactggggccccgcaggccagctgccatccccattgctaatatttctatttgcaaggtgcattagcctcaatcctcccctcgctcccctcccggagctgatcgggtttcagtctgttaatgacagtgagtcatttggtctgatctgaggtctctggggacagcacagtcccccagggtgaggagagacacaggcaggcaggtggcctgaagccttctccaccttccttcttgctcctccactaggggatggatgatttctggtagctctagacaaggcctccagaaggagaggggatccacaggaggggtcaagtctggattcgaaaggaaatgctcagctctgaggcctgagagacatgggaaccatggggttagggagcttagattcatagattatcaaggcccaaggagatcccaaggagcccagggcatcccttgaggtcacccagccttttattggcagtcccagagtctgatgcctacacaggaccactcatgtcccactgcactgcagagcatcttctctggtggcacccaaaacccaagcctcccaaccctaattcccagcctttggctctaggtgagatgtggccccaccaggcagctgcattatggctgtgtcgaccctagtcctggaggcgccaggaaggcttcttggttgggacggtgctgggccttccccagggaaccagggagctcagactctgagaggcccctgaggcccagcattgatggacccagccagactcagcacccacttctccattcaaattcctctggcaggagagaaggggatttcctggagagaagagggagaggaggctgtgaacaagtggggaacagccaggcttatcacagggcagagtgggggccctgtccaggatccttggctgctcagctgtctctccttggccacctggagctgccaagcattcttgaccccctgcagctgtccctagagcattccatgcctgagctcccagagccaagtgcccactcagctaatcctcagagacaccgtgttccttctcactgtcttgtcctcctccgccctgcatgccaccaaccaactgctgccacctgtttgctgctgaggagcctcagtcatggacccagcacccaccccaggggacagggatggtggccactgcagcttcccttagaatgcccaggggcttcagtggttgcccctgaccagatgagggtcagaatgtcattccttagcatagcaggcagctgaaataggacttcaagaaggacttcccggctctgagactaacagattttgggagggtgacagaggaagaaggggggatacccgccctggcttcacttgggaagagaaagatcctaaacctttcaatagggcctggagacagaggaatggacaaacagggtttcacaaaggcttctctgaaagtcctgggcttgtggagagctggggatattagagcaggaagacggcagtggcctccccttcctagaagtgcagcctgacaggtgcagcacctgctccccagcagggggagacagagagtcagctggggcccatctggtgcttgggaatgcctgggctgcaggacaaatcccatcctggcagagtcgaggcgccaagggagttcccaggatgcttaccagttcacaccatggaggcgctgacctcctgaaacctcctgctcccttaagggatttgggcccctagacctcaggagtgagagcttcacccttcctgcaaggagggaccccatggcagccaggcacacccaggaccctcctcccagccagcatccctcaccagctgtcccctgccccatctcagaaaccccaatcagccaccccactgcactgctaagcccagactcttgctttgatccagaggcccccaagatccgtgtcccccgccacctccgtcagacctacatccgccaggtgggagagacggtcaacctgcaaatccccttccaggtgggtattacccccaccaagggtaacagcctgggtgggaaccagggcccccatttaaggggagcctgggagatggcagggtctccaagggtccagctgagacccagcgagacggcttcatccttccgcaatcatgcacatgactcattggtgattctcagcctgtggatgggcaggtgggcccccagagcgggatggacacctggaagatgtggctgtgggcagcacctgtggctccagcctctgctgcccctcctgagaagggccagtgggacaggcttccccgagaacagctccagagactcctggagttaaggaggtgtggggactctggcacctccctacactcaccctgggggctcctccctgccaggggaagcctaagcctcaggccacatggacccacaacggccatgccctggacagccagcgggtgagcatgcgcaccggggaccaggactccatcctcttcattcgctcggcccagcgctccgactctggccgctacgagctcactgtgcgcgtggaagacctggaggccaaggcagtcattgacatcctggtgattggtatggagccaggggaacagtgctgtctcatgggggacctggagcccccaacctcctatcccagagctgatggctgatgggagcaggccaagggagtgtggcaagagccaaattttgggtgtgggggctctgtgccagcctggccctcacactcacttcctctcacactctgggcctacagagaaacctggacccccctgctgcatcaggctcctggacgtctggggctgcaatgctgctcttcagtggacgccaccccaggacacaggcaacacagagctcctgggctacatggtgcagaaggcagacaaaaagacaggggtgaggctggctgaggcaaagtggggtcggggtacgaagtggtcaaggtggtggggaaggcccatcccactgagtctagggaccgagtctagggatcgagttctggtctgcccactgctaacctgactccctaggaggcccttagcaagactcttcctctctggacctcagatgcctcctgaagactgtgaagagggctggcccgggctgtctgaagcctttcaagttctggagccatgcttctcaaatcttaatgtccacatgagtcacctggggagcttgctaagaggcagagtctgactcagctaggtccagggtgggggctgagggcctgcatttctaagacgtttccaggtgatgctgaagttgcacatccatgggccacactttgcacacaaaggctctaggattctctgaggaccctacagaggtcacctgagtgacccaggggccccttcttccaattcaatgtccctgaggcccaaagctggatggttcagcatcctaaggttgggggcatggaatgagttcctgtgaggaaaggtctccagggtaagcagggagggtgaggacaggggtgagaaatgagggtgacacccggggccctgcagcaatggttcacagtgctggagcgctaccacccaaccacctgcaccatctctgacctcatcatcggcaactcgtactccttccgggtcttctcagaaaacctgtgtggactcagcacctcggccaccgtcaccaaggagctcgcccacatccagaaggcaggtgggtttgggcccggagctggctgtgctaactctctccctgtctctgcttcttcctccgcgtctctgcacccctctctctgggtttctcctgggcgtctgcccctggaacacttgccgtctcctcactccacggctatgcatacacacacatggagtggctgcaaagtagtgaatgtggttggctgattttaacaaacacatcagagcaaatccacacaaatgaaagatgcccctttggaggctgtgtgcttattccaaagaggtgtgtggctgccagcatcacagcagccgccgagtctcaggcagtgagtgtccgaagggaacctaaagggtgacctgcgcatggctgggtagtgtgctaaaacaagcctcccaaccctaatacataccacatagatggacaagagagataggagtatttactgtctccacacaggcacctgaccctcttgcgtcaaatgttaaaccccgggcccttttccctgtcccttgtgtgccccaaggccctctccgacccacagtctgtgtgggttccagaaggcaaactttttttaacactagcctgaactgcacagaattaggaagaaacttttgtttaaaaaaagaaagccagtcaagtctccaacgacaaacccaaaggaaacgtggcacctctgagttgctagcatccatcttctgccaagatgctcttatctctggtttttccaccttctcatctctactcatcaccctgacccacccagctacagtctcagctttctctgcctctttgagattgtccaagttcctgcaaataagccacgacttgctatccatagatcttgaatcatagtcagtcctgacaggtctccctcactcctgtaagctcagatgcacccgactttctcccctgaacccagatattgctgccaaacctaaagggtttattgagcgagacttctcagaagccccctcattcacccagcccctggctgaccacacctccacccctggctacagcacccagttgttctgcagtgtccgagcttcacccaaggtgaggggccaggccctgttgtgccctgggctggtgggggcaggtggggacagcagggctgaggaatcctccgggcgtccacacctaagcctggggatagctgttgagagccccgccccagtccatacctccccagctctcttctgaccatgtctcccagcccaagatcatctggatgaaaaacaagatggagatccagggcaaccccaaataccgcgccctctctgagcaaggcgtctgcaccctagagatccggaaacccagcccctttgattctggggtctacacctgcaaggccataaatgtgctgggggaggcatctgtggactgccggctggaggtcaaaggtgagagtttgaggacgggagaacaggagtaagcacctctctggaactggactagaggcagcagacagcttaaaatcaaggccgaagagaaggggtggtaagactggggtcaggctgtgctgattactttccaagcggcagggtggacaggtgtagaagagggtgtataaccgtgaactttccagttccccgccacttcccccaagctctaactgcagcatctcttccagcctcagccgcacactgaagagtcacgggaggaggctgtgatgaggagccaggtaaatggcctgacccacccactctgttacctctgtgggcagcacagaagcagagaggaggccaggagcagggggttggggtgagaagggaagtgtggtcagctctgtggacacaaacttgtggacacaggcaactagcacgcatgtccagagactcacagtgatgttgcagggccaggcgacgccggtgtctcctggaaggggggtgattccgtggaccgccacacaaccagagtctactcccagctctgagtgatcttcagcaagggtgttctctttggacacattctctcatccgaaaactggggataacaacctttccctgccttccttcccctggtggttctgaggctctgcataagtacggaagtatctagaactgcagtgggcagagctcagacctgggcattgcacctgagggagggaggcctggtgaggaagaggatgctgctccccctccccactctgcacctctctggcctgcagccgagctctgctcacaccaggggctcaggaagcatgtcctcctccaggtgctgcaggcctgaggggccaggtccaccaggcctacagtcaaactccagagatgcccaagacccccgcttccatagcgacggctgatggaaccgcccctggtacctgctggcctcccttccccagaggctggtgtccagaactcaggaatgggcctggtaggccccaggccagactaactgggctcaaggggtgctggaaggcgcagagattggagtgccctgcggagttgcactctgggtgggaagcactcaaataaagatgcgtggtgttaacagtgcggggcctctgtgcagtgagcgacatcatctgggggaggcgctgtgtcacgaggagggggggtgtctgaatgtttcaccatgagggggtctccagatatgtcaccaagaggaagatgccaatgggagaggtctcaggatgtcatggctggggcagggaggtggggggatggggggtgttctggacctgtgagttttcaggatctcccttctgatcagggtttgctaccgccagtgcgtaactatggaaacagacacaccctctctggaaccctccttgctccaacgcctccacgtgccccctctcgcagctcctcccagcccccgtcattgcttcctgtctgctgaagctgtcttattgccctcaacagtggtggggatgggcgcccagcaatgtgctctccacagggttcacagttttttattagtcacatgggcctcccttgggagccagggcacacccaatttccaacagagggaagggcttggaagcaagtcctggagttgacactcatgttcagaaggtcaactcgacggccacctcccctccctcgccccccgacacaggggctccaggatcccccgcctcgccctcccacacaggggctccaggctcccccgcctcgccctcccacacaggggctccaggctcccccaccttgccccccaacacaggggctccaggcttggcagggcatgggttggtccttccccagatccctaaagtcctagacccccggacacctgcaacagagcttccaaagcccctgaaaacccagccagatactaggggtattgagggattcacatgacagcaaggccttcccccacatgctctcaggggggtactctcctctgcctgctgcag

SEQ ID NO: 896 - DNA, 2366 bp, Homo Sapiens
gcgcttccggggactggagcgtgcgtgctgaggtatgcgcaacgcgtgcggggtctcttccggagtcttttcctggacggggtccctgcggtgggtgtgtttcggactggcctgggcaggcgcttgtgctgccagggcgccgggcccggggaggccggggtctcgggtggccgccggcccaggcgctggacggcagcaggatggggaaggcgaaggtccccgcctccaagcgcgccccgagcagccccgtggctaagccgggtcctgtcaagacgctcactcggaagaaaaacaagaagaaaaaaaggttttggaaaagcaaggcgcgggaagtaagcaagaagccagcaagcggccccggtgctgtggtgcgacctccaaaggcaccagaagacttttctcaaaactggaaggcgctgcaagagtggctgctgaaacaaaaatctcaggccccagaaaagcctcttgtcatctctcagatgggttccaaaaagaagcccaaaattatccagcaaaacaaaaaagagacctcgcctcaagtgaagggagaggagatgccggcaggaaaagaccaggaggccagcaggggctctgttccttcaggttccaagatggacaggagggcgccagtacctcgcaccaaggccagtggaacagagcacaataagaaaggaaccaaggaaaggacaaatggtgatattgttccagaacgaggggacatcgagcataagaagcggaaagctaaggaggcagccccagccccacccaccgaggaagacatctggtttgacgacgtggacccaccggatatcgaagctgccataggtccagaggcggccaagatagcgaggaaacagttgggtcagagcgagggcagcgtcagcctcagcctcgtgaaagagcaggccttcggcggcctgacaagagccttagccttggactgtgagatggtgggcgtgggccctaagggggaggagagcatggccgcccgtgtgtccatcgtgaaccagtatgggaagtgcgtttatgacaagtacgtcaaaccaaccgagcccgtgacggactataggacagcggtcagtgggattcggcctgagaacctcaagcagggagaagagcttgaagttgttcagaaggaagtggcagagatgctgaagggcagaattctagtggggcacgctctgcataatgacctaaaggtactatttcttgatcatccaaaaaagaagattcgggacacacagaaatataaacctttcaagagtcaagtaaagagtggaaggccgtctctgagactactttcagagaagatccttgggctccaggtccagcaggcggagcactgttcaattcaggatgcccaggcagcaatgaggctgtacgtcatggtgaagaaggagtgggagagcatggcccgagacaggcgccccctgctgactgctccagaccactgcagtgacgacgcctagcagtcctgccctgctgctgctgccgccccgctacagaggcaatgtgaccagtcacagggacagatcacatctccccagagtggcaactctggtgaaaccttttcagaatcatggcagaggggcgtggcgtggtgctactgagaaggtcctccttcctcttgactttgtggtctgaaacctggtcttactgtccatgtgtgtttgggcccggatggtcagggtggggagcagggacggccatgggcacgcctggccacgctttaccgactgctgaccccctgggccaggtgaggttggggcctgtgggccgccagtccatacggtgctgtcactgcccatcttcggtgacaccctggggtgaggtgctcagcaccttcctctcgaggagccacattttcctcctttgtgttaggggacataacaagctctgctgggcttgagggacccagaccaggtgtctgcagtcagctcctgagacacagctggccggcacaacaggtgttacatcaggggtttcctgtggccgtttgaactttgagcatttatctaaattaaattggcccagggttggctggtgggtcacccagcagaggcttctccccatagcacgaggatgtgttgcctgggcacggtgactgcggttattcctggaggtcggcagacatgccaaccttgggctatttgagctggagaagctatgtgatgctagccggtggctttctgggctaggccccagtttgaggctcccctgggaactagagccaggaacagccagtggcactgacaaggggacggagtccaaggcgttattgggccacctgacagctggacagaaaaggggcagacacaccgaggatgcgatttaaaataaatgcagatgtttacttggaaaaaaaa

SEQ ID NO: 897 - DNA, 2523 bp, Homo Sapiens
tgaagtgaaaatggcgtgagggtgtgagagaggtttgggttaggaaacatgtttttagtgctatttccaaccaggggtcgcaaactcagcagcctgtagaaacaggggtgggaggtgggggggaagctgtgcccacctgcctcctcggcagagcaatggcggtgtctgccgggtccgcgcggacctcgcccagctcagataaagtacagaaagacaaggctgaactgatctcagggcccaggcaggacagccgaatagggaaactcttgggttttgagtggacagatttgtccagttggcggaggctggtgaccctgctgaatcgaccaacggaccctgcaagcttagctgtctttcgttttctttttgggttcttgatggtgctagacattccccaggagcgggggctcagctctctggaccggaaataccttgatgggctggatgtgtgccgcttccccttgctggatgccctacgcccactgccacttgactggatgtatcttgtctacaccatcatgtttctgggggcactgggcatgatgctgggcctgtgctaccggataagctgtgtgttattcctgctgccatactggtatgtgtttctcctggacaagacatcatggaacaaccactcctatctgtatgggttgttggcctttcagctaacattcatggatgcaaaccactactggtctgtggacggtctgctgaatgcccataggaggaatgcccacgtgcccctttggaactatgcagtgctccgtggccagatcttcattgtgtacttcattgcgggtgtgaaaaagctggatgcagactgggttgaaggctattccatggaatatttgtcccggcactggctcttcagtcccttcaaactgctgttgtctgaggagctgactagcctgctggtcgtgcactggggtgggctgctgcttgacctctcagctggtttcctgctcttttttgatgtctcaagatccattggcctgttctttgtgtcctacttccactgcatgaattcccagcttttcagcattggtatgttctcctacgtcatgctggccagcagccctctcttctgctcccctgagtggcctcggaagctggtgtcctactgcccccgaaggttgcaacaactgttgcccctcaaggcagcccctcagcccagtgtttcctgtgtgtataagaggagccggggcaaaagtggccagaagccagggctgcgccatcagctgggagctgccttcaccctgctctacctcctggagcagctattcctgccctattctcattttctcacccagggctataacaactggacaaatgggctgtatggctattcctggaacatgatggtgcactcccgctcccaccagcacgtgaagatcacctaccgtgatggccgcactggcgaactgggctaccttaaccctggggtatttacacagagtcggcgatggaaggatcatgcagacatgctgaagcaatatgccacttgcctgagccgcctgcttcccaagtataatgtcactgagccccagatctactttgatatttgggtctccatcaatgaccgcttccagcagaggatttttgaccctcgtgtggacatcgtgcaggccgcttggtcaccctttcagcgcacatcctgggtgcaaccactcttgatggacctgtctccctggagggccaagttacaggaaatcaagagcagcctagacaaccacactgaggtggtcttcattgcagatttccctggactgcacttggagaattttgtgagtgaagacctgggcaacactagcatccagctgctgcagggggaagtgactgtggagcttgtggcagaacagaagaaccagactcttcgagagggagaaaaaatgcagttgcctgctggtgagtaccataaggtgtatacgacatcacctagcccttcttgctacatgtacgtctatgtcaacactacagagcttgcactggagcaagacctggcatatctgcaagaattaaaggaaaaggtggagaatggaagtgaaacagggcctctacccccagagctgcagcctctgttggaaggggaagtaaaagggggccctgagccaacacctctggttcagacctttcttagacgccaacaaaggctccaggagattgaacgccggcgaaatactcctttccatgagcgattcttccgcttcttgttgcgaaagctctatgtctttcgccgcagcttcctgatgacttgtatctcacttcgaaatctgatattaggccgtccttccctggagcagctggcccaggaggtgacttatgcaaacttgagaccctttgaggcagttggagaactgaatccctcaaacacggattcttcacattctaatcctcctgagtcaaatcctgatcctgtccactcagagttctgaagggggccagatgttgggtgcagatgtagaagcagccagtcacagacccattctatgcaatggacatttatttgaaaaaaattctcaaaaa

SEQ ID NO: 898 - DNA, 215 bp, Homo Sapiens
tttttttttttttttttttttttttttttttttttgcaaagacaaacattttatttttcatgataggagctgtagcagagtatatgggggcctctgacagcccacaggcggaaactggggcctgttgaccttgagaacctcatctcacattctgcagactttggcggcggggcagtgctcgaccactggctgggtgggctggtctcagcttctcc

SEQ ID NO: 899 - DNA, 2476 bp, Homo Sapiens
atttttagtttgttgaagttcgtgactgcttcactctctcattcttagcttgaatttggaaatgacttttgatgacctaaagatccagactgtgaaggaccagcctgatgagaagtcaaatggaaaaaaagctaaaggtcttcagtttctttactctccatggtggtgcctggctgctgcgactctaggggtcctttgcctgggattagtagtgaccattatggtgctgggcatgcaattatcccaggtgtctgacctcctaacacaagagcaagcaaacctaactcaccagaaaaagaaactggagggacagatctcagcccggcaacaagcagaagaagcttcacaggagtcagaaaacgaactcaaggaaatgatagaaacccttgctcggaagctgaatgagaaatccaaagagcaaatggaacttcaccaccagaatctgaatctccaagaaacactgaagagagtagcaaattgttcagctccttgtccgcaagactggatctggcatggagaaaactgttacctattttcctcgggctcatttaactgggaaaagagccaagagaagtgcttgtctttggatgccaagttgctgaaaattaatagcacagctgatctggacttcatccagcaagcaatttcctattccagttttccattctggatggggctgtctcggaggaaccccagctacccatggctctgggaggacggttctcctttgatgccccacttatttagagtccgaggcgctgtctcccagacatacccttcaggtacctgtgcatatatacaacgaggagctgtttatgcggaaaactgcattttagctgccttcagtatatgtcagaagaaggcaaacctaagagcacagtgaatttgaaggctctggaagaaaagaaaaaagtctttgagttttattctggaatttaagctattctttgtcacttgggtgccaaacatgagagcccagaaaactgtcatttagctggctgcagaactcctttgcagaaactggggttccaggtgcctggcacctttatgtcaacatttttgattctagctacctgtattatttcacctagcttgtcccaagcttccctgccagcctgaagtccattttcccctttttattttaaaatttgactcctcttcaagcttgaaaaccctctgaactcagtcttctttacctcattatcaccttcccctcacactcctaaaattgcatgaaagacagaacatggagaacttgctcaagtgcaggcagagagcaaaaaggggaaatatgtctgggaaaaagtgcacgtgaagaaacaaagaaggacagaggccattccgaaatcaagaaactcatgttcttaactttaaaaaaggtatcaatccttggtttttaaactgtggtccatctccagactctaccacttacggacagacagacagacagacacacacacacacacacacacacattttgggacaagtggggagcccaagaaagtaattagtaagtgagtggtcttttctgtaagctaatccacaacctgttaccacttcctgaatcagttattatttcttcatttttttttctaccagaggacagattaatagatttaacccttcacaacagttcttgttagaatcatgggatgtgtggcccagaggtaagaatagaatttctttccctaaagaacataccttttgtagatgaactcttctcaactctgttttgctatgctataattccgaaacatacaagacaaaaaaaatgaagacactcaatctagaacaaactaagccaggtatgcaaatatcgctgaatagaaacagatggaattagaaatatatcttctatttttaggcttctatttcctttccacccactcttcacaggctattctactttaaaggaagcctttttattttgctgcacacaatctagcaggaatctttttttttttttaagagctgtgtcatccttatgtaggcaagagatgtttgcttttgttaaaagctttattgagatataattaacataaaataaactgaacatatttaaagtgtactatttgataagttttcacaccttgtggagaacatgcatactacaattaagagagtgaacatatccatcatccctcaaagtgtcacaatgctcctcctgatgactcctccccagaaaaccaccaatcggctttcattttgcattttgtagttttatgtgaatggaatcatatagtatgtcttttttttttgtctggcttctttcactttgcataattattttgagattcatatgtctccatcttgatgctcgtatgaattcattcttttaaatgttgaatattcccttgtatggatataccacaattcatttacccatttacttgttgatgacatttgggttgttttagttttgggatattacaaataaagctgctgtgaacatttgtgtacaaaaaaaaaaaaaaaa

SEQ ID NO: 900 - DNA, 582 bp, Homo Sapiens
ctgggagccaagctggtctggcaagggcgctcaggcctgggagagaagggagcaatggccagtcaccttcaccttctaactaactagcctccggatgaggtggctgccaccaggcccgaatgatccccaggagcccagcttacaaaccccaacatcgaatcaaacatctccatccccaagtgcagtaacacacaaaaaccaaacactctgccctgggaaaggcctggtgcgattctcagtaggactcacacccaccctacctagaagtactgggctggcctgggtactgcatccgtgtgttttgataagggggtgatgtggccacgcccttatctagatttcactttgtatccactgggcacagatattctagagaacttatctttcactcttgtaaaagccacatatccacatctctttcattttctcagtgtgttatgcagcaatttaataaaagtatttattgtctaaaaaaaaaaaaaaaaactcgagggggggcccggtaccccaaatccccttatgtgaagagtataaggcgcgctaactggccggggttttacaagtggtgaatgggaaaaccct

SEQ ID NO: 901 - DNA, 1981 bp, Homo Sapiens
tcgatagccggaagtcatccttgctgaggctggggcaaccaccgcaggtcgagacagcaggcggctcaagtggacagccgggatggcagagcgtgcggcgctggaggagctggtgaaacttcagggagagcgcgtgcgaggcctcaagcagcagaaggccagcgccgagctgatcgaggaggaggtggcgaaactcctgaaactgaaggcacagctgggtcctgatgaaagcaaacagaaatttgtgctcaaaacccccaagggcacaagagactatagtccccggcagatggcagttcgcgagaaggtgtttgacgtaatcatccgttgcttcaagcgccacggtgcagaagtcattgatacacctgtatttgaactaaaggaaacactgatgggaaagtatggggaagactccaagcttatctatgacctgaaggaccagggcggggagctcctgtcccttcgctatgacctcactgttccttttgctcggtatttggcaatgaataaactgaccaacattaaacgctaccacatagcaaaggtatatcggcgggataacccagccatgacccgtggccgataccgggaattctaccagtgtgattttgacattgctgggaactttgatcccatgatccctgatgcagagtgcctgaagatcatgtgcgagatcctgagttcacttcagataggcgacttcctggtcaaggtaaacgatcgacgcattctagatgggatgtttgctatctgtggtgtttctgacagcaagttccgtaccatctgctcctcagtagacaagctggacaaggtgtcctgggaagaggtgaagaatgagatggtgggagagaagggccttgcacctgaggtggctgaccgcattggggactatgtccagcaacatggtggggtatccctggtggaacagctgctccaggatcctaaactatcccaaaacaagcaggccttggagggcctgggagacctgaagttgctctttgagtacctgaccctatttggcattgatgacaaaatctcctttgacctgagccttgctcgagggctggattactacactggggtgatctatgaggcagtgctgctacagaccccagcccaggcaggggaagagcccctgggtgtgggcagtgtggctgctggaggacgctatgatgggctagtgggcatgttcgaccccaaagggcgcaaggtgccatgtgtggggctcagcattggggtggagcggattttctccatcgtggaacagagactagaggctttggaggagaagatacggaccacggagacacaggtgcttgtggcatctgcacagaagaagctgctagaggaaagactaaagcttgtctcagaactgtgggatgctgggatcaaggctgagctgctgtacaagaagaacccaaagctactgaaccagttacagtactgtgaggaggcaggcatcccactggtggctatcatcggcgagcaggaactcaaggatggggtcatcaagctccgttcagtgacgagcagggaagaggtggatgtccgaagagaagaccttgtggaggaaatcaaaaggagaacaggccagcccctctgcatctgctgaactgaacaaactatcagaggaaaggaagtgggactggcactatttgaggttaagacaaactgcatatgtacttcaattgctttgcacttttccgtttcagcggaagacctgaagagtggtcagaacagagcctttgatttttattatggttattttattgattattactggcaaaaacggccaggtacaacacctttttcatacaaggcccaggaggcttagtccagtctgtgctcctgggctacaaggacccagcctgagatggtcccatctgcagggccccgcaccagttggagcagatgcctccccaccaccaattgccaaaggtccaataaaatgcctcaaccacggaaaaaaaaaaaaaaaaaa

SEQ ID NO: 902 - DNA, 455 bp, Homo Sapiens
tttttttttttttttttcactttttcattattttattgttgttttagtagcattttgaggtgaatgtatgcataatcagtgaattagacaagcatgcacatacatgatatctgatcaaacatttttttgtctctcatcatcctcataaaatttattcagtgggagaagctttttcttccatcagatacattccagttgtatgccaacatactcaggtaagagcaacattttggtcattttaaatagtttggtaattatgactcccagtcgcctacaataagaagaaactacaataatttagtactaaatttttcttccctctccaactgagtcttgtgttgagttgcctacttgcgctagcacatcttcccttgctggttgacatttttgctaagatttctccctctccttccaccccaccttggacacggaggtttctggcctccctttccccc

SEQ ID NO: 903 - DNA, 428 bp, Homo Sapiens
cggcacgagcagaaagataggcaatagaagaatgagctatgatgtacccatcattttgattcagttatcatcacgtcatggccaatcttgttttagctatacttccatctgcttctcattctcttgttacttttgacctgtaaattttgaagaacagatatcccctacagtagccctgtgaggaagatgttatctctacttttgagatgagaaaattgaatgttaggataaatttcttttctaaaatcacccagcttgtaagtggcagaataagaattttaaccaggtctgttaagttcttcctctgcagtcagttgtttttccttctgtttaggtcagattataaccaaggagggtggtgtattctgacagcagctaaatgttttactggagtattaccaattcagtacctacagacacttgttaat

SEQ ID NO: 904 - DNA, 223 bp, Homo Sapiens
  misc_feature (192)..(192): n is a, c, g, or t
cgtagtcaaagcaagaaagagaaacgtaaaaacagatagagattctgcctgtgcttttgtttgactgtctctagattttgaaaccaaaaaactgaactgaaatcatctaaagagttaaaatttcagtgatctgcaattaattacattgtggaagattattttttatcttgtaaaaacacttttttggtttantatatatttttaaaacatttcactagtgatt

SEQ ID NO: 905 - DNA, 400 bp, Homo Sapiens
  misc_feature (355)..(355): n is a, c, g, or t
taaaaccttcaaccgcaaagacgcacttgttctacaccagaggattcacactggagaaaggccttacgagtgcagcaaatgtggtaaaaccttcagtgttctgtctaccctcattcggcaccggaaagtgcacattggagaaaggccctatgagtgtgcagaatgtgggaagttctttaaatacaataatagcttcattcttcaccagagagttcacactggagaaaggccttttgaatgcaagcaatgtgggaaaggctacgtgacccgttcaggcctctatcagcactggaaagtccacactggggaacggccctatgaatgtagcctgtgtgggaaaacctttcactacccngatcctaccgcaatcggcaccagcagttccacactgaagagaggt

SEQ ID NO: 906 - DNA, 458 bp, Homo Sapiens
  misc_feature (180)..(180): n is a, c, g, or t
  misc_feature (183)..(183): n is a, c, g, or t
  misc_feature (372)..(372): n is a, c, g, or t
ttttttttgcttttcttttgctttttctcagcctgatttttgcttggcttctttttcttggtttcctctttataccatggtccccagacccctccattgagcctagggttacttctggggtctttggggggatacctgaccggcactgcagttttgttgaactgtgagagcctccgtagnctntcttcacgattcctgggatacctgttagataggtccaccctctcatatgggtcggctgtgatgttgaaaagccatacacttttgccagttgacaaggtgatccgttcattgtgccaccggttcggtcccagggttgctgaaagactgaggggggacccagttcgctgtagccagggatttcctgtaagnaatttccagtgctggcactctgatgggctgactgggattgcagtgttccagatcccataggcctggtggcccagggagccattttt

SEQ ID NO: 907 - DNA, 796 bp, Homo Sapiens
  misc_feature (608)..(608): n is a, c, g, or t
  misc_feature (652)..(652): n is a, c, g, or t
tttttttttttaactcacataaagtttaatcatcaagttaatgaaaatatcaaaatttttgagttagtgtatggcagagaaaatttagttgcaaataatacagtttttggtgtttccattattgacaagctatgctgcagaaagagcaatcgcattaaatcttagttcatcagggtcgcgctccataaacttcttgcaaacttctatggcatcctctaataaagtttcatcactagtttcaccatggttaattggaaatggcttccgcccatctaattcatagagatgcccatctacatgaactaatgcaataaaatgaagatctactttctcatctatacttggtgcctcagtctgaccttcatgggcactggtctcatgagtaactcggatggcatcatagttctccaggtatctggctcgttcttcagggctcattgacacagattcctccaggaattttttcaaggttgatccagattcaaagtgcatcttgtctttattgtttgcaatagcatgaatcagtccaattgttccacacgcattgctgattgtttgcttcatgaaatatactgatgatgtaaccatcttgccctgagattttattntttctttctcctctgttctgaatacttcatacttttctgtaatnggaaagagaagtaagactgggccactgggcttggtaccctgcgttagggttcaggttcctttccttccacttaacaaattcccgtttggatggacacctaattgtataaaaacgggttggtgccttggaattgccttcagcggc

SEQ ID NO: 908 - DNA, 345 bp, Homo Sapiens
gggggaactcggaatttatcaccattcagaactgcaggttgtccttgtgagtggcatctgatgtgggggaagtcttggactgagccccttaacttgtggagtctgcactaatttagactgcactaactaacttgcactgcactaacttggactgcactaacttgtggagtctgcactaacttggagaagttagtgtcagaattgaattatagaacacccagttgttcagaattgaattgtagaacacccaattggtgtgggagaattagagaatttatttgtgtcagaaaatactccagaacaaccaccccatattatgattagctcttttcctttctttggctc

SEQ ID NO: 909 - DNA, 402 bp, Homo Sapiens
gtccagcctgcagatttgtytttytgaattgaaggatagttaacaaagaaaatgcacagatcttaatgttccttctataggcatgtytttyaaattatttatytccttaacatttaaacattgagagatctcacataaaaacccagacttctggttccttttgagaagccagaaattggccacacagaccctcattcttgcattcttgcaagacagccgtgagctggaggcacacttcagccaaactgctggttggcactccacatgttccccacagccacagtccctagccaggcccctttcctctttgcctgcaggtccctggaatccattcctctctgtctcagctgagacaatacttcctcaggtaagccttctggccctttycagtctagatgrggt

SEQ ID NO: 910 - DNA, 558 bp, Homo Sapiens
gcacctcctcccgccaggcgctttctcggacgccttgcccagcgggccgcccgaccccctgcaccatggaccccgctcgccccctggggctgtcgattctgctgcttttcctgacggaggctgcactgggcgatgctgctcaggagccaacaggaaataacgcggagatctgtctcctgcccctagactacggaccctgccgggccctacttctccgttactactacgacaggtacacgcagagctgccgccagttcctgtacgggggctgcgagggcaacgcaacaatttctacacctgggaggcttgcgacgatgcttgctggaggatagaaaaagttcccaaagtttgccggctgcaagtgagtatggacgaccagtgtgaggggtccacagaaaagtatttctttaatctaagttccatgacatgtgaaaattcttttccggtgggtgtcaccggaaccggattgagaacaggttcccagatgaagctacttgtatgggcttctgcgcaccaaagaaattccatcattttgctacagtccaaagatgagggcct

SEQ ID NO: 911 - DNA, 4284 bp, Homo Sapiens
ggccaaggcggcgaccggagcgcgatggcgggggcggcgggactcacggcagaagtgagctggaaggtcttggagcgaagagctcggaccaagcgctcaggctcagtttatgaacctcttaaaagcattaatcttccaagacctgataatgaaactctctgggataagttggaccattattacagaattgtcaagtcaacattgctgctgtatcaaagtccaactaccggtctctttcccactaaaacatgcggtggtgaccagaaggccaagatccaggacagcctatactgcgctgctggggcctgggctttggctcttgcatacaggcgaattgatgatgacaagggaaggacccatgagctggagcactcagctataaaatgcatgagaggaattctctactgctatatgcgtcaggccgataaggtccagcagtttaagcaggatccacgcccaacaacatgtcttcactctgttttcaatgtgcatacaggagatgagttgctttcctatgaggaatatggtcatcttcagataaatgcagtgtcactttatctcctttaccttgtggaaatgatttcctcaggactccagattatctacaacactgatgaggtctcttttattcaaaaccttgtattttgtgtggaaagagtttaccgtgtgcctgactttggtgtctgggaaagaggaagcaaatataataatggcagcacagagctacattcgagctcggttggtttagcaaaagcagctctagaagcaattaatggattcaacctttttggcaaccagggctgttcgtggtcagttatatttgtggatctcgatgctcacaatcgcaacaggcaaactttgtgctcgctgttacccagagaatcaagatcacataatacagatgctgccctgctcccctgcatcagttatcctgcatttgccctggatgatgaagttctttttagccagacacttgataaagtggttagaaaattaaaaggaaaatatggatttaaacgtttcttgagagatgggtatagaacatcattggaagatcccaacagatgctactacaagccagctgaaattaagctatttgatggcattgaatgtgaatttcccatatttttcctttatatgatgattgatggagtttttagaggcaatcctaagcaagtacaggaatatcaggatcttttgactccagtacttcatcataccacagaaggatatcctgttgtaccaaagtactattatgtgccagctgactttgtagaatatgaaaaaaataaccctggtagtcaaaaacgatttcctagcaactgtggccgtgatggaaaactgtttctttggggacaagcactttatatcatcgcaaaactcctggctgatgaacttattagtcctaaagacattgatcctgtccagcgctatgtcccactaaaggatcaacgtaacgtgagcatgaggttttccaatcagggcccactggaaaatgacttggtagttcatgtggcacttatagcagaaagccaaagacttcaagtttttctgaacacatatggtattcaaactcaaactcctcaacaagtagaacccattcagatatggcctcagcaggagcttgtgaaagcttatttgcagctgggtatcaatgaaaagttaggactctctggaaggccagacaggcccattggctgcctcgggacatcaaagatttatcgcattctaggaaagactgtggtttgttacccgattattttcgacctaagtgatttctacatgtctcaggatgttttcctgctgatagatgacataaagaatgcgctgcagttcattaaacaatattggaaaatgcatggacgtccacttttccttgttctcatccgggaagacaatataagaggtagccggttcaaccccatattagatatgctggcagcccttaaaaaaggaataattggaggagtcaaagttcatgtggatcgtctacagacactaatatctggagctgtggtagaacaacttgatttcctacgaatcagtgacacagaagagcttccagaatttaagagttttgaggaactagaacctcccaaacattcaaaagtcaaacggcaaagcagcacccctagtgctcctgaactgggacagcagccggatgtcaacattagtgaatggaaggacaaacccacccacgaaattcttcaaaaactgaatgattgcagttgtctggctagccaagccatcctgctgggtatactgctcaaaagagaaggccccaacttcatcacaaaggaaggtaccgtttctgatcacattgagagagtctatagaagagctggcagccaaaaactttggttggcggtgcgctacggggctgcatttacccagaaattttcttcctctatagccccacacattactacttttctggtacatgggaaacaggtaactctgggtgcctttgggcatgaagaagaagttatctctaatcctttgtctccaagagtgattcaaaacatcatctattataagtgtaacacccatgatgagagggaagcggtcattcagcaagaactggtcatccatattggctggatcatctccaataaccctgagttattcagtggcatgctgaaaatacgaatcgggtggatcatccatgccatggagtatgaacttcagatccgtggcggagacaagccagccttggacttgtatcagctgtcacctagtgaagttaaacagcttctgctggatattctgcagcctcaacagaatggaagatgttggctgaacaggcgtcagatcgatgggtctttgaatagaactcccaccgggttctatgaccgagtgtggcagattctggagcgcacgcccaatgggatcattgttgctgggaagcatttgcctcagcaaccaaccctgtcagatatgaccatgtatgagatgaatttctctctccttgttgaagacacgttgggaaatattgaccagccacagtacagacagatcgttgtagagttacttatggttgtatccattgtactggaaagaaaccccgagctagaatttcaagacaaagtagatctagacagactggtcaaagaagcatttaatgaatttcaaaaagatcagagtcggctaaaggaaattgaaaaacaagatgacatgacttccttttacaacactcctcccctgggaaaaagaggaacatgcagctatttgacaaaggcggtgatgaatctgctgctggaaggagaagtcaagccaaacaatgatgacccgtgtctgattagctagtggggaaggtgtaggaagctctgttgagacacatgttctgaagtgtgttgtgtttcatgttcaagcttaatcaaggcagccattaatatacgaactgagcatgctggggaggtgaatgccacatccttggcggggttatggacctcttgcatgtcatagccaatctaacggtaatggtaaatgcttttaatcaagcaggaaaaagttctcatgattatgccaactataatagtaatcctcactgagtgataaaaatagtttatgaattgaaaatttgccgctgcatgttgtatgatcaaatagttcatcaaaatgaatctttgctctttggactgaattcttaccatactgccattaaaataaatttgccaactagtaatgcatactggaaatcaaaagatactgaaagaatggtgaacttctcttagtggtattgtcatgctaaaagatgttaatatacatcataaaagcaaagtcagccagctgatattttggttctcaaaaactgcattattaataatattttagtatacagagctattctacagtttttacattgtaaacatgactgtggttttgtatttgctaaatataggggttggactaaaatataataaatctgtaccttatcaaacattttctttgagctcctgctaaaaataggacatgtctatgattgttcaaaaatatgttaaatttaggctcagcacagtagctcacacctgaaatcttagcacttcgggaggctgaggcaggtggatcacttgaggttaggagttcaagaccagcccagccaacatggtgaaaaccctgtctctactaaaaatacaaaaattagccaggcatgatggtgcatgccttttaaacccagctactgaggaggctgaggcatgagaattgcttgaaccaggagacggaggttgcagtgagctgaaatcctgccactgcacaccagcctgggtgacagagcgagactcc

SEQ ID NO: 912 - DNA, 1254 bp, Homo Sapiens
ccacgactctgggagtggggaaacagagagccggttcctctgctgcagaagtcctcggggttccttctcacaactctgcgaaggggaaagggttgtgagacccaaccagaccccaactccagctcccagcaggaggtggctgcgccacactcgggaggcctcttggtttcagggtctctctgtctctctctcaccctcttcctcgctttctctgtctctctgtctctctctctctctctccctcgtccactcccccaaacatgtccaccggctccctcagcgatgtggaggaccttcaagaggtggagatgttggaatgtgacgggttgaaaatggattcgaacaaggaatttgtgacttccaacgagagcaccgaggagagctccaactgcgagaatgggtctccccagaagggccgcggcggcctgggcaagaggaggagggcgcccaccaagaagagccccctgagcggggtcagccaggaggggaagcaggtccagcgcaacgccgccaacgcgcgagagcgggcccgcatgcgagtgctgagcaaggccttctccagactcaagaccaccctgccctgggtgccccccgacaccaagctctccaagctggacacgctcaggctggcgtccagctacatcgcccacttgaggcagatcctggctaacgacaaatacgagaacgggtacattcacccggtcaacctgacgtggccctttatggtggccgggaaacccgagagtgacctgaaagaagtggtgaccgcgagccgcttatgtggaaccaccgcgtcctgaccttggaggtgcgagtctgggaaaggcgcgctcccggggggagcgggccccgggaaggcgacccctgccctcagtgctctctgtctctgcttccccctcgcaatgctcctctctctgtcccaccccgcgagaacactttacaacgacgaggagattcgtttccaaaccagaggagatcaattgtacttacaaagattcccatctatttaactttattaacttctaccgtgaatgactctgcaagccttgctggtccaagtgcaatatgtaattataaatatataaatagataagagcctatcaatgtatcttttgtacaatatgttgtaaaatgtagatcataggatagctgactttgacagtcacatttataaagtaattcacttaaagatatatatttttttcaaacaagttttgctacttttgaaaataaatctttctttatattgctaaa

SEQ ID NO: 913 - DNA, 398 bp, Homo Sapiens
aactcgatcgctctccacatccctcctctgttggacatcctcttgtaggtcacaggactgtgtatcaaaagcatttccaacacaaggctggcctccatactgcccatacacagcaactgaccgcctgcgagtctgagtcttggtacagccattgcattctgaccaaggggcatagaagtcccactggcagttgactggagaggaggcacttgaaaaactttggaactctcctataaatcccaccaaaatgaataagcttatcaccttcatgtttgggaaaacattcagggcagaagagaggaggaagatttcctctgtaagggccgggtaagttttcaacagcaggaagagcccagcaggctgcctgcctctctgcctctcccgagcgatcagagaaa

SEQ ID NO: 914 - DNA, 1204 bp, Homo Sapiens
ctctgaggagaagcagcagcaaacatttgctagtcagacaagtgacagggaatggattccaaacagcagtgtgtaaagctaaatgatggccacttcatgcctgtattgggatttggcacctatgcacctccagaggttccgagaagtaaagctttggaggtcacaaaattagcaatagaagctgggttccgccatatagattctgctcatttatacaataatgaggagcaggttggactggccatccgaagcaagattgcagatggcagtgtgaagagagaagacatattctacacttcaaagctttggtccacttttcatcgaccagagttggtccgaccagccttggaaaactcactgaaaaaagctcaattggactatgttgacctctatcttattcattctccaatgtctctaaagccaggtgaggaactttcaccaacagatgaaaatggaaaagtaatatttgacatagtggatctctgtaccacctgggaggccatggagaagtgtaaggatgcaggattggccaagtccattggggtgtcaaacttcaaccgcaggcagctggagatgatcctcaacaagccaggactcaagtacaagcctgtctgcaaccaggtagaatgtcatccgtatttcaaccggagtaaattgctagatttctgcaagtcgaaagatattgttctggttgcctatagtgctctgggatctcaacgagacaaacgatgggtggacccgaactccccggtgctcttggaggacccagtcctttgtgccttggcaaaaaagcacaagcgaaccccagccctgattgccctgcgctaccagctgcagcgtggggttgtggtcctggccaagagctacaatgagcagcgcatcagacagaacgtgcaggtttttgagttccagttgactgcagaggacatgaaagccatagatggcctagacagaaatctccactattttaacagtgatagttttgctagccaccctaattatccatattcagatgaatattaacatggagagctttgcctgatgtctaccagaagccctgtgtgtggatggtgacgcagaggacgtctctatgccggtgactggacatatcacctctacttaaatccgtcctgtttagcgacttcagtcaactacagctgagtccataggccagaaagacaataaatttttatcattttgaaat

SEQ ID NO: 915 - DNA, 244 bp, Homo Sapiens
  misc_feature (29)..(29): n is a, c, g, or t
  misc_feature (62)..(62): n is a, c, g, or t
  misc_feature (159)..(161): n is a, c, g, or t
  misc_feature (166)..(166): n is a, c, g, or t
  misc_feature (188)..(188): n is a, c, g, or t
  misc_feature (212)..(212): n is a, c, g, or t
  misc_feature (230)..(230): n is a, c, g, or t
gacacaaaggaattccaggtccgagccancagaggagaaaacatgaatttttagacacatgntctcctgcccacctcttggctccatcaagatccagccccccatctcactgttttctctgagttcttgggaggagtgatggtgttggggtagaaatannntcacncacccacggagggtactaatgntcttacaggagcttcaactggagnaggaggagctttttatgnttatgttgaatcaa

SEQ ID NO: 916 - DNA, 339 bp, Homo Sapiens
  misc_feature (45)..(45): n is a, c, g, or t
  misc_feature (94)..(94): n is a, c, g, or t
  misc_feature (98)..(98): n is a, c, g, or t
  misc_feature (171)..(171): n is a, c, g, or t
  misc_feature (322)..(322): n is a, c, g, or t
ataacgctgatcttcagtaagttcagttacttcaaagtatgtttnttgtatattagtataattgcacttcagccaccggcatctggtagttctntgcnttcaacaatgtatcctgtgatcttagctccaccatcataatgtggtttagaccatttaagtgacactgatttntttgtgatatttgtggcttcaggttgtccaggagggtcacaaggttctcttgcaggggctggttcacaagatttactgcatttaccaattccagcaatattttcagcatatacacgatactcatacatcagtccttcatcaaggccggagnctttcatttgagtatca

SEQ ID NO: 917 - DNA, 234 bp, Homo Sapiens
tttttttttttttcatattataactaaagcgtttatttccattcaattcactaactgattgctctgcttgggtgtctgtgttggttcacaggagggagtctgtggccagatccctaaactgagggcgtccccatggccaagacctttaggcccagcaaaggtctggtggggggaaggaggggggagagaaatcacacactttctctccagggaaggcaagaggcatgcttgccc

SEQ ID NO: 918 - DNA, 5482 bp, Homo Sapiens
atttatattcattttttactcttttccatcaaaacataattttactaagtacgcatgttctgtgtccgtgttttgtcatcactgaagccacttttggagtcacctagtaatagcctttccactctatctagttctgtagcttttatgtgtgtaaattacttcaaatctgtttatgatcctattgctggaaactttatcccaagacacaaaaatcttttctattagaagttattaactttaaaacaattatttattttattttattttattttttgagacagagtctcgctttgtcacccaggctggagtgcagtggcacgatctcggctcactgcaagctccacctcccgagttcatgccattctcctgcctcagcctcccgagtagctgggactacgggcgtccgccaccatgcccagctaattttttttgtatttttggtagagacaaggtttcaccgtgttagccaggatggtcttgatctcctgacctcgtggtccacctgcctcggcctcccaaagcgctgggattataggcgtgagccaccgcacctggcctaaaacaattatttctttaaaaaaacataccctctattctattttgtgtcttcacaacacaatcacttactgtattgctttttaaagtgatctttaaagagtcttgcagaagagactacacagcaggcccgagaccatcctgagaggcctgtgtgcaaggctggccccccgctgtgtcaggacggtgcccaccaccctcaatgaagaggggctccctgtgcttagctgcttgtgtggggaacaagggcactgtttgaagaagcaaacatggtagcatcaagcattccttgaaatatggctccaagggaacaatgagacgtgctcttggtcttggaagctcatcagaatgtttagagctggggaggcctccaaacgcccattgcctgggccgtcgcccccaagggtgcggagtgtggaggttgcccgggggagggccggctacggattcacgctttcgggacaggcaccctgtgtgctcagctgcgtcatgagagggagccctgcggatttcgtgggcctccgagctggagaccagatacttgctgtcaatgaaatcaacgtgaaaaaagcatctcatgaagatgtagtgaaattaattgggaagtgctctggtgtccttcacatggtgattgctgaaggcgtcggccgcttcgaatcctgttccagtgatgaagaagggggactctatgaaggaaaaggctggctgaagcccaagctggattctaaagcactaggtataaacagagcagagcgagtcgtggaggaaatgcagtctggtggaattttcaatatgatttttgaaaacccgagcctttgtgcgagcaattcagagcccttgaaattgaaacaaagatccctttcggagtcggccgcaactcgatttgatgttggacatgaaagtataaataatccaaatcccaacatgctttctaaggaggaaatatcaaaagttattcatgatgattcggttttcagcattggactagaaagtcatgacgattttgcattggatgcaagtattttaaacgtggcgatgatcgtgggctacttaggctccattgagcttccttccacgagctccaacctggagtccgacagcttgcaagccatccgcggctgcatgcggcgcctgcgggcagagcagaaaatccactcgctggtgaccatgaagatcatgcacgactgtgtgcagctgagcactgacaaggctggagtcgtggccgagtacccggccgagaagctggccttcagcgccgtgtgcccggacgaccggcgatttttcgggttggttaccatgcagacgaatgacgacgggagcctggcccaggaggaggagggcgccctgcggacttcctgccacgtgttcatggtggacccagacttgtttaatcacaagatccaccaaggcattgctcggcggtttgggtttgagtgcacggccgacccagacaccaatggctgtctggaattcccggcgtcctccctccccgtcctgcagttcatctctgtcctgtaccgagacatgggtgagctgattgagggcatgcgggcccgcgcctttctggacggggacgccgatgcccaccagaacaacagcaccagcagcaacagtgacagcggcattgggaacttccaccaggaggagaagagcaaccgggtccttgtggtggacctgggtgggagctcgagcagacacggccccggaggcagcgcgtgggacggtgtgggtgggaggggtgcccagccctggggtgctccctggactgggcccttctgtccggaccccgaagggagccccccatttgaggccgctcatcagactgacaggttctgggacctaaacaagcacctagggccagcctctcctgtggaggtgcccccagcttccttgaggagctcagtccccccttccaagaggggcaccgtgggtgctggctgtggtttcaaccagcgctggctcccggtccacgtgctccgggagtggcagtgcggacacaccagcgaccaggactcttacacagattccaccgatggctggtccagcatcaactgcggcacactgccccctcctatgagcaagatccccgcagaccgctacagggtggagggcagcttcgcgcagcccccgctgaatgccccgaagagggagtggtccaggaaggcctttggaatgcaaagcatttttggtccccatcgaaatgttcgaaagactaaggaagataaaaagggctcaaaatttgggcggggaactggactcactcagccttctcaacgcacgtctgctcggagatcatttgggagatccaagagattcagtatcactcgctcccttgatgatcttgagtctgcaactgtgtctgatggcgagttgacgggcgccgacctgaaggactgcgtcagcaacaacagcctgagcagcaatgccagcctccccagcgtgcagagctgccggcgcctgcgtgagaggagggtcgccagctgggccgtgtcctttgagcgcctgctgcaggaccccgtcggtgtccgctacttctctgattttctaaggaaagaattcagtgaagaaaacattttattctggcaggcctgtgaatattttaatcatgttcctgcacatgacaaaaaggagctttcctacagggcccgggagattttcagtaagtttctctgcagcaaagccaccaccccggtcaacatcgacagccaggcccagctagcagacgacgtcctccgcgcacctcacccagacatgttcaaggagcagcagctgcagatcttcaatctcatgaagtttgatagctacactcgctttctgaagtccccgctgtaccaggaatgcatcctggcggaagtggagggccgtgcactcccggactcgcagcaggtccccagcagcccggcttccaagcacagcctcggttcagaccactccagtgtgtccacgccaaaaaagttaagtggaaaatcaaaatccggccgatccctgaatgaagagctgggggatgaggacagcgagaagaagcggaaaggcgcgtttttctcgtggtcgcggaccaggagcaccgggaggtcccagaaaaagagggagcacggggaccacgcagacgacgccctgcatgccaatggaggcctgtgtcgccgagagtcgcagggctctgtgtcctctgcggggagcctggacctgtcggaggcctgcaggactttggcacccgagaaggacaaggccaccaagcactgctgcattcatctcccggatgggacatcctgcgtggtggctgtcaaggcgggcttctccatcaaagacatcctgtccggactctgtgagcggcatggcatcaacggggcggccgcggacctcttcctggtgggcggggacaagcctctggtgctgcaccaagacagtagcatcttggagtcaagggacctgcgcctagaaaagcgcaccttgtttcggctggatcttgttccgattaaccggtcagtgggactcaaggccaagcccaccaagcccgtcacggaggtgctgcggcccgtggtggccagatacggcctggacctcagtggcctgctggtgaggctgagtggagagaaggagcccctggaccttggcgcccctatatcgagtctggacggacagcgggttgtcttggaggagaaggatccttccagaggaaaggcatccgcagataaacagaaaggtgtgccagtgaaacagaacacagctgtaaattccagctccagaaaccactcggctacgggagaggaaagaacactaggcaagtctaattctattaaaataaaaggagaaaatggaaaaaatgctagggatccccggctttcaaagagagaagaatctattgcaaagattgggaaaaaaaaatatcagaaaattaatttggacgaagcagaggagttttttgagcttatttccaaagctcagagcaacagagcagatgaccaacgtgggctgctaaggaaggaagacctggtgttgccagagttcctccgtttacctcctggttccacagaactcaccctccccactccagctgctgtggccaagggctttagcaagagaagcgccacaggcaacggccgggagagcgcctcccagcctggcgagcagtgggagccagtccaggagagcagcgacagtccgtccaccagcccgggctcagcctccagcccccctggacctcctgggacgaccccccccgggcagaagtctcccagcgggcccttctgcactccccagtcccccgtctccctcgcgcaggagggcaccgcccagatctggaagaggcagtctcaggaagtggaggccgggggcatccagacggtggaggatgagcacgtggccgagctgaccctgatgggggagggggacatcagcagccccaacagcaccttgctgccgccgccctccaccccccaggaagtgccaggaccttccagaccaggaagtgggacccatggcagccgagacctcccagtcaacagaatcatcgatgtggatcttgtaactggctcggcgcccgggcgggatggtggcatagcgggggcacaggctggccctgggaggtcgcaggccagtggtgggcctcctacatcagacctccctggcttgggccccgtcccgggtgagcctgctaagcccaagaccagcgctcaccacgccaccttcgtctgagctgccctggcctggccaactctcctgtggacatgtcggggtggggcagcccaggtggattctgtgggcctcaggggggccaccctggccaccacaccctcaggagcccagccaggagggcagggggtgacctcgctggaggcactggccccggacattcgccatgctggccatggggctccctggccctggcctcctgctgcccaataaagcatttctgaaaaaaaaaaaaaaa

SEQ ID NO: 919 - DNA, 350 bp, Homo Sapiens
  misc_feature (144)..(144): n is a, c, g, or t
ggatttagcagacttcataaacatgttcaaaatggaagtctgtttattatattaaagaaaacttataataatccaatgaacaaagaatctcaataaagaggtacaaagttatgaaagaaccaaatggaaacctgggcgctgaanaattcaacttacgaaacaaaacaatgcaagtagatttgagatggcagacgcatcggtgagcttgaggaaaaatcaacgttacacaacctgagaaatagagggagaaaaagactgaaaaaaatgaacagagcctgagaccagggtaacaggaaatgtaccaacaaatgcataaggcggaatcacagaagagcaaagggcagaaaaat

SEQ ID NO: 920 - DNA, 319 bp, Homo Sapiens
caaagcacacgttggacaatttcaaaacaaattaaccctggtttcagaaagttacagaaattaaggaacataactacaaaaagggagatataaagaatgacaagagaatgctgtgtaacttttacaaaaaattaaactcagtggaaaataattttcaaaaaaaagaagaaaatagacaagctgactaaacaaattatgattatgaaaataaggtaggcagttaaaaaatattttctacgtccttccacccaaatgctgccaagtccggtcagatattccaagttttagtgaatttatgaggaatagattatctcttttt

SEQ ID NO: 921 - DNA, 145831 bp, Homo Sapiens
aagctttaagtgcagagcaagaaggaattgaaccttttattatgattccttgagcacctaactaggtgctagactaatgattacaacctgctaacacagaggagtgatttttgtttttaaattgagttaacttaatatatcaaaaaaagaaatctgtttctggcattgctcgaaaaagcagaggacctgacactgcagaatgcagagtgcgagtagcagtccctgtgagatgggctttttgctctgcttttccgcagacctcaccactccctgtcgtctcccaggccatggtaaccattgaccgtggcacctcttttgttcactcacacacgccctgcttcactcatgccttacctgctttgtctctgtagacagtgggaccctccaccctataccaaacctctggggttgggaaaatcatgatccagagccaaggtggatgggcccccctgctcattggaactccaagcccaagtccctgaaccatgaaccccaaaggacatttttccagttctggttctgcttctggaatgcccagggggtcaggagaagccctccttccaaactttagcaggtgacaatttttccgccttagagacctggcccagcaatcttagcctactctggaagcagtgtccacccggggacacaaggaacaagcagattgtgaacagaggcctcctgggtgccagccactgcactggtccctagagggtagaaagacactgtaactggaagctgccctttgtcaagccccaagcattagcccttctgatctttttttttttttaacatggagtctcgctctgtcacgcaggctggagagcagtggtgtgatcctggctcactgcaacctccatttcctgagttcaagcgattcttgtgcctcagcctcccagtagctgggattacaggcacatgccaccacgcccagctaatttttgtatttttagtagagaagtggtttcaccatgttggccaggttggtcttgaactcctgaactcagatgatcctcccacctccgcctcccaacgtgctgggattacaggcatgagccactgcacccagccttctgatctttcaagtcattattgcttcaaagaacctcctccagtaatacaaggataatctatgcaaagacctcaggagaatatttaaaaataagtatgtatcacaaaaagcagccctcttccctggaggcaaacatgattcacaggttcatgtatgtacacacacacacacacacacacacacacacacaccccaaacataagaaaaagtcactccttgtatgttttgcagtatgattttttttccacttaaccctaccttatagttttttctgtctgttcataactatctagtcagacttcaaatatgtttttgaataggtaagacatgcaaatatgaaataaaatagtgtataagggaatatagaacttcccccttcgttcctatttctcgcccttccagttccccttcttagagacactgtggttgctggttacatatgtagccctccagtcatgttatttatttatttatattatttttcgagatggagtctcactctctcacccagactggagtgaagtggcatgatcttggctcactgcaacagccccctcccaggttcaagcaattctcctccctcagcctcccaagtagctgagactacaggcgtgtactaccacacccagctgatttttgtatttttagtagagagggggttttgccatgttggccaggctggtctcgatctcctgacctcaggtgatccacctgcctcggcctgccaaggtgctgggattacaggcttaagccactgtgcccagcctattgctttttttgtgataaagtctcactctgtcacccaggctggagtgcaatggtgcgatctcggctcctgcaacctatgccttctggattcaagcgatcatcccgccccagcctcctgagtagctgggattacaggtgtgcatcaccacacccagataatttttgtattttttgtaaagatgggtttttgccatgttagccaggctggtcttgaactcctgacctcaagtgatccacccacctcagcctcccaaagtgctacaattacaggtgtgagctgctccatccagcctccagtgatgttttatacacatgcagccacatagagagcccctcctgcacccctccaaaatggcagcacaggccccggctgttgtgcgtctcaatctttgcatctaactgtgtattttggccattcatccatggtagtagagagagggccactgcacagtcttctgctatagggatgaaccataatgattaagcctgtctgctattgacaggtatttaggttgtttctagtctttttgctcttaaaagcaaggctgcagcaaaagcacgtgcttggtggaccacgtctgtctctaggttgggtatttagaaagccgtgatattgcactgcagcttcataaagaagccgtgattatccatcactttactgaggaagctcaggggtaggtctgtatgcacaagtcaggcaggtgataaggcaaagccaacactctgcccaggcctgtgtgtctttttttttttgagaccaagtctcgctgtatcacccaggctggagtggagtggcacaatctcagctcactgcaacctctgccacctgagttcaagcagttctcctgcctcagcttcccgagtagctgggattacaggcacgcgccaccacaccttgctaatttttgtatttttagtagagatgaggtttcactgtgttggccgggctggtctcgaactcttgacctcaggtgatccacccaccttggcctcccaaagtgccgggattacaggtgtgagccactgcgcccggccatccctgtgtgtctgaaagccagtgttccttccacttccctcccttccctccctgttcctcatttctgctgcaggccccgggagcaccccctgctcagggctctgtggctgaccatataaagcgtcagagaaaaactggagctgcttcctaatacggtcacaagagggaaatcctgggcctgcagctgggacttgctggtggcacagggcccatgagatgccggctgggacacaggaggctgggatgttgaaacctctgaatttaaccagctggagaggggctcgtggggccagagaggcagaaacacagccaactatggttgggctgggtcgaggtgaaggagaagtggctgaataatgtgggaggaagagcccgatgctgaagccccacgaccctgccgtgagatgtgcggctgcctgcaccagtcttaccttcactccatcgtcataccctggcttgcttagaaagcttttacagaactcagcagagattcagatctacctggaagtatggattaagtgcttgttgtgtgcacggcactgggagagatgtcccaaacaaagaggatggaagtcatattcctctttcagaagctagtgatggagttgaaaaggcagtgtggtccttccttctttttaaaaattcattttattctttttttttttttctttgagacagtctcactttgtcacccaggctggagtgtggtggcatgatctcggctcacataacctctgcctccttggttcaggtgactctcctgcctcagactcctgagtagctgggattacaggcatgcgccaccacacccagctaatttttgtatttttagtaaagacggggttttgccatgttagccaggctgttctcaaactcctgacctcaagtgatctgacctcctcgatttcccaaagtgctggcattaaaggtgtgagccaccatgcccggcctcttccttctttttaaaaattccttttattcttttcttttctctatctctcatctctctttcttcctttctttcttactttccttccttccttccttcttttttttttttttttagagtctcactctgttgcccaggctggagtgcagcaccatgatctcagctcactataacctccacctcctgggttcaagtgattctcctacctcggcctcccgactagctgggattacaggcgcctgccatcatgcctggctaatttttgtatttttagtagagacggggttttgccatgttggccaggctggtctcgaactcctgacctcaagtgatctgacctccttggccacccgaagtgctgggattacagctgactgagtgtctaccctgtccctggcactgtgcggggtgcaggagatacagtagtgtgtgggtcacagtccaggaggtaacatttaggcagagctctaaaagaggagagggaaccagctgtgggaagatgaggggaaaagtgttccaagtggagagaacagcatattgaaggctctaaggtggcaagacttccctctcgtgaaatgaagggagcatagtaagagtcactaaataacattgattgagcacctactacataccagccgccatgctaaatgcttttcgagcattatctcgcagcacatctatgaagggcttgttcgtatgcctccctgttttgtagatgaggataagtgagactcagagaggttaagggacttgcccagggtcacacagcgaagaagtagcaaagtgaaggttcaaattcaagtaccccatacccagttctgagcccttagccactgccctttactgcctccaggtcaagggcttgagtgaggacaggttgggctgtaaatgatacctacattcaaaaggggcgtggcagtggacatggccccagaggagctggagatggagtcgaggcctgaaggagggtggggcttgattgacctttgttcaggtgaccacagactgggctcttctctttgggaggcttgtcctggggacaggggacactgattgaacaggaaatagcccctggcctggctcagtgtagtccactgagtacctactgccgccgtgcaaggcccccaggtcacggaggtgaagtcaggctgtccctgctcccaggaagctgtatcattaatttattcccctggcatgcatttagcaagcatttagttagcacctattctataccaaggcctgtgctgggactgaagaggagaaagggggttccccggactcaaggcacttgcagctggtgtttgcaggatgggtgggagggtcctgggtgatggaatggggaagaggggtgtccaggcaggcagccccccactcccagccccaccaggctggatgttgctcctgggccccgcttacctctaacccttgctttgcttctccatttcggtccgatggagccgcttataccaagctgcttatagttcacccccacggaccccgtgtcctgtttttctgcccatgtccctgctttgtcttgagctggttaacaccttgttgtcctttaagactcagtgcagggaatacctccccacctggaggtttccctgaccacccccaatgtgggttagggccttcccttccttgttcctatcattctctgttcttacgacgtgttttaatgtacttgtctccccctctgatttaagttctttaagggcaggagctatcattgatttctttatctccagcctctgacacagatgtggtatatagtaggtgctcagtaaatggttgatggctatttagacaggcatatgttgactcattcattctccttttaggggatggtgagaacctccgtctccatcaatcctgtttccttttttttttttttttttttttttttgagatgggttctccctctgtcacccaggctggagtgcaatggcaccaccttggctcactacaacctccctccacctcccaggttcaagtgattctcctgcctcagcctgccgagtagctgggactacaggcatgtgccaccatgccctgctaattttttgtatttttggtagaaacagggtctcactgtgttgcctaggttggtcttgaactcctgagtgtgagcaatctgccctccttggtctcccaaagtactgggatcataggtgtgaaccactgcgcccaacaatcctgtaccttcaaagaatattcctctgcagcacccccagacattacataccattgtccctgagtggactgagccctggaaggaccttcccactctctctttttctttctttttcttttttgagacaaggtctcaccgtgtcacacaggctggagtgcatggcacaatcacggcttactgcaacctcaacctcccaggcttaagcaaacctcccacctcagcctcccaagtggctgggactacaggtgaatgccaccatgcccagctaatttttaaatttcttatagagatgggggtctcactgtgctgcccaagctggtctcagacttctgggctcaagcaatcttcctgccttgacctcccaaagtgctgggattacagttgtgagccaccacacccagccagactttcccactctctaattggctccagcccttgactaaaaggcccttgagggctgggatcctgtgtttttttaatgttctaatgtagtcccagcaccttttgcatggcatctgggacgtacagaatgaatgaatgaatgaatgaatgaatgaatgaatgaacgaacgatcagtagtttctgtttctgttggatgggcctaggctggatagcataatggaccatgctcatacctgggggcgggccaggctgggcttggtgctgccaggatcttctttggtgacctcggtcaagtcacttaaccctctgttgcttggttcaccctagctgtaactgagagatggatctgtggttctccctaagtcacttgcagggaagaggatacgctttatggccatcagagtcttgggcagtactgatgtttatcgtttggggaaagcagttcctgtgagacgggttggagcctgtctcctgaactgtgacctcaaccatgggaaaatctagtatccagtaaggaaaaatcatgacaatagtgccttaccacgtacagcatggcgggactcgccttgtgccttgactcctccgtccctgatctgattattttcagatgctcctattcacccagtaggagaggactgctattttttaaatggtaaagtgcatatgacataaaatttaccattttaaacattttaaagaaaacagtgccattaagtgcattcacaatgttgtacagctatcaatttcaagacagggtcttgctctgtcacccaggggctagagtgcaatggtacaatcatagctcactattaccttgagctcctgggatcaagcaatcctcctgactcagcctcccaagtagctgggactacaggtgatcaccaccatggccagctattttttttttttttttttttttgtagagagggggtccggctgttgttgcctgagctggtctcaaacacttagcctgaagcaatcctcccaccttggcctcccaaagtgctgggattacaggcatgagccactacacttggccccagagcatttttatagcctcaaaaggaaaccttatacccatgagcagttcctcctcatttcccacctctttccagcctctgggaaccacaagtctgttttctgtctccatggctttgcctactctagacacttcacataaatgagatgatagagtacgtgacttttcgtgcctggcttctttcactaggcatattttcaagcttcatccacattggagagctcatgtcagtgttggtctctgttttgcagatggggaaggtattaatgatcaggagcaggcgctgtggggtaaacaggagttctagttcccaacttccctccagctgtgtaacctggtgacaacctcaccatgcctcactttgccctcctgtcaaacaggcggtggggaaatcactgttactgagtagttgtgaagatgccacgaggagatgcctctgccatcttctagagactgagtcactggggtttcttcttagatatggacattgggaggtcccagaaagagatcagagggtggtgggaggagagagagcttggaggattattaccttttcctccctccctcctggaccacagttttggcagctgtgtttctgtatgactgcggatccctctggacagcccctttttaggggtgtgtggctttctatgcctccaatgttcagttaacgacattccctctctggctgagtgcggtggttcccacctgtaatcccagcactttgggaggctgagactggcgcatcacctcagctcaggagttcgagaccagcctgggcaatatggtgaaaccctgtctctacaaaaaacaaaataaaaattacctgggcatggttgtgcacacctgtggtaccacctacttgggaggctgaggcgagaggatcacttaagcccagaaactcaaggttgtagtgagccaagatcaccccactacactgcagcctgggcgacagagcaagaccctgtctcaaaaaaaaaaaaaagtaaacaacattctcttctgttcttgctcttcagacttaactgctcccgtcactggttgggtttctttaattctgcacacatatctgtaaacactttctttattaaatgttcctgagttaatatcttaagcacactgttcattttctgtgccacctgttaaatgatgagcatttaatatgattgtcagcatccaaaaaagatcctgcgtagtgcttagttcggtgcccaacacatagtaagtgctcaatgaacggtggctgttatttaagccagtgaggtccggggaggtaaagtggcaggtcggaggagtggagctgagatttgaacccagagctcttcaaaactccacagtttggccaggtgcaatggctcacaactataatcccagtgctttgggaggctgaaatgagagaattgcttgagcccaggaatttgagaccagcctgagcaacacagtgaaacccatgtctctacagaaaatataaacatcagccaggcctggtggcgcccgcctgtagtcctggctactcaggaggctgaggtaggaggatcacctgagtccagaaaggtcaaggtttcagtgagtcacgttcacaccaccgcactccagcctaggtgacagagtgagaccccatctcaaaacaaacacaaaaccccccacagttgcaaaataaaacataggcagcttggaaacccactctcgccctttctcctcttcccacgtacctggaatatcagtgaggcccagggtttccactaagactccaagctccagtttccccatctctaacatgagaatattgagtgcttctgtgcaatctgtctaccctggaggaggtctggaagtaagctgggttctctgtctgcagacgtactctggcctcttctgcgtggtggtcaacccctataaacacctgcccatctactcggagaagatcgtcgacatgtacaagggcaagaagaggcacgagatgccgcctcacatctacgccatcgcagacacggcctaccggagcatgcttcaaggtgagtgaactcagggctgcacggggccagctccagggagcccctcctgtcctgcttgtctgcagttcttgccaggaatgtggagtttggcaggcactgcgagggaccaggagttactgtggctgaaaaagggaaaaagcaaaaggaacatctgtgtttgcagcctgggagggtgagggagagccaagagcttgggcaaatacgggcatgggcccgctccagctccagctccggggctcgctgcccaaggtccccgtcgggccagctgtctgcaaaggatggaaagagggtggggaacagccctggggctgagccattgtggtctgtgttgacacctacctgtccctcaacccctgtgggactgtgggtaaatatcttttcctcttcagcctcagtttcctcatttgtcaaaaggggtgatagtctctatcttgtagcttcttgtgaagattgttaatgctggtttttccaaacttaagacttgtgcctattactttcatgtttatacgttattatttttactattgttttattatttttgagacagggtctcactttctcgcccaggctgaagtgcagtggtgccatctcggctccctgcaacctccgcctcctgggctcaagcaattctcctgcctcagcctcccaagtagctgggactataggtgtggactgtcatgtcaagctaattttaaaaaggtgggtttttttgttttgtttttgttttgttttgttttgtttttggaagtgacaggatcttgctatactggttggtctcaaactcttggcctcaggcgatcctcccactttggcctcccaaagttctgggattataggcatgagccactgcacccaggccttctcaccttctatttagaacactttggagcccctgaaatagccacccccaagtcaaacagagggactaggcagttaatgcaaacaagtgtaccaggtcaggcgaagagtacaagaaactcgaaaactcacaccccctctgaaagggcaccaacaggtgggaacccagggatctgagttgggagttgagaggagcccaattctggaagttcttgaggccggaatccaggtgtgcctgagagatgccacgaccccgcccccaagatagagggactcaggtataagtgccccaactttctgacagtgagccagactccacaggtaggaccagaatcttggcccttctaggcagggcctgccattacctccaaagaccagcaggtggagccttgcaaaggcaatcttggagctgtaatctcaggttgtaaagtgatggctcctggagtcaggtatctgtcttttttttttttttgagacggagtctcgctctgtcgcccaggccggactgcggactgcagtggcgcaatctcggctcactgcaagctccgcttcccgggttcacgccattctcctgcctcagcctcccgagtagctgggactacaggcgcccgccaccgcgcccggctaattttttgtatttttagtagagacggggtttcaccttgttagccaggatggtctcgatctcctgacctcatgatccacccgcctcggcctcccaaagtgctgggattacaggcataagccaccatacccagcaattcctggttcttttctggagctgaggtcccactaagcacattttaatctaaataccaaaaagaaagaaaattctgttagcaaaggagaaggagggggagcgacagatgggtaagcatttctacagtgctctgaaaaaatttatttgtaacttgaaaaagtctttaatattgtatattcattctagaaaaacttaaacatatatttaagtaaaagagaacttgctggcacctatgattctatcatccaaaactcatcaccattaacattttgttacgtgacctttcattacactaactgaactaaatggcatgaaatgaaggaaatttttactatctgaagataattcgttccagaaaaagatcacttaaaacagagaccaaagtttcactgtagatagtatgtgtgtggaggagggaaagagagtgggcaaaatatttgactgagcttgaaaaatgacattgcaggccaggcacagtggctcacgcctgtaatcctggcactttgggaagcccagatgggtggattgctcgaggtcatgagttcgagaccagcctgggcaatatggcgaaaccctgtctctacaaaaaatacaaaaattactttggtgtggtagcacatacctgtagtcccacttcttgggaggctgaggtgggaggatcgcttgagaccaggaagtggaggttgcagtgagccgagatcacgccactgcattccagcctgggtgagagagccagaccttgtctcaaaagaaaagaaaagaaaaccaacattgcaaattataaaaataggttaatttcagcttacatgtaataagaattttattttaattacaagtaggtgctaatttgtagattcagtataaaatgaattaagagtgggtgtggggtttttttctgtaactttttctgggctgagggatgaaatcatgtgagcataaaacgacatcttcatgtcatgcttgacttctgcagcccgagctaaaaaggatcattcttacagatttatttgatgggtcaccagttttcctaagggcttcttttacttctttagtgtttaagtctctcaaagcccctgtggtcttagcgttcattcagctgtgaattgccctgaatctttttctttcttttgtctttctttctttctttttttttttttttttccggatggagtttccctcttggtgcccaggttggagtgcaatggtgtgatctcagctcactgcaacctccacctcctgggttcaagcgattctactgcctcagcctcccaagtaactgggattataggcatgtgccaccacacccggctaattttgtatttttagtagagatggggtttcaccatgttacccaggatggtctcgatctcctgacattgtgatctgcccgcctcagcctcccatagtgctgggattacaggcatgcaccatcacaccaggctaattttgtatttttagtagagatggggctttaccatgttggtcagactggtcttgaactcctggcctcaggtgatcctcccacctcggcctcccaaagtggtgggattacaggtgtgcaccaccacacttggcccctgaatcttttttttggcctttccaaggccactgactttgccagtcactgcaccttgttttccagaactgccactttgttttgtgttcatatcatgatggtggctattgatacccaataattggcaaggtgaagccactgaatcgtcggagaaggaggtttcggtggagtttgatcgctcttgtagtcattgaagaatacttttgtgttgtggggacttttgctttcctagaccagcagtccccaacctttttgacaccagggaccagtttcatagaagtcagtttttccatggaccgcaggggagagatggttcgggatgattcgagcgcattacatttattgtgcactttatttctatgattacattgtcatatataatgaaatcattatacaactcaccatcatgtagaatcagtgggagccctgagcttgttttcctgcaactagacggtcccatctgggggtgatgggagacagtgacagatcatcaggcattagattctcataaggagcacacagcctggatccctcttatgtgcagttcacagtagggttggtggttctataagagtctaatgccgcctctgatctgagaggaagcagagctcaggcagtaattggagtgatagggagtggctgtaaatacagatgaagcccactactcacctcctgctgtgcagtaccagtcggtggtttgagatgcctgcgctagaccacctcttaactgtgaggcaatgttgtaattgacaaggacaccctgtgttcatatatttgattcctcatggtctctaggttttaacacaaaattgcatagtcagctctcttgaaactacttagaaatgctcacttgacacatagtaagctccaataggaaatgactatcatgattgagcacagcagcatgtcttcagtcctagcactttgggaggccaaggcaggaggatcacttgaggccaggagttagagaccagcctggccaacatagtgagctcttgtctctacaaaaaaataattagctggccacagtgcgtgagtctgtagtcctagctactctggaggctgaggcaggaggatggcttgagcccaggacttcaagaatgcagtgtgctatgatcgtgctatggtactccagccttggcaacagagtaagaccctgtcacgaaagaaagaaagaaaatgaaaaccgtgaatatgcacatccataaaagataaactctttacttaatttaaatgttaaccaacacctgctatgccctcgtctattttggcatgacctggtgctttctggcaaatcattgatggcggactccaaaaataaaaagaatcgggcacggtggctaacgcctgtaatcccagcactttgggaggccaaggtggggggatcatgagatcaggagatcgagaccatcctggctaacgtggtgaatctccgtctctactaaaaatacaaaaaaaactagccaggcacagtggcaggcgcctgtagtcccagctactcagggggtgctgaggcaggagaatggtgtgaacccaagaggcggagcttgcagtgagccgagatcacgccactgcactctagcctgggcaacaaagcgagactccatctcaaaataaataaataaataaaaaataaaaagaatgtcaaaaataatggagaaaaatttaagcttgggaagaattccgttcacctgcttaattttttctccattcccaagtaggaaattggtttttgtgaagaaacacgtaggcccagtgtgttgactccattgataaatggcacgatctcattctgttaagtcactgggctgcgatccacactaagcttaccatgaaggtggagagagaaagctagcacatgtggcttcttccttgagttcttcatggaaaagatggggtgtgaaaaggcgggattgaggagggatgggtaacacacatgcactgaatataagatgaagcattgcagttgtgtcacatagacagtaagttcctgaggacctataaactccatccttcttgcatgtgcatcattgtatctccagcacattttctggtgcctggcacatagtagctgctcagtatttgttgaatcaatgaattattagagttatttatagaaaagaacctaccagggtcaggatggatggggtgggttatttgagagaggtggggctttataagcctcgaagaatggtttgctaaggtgagagaagggggcagggatggctttctagccaagaataataaaagcataaatgtaggggtgagaatgggtatgatgagtgtggcaggagctggtttagaggggttgactagtatactgtggcagggagctcagagccagagctcagccctttgctgcctcacaggagttgggaaaatgggagggactttctaagagatacttcacaacatggcaccctcccaagtggaagccaagccccttgagggtatgggaagagaagctgatatttaaaatatgtatcttatatctgcatatgcataaattatgtcatgtttattttttaaattctccccccctttttttttgaggcagagtctcgccctgccacccaggctggagtgcagcagcacgatctcagctcagtggtatgatttctgctcactgcaacctctgtctcctgggttcaagcaattcttgtgcctcagcctcctgagtagctgggactacaggcacacaccaccatgcctggctaatttttgtatttttagtagagatggggttttgccatgttggccaggctggtttcaaactcctgacctcaggtgatctgcccgcctcaacctcccaaagtgctgagattacaggcatgagccactgcgcccggccgtggtttgtttttggaaagatgttacatacaaattcaaaaggtgaacttctcccttcaacccttgtgcattagacccttagcttccctcccaagagacaattatggtttctagtgtatgaggttttctcctagagatatttttgcaagtataagcaaataggtatctattttcttccctaagatttccctacaaatactagcattccatatatatacagtcctatattttgccagaggatgttacatatcagtgcatgtaggaattccttgttcccttttttaaaaaattggtttttatttttgttaaaagtattcatgcagacggcttagagtcaagtaatttttgaaggcttattaagaaaaatagccatcctctgctacttctcaactcctttaattgattttttttttttttggtatttaccaccatatctctgaaaacaacacttgatcattgtgctgctatcttaattttgttttcaattttaggtatcatctattgactttcctccatgaaagatgaaatttagctcattcaccctctggatttgcccctatttcctcgttccaacacacatgcctcatatcagagtcccagtataattttatcttagttttgacaaactcagtgttcagagtttccattattatgactatgtaatgctatctagagtttacattattatgattatgtagatgttattcaaagctgagctttgcactgctttgtgactatttttcttctttctgtatgacttttctttttcctggagttagcaattgccttttttttccccaatcttgttttccatgtatttaaccaccaattctgccccaaaatctctttctaaatgtgttaatctccttttaatatgtccagacatgtattggatatcatattgatatcatctccttgaatgtgatctctactatagccttctgatctgccctggctttctctatagctagtaactgtcatataggatctttttcaccatccttgaaattccccttagtgctttcatagtggattccttgtttcccagttttcatgtcttcctctttcttgctttactctcctgcttaaatcaagcactttgtccagtagcttcccaagaaagaatgtacgtgatcttgaggcattgagaacttccatatctgagaggcttgatgcttctctaacacttaaaggatagtttagttgggtttaaaatttcaggcaagaaagttgttttcagaaagttataaataactttttttgcctgagctttttaaggcatttgtgttgttgccttctagtttcagttttgagaagatgaaacccaatctgattcgtatgtgtgtatgtttgtgagtgtgtgtgtgtgtgattatattcaccttcctggctgggaatattcttgatcctttgtacatgaccagtttttgtttttcctccttctctagaagcttttagactgtctttgtacccctattcaggatgatgggacttgctatgagtccatttttatttgttatcctggacacttagtggcccaattaatctataaacgtgtgtccacaaattctgggaaatgttgcaaattatttcattgatgctgtctttctccctgtgttctctgtttctttttcttagaagtctttttatttccataatggaattcctagaccaatcctataatttaaatctctttcttttgtcattttcatcactttaatgtttttaatggtattttctgggcacttacctcaacttttttccctaacccttccattgcgttttaaatttctggtatatattttattaaattccaaaaattctattttatttttaaatgtttctttcatatgacattctttttctgtggttgcaatatcctgtttctcagaggatatttaatgcagagtctatttcctccaagatacatattttcctaattgttttaacttctgtctgtcatattagtggatttcttcagatgtcttgggattcttggctatccattcatcttggatgctttagtacacaggataccaaattgttgatggaagctcagtgcttataggatgggcttgctgatgtgcttggctataatatgaaagcactgggctaccccattaggacacttctgtttcgtctttcagtcttttgttcatgggctaatctgattcttcagagaaggtttgtagaaaaatcttctgcctggaggttaaagatttgtctagcatcattttgagggtctagttgaaaagaagctgagggtttcaaaatgtgcagtgaaatttgtacattataccttccttctttcagtatggttcctggtgtccccccaggacggagaccctctgtttaaccctcaccagagactaaacccaccaccttctgtggggtgtgagaagggcagtcacttggcttcagggagtgtagaagatatgggaggggtctaacagtgccttatatttgacccagtccttatgtttttgtctcctccttgatcttttcttccagaggcccctggcattgccagtttctgaggtttggggcagaaatggggaattcggtgttgaaattaggtcgtttcccacctttcctcactgctcacctagacttttttcttggtacctttttttttttttttttttttttttttttttgagatggagtttcactctcgttgtccaggctggagtgcaatggcatgatcttggctcactgcaacctccacctcccgggttcaagtgattctcctgcctcagcctcccaagtagctgggattacaggcatccgccaccacacccggctaatttttgtattttaaatagagatggggttcaaccatgttggtcaggctggtcttgaactcccgaccttaggtgatccacccaactcggcctcccaaagtgctgggattacaggcgtgagccacggtgtctggactttttcttggtacttttcaacgcttatcccattttctgtcttccaagatggctttgctgttctcccctctctagttctttttaaactgcctcatgtatttttacactttttggtttgtttgtttttttttgggggatggagtttccctcttgtcgcgcaagctggagtgcacgatctctgctcactgcagcctccacctcccaggatcaagcgattctgcagcctcagcctcctgagtagctgggattacaggtgcatgccaccatgcccagctaatttctgtatttttagtagagacgggttggccaggctcgtctcgagctcctgacctcaggtgatccactcacctcagcctcccaaagtgctgggattacaggcgtgaaccaccacgcccggcctttttacacttttttttttttgccttttcccccctcttttgtgtggagaatggggtcttgttatattttccaggcaggtcttgaactcctgggctccagctttcctcatgcctgtgccttcctaagagctgggattccaggcatgagccaccatgcccggctaaactggttcatgtatttttggaaagtcttttacagttattttagtaaggtttaggaaggaagagagctaaatgcatgcactcagcctaccatcttctcatgggaattctctcatgccttcttttacaaagaagtgataataataatcatggatttttattatatgcttcctataaagctcagggctttacagaaatattctcagttaatctttaccacaaacctacaaggtggacaggaccagattaggaattttaaaattaagccctgaaactattaaggtgcaggcatatgtcataaaaaaaaattaaattataaagtaaagaaggctgacaaaattgtttttgtttttgctttttttagagacagggtcttgctctgttgcccaggctggagtgtaatggtgcgattgtaactcactgcagcctcaaactcctgggttcagcaatcctgcctcagcttcccaagtagctgagactacagagatgtaccaccatgctcagctaattaaaaaaaaacaactgttttttgtttgtttgttttgagacagagtttcacccctgtcacccaggctggagtgcaatggcacgatctcagctcactgcaacctccacctcctgggttcaagtgattctcctgcctcagcctcctgagtagctgggattacaggcacatgccaccatgcccagctaatttttgtacttttagtagagatggtgtttcaccgtgttgaccagactggtcttgaactcctgacctcaggtgatccacccaccttggccttccaaagtgctgggattacaggcatgagccaccgtgcccagtcttttttatttttgagacaggttctcactttgtcacccaggctagagtgcagtggcacaaacacggctcactgcaggcttgacctcctaggctccagtgatcttctcacctcagctccccaagtagctgggactgcagccatgcaccaccacacccggctaatttttgtattttttgtggagacgggatttcaccatgttgcccaggctggtcttgaactcctgagctcaagtgatccacctgcctaggcttctcaaagtgctgggattacaggtgtgagcccactgtgcctagtgaaaaaactttttttttttttttttttttttttttttttagagataagatcttactgtgttgcccaggctggtctctcattcctggcctcaagtgatcctcctgccttgacctcccaaagtgctgggattatgggtatgagccaccgtgcccagcctaaagttgctatttttcccatgatgtttatcttcgtggtgcttatgaaatggcaactatggcattcttccttctcgtgcatgcctgtgtgggtgtgccctcagcatatgcttacaaggtttattgggtgatccaacgctagccgcaagagctattattagctcccttttacagctgggaaaacagactcagaggagtggagaacttgctgcagatttgttaagtgtcagagccaaatatacacttggattatcctgactccaaagccggagccctgctggtcagtcggtgacaccgggcaaccacagggatccccctcaatcccacggaaggctgtctactgtcttcatctcagagtgttgacagctcaaagcttaggaggctggagctaagttcaataaatgaacgtgatgaataggagaaaagcgccattaaagccctccagacaagaaccactttggagcccctccatgggtccctggggtgtaggaggggcaggaaagcagataagattccattctgagcctctgcacttgccctatgcaagatagccacaagtaatgttttgtcctcacctcattagcaacaaatggccacactcaggggattaaaaaaagaaataacagccagcctttatcagcttggggctcttggctaattcctctttaagcttaagacaactctgcgggtggagtgatccaaacgactttctccactttgcaagttcccacactcggctgtatccttctgcttgagattggcagccccctggggatggttcctgctcacccaactcccctgaggctgctccccagtagaggcagagagaggaagggcactgatgtcctcagggcccctgcaataggtcaggacctgggttcactgctccatcaatcccacattgctcggccctcactagcaccacacagggtgggtggcagcctccccatttgatcaatggggaaaactcagcacacctacttggccccagaactgagagtcaaacctggggacccagcttcgctgccctcagaatgttactcttccctcctgggtagcgtggtatagatagtgtagtattcttgtccccatataacggaagaggaaactgaggcccccagaaggctaagggactagcataggccttgtgtcttagcctgttaaggctgctatatcaaaataccatagactgggtggcttttaaacagatatttgtttctcgtggttctggaggctgggaagtccaagatcaagcttggtatctggtgagggcctagtgctgccttctcgctgtgtctcacatggtggaagggacctgctagctctctgggtctctcccccaatgaggattgaacccccatgatctcatcacctcccaaaggccccacctcctaatatcatcactttaggggtaaggattccagcatatgaatttgagggagacatgagcattcagaccatgacaccttgtaatcagaaaggggttaaatatctttggttgaatatcctgtcctgccgattcagaatcactgctgtctataacctcttccctagatcactgttttagatgatgatgataaagatgatattaacggcaattaccaagctcttaaatgtgctgtgggtaaaacaattttaagctctttctgaatccagtctctttcaatcatcttcatgcccttgaaaggtctggatttttgtcgatttccctggtgaggaaacgggccctgggggcagaggtgatagggtggagccaagaagtaattcccagctgtttctctgcagaggcagtgctgctacaaacacatctccaggaaggggtacagccaaatgcttctctgtctcttgtgggttttgcagtggctgtcagctatgtgtctggcccggttgggaatgatgggggactgtgtgtgggaatgaatggctctgtctggctggctcagtctttacagaggtgctaggagtgtctgtttggtgctctgactaatcatgaaaagttcacgtttttatctttattttatttttatttttggtacccatggtgcattacagggaagggagacagcaaaggagaattatttgttataaaatagtaaatattggccaggcacagtggttcacacctgtaatctcagcactttgggaggcagaggcaggcagatcatctgaggtcaggagttcgagaccagcctggccaatgtagtgaaaccccatctctactaaaaatacaaaaaattagccaggcatggtggtgggcgactataatcccagctactcgggaggctgaggcaggagaatcgcttgaacctgggaggtagaggttgcagtgagccgagattgccccactgcactccagcctgggcaacaagagcaaaactccgtctcaaaaaaaaacaaaaacaaaaacaaaaaccgtaaatattaaattgaaaaagggacatacttaagggagtgaacctgaaaagccccagctgacacttggcaacaccttccttgtttgttttgggcttttttgagacagagtctcactctgttgcccaggctggagtgtagtggtgtgatctcggctcacctgagcctcagcctctccaggctcaggtgatcctcccacctcagcctccagagtagctgcatacaggcatgcaccagtacaactggctaatttttgtattttttgtagagatgaggttttgctatgttgttcaggctggccttgaactcctgagcccaagcaatccacctacctcggcctcccaaagtgctgggattataggcgtgacccacagtgcctggccagcaccttccttgttaaattgcatgtgtcagccacctccctcggtgtcctcccagcctctgggcagtctggctccccattcctttctttatccaacagcatttttttgtgagacaaggccttgccctgttgcccaggctggagtggagtggcacactcatagctcactccagcctccaactcctgggctcaagtgatcctcccctctcagcctcccaagtagctgggaccacaggcacagatcatcacgcctggctaattttttgattttttgtagagatgaggtctcattatgttgcccaggctggtctcgaactcctggcctcaagcaatcctcccgcctcggtctcccaaagtgctggaattacagatgtgatccaccacgcccggtcattctaacaatattgattattagatgttgccctagacacagcctactgtgcgtatgtgtaaatacgaattgaatcatcccacaagtagctgctaagtagaggaggtccagagagtggggaagtgtagccctggggaccttgggaggacaggggaggcttccttggaaggtgaagtgtaggcttggctagggaacttgatataggttctatgaggctgctggggctggagcagagagaagggggagaatgtaggaggtaggagtggaggcccaagagggagagcgttggttttcctgtctcctacaccccttcactggccagttctgctttcatgtttttatttattatatattttttgagacagagtttcactctttcacccaagctagagcgcagtggcacaataatagctccctgtaacctcgaactcctaggctcaagcaattttcctgcctcagccttccaaatagctggggctacaggcacacacctctgtccacagctaattaaaaaaaatttttttttcatagagataggggtctcgctttgagtctcaaactcctcgcctcaagcaatccttctgcctcagcctcccaaagcactgggattacaggcatgagctcctatgcccagcccagttctgcttttacaataccagggcttcctgtaggtttggaaaacacctgttgggttgcagcaaaggctctcaaagtatctcttcttactcagcatgtcatcctaaccaactctgccgggagagtagagtggggagatgaaggctggagaaagagaagggccctcacttacagaatggcttaggtcatgggctctggagctgggttcacctcccagctctgccccggctattactttgtgcctcagtttcctcacttgtcccgtgaggatgatgactgtgcttactccagttgttacaagggtgattcggtcagtgtgtagggacacggtgcatggacaggacaagttcaacaggcattagcagtcagctgccgaggacccaccgtcaagggccatgcagtggccaccttcacagtcacaccacagaagatccagaacctctggcatctgcctccgtgcggggcattaggtagagagccacttttctgcaggcaatggaggctgagacctttcttctttactagcccaggggtattgatggccctgcagagacgggttttgattacctctcactggatcccccagcagcctgttaccagaaagaagggcagacgcagggagcctgggtctgtgctcagtccccgctgggttttctccttttatggtcagcctacagtgctctggcttcccagacagaatccaccagcttgtgtttgggcttgggccgaaatagctggtctgtggggagctgggtacctcctgggagtcctcaggcccacagcgggggaggaaccgctgaagccctttatcttctcaggaaacgtgcctggggccttacacatccgaggctgggtggggagtctggggaggaggaagggagagaggcatgtttaaggatggggtgtgaggtgacatgagccccagggatctgggctgggaagctcagccccaggcgggtcctgatgatggccggccgcccccagctccagccttcccagactccacggaggctcggtactgtgtccccgcccactttggagcttctgtcccaggccctctgcttgggatgctctgcctcgacctctccccaggagattctttcacatttttcttaatgctgttcagtggtcacctctgccgtgaaggcttcctgtcttgctcaggtcagtgtgaaaaaacaaacaaacaaaaaacctgacgtctatagcacttgggttcacatccatcgtagcactgctcatctcttacggtcatttctttgcccatctgactcccaccctgggtcatgaacttctcaaaagcaaggataagcaagtcatgaagctcggtgcattggcttgagcctgtgatttcagttacttgggaggccaaggcgggaggatcacttgaggccaggagtttgggaccagcctgggtaatattactaagttaccttactaggccctgtctctacaaaaaaaatgaaaacaaaaaacaaaaaaaccattagccaggcgtagtggcatgcacctgtagtcccagctgctcaggaggctgagatggaaggatctgttagcccaggagttccagactgcagttagctatgatcgtgctactgcacttcagcctgggcatcagagtgacacctcatctcttaaaaaagaaaagaaaaaaaaaagcagatcttattgacttttgtgctttcggtacctggctcaggactcgtttgttgaatgaatatgtgaacacgtgaatatgcattttccattgcttctaccttggttgcctctctgagccagagagcaattcaaaataacaagcatttcctgagcacctactgtgtgtcaggcattgttccttgtaccttcaggagctcattggttcaggggaaaagcattgaaaatgaacaattttgtaattgttggaaacctaatagagctgcatgaagtggaagaagtcagatttataatcattcagaggtggtataaaatgaacatcatttttaaaaaaggtttatgcggtataatttaaataaattcattttaaggatacagttcacacctaaaattgcagctatgtctgcataactgtctaaattcactcataatttacatggttatgcagccattgctgcaatataattttatatttctatcatcccccaaagaaatcttgtgcacatttttttgtcactccatattcctacccgcagctcctggcagccacgaattcacaaatctactttctgtctctatggatttgcctattctggacatttcatataaatggaatcatatgtgaccttttgtggctggcttcttttttttttttttttttttttttttttttttttttgagacagagtgtctcactgcactcgcccgggctggagtgcagtgatgtggtctcggctcaccacaaactctgcctcctgggttcaagtgattctcctgcctcagcctcccgagtagctgggactataggcacgtgccaccacacctggctaatttttgtatttttagtagagacggggtttcactgtattggccaggctggtcttgaactcctgacctcgtgatctgcccacctcagcctcccaaagtgctgggattacaggtgtgagccaccgtgcccagccggctagcttctttcacttagtataatgttgtcaaggttcatccacgttgtatcatggattcatactatttatatattttttaagacagggtctgtctctgtcaccccagctggagtaccgtggtgcagtcgtggcttactacaacctccacctcctgggctcaagccattgtcccacctcagcctcttgagtagctgagaccacagggattgtgccactatgcccagctaatgtttgcatttttttttgtagagatagggtttcaccatgttgcccaggctggtttcggactcccgggctcaagcaatccacctgcctcagcttcccaaagtgctggaatttcaggcatgagccatggccgccggccataacatcctttcttttcatggctgaatactatcccactgtctgggtagaccacattttgtttatccatctacccattgatgaacatttggttgtttctattttttggatattatgaataaagtccataatttttaccaatatggaaaagaaaaacaagaaaaactctgaatgccatatcatggatagatggcctattatcattccatatcatctgtacctttttccgccagaatgttttgagacatttattaagtaaggatcacaatgatgataattactaaaatggagagaacctgtggaccatgggaaccactaggccatgtgacactcatgtttatattagagaaaggcaccgttttctcaaagcacttttcctccatctgctgaaagattattacaataaatacacaatgcaatacaataaatgaccaatgcaaatagtttctccatagagttatgcagtgtacaacatgcaccacggtccatggccatcctgcaggtaggaggtcaagtggaaaggtctccaactcagctctagaaaagtgcagagttagagaaggtatcatagaagagttgactcccaagacgatgtttcagatacagattagggtatgtacccgaagaattgaaaaggtactcaaactaaaacttgtacaggaatgttcatagcagcactatgcagaatagccaaaaggtggaaataacccaaatgtccgtcaactgttgaatggataaacaaaatatgatccatccgtacaatgtgatatgactcagccacaaataggcataaagtctgggacctgctacaacatggatgaacttcagccacatgctgagtgaaagaagtcagacatgaaaggccgcacatgttataattccatttatgcaaaaatatctagaataggtaagaccatagagacagaaagcaaattggcggttgcaagggcttatgggggagtggctgcttaacgggtagagggtttcatttgggggtgacagaatattttagaactagataaaggtggtagttacgtaacattgtgaatgtactaaatgctcctgaattatgcactttagttatttttttatctttattactattttttgagatggagtctccctctgtcacccaggctggagtgcagtggcgcgatctcagctcactgcaaactccacctccctggttcacgcgattctcctgcctcagcctcctgagtagctgggattacaggtgtgcaccaccgcgcccagctaatttttgtatttttggtagagacggggttttgccgtgttggtctcaaactcccgactttaggagatccagctgtgtcggcctcccaaagtgctgggattacaggcataagccaccgcacctggcttgaattattcactttaaaatggttctttttatgtagtgtaaattttacctcaatggaaggaaaaaagagagagagagagagaatggattaggccagagaagaagtggtggtgggtgcactgggcagaagaaatcacttgtgcaaagcaaggagggagtgaaactgctttgtacggtggagaacactgcttttgagtccaacacaagctcaggcttggggaaggaatcagataaaaatttccaggatctcagagttccctgtgctccacacgggttggcagacagcacccacatggagtccttctgctcgtaaccagcaccctgcaagcttcccacgcctggaagtggtgtgtttttgatgggaacgtcaggccagaggtctcccagcagcccccagctcggagccgcgctggcagctcccaggccttctcctggagcccgctccctctcctgggggccctgtgagcatctgagcctataaatctctcctgctctgggcctaggattcacaaggctgccaggaaagcctgcctctctccctgaagtagtggatcaacacagcccatctgtctgtccatctcaaaatctttccttaagatagtggaggttgtctgggccggtcccaggaggttctctctgtctgggttctaatcacagggtacctggttcttctatccttcaccctcttttaaaaaatcactttttagtactttgggaggctgaggcgggcggatcacctgaggtcaggagttcgagaccagcctggccaacatggtgaaaccccgtctctacaaaaaatagaaaaattagccaggcgtggtggcacgcacctgtagtcccagctactcggggggccgaggtggaagaattgcttgaaaccaggaggcagaggttgcagtgagccaagatcgagccactgcactccagcctgggtgacagagcgagactccatttcagaaaaaaaaaaaaaattaaactggtttcccattttgctctgtcctcgagtgaatttctccccctgggtggaagctaaaggcacgggtatctgtctgtctccagagtataatggagagattaaagtttgattgcttttttcctgctttttttttctttgagatggggtcttgctctgttgcccaggctggagtgcagtggcaaaatctcaactcactgcaacctccacctcctgggttcaagtgattctcctgccttagcctcccgagtagctgggactacaggtgcctgccgccatgcctggctaattttttgtatttttagtagagatgggtttcaccatgttgcccaggctggtctcgaactcctgacctcaggtgatccacccacgtgctgggattacaggtgtgagccaccacgcccggcctcctttctcttataaatagggacaccattgatttaggtctcactccaagccaggatgacctcatctcaacatccttcccttaattacatctgcaagacccttattctaaataaaatcacaggtgggatacagtggctcacgcctgtaatcccagcactttgggaggctgaggcaggtgggtcacttgagcccaagagtgtgaaaccagcctgggcaacatagcaagacccaatctctacaaaaaatacaaaaattagccgggcatgctggcatgtgcctatagtcccagctacaggggaggccgaagagggaggattgcttgagcctgggaggttgaggttgcagtgagctgagatcacgccactgtacacccacctgggcgacaaagtgagaccccatctcaatcaattggttagtcaataacatcgcagtctgaggttctgagtgaacatagcttttgggagtcacagttcaacccaccctagtgaccttgggcaagttgcctcacttctgaacctcactctccttatttgtaaaatggaggcaatgccagtgcccaccccaggagctgctgagagaattcagtgggtcacttcaacacagaagttcagcatacgcctgcagtgcagtgagtgctcgggagatcggagctgttagtgggatcctaatgcggtggctctttcttttctgtctttttttagctttgtggtcatgatggtttcataaagaacaataccgactctttttctattgaccatttttggtgggatgaggaaaagattgtatgtgttcatagcacaaacataaccaggatagaagtagaatgggtgaaagtaggtcttcctcctgtcccttttctcaatacttcaggctcaggcctgtttgttggttttttttgtttgttttgttttgtttttggagtctcgctctgttgcccaggctggagtgtagtggcatgatctcacctcactgcaacctccacctcctgggttgaagtgattctcctgcctcagcctccggagtaccttggattacaggtgcatgctaccatgcccagctaatttttgtatttttagtagagacagcgtttcaccatgttggccaggctggtcttgaactcctgacctcaagtgatctgcccgcctcagccttccgaagtgctgggattacaagtgtgagccaccgcacccatcccaggtctgtttttagagatagggtctcactccattgcccaggctggagtgcagtggtgtaatcacagctcactgcaaccttgaactccttggctcaagggatcctactgtctcagcctcccaagtagctgggacaaggggtatgtctatcacacatagctaattaaaaaaaaatttttttttgtagagactgggtcttgctatgttgtccaggctggtctggaactcctggcctcaagtgatcctcccatctcagcctcccaaagtgttgagattacaggcatgaaccactgcatcctacctatatatctgtctttttaaaacacaaaaggtataacactatgctacctcatcttttatttttagcttaatatattttggatatttttctgtgtccatccacaaagctctgcctggttcttttcaatggctgcctattttatttatgtatttatatcttatttgtttttgaaacagagtcttgctctgttgcccagcctggcatgcagtggcacgatctcggctcactgcaacgtccgcctcctgagttcaagcaattttcctgcctcagccttctgagtagctgggattacaagcgtgtgccatgacacccaactaatttttgtatttttagtggagatggggtttcaccatgttagccaggctggtctggaactcctgaactcaagtgatccaccctccttggcctcccaaagtggtgagattacaggcatgagccactgcgcccggcctgcctatttttaaatgtgccattatataaacacaccagaattgaaaccccagagctgactagtctttaggccttttgtcttgaggatttcgttcaaccaggccacccaaacatccatctataatccgagggaagagagagagaactgattggagttgggcatagaatctgaggaacgtgcccacatccaatcagttctctcttaagattacagatggaagaaagagtcatctctttcaccttgccttcttcagtcccatccatcctcccattcatattcccatccatccatccatccatccatccatccatccatccatccatccaactcatttaccggcctatacactctgtcctccctcccattcacccacccatccactctctcatccactcactcatccttccctcctccgtccaaccatccgtccaaccagctatatacccacccatctacccatctacacacccttccctcctttcttctttctttcttcctatctatccatccatccttccttctttccatccatctattcgtccacctacccacccacccactcatccatttgtcttcctgtctctctacctgtccatctatccatccttccatccagccatctgtctgcctattcacccagcctcccatccatttatcctcccgtccatttacctatccatccattcttccatccacccatcctttcttccttccttctttcctttcttccttccttccactcacttgcccatccacctcttcttccatcctcccatccatctactcatctatccatccattttcccacccatctgcccatccacccacccacctactcacctactcatctgcttatccaccctcccgtccatctgtctattcatccacccacccacccatccatctacctacccatctacccacccttccattcacccatctacccttccttcctttcttccttccttccgtccactcatcttcccatccatctactcatccatccctcaatccatccatctaacaagcataattcagcacctaccatctatgtgccagtactagagatacaatgtaaaaccaagcctaggagatttttgatgaaatgaagcttgtgagagctgagcactgaactagtaggactgaagccagggagtggatttaagaaatgcttgccactgtggcattgtctaccagcagatatgatgctgggatttctacattgttaggtgaccattgaacgtattggtaactgttctcagatctctctttgggaaggaaatgggtcttcagagcctggctccacctcagaggcctctttaagagtagaaggtgatggataatgtctgcttaatcacatctagttctttgatgacctctgtatcttttgggtttctctggtggtaaacaagagagactgactctgtcatctagtagaggaaagggatttgtaggggagtatggaggagctcacagttgcagtgggaacactaggaatcaggctaggtaaatgacagaaactgggctgcttgggcccaggggcagaaaggaagtctgcctcagggctctgtccacctgctgtgcttccctgtccttgactgagcttggagttttaggccagagagtctgaccaatgcagcctggaacacattcttacctctttgttgaaggtacttatgaggcagtcccactaagactgtacatgacggtaggggtgatgggggaaacctcaaggaccacaggatgcttctggaagaagaggaaatggatgctggatttacaaaaaaacacaaatgtgcacaatactatattacagatgaaggaactgaggcatggagtttaagaatatttgcccaaggccacagagcggagaagtggctaagggggaccccaatctgtatagatccaacatctgcgtttggtccctaacctaatctgggtggggtgggcctcccgggacacctccagagctgatgtggctggatgctaatgactcctggatcagtcaggctccagcatctttctggggctgcctctgggactttggggctgcccttttggctttggtcgtggcccctgtagcctgggcaatgagcccagctgacctgttgtcacttccaatgaggccagcatggagaagctttagaatgggagggccctgggaggagccaagtccagacccttagctcagagctcattttaattcatggctcttttttcttctttctgtttgcagatcgggaggaccagtccattctatgcacgtaagtggaactgctttttcttctgttttttttttgtttttttttttttttaatctgtagtcgagatccaacctatgaaagaaaagatccatgagtgcagagatctttgatttgttcatggttccaagtgcctctctttatacctggcaccatgtagatgctcactaaacatttgtgatatatggtcttctgcggaggcaggcaaacttaaactcttaatgacacctgctatcatttggttccatacctctcctccttctaaaaaactagcatttattgaacatgtactctgtgccaggacttgaactaaagattttatatgcagaatcttatctaattgcataacagccatctgtgttgatagggaagatgttaaactgtcactttagtatttcacatttatcaagccacaaacacatcagtgccatatttggtgattggtatcactgtttctttgaagacctaggtacataggcagaagatagtaactcaattttagaatcattgagagagttttcactattgtatttatatgcaagtaacatatattaatatatattgttgattcattgacattgaactcacagccagcagctctgtggctgatgcctggatgaagtttatctgatgtgtatttattacataatgggtatcacaactttattgtgcttggaaacatgagccaacacttgagcactatgctggggacatttttgtatgtgtgctgccgaagggagcacatctgaggggacattttaaactgcaaaataactaacaaaaagccacaaaaatacaaaaaaaggtggcactaaatacactacagaaaggacacttgtttacagtatgagagttgaaactagaaggtagagcattcccctgttcaacctgagctgggaacgtgtgcattgggggaatcgaattttccttactctgcacatgttcacaaatgactacaaaagtgccatgaatattgattttggggttacaaataactttcagcaggtcggtgaatttgaaaatatagaatatataaataatgaggatagactgtgcatatatatatttacataatatataatatgtattatatttaatatatttatatttatatatatatatatttgaaggtctggaagcaactaaagctataatcaacagaggttatttaaataaaatatagcatttccaggtagccactacaaagagtgaggctgatctatttatgctgagagagaacgctctttatagataataccgttgagtggaaaacacaggggcaaaccagcatatgcataatgtaaccgtgtgtgtctttaaaaagagcaggattgcatggacgtgcatatgtttcctatttgcatgaaattatctggaaggacaattaaaaactagtaattagaatttcagatggtgatggatggtaggatggcaatgaactgtattgagagaagattgaaacaattaataagtttggggttgatatagatagaaaacctggaaacaataaaacaaaggcaattataaactccaggaaaaaacaaaagttgggatggaaggagaagtaatcacattggactaaggagcccagctgtgcaagtttggagtatttatctaaccagaataactccctgtgatggacttggctctgtggggaaagggaagaggattagatgggaactgaattctcatattccatggtaggatgtacacatttgatgtttgacaatgaatagtctggatctagagatataatgctacctagctatgaggatataaatgctaaaacaacctgccgacttggtttcctagttttctggcttctaggggtcacctgcattccttggctcatggtctcttcctccatctttaaatcctgcagcatggtatcttcaaatctctttctctggtccccctacctctctcttataaggcccagtacctttgtggttatattagccccacctagatgatccaagacagtctcctcatctcaagcaaacatattcacagattctgaggataggccatggacattcttgtgggggctgtttttcagctagccacagaggcatttgatcccctaggagccaaacccatgtgtgagccacatgtcatctccccaggaaccaaaatagtgtagctcaactgccctctgttgagtgaatgaattaagtgtggtaacagagaggtgcaggaaagagtaggactttcagatggcttcctagctatgtagctatgcacgggtcacttgacctctctgagctgagcttatggagaggctgtgaagatgaagaagaggccaccctgctctcatttccagcacccatgccatcagcaggtgctgtttcatctaaaacggtgctatccaaaagaactttgtgatgagcacaaagttcacttaaaagttcacttaattgagctcttaaaaagtggcaagtatattgcagaactgaatttttaagattttagttaatttagatagcggttcctgccttggacggtatgatgctgaaatatttctcatctctgtccattcctctgactccaccgcctcttcctagttcagggtcccgtcacctctcaccagggcctctgtagcagtctcttaagctccctgctcccattgcttgcttgcttccttcctttaataaatatacattataagaatattcactcattattcattgaataaatattcattagcatgctgtcataaagtgtggattccagaacctaaccccttgggtttgaattctggccccatcatcgtctagttagttgtatgctccaggaaataagtcagttcacttctctgagcctcagtttccccatctgtaaaatgggaacaataagcaccccattgggttgttggaaggatgaaatgagtcactacatgtgaagaactgagaaacaggccactgccccatggtgagcactttgtaaggatcagctgctattgtagtgaaagtgctcactattttttaaaaatccttcctgcaatccagtatccatcttgcagtttgtttgtttgtttgtttgtttgtttttgagatggagttttgctctcattgcccaggctagagtgcaatggcgtgatcttggctcacagcaacctccacctcccaggttcaagtgattctcctgcctcagcctcccgagtagctgggataacaggcatgtaccaccatgcctggctaattttgtatttttagtagagacagggttttgtcatgttggtcaggctggtctcgaactcctgacctcaggtgacccggggagcctcggcctcccaagtgctgggattacaggcatgagccgctgagcctggcccatcctgcagtttgttgttgttgttgatttttttgttgagacagagtctcactctgttgcccaggctggagtgcagtggtgcgatcttggctcactgcaacccccgcctcctgggttcaagcaattctcctgcctcagcttcccgagtattatgccatcatgcccagctaatttttgtattgttaatagagatgggttttctccatgttggccagcctggtctcaaactcctgatctcaggtgatccacccacctcagtcagcctcccaaagtgctgggattacaggcatgagccacttcgcccagcccatcctgcagttctgattctccccacactggttctaaagtcccgttcccctcgtgaaatggtttcctgcacccatgagaataaaactcagattccttactgtgacttggaagactgagtgtgatctgctcttccctcttcacttcctgctgtcctcctctgttgtggccctccagccatgctgggagccattctgtctcatacctgggcccagcatttccctcccttggacctctgtccatactgtttgccctgcctggcccacccttccctccatccttcccacagggctctcttgtaactttcaaggctcagcaactccctggcttccccatccacagcctcccctctcctcccttcccctcgatcttctcagtcacatcacccagatgtagcaatgatatctccaccacgaactatcttgattatttgtttacttggctattgtgtatctccatctcctggaatgcagcgttagcaaggacttggcacactgcccacacacagccagtgctggagaaggaggccttagccattgttaggaaggaaatcccaaaacgatcagacttttatttgcaaatgcatccagtcagcccagaaccaccaacatcttcagtctctgtattcaattttattttgcttgttgtgaaattcagccaaagtgacttgaaggacctacaagttgacagcagggctgagcttttacgcgtagttggtgcttaagagaagccaggctggagccaactgtttggttatgcagttaagaaactgaaaattggccgcgcactgtggctcaggcctgtaatcccagcactttgggaggccgaggcgggcggatcacgaggtcaggagttcgagaccatcctggctaacacggtgaaaccccatctctactaaaaaaatacaaaaaaattagctgggcatggtggcgggtgcctgtagtcccagctattcaggaggctgaggcaggagaatggtgtgaacctggggggcggggcttgcagttagcagagatcgcaccactgcactccagcctgggtgacagagcgagactctgtctcaaaaaaaaaaaaaaaagaaaagaaaagaaactgaaaattggccacgcaccgtggctcacgcctgtaatcccagcactttgggaggccgaggcgggtggatcacgaggtcaggagttcgagaccatcctggctaacacggtgaaaccccatctctactaaaaaaaatacaaaaaaattagccgggcatggtggcgggtgcctgtagtcccagctattcaggaggctgaggcaggagaatggcgtgaacctggggggcggagcttgcagtgagctgagatcacgccagtgcactccagcctgggtgacagagcgagactctgtctcaaaaaaaaaaaaaaaaaaaaaagaaaagaaaagaaactgaaaattggctgggtgtggtggcttatgcctggaaactcagggccttgagaggccgaggcgggagggtggctggaagccagaagtttgagaccaaactgaggaacacagtaagaccccattactacaaaaaatttaaaaattagctaggtgggatggtgcatgcctgtagtcccagctactcaggaggttggggagggaggatcacttgagcttgggagttagaggctaagtgagctatgatggcaccactgcacctcagcctgggcaacagagcaagacccagagacaggaaggaaggaaaggaagggaaggaagacaagaaaggaaggaaactgaaagctgaataaatgtaatttttaggcctgagttgtattttgtctagcatgtaatccatccagtataatcagtttaattagaggccatgggcctggctggagatagagctgtgtgatcagggggctaaagtaagaggaggagggtggtttcacataaaattagagagaggtaagggggtgcttccaggccctggggaggagtttaaactttcgtctaaaatggatgacaggctgggcatggtggctcatgcctgtaatcctagcacttcgggaggccaaggcaggctgatcgcttgagctcaggagttcaagaccagcctggccaacatggccaaaccccctctctacaaaaacaaaaattagctgagcgtgatggcatgtgcctgtagtcccagctacttaggaggatgaggcaggaggatctcggttcactgagcctgggaggcagaaagttggcactgagccaagactgcaccactgcacttcagcctgggtgacacagtgagaccccatctcaaaaaatatatataacaataaaataaataaatgaaatggatgagaacgtgctaagggactcaagccaaggaaggacaaagtttaaccagtgggtcaaatcaggcccttgtctgtctgttccagataaagttttattgaaacacagccgcacccacttgtttacgtatttgcttttgtgctgcagtggagagctgagcagatgtgacaaagaatgcgtgaccctcaaagtctaaaatatttactgtctgaccttttacaaaaagagtttgctaactcctagcttaaacagtgggaaaatgtgaatattatttatattgtaatgataggatgaatgctgaaaatcattatacaaacaatatataacttctgtggaagcagtggttataaaagtaataataggtgggcacagtggctcacacctgtaatcccaacactttagggggccgaggcaggaggattgcctgaggcctggagttcaagactatcctgggcaacttagcgagaccccacaaaatcaaaaaattagctaggtgtagtggcacatgcctgtcatcccagctactcaggaggctgaggtgggagggtcacttgaacccaggagttcgagattgcagtgagtcaagattgtgccactgcactccggcctgagcaagaagcaaaactctgtctcaaaaaacaaaagtaataataactaacattttggcataccaggcattgttctaagcattttatataaatgttcactcatttaatcctcataagaatcatataaaaggtcaggcatggtggctcatgcctgtagtcccagcactttgggaggctgaggctagagatcacttgagaccaggagttcgagaccagcttgagcaacatagcgagacccctgtctctacagaaaatttaaaaatcagccagctgtggtggtgtgcacctgtagtcccagctacctgggagattggggcaggagtatcacttgagcctaggaattctcagctgcagtgagctatgattgcatcactgcactccagcctgggccacagagtgagatcttgtctcaaaaaaaaaaaaaaaaaaatcatacaaggtaagtgtttttattatacccattttataatggggtaaagaaactgaggtatggagaggctaaatgacttgcctaaggtcacccaggtaactggcagaggagggatttgaacttgagcaacctggtcctggagcccattatgctattctgccaattgatgctataggggagagaggcgttgcttctgcctggggttttgcaggacgtgtaggagttgtacagtacaaaatgccagggtgctttgccagtcacataaagaccagggactgaatagctgtgaggttcatcagagacaatttggctttcctaccagtggcaaaccacaggctgcaatggacttggcaatattcgaccctgggagccaggaccagctgcagaatttgtagaattttgcaaaatgaaaatgctggctgagtgcagtgactcacacctggaatcccagcactttgggaggctgaggcgggcagatcacatgaggtcaggagttcgaggccagcctcgccaacatggtgaaatcccatctctactaaaaatataaaaattacccaggcatagtggcgggcacctgtagttccagctacttgggaggttgaggcaggagaatcacttgaacctgggaggtagaggttgcagtgagccgccatcacacactgcactccagcctgggcaatagagcaagagtcagtctcaaaaaaaaaaaaaaaaaaagaaaagaaaaaaaatgcagagcgtttataaagaattaggaagaatttccagatggcaacattagagtatgaagcacagggtggtccctgtgagacggtacaggtcacactcatgaagccagcctggctgggggattaagtggccattgggtggttcttcccagctgctggggctggactgattaaaaggacttggcactggggtagttacaaggccaggaggccataacgtggtcatgagtctggtccttctccgggaagagggagctcagtaccaaattccccaagaaataagaaaggagtttagggtgctcagaccaggaaggcatcttcacccctagaggtcaggggtcagaaaagccaagctatgaatgtttctagaaccagctctaagcacatcaaccttcagacgcccacgagcctggagcttgggatgttttctttggcagaacctcccagggcaatttatttttctcaacagaacttggaaacagtggagcccagcagcaacatgggaaggggtagatgcccagagtttatgtcccactccccatcccaggcaaagtgggagaccatagccacggatagggcacattgatgtctttgtttttttttttgtctgtctgtttgtttgtttgtttgtttgttttttgagatggagtctcattctattgcccaggctggagtgcagtggcacgagctcagctcactgtaatctccgcctcctgggttcaagggattctcctgcctcagctccccaagtagctgggactacaggcacccaccaccatgcccagctactttttgtatttttagtagagacagggtttcaccatgttggccaggctggtcttgaactcctgacctcaagtgatccacccgcctcagcctcccaaagtaccgggatgacaggcgtgagccaccacacccggtgatgtctttgttgtaaaagggaggaggtgagagaggttcaaggccagggtggaaaggaaggaactattgtgggaaaggagaagtgagcagcagcagtctaggagcactggtttgtcagcatgaagagtgtgatccacacatgttgtttgtgcacactgctgtcctgattcttgtcttggatctgaataggttcatgaccacctacgcaagtggtttcctacatccaaaaatttctctcctttctcttgctttaatcagaatccaaccccttcactttagaatgaagtcaagcaaggttctgacgttagcctgattgaagtaattcatacttaggtgtgaatgactgagtggcttggttcattgattggggcaagtaaagcctcctggaatatatggcagaattccagtggagtggggctgggacttcactctgtcttttctctttgctgatttgttaaaataaaagggtaggaggcagaacatgggccctggtgtcaagtggacctacgttcaaatcctgcttctcctccatttcctatctgtgtgaaagcaggagcaattgtgggctggagcaatttacttcaaacctctctttgcctcagtttccccggatgggtgatggggataattaataactctctcattagattgctgggtagagtaaatgaaaagatctgtgagcccaaagcctagtactgtgcaggccttcaacaaatatcaattccccttcccctgcccttcttctggccttagaaagcaagtccctagagggttgggcctgtgtcatggaacaacttggtgaaatgtagtaaaaggaattctgactgcattagaatcagagacctgactttccattctgactgtatcccttctttgctgtgtgacctagggaaaattgcttacccactctgggcaagactcttccttctataataacatggaagcaggaagaggataaaggaaataattcatgtagagcatttagcaaagggacccttccccctatatccccccaatgacaaacgccaattcttctctgtcttaagagatgggatcttgctatgttgcccaggcttctctcaaactcctggcctcaaggcatcctcccaactcagcctcctgagtagctgctattataaacgtggccagttctctgctgcacctggccagttctcctcttttacacacacacacacacacacacacacacacacacacacacacatatattctggtcttagtttccccttctggggaaatggggtaatgccttcatggtccccatttcataaactgcctctgaggccatgtgaaataatgtggccattgggaaggaaggcctctaggaagggaagggaccacacaaagtcaccgcaagatgtttcatcattcttggccatcagacacttgatttctggacagtgggacctgtaggattaggcacagcaatttggggcactttttttttctttctctttcttttttcttttcttctatttcttttttaagccatgagccaagttattaatgggcctttggcagagaaaattaatttctttatttcctaattaggaagaagagcagagactgtactagctttggtggcactggttcagcacagagaaccttgggctgacctcggggtgaacaaattcttttttcaacttaaaaaaaaaactctcttatattttagagtattaagtgagctcagaaaataaaagagataaggcaaagaaaggaaacacaaaaaacaaaagtaaactgaaaaatagaagaagacgataaacaagtgaagttttggtcaaggcactgtccttatctttcactaggagtggtggaacatagaggcagtatctggatggagcggttccattgtgatgatttctggtggccaaaacaggcagctagtgcacgaaagccatcttggtaaaaaaaaaaaaaaaaaagatctaccttcatattccaggaggacatacttttttgatacgacaaaccatgtcgtgctgatctaaacatatcagtcatttacactttagtgtgaattacttcaactgggtttattcttagatacttggctgagatcatcagccagcttcctgatacatggggtgggattcctcagaggataaaggggcttgcatctgcccagtgaccaatgggataaccggttttttggtaaatttttctttccataagggagcttcttaaactttaggtcctggtactccagaggcacttacatcctttcttgaaggctgccttgtgcctggtctttccatttctagcaatgctaatgatgtctgcaggcggatcacgaggtcaggagatcgagaccatcctggctaacatggtgaaaccccgtctctactaaaaatacaaaaaattagccgagtgtgctggtgggtgcctgtagtcccagctacttgggaggctgaggcaggagaaccagggaggtggagcttgcagtgagctgaaattgtgccactgtactccagcctggggacagagtgagactccatctcaaaaaaaaaaaaaaaaaaaagtagataattccaaataaacctgtttggacctatgtaagaaaactaaggttttcttgttcactctatttttttagagatgaggtcttgctctgtcacccaggctggagtgcagtggtgtgatcatggctcactgtggcctcaaactcctgggctcaagccatcctcccacctcagcctcctgagtagctgggactacaggcatgcaccaccaagcctggttaatttttcttattttttatagagtcagggttgtgctgtgttgctcaggctggtcttgaactcctggactcgagtgatcctcctgcctcaacttcccaaatagctgggactacaggcatgtgccaccatgcctggctaatttttaaatctttttctagaggcagtgtctctctgtgttgctgagctggtctcacactcctgggctcaaatgatcctcccacctcagcctccccaagtgctgggatcacaggcatgagccaccacatccggcccaccttttcactctttgtatctgaattcttttctatgtcctcttggaaggaatagattgggcattggacctaggctggggacccagttccgctcactaccagagatgtggccttgggcaagttacttcccctctgggagcctctgtttcaccctctgggaaatggtggtgatgatcattattgtcctgcctggctcatggaactgcggaaaggtcaccatggaacgtgtgcatagatgatgttcccgtgtctttcagaggcgagtctggagccgggaaaaccgaaaacaccaagaaggtcattcagtacctggccgtggtggcctcctcccacaagggcaagaaagacacaagtatcacggtgagtggcagttcccaatcagaggccatgatttagccaaccggtctccagcttgcagcccaaccgagatacaaacagaacatcattgcaagaactcaggccccatctgactacccctcccctgaagactcaaagagggaccgtctttttggcgagcaggcctgttgagtgtgggtgatttcttggctcagctagaagcatccctccagaagggggcccgttttgtgaaatgagaataagccctttccttccatagcgagatcttcctccacgtcggggcttctcagtggtggcactgatgtcattttggaccagataactcttccttggaggggcttccctgtggctcgtagaatgtttcacaacatccctggcctcgacccgccagatgccgacagcccccttccctccagttgtgacaaccaaaaatatctctagacattgtcagatgttccctggggtgggacagttgcccttgattgagaagcactcctttcatgaatctctgtaacgtcccaggggttaaggtaccttttgggttcccggattcctccacgtgtccccctgtccctgggatggagatgctggtatcactcggcccgtgggcttcagtgcaatgccattcagtaactgtggattgagcacctactgtatgccaggaaccacttggggtggggacctggggataagtctgagagatgctgttattctcttctctgagcttccagacctgtggaagagcatgtagttgtcaaagaatccctcaaataaacagatgatgacacggtatgactaagagcttgggaggaaaagaagagcaggtttctagagtcatcacctctagggcccatccttctcttcctcctcgtgtgtcagccctgccccatctatcccacaggagggggcacgtggtagggccgctaggactggccggtgcctccgtctgcaggtttgtgggtgggaagatggtaggatggagatctgaccacggcatggggtgtctccagtgttcgccattccagatgtcactttgcgtcctcagaggggactctggggcagccaccatggccggcttgtctggaggcccttggagatctaggatgggcgctggtcgtggctttggagaactttccttctccaaacaaatgcaggaaactcaagattcagcatcctagaattgtctctggcaagttggtttccagccatagtgagtgggaacaatggccccagaggctgtgtggcagtttaaacacagtttccactgccttccctttccctaaagagtaaacacaggagataatactttctaacaactcatcgttatcaagggcctactatgtgctgcttgttttggctgcatgcgtaaacacatctcagacattgtctcactggatactgttttaaggagcctaatgtggccccagtaattatgaaaacctttgaaatgtctggatctctaagaaattagaaaaaggagggaatggctgagcatgggggctcatgcctgtaatctgtgttttgggaggccaaggtgggaggatggtctgagcccaggagttcaggaccagcctgggtgacatagtgagaccctgtctgtaccaaaaaaaaaaaaaaaaaaaaatcaagagaattagctgggcctggtgtgcatgcctgtagtcttagctacttgggaggctgaggcaggaggattgcctgagcccagtaggttgagactgcagtgagctgtgatcgtattcctgcagctaaacagagagaaaagaaacagtatcaaggaaaaggagctgaccagtctgtctgggagactccaggctgtttggggggatcaaagtcatatattctccagcccctgatgtccatgtgatggaaataacgctgacatttgttttatactgtgttgttcaaccacagcaaggcccatcttttgcctacgtgagtaactgagagtgttttcctggtgtgtaggggaggcacggagtgaacttagatctgcatgatcctcttgcacccaccgagtcccgtagctggtggtagaaatggggtaggccctagagtttcacaacttaaatcagtaaatgcaccaaaataccatcctgtgggtgtctgatgccagggaagggtgtgggggtgcatttaccacccacgggacgcctattggagtccccagggttgcgctccagcctgaaatggatttctccggttcagaatgaacccctgcacccttcaaagcatccgctcctggtacccttgactggaacaacctagacagagatgtctgtcccatctggctgagtgttttaggactgtcaggccccaaagcttccctggctcgatggacagtcgatggcacagctgtggcatgcctccctcttctctccctgccatcatccctaagtgtcttccctcagccctgtccctggtgcaccagtgtgtccctgtgcatgcgtgtgcagtgcgtgtctgtctcttgcatgctggttgcttgactcaagcctccagaaacagtcttggaggtcgcgatgcactagctttggtggcgcggtaaggccccagctacgcaacgcataacctggtcctgcttggacctgtgcatatgtaaactcatctctaacacagagcttggggggctgatgtgtgggtcccagcctagaagaaacccacaggtgtcttccttggctcccgaaaagatcattcaatccatcttagttagaccctgggtgactgtgttgcagatcagaaggagaattacagttcttatttgggatctgcttttgtgtgaccttggccgagtcagttaactcctcggggctatggtttcatcatctataaaattgagggtttgaaccaggtcccccgatttaaagctctcttgccaagacttttcaaccttacctgccagaatccccattctagaaagggagcctttttcagagagcatggagaccccaagtttatgtgaacaaaagtgattcctttagtcgtcttcccaccaacaaagaaatgcccgtggtgctccttgtaaatttccaccagtctcagctgtggtgattccacttgtagctgagatttgtatgcggatgaggcttttgcttcatctttctctgggagctacaaaaaggaggatgtgtggacaaatcaaaacagaaacaaatagcagcttcctgctttgtcctgtagaccaggtaccctgatgccttcctagcatgcggaggaatgaggaggaagccatgcccatccttgtcccctctagacactttcccggctcctgtccagcccagccctgatgcctggaaaaataaggaagggaaagcaggaggggaggacaaggagaaaaactcccagaatccagggcctggaggcctcggggcccaactgcagccgccatgttttagggctaggccaagagcagctcgtttgctttcccagcttaacttaccacattggccctttcctgccatgattaatcacgtgaccgcgtttgtgcaaaggcatcccggcagagggggccggtgggctgtgtacagtctcagcttcctttaacccaatgaatggagctcaggcaacctgctttgaagctttattccgcagtccgctaagaggattcctggtgggttttgtgcattccttacttgtctgctgtagaagacttcagaaaaccagtcctgagaaagaaaaaattgcaacttaaaaaaaattgcactaaaataattagaaggaggcttgtagtggtttaacttgaagaaggctgcttgttaaacatgaacagcagcacgactgccatgtacagtgggacaggtggtgcactgcacaactccggggggcaccattcatcatgatgtaaatgacatcaccgacattgtgcaaggcagtggctttgagtggcagtgatgttgcacagatgagcaggccctggtcttgaaaaaagtgaccttcctagggagcagatgtcctagctattagagagctcagacagttgcttctcttctgaaatcctcctgtaaatctgaacattagcatcagggtctaagaggaggtaggagataggagagaacctgtgggttaagggcagagttttgtgacaacatccatccaaggtagaactgtcaggacctaggttgctttctccaataactagatgtgaatgaattttagggagagctggaaaagcagcttctacaagcaaacccgattctggaggctttcggcaacgccaaaacagtgaagaacgacaactcctcacgattcgtaagtagcaaagccacatggattttccagaaaagctttggtgtcatctcctgcctggggctgcagagtgtttgcgtgcagaggtgggaggggcatctgaccctggagagatgggctgtatctcacaatcttgcaagggctcctgcctctcactctctcattcattcattaatttattcactattcactcaacaaatattgattggcctggtgcggtggctcacacctgtaatcccagcactttgggaggctgaggtgggaggatcacttgagcccaggggttctagaccagcctgggcaacaaagcgagatcccatctctattattaaaataaaatttaaaaaattaggtattgagcacctggtatgggctagacccttatatccgataccattttatgtaacaaaacatgaattgagtgccaactgtgtaccaggcacacacctcctccaagaaatacttagtaagtacctactgtgtacaattactctggtaggcacttttacatgtaccaccattctctttgtttttttctcatttgctgtttttattaagtgcctactgtataccaggcactcagcgagtctcacaggattgcgatgaatagttcagatatggttccagccttcatgaagctggttcttccaactgaataacagagagtaagtgaggcagggggtactaccttcccatgcacactcccccaggctccaaagcaaaaagtttttgcctgagcccaacagggcaggggaactctgaaagtggatggttgatgataggtagacaacaatggttttattgtgcaaaagaagcggttgtctccgtaggagggtcagaaagatattttagtgagaaaagatgaaggaaaaattgcctctgcattccaggagaagggggtctctgaactgttgctcgctgagatggggccctgtgaaagactctttgcagaaagctctgctctgctgagcaaatgcacatggtggtccctgaccctgtgatccccaaggcccattttagtaacaaacaattacataatgtctcctttcctcgcccgaaattagaatcatagatagtatcacctcctacacgtattagatgaatacacatcagcataatgccctaactggaatatgaagaagaaataacataagacaattcataatgaaagtgtgcatttcaggccaggcgaggtggctcatgcccgtagtcccagtactttgggagactgaggcgggcagatcacttgagctcaagagtttgagaccagcctgggcaacatggggaaaccccatctctacaaaaataaataaataaagtgcatttcagcatatcaatgctcgggccaggccacaccaacagaagacacagtaagagacagacacttaggtctatccacggcgacagctacaaatacaaggaaaagggtcaagttcaggcactgatgatgttggcatgggattttccagaatggcaactgactctcagtgaagcgctgaaccaaagaacaatcttctctagagtcacacagatgggatattcttgtattagaacaacattttaaacacttgttaatgctttcatttaaaagcataaaaatctagaccaggcacagagtggctcacacctgtaaacccagcaccttgggaggctgagttgggaagatcacctgaggtcaggagtttgagaccagcctggctaacatggtgaaaccctgtctctactaaaaatacaaaaattagctgggcgcagtgacacatgcctgtattcccagctactcgggaggctgaggtgggagaattccttgaacccggggagatggaggttgcagtgagccaaagtcacaccactgcactccaacctgggcgacagagtgaggctcttgtctcaaaaaaaaaaaaaaaaaaaaaaaagcgtaaaaatctaaagtcataaaggttaggttctaagcctggctaattacaaacagatttttacctccatgagtggcaggtgagacattggaagagtcataagggatatagacaaggattggcatcagagactctccaggtcattgcaggactcccaaaatatccttggccccactgttcactaacaacagcggcccccccccaacatgtgacaagccaaataatggcttccaccgatttccaaaatctccatagcagatgtgccgcctccactgagaagcactgcgtttgcatgttccaattctgtgcaatgtttctagcctgtcataaatggaagcacgtgcaagacaaatccctaaaaacatcctccactcactggcgtccctgccatcttgggaaggagagtgaagaaggtgcctgggccttgcctgtgaccagccggctctccctggctccatctgggatatggtcatcccaaatcactctactgcatgtttcccaatggggaaagtttgaaggttttgtcaaggactgagcaagcctaggggattgtgtccacacacgccaacacttcccaccatgttatgtcatgatgggggaaaaggatgaaatcctgtctcacctgttgaggaaacaggaaaagggttcatgccaacagatggaggattgggttccatccttggtttcatggcttagctgaggcaggtagatagggccatctttggagatacttgttgagcctctagggccaggaacatgagccattcctgcctaaaggacatcctacacagggcctgcttgggcagtgtggccaatgcatactcacctgtcccacagaaaaggtttaatccatagttggatgatgtggatgttttggagcagggtggggtctggggagggagccctctagcccctgaatatggaaaaaccttctttctgcttagggccctacctctcaggagcaacgtcacgttggacaagtcacttgatctcttttagccttagttttcccagctttaaaatggggatagtgggctgggtgtggtagtttactcctgtaatcccagcactttgggaggctgaggtgggaggattgcttgagtgcagcagtctgaggccaacctggacaacacagtgagatcctatctctacaaaaaaaaatttaaaaattagccagatatggtggtgcatgcctgtagtcctagctgcttgggagggtgaggtcatggggaaaaggggattgcttgagcccaggagttcaaggttacagtgagctgtgattgcaccactgcactccagccctcgctgacagagcaaaaccttgtctctaataaataaataagtttttttaaatagggatagccatgatggactacggtcattgcaaaagccgaatgaaattgatctgtgaacatgttttacacgttctgttgctgtcaggcctggggtggtttcagctcagcagatgttggttccgcctgacaacttgacctgtggggttctgagtgttcgcaagaatctccccgccccacctcccatcctctgtaccatctgcctcctgcttgcccacagcatggggttaacggctgaagttgggcagcaaagcctgaactgtgttttcctgttggcagggcaaattcatccgcatcaacttcgacgtcacgggttacatcgtgggagccaacattgagacctgtatcctttccctgagcctgggccaaatgggtacccctgccccctaccaatctcctgcccagaggctgggagagtccaagagccacctctatctttccagcctcttaggtttcttccagaacaaatctccccttaacagcaggcattgtggtgcagtggttatacatgtgtggaccggacccctggtttgaaccctaaacaagcagcctaggctgcatgtgatgctcaaatgatctgtcccttagctgagtgaccttgggctggttactccacctctctgtgcctcatcagcaaaatggggatgataatgaatggtacctgcctcatagaaatgtgagaatagagtgaatgaactcatataaagctctaggcaccatgcgaggtgcagagtaagggctggctacgtagtgtctatcgtatgatcttcacttcatccttattcagccattgtccgaggccaaattctggacctgtcgtcctcttagagagttggtctgtgatcggctccacttcttaggtaggaaattgatgaaaacagagtttacccagaagaatgctggtatcgcaaggaacaagtagagcatctctttcatgaacctgagcggtgaagtggagccaagttagaaatttctggacgtgggggaacaaccaggtctagagttcagtgactgatcagcctcaggagctttgcaggcggccctagggctcaggcttcctgtggaacacgtgcttggcaatgtataggacctgggggcctgacttagcttctttctgcacctgaggtcctctagcagcacctagtggtcccatttttccacgttatgtgccctggataagagggtgggttgtggagtagcttcctctccactgtacttgtctaagctgtggggatttgggaaaatcactgaagctctctgggcctcagttttgcctcggtaaaatgggggtgattgcacctagtttctggagctggtgcaggggttaaatgaaataatatgcataataatatgcacagcccttggtacggtactgggcccaaagtgagcatctcataggtggtggctattgcgttaactcaatgttttctacgtttctactttaatctgcccaaaccagccaggattcccatcctgcagctaggagggctgtcaggcttcggtcaagtccagagccagggccctcttgtcctgcagccctgcacacacctctcagcaattcatttcctgtgtttagagcgagccccaggcatagccccgtccttctggcctcagccttccttttagatcagtggttctcaaagtatgtttccaaaccagcagcatcagcatcacttgggagctctttagaaacacacatctcagccaggcacggtggttcacgcctgtaattccagcactttgggaggccgaggcgggcagaccacttgaggtcaggagttcgagaccacctggccaatatggtgaaaccctgtctctactaaaaatacaaaaattatccaggcgtggtggcatgcacctgtagtcccagctactcaggaggctgaggcaggagaattgcttggatccgggaggcagaggttgcagtgagccaagatcacacactgccctccagcctgggtgacagagcgagactctggctcaaacatacgtgcgtgtgtgtgtgtgtgtgtgtgtgtatgtgtgcgtgtgtatacccatgtacaccatgagaaagtctgagaatcactgctttccagattggacatgggctgtggtagcccgggcactgctagctggctttaggacttgaagaagacaaggtctgctgatctagccccatcatcccgcaccatcatgcttagtgctgtggaaatccacccagtacagtagcccagcctcccagctgccctctcccatcaccccggaccctgtgatctccatgccaccctcacctgccctcccctctgctctccctcctgccaccccgcatcgcggagaagctctcctgaaattaattagtgtggcgtgtttacggtctctctcgcctccatcccgtcagaccccactcttggaacagagggcatggaagacagctttgccacttgttagctgtatcatcttgagaaaggacttctcttctctgagcctcagtttccccttattgaaaacaccgataatagttgcacttatttcctagcatactttgtgaggcttcagtgagacaatttatatcaatcatttcacacaggaatgaatcataaatcataggatcatagatggtgtcattatttgtattctgtcatgtctgaagacagctcattttaaagaagatttgctggtgatggctgttaggggaacatctcgttaccattaccttcttcctggagcctttttatgctttttcttttcactctattcccctcccttttttttgcatctgaagtctgctggcagcacccagcggttccatttgtccataggggcaatggtcaaagttagacattaccgatcccaggggtagaactggaaagtcatcccatgtgaattgggtgtgacagggatggaggtggaagaccagaggaacacccgcagtatccccagaatccctaactccctccaaaccagatctgctagaaaaatcacgggcaattcgccaagccagagacgagaggacattccacatcttttactacatgattgctggagccaaggagaagatgagaagtaagtgactagcaatgacatgtgattggatggcttgagccttccctttcatcagaatccggggttaagggattggctattaaaacagtctcagatcctgccagaaaggaccatgtctgtgagtgacatatgaacagttcttcatctcctcccaatgagtgagtgtggcttgtgttcagtcattctcatttactgagcacctactatgtgacatagtagccatcaactccaattagacattagatcattaatgattcatgtctcattagaccagagagcatcaagtccaactagacacaatctacgccttcaaggaaagggagaaagacatttgccttacttgccaatttataaaacttgcaaatataaaagatgcattctggttttataaggaatttgcaggggcagcaggactaagcatttttcattatacatgttttgccagtgactttgtagaacaggggtcaagactttttctgtaaaaggccagatagtaaatcttcaggctttgcaggccaggtggcttctggcacagctattcaactctgccattgtaatacaagagcagccacaggcaatatataaaccaatgagtgcaggcaacacataaaccagtgagctcaggcaacacataaaccagtgagctcaggcaacacataaaccaatgagcacaggcagtacataaaccaatgagcacaggcagcacataaaccaatgaacataggcaacacataaatcagtgagtgcagatgcatcactgtgttacaataaaactttatttacaaaaacaggcagtgtgcagaagtttgctgacctctgttgtagggaaaagtttttttatgtaaatataatacactgtataccaaactccagtaggaagttatgagttctggacctgcagctgtttactaactcttaaaaatatatacaaatcgcatagcttaaaaaaggaatggatcagtgactatctgtacatagtagagtctacatgttagtaataagttttgagtctgaaattctatgggaacaatacagactttgcttcccatctcttttgtggcccaaggttagttattttggttaagacagttaccaaaaggatctgtgtgagctcagaacttcgctgtgtcggagtgtattgtagacctcagctactagggggtggcattatccattatttaaatttccagggtggggcaaagtggctcatgcctgtaatcccacactttcggaggcagaggcgggcggattacctgaggtcaggagtttgagaccagctcggccaagatagtgaaaccctgtctccccaaaaatacaaaaattagccaggtgtggtggctggcgcctgtcatcccagctacttgggaggctgaggcaggagaatcacttgaacctagaaggtggagtttgcagtgagctaagattgcaccactgcactccagcctaggcgatagagtgagactctgtctcaaacaataaaaataagtttccttaatggctggctttcaggaacataggctatgaggtggagcaatttttggtaaagggggaatgctgaatggattttttatgtaccagcaaacatggtatattagcagttacagtgcaggaccctgtggaatgggccagggaaaaatgttgacattccttttccttttatttggcacccaagaaaacagtttggttgtttggtaccttgggttccagttttgtgctttgcctctggtcttccagaaatgggcaagtatagggctcagaactaaattcccaggggccgtttgtattctagatgatagaactggaaagatgttaggcttttagaaagaaccaaatattgctaaatgcatccaaactcgggataatgaagtcttggcaaagacctcaatcctcgtgacttgaatcaggcatttcaagttaatccaaaagtttgagttaactggtgccttcagtcaatttaacctcgagtttatcaagcagcttccaagtgacttgacccataaaagaccttgattttgaaagaaaaatatcttgctgacgtctctccaaaagtataaccgaatccatcctaattaaagattgatctggaagaggatccttgatgtattggagggtataataaaagcaaatggtgcaggagaaagaaaggcaattataaagttgggggtgggggagaagctgaacaacaacaaaggaaatgtaatcataggatacagtttgacacagaatatctaattaatgtcataaaaagggagttggcaaactgtttttgctaaagggtcagtagtaaacgttttagactttaaggaccagatggcctctgttgcaactactcaactctgttgcctagtgagaaagcagccatgagaaataaacaaggacatcagagcagctgtgtttcaataaaactttatttacaaaaacaacaggggaccagatttgccaacctgtgatataagccttatatattgattcaactaaaaatagctgggggtggctgggcacggtggctcacacctgtaatcccagcactttgggaggctgaggcgggtggatcacctgatgtcaggggttcaagactagactagccaacatgatgaaaccccgtctctactaaaaatacaacaaattacctgggcatggtggtgggtgcctgtaatcccagctactcgagaggcaggagaattgcttgaatccgggaggcagaggttgcagtgagcagccaatatcgcaccactgcactccaacctggacaaaggtgaaactccctctcaaaaaaaaaaaaaaaaatagctggaggaaaggaaaggtagtataagaaagctgcatttttgcctaccatagcaggaagtcactagatactatctaaacttgacatatccagaaatcgcctattacagcgattgtgctttgcctctggtcttccaataggccaaaagcacctgttacttttggcactgaggactggtttcctggaagaaaagttttccacagactgggcgggcagggttggggggatggtgtggggatgattcacgtgtattacatttactgtgcactttattattacattgtaatatacaatgaaataattatactagtcaccataatgtagaatcattgggagcttgttttcctgcagtcccatcggggggtgatgggggacagtgacagattatcaggcattagagtgttataaggagggcacatgtgcagctcacgatagggtttgcgctcctatgagaatctaatgctgctgctgatcttatgggaagcggagctcagacagtgatgcaagcgatgggcagcagctgcaaatagcggataaagcttcacttgctcacctgctgctcacctcctgctgtgtggcccagttcctaacatggaccggtactggtctatggcctatgggttggggaacccttggcctatgatatgtaatacataatggtatatacattataataggctagtatatatagcaagcctattgtacagagagatagtggtaactgccagataaaaagcagctaaaagagataaaagcaggtattatggagtaaggtagagttggagaagggatgtgacaggagaatgctatttttcattataaacctttggtagtaattgatttttaaaactcatgtgcctgtttgaatttgataaaaattttataaatacatgaataaggccaggtgcggtggctcacgtctgtaatcccagaactttgagaggccaaggtgggtggatcacctgaggtcaggagttcaagtctagtgtggtcaacatggtgaaaccccatctctactaaaaatacaaaatttagccgggcgtggtggcgggcgcctgtaatcccagctactcaggaggttgaggcaggagaatcgcttgaacctgggaggcggaggttgcagtgagccgagatcgcgccactgcactcctgcctggacgacagagtgagactccgtctcaaaaaaaaaaaaaaaaaaaaaagagtaaaggttgatctaactcttctgacagctttgtctctgaaggctgaaggcagggtgcctctagacaattgaggtaaaggcatcccttcctccaggtaaatgtaacttcgtgccagggattgtggcttagcaagcagaaccaaggctggatatcagctgcagtcactggagcagtgcacaacctgcaccgctgtgtaaggctggcagtggttggtgaggctgtctacgtgacgatgcgtgagggctttaaacggttcaagccttgataaagggaaaggaattatgatggcccagacccttgaccagatctcggtctcatgttgaaattagaagtatgtcttattgaccctgacctgtcttcctctccttctaggtgacttgcttttggagggcttcaacaactacaccttcctctccaatggctttgtgcccatcccagcagcccaggatgatgagatgttccaggaaaccgtggaggccatggcaatcatgggtttcagcgaggaggagcagctatgtaagcctcacaccttgagtctggagggtagcttgcctggataccagtggaacctgttaagaactcttctctggtcaggacagatttctgctctctgaattccccaccttccattaaaaaaaaaaaaaaaaaaggaggaaaatgaattttattctaggtggtttgtttgtgttgtagaaaagtggctgtataactagggttgcaagtaacccgagctggcttaaaccaaagggaaagtgactaactcagaatgttgagaagttcagggaggttaggcacagtggttcaggtctgtaatctcagcgctttgcggggccaaggtgggcggatcactttaggtcaggagttcgagaccaacctggtcaatttggtgaaaccctgtctctactaaaaatacaaaaaaaaaattagccagggctggtggtgcacacttgtagtcctagctactcaggaggctgaggtgggaggattgcttgaacccggaaggcagaggttgcagtgagccaagattacaccactccactccagcttgggagatggagctagactccatctcaaaaaaaaaaaaagttcaggaattcaagcttcaggtacagtgagatctaggtgttcaaaagatttttctagaacctaatttcttgtcttctatctctctcgactacattgtttctctataggatgcagtttgttgacagcaacatagctgggttccagcccttatattctttgggtttatgtccaaagaacagagtagattcccggcttaagttcctgaatggagtgtcattgactctgattggttggcttaggttgatatgcacattcctgagctatgcagcataggcagggttgtggaaagcgcagggtggtttcattatggtccctaagaatggattcttggagctgaaggtagagatgttggcctcatcaggaacatgtgggcagggtttaggggagggggagtgatcgaggcagtggatttactcaggcttttcctggaggggttgctctggtgatcaattgatattgatcaaaatcatccaaccaatggccaagaaacacactgggtcttgagaacaggacagctcagaaagaaattcttggtcgggacactgtgtttccagaaacgattttccttctgcgttagatgtgcctcagtgttgaaggttaatctctttcaggaacaccaggacagaactgtggaaagtttcccttccttcccacgcctacgcccgtttggagccccagaatagcactgaggttgctgaaatgctgcataaggggaggggcagctcctccgaagataacttggggtctggaaaattaggctgtatgggtcagttgacaaatggatggtgtatgtgggtcttggccagggtcccacatcagaatctagtgctgatagcctccttgtctgaatgacataggccctccaagaatgattcatttcatttgggacaggggtcagttttgcttctaatcttgcttttaaataacaatgaacaatggttaagtatttgctgtgtgccaggaatttaccaaatccttttttcttgatgtactacactgttcagtatagttttatttaaataataaaaaactggaacaggctgggcacagtggctcatgcctgtaatcccagcatttggagacactgaggcaagaggattgcttgagcccaggagttcgagaccagcctggataacacagtgagactctgtctctacaaaaaaaataaatagaaaaaaactggaacaaactaaaataggttgattaatagagggtttattaaatcattgtctgtccttgtgaaagaaaacaatgagaccatttaaattgttttgctgggcatggtggctcacgcctgtaattccagcactttgagaagccaaggcaggcagatcacttgagcttgagtttgagactaacctgggcaacatggcaagatcccttctctacaaataatacaaaaaattaactgggtgtggtggtgcacactgtagtcccagctacttgggagactgaggcaggaagattgcttgagcccaggaggtcgaagctgcagtgagccgagatcacaccactctgtcacctaggctggagtacggtggcgcagtctcagctcactgcaatctctgccttgcaggctcaagcagtcctcccagctcagcctctcaagtcgttgagactacagacatgtgctaccacgcctggctaatttttgattttagggtttttgttttgttttgtttgagatggaggcttgctattgtcacccaggctggagtgcagtggcacgacctcggctcactgcaacctctgcctcctgggttcaagcaattctcttggctgagcctcctgggtagctgggattataggcgcccaccaccatgccccactaattttttttgtatttttagtagatactgggtctcgccatgttggccaggctggtcttaaactcctgacctcagatgatccacccatcttggcctcccaaagtgctgggattgcaggcatgagccaccgtgcctggcctggggttttttgttttgttttggtttgatttttggaggggtgggtagagacaaggcttcaccatgttatccagtattctctggtcttgaactcctgggctcaaacaatcagcccaccttggcctcccaaagtgctgggattacaggcatgagccaccatgcccagtccccagtgttctcaatgtactttggcacttgtttcccctttaaccacagagaccagactccaggcccagcaccttcggcagccccaagcatctagctagaatttggtaatactgttttccttgtatttatatttataattgccatctatttatggcaagtgaagatgatttgtcactgaagatagagaaagttttctattaaaacaaatgtaaggaaagagaaggaagtaaatttaaagaaaatgattaagcaaataatggagcagatggtacacagagcaagcattcagacgatggcgtgcaaatgacgaactctcataggaaccaacttagtcctaaatgtacaccaaccccatttataaaccaagagctacttccaaaccctccatcaaggggcctatggagaagggggtgggtcaggcttcaggctggagcttcatgaggctccaagtgaccaggggacaccaggattttccccaccacattgggttctgcagccttgaactcctggcctcaagatatcctcatgcgccaccatgcctggcctggttatactgcttctaatgtattttgaagataaaaaataaaatcacctaaattgtccatcctgtgtatccctggtggtacacatgtctgatgttggaaagtcctgtttcttattcctcagcaagaagagaggtgtaaggccactgtaaaaaattagcacaaacttgatgccttaaaacaacaggaatttattctctcccagttctggaggccagggttctgaaatcagggtgtcggcaggagccgggcataatggctcatgcctgtaatcccagcactttgggaggccaaggcaagaggatcgtttgaggccaggagttcaagaccagcctgagcaacatagcaagaccccttctctactaaaaatttaaaaaaaaaaaatttttttttttttaaaagacaagatgttggcaggggttgttcctcctggaggcactgagggagatctgttccttgcctctgtcctggcttctggtggctctggctgttcctggcttttccttggcttgtctcactccagtctctgcctcatccttcatgtggcattctactctgtgggtcttctcttctgtccatcataaagacacttgacattaaatgtagggcccaccaggttaatccaagatgatctcatcttgagatcttgtacttgattccatctgcgaagaccgattttttccaaaataggccacgttcaggctgggcgcggtggttcacgcctgtagtcccagctctcagggaggcagaggcgggaggatagcttgagcccaggagttcgagacctgcctgggcaatatagtgagaccccggtatccacaaaaaggaaaaaaaaataaatgtaaccccccaaattaggccacattcacaggttccaggtggacatattttagaaagaccaacattcaacctaatataggtggcttccactctttatcacctactaggccaggcccttgctcagcatcttacaagacctaaacttcacgaagcaggtactactgttaccatctccgttttgcagatagggaaactgaggctcatgggacttattgagactcatgtagagtctctatcctctattcatccatgattcatccatcaatccatcctctatcatccatctatcctctactcatccttccatcacccatccatccatcacccatccgtccatccatctacccacccatccatccatgaacccatcctctatacatttatacattcatccatccattcaccctccatctgccatccatccatctccctccctccccatgtgtatctggacccggaactaggatttggaaattcagagataatgagatttataagaagcaaagctgggatttgaactcaggactctctaactgcagagcgcgtgctttgcaccagcacaccaggatgctgccagccgtcaccacccttgctgtgttgtgtctcctcactggtttacttctttgctgtctgctaattctgccccaaggttcatctcttatggcctgggagtggtggcattcttttgtcatttctggaattacatttaactataccagaaagtgcaaaccaatggttcctgagcccacaggagagatcggccactacaaccttcaaaatttttagaaattggttcctaaagtttaaatatgggtaggccgggcactgtggcctataatcccaaccctatgggaggccaaggcacatggatcacttgaagtcaggagtttgagaccagcctggccaacatggtgaaactccgtctctactaaaaatagaaaaattagccgggtgtggtggcacacgcctgtaatcccagctactctggaggctgaggcaggagaattcccctgaacctgggaagcgcagaggttgcagtgagccgagattgcaccaatgcactccaacctgggtgacagcaagactcagtctcacacacacacacacacacacacacacacacacacacacacacaccaaaaaacatgggtacacttcacataaaaactctgggtttccattatctagaaaaatcagaagttccagcaacacttggcttatatcccctgtggcaatgacggagtagctgctggccccttcagatgggtttgtggcctccttgggtccccacagtcctcattagttggctttgttcatttagaccagtggttctctgccagaggtgagtttgcctcccaggggacattgagtagtatctggtgacatttgtggttgtcacaactctgtcagggtaaccaccactgacatctagtggttagaggccagggatgctactaaacttcccatgatacccaggacagctccccacaatagagaattatctggcccccaatttctgcagtgacaagattgagaaaccctgagttggccggctcgcctgggctgtgcaggcatttcaggaatctttagtttaaattgacacttttaaaactgtgagtgcaactcttcatagtttacaaagactctttcatagatgttatggttaaaaggaagtgtgtttccaagccctgtcaacagcagcttcattcattttggggagaaggctttctaccatagtaagtgggagcaaatggatgggtggtcagcagctgggtccttttgctgagctgggccagggaccccatggcgtgagaatagctgttgtgaagggccttgtaatgtctggtttggcctgaggaaccagagaagtctgggatctctaggctttgttcctggaacatagtgactgatttgaagccagaactctgggtgatttgtacctgagttaagctaagccaagaatttgcattaatcatcatccatccattcatccatctaccatccatccatcatctgtccatccatccattcatccatccatcatccatccatcaatgctgtatccattcctccatcaattctccatccatctatccatcgtctatccatcaatcctctgtccattccatctatccatctatcctctatccatccatccatcatccgtctatcctctatccatgaattattcatccatcaatccatcctctattcatccatctatcctctactcatccgtccatcattcacccattcatctacccacccatccatccatccgtccattcatccatgaacccatcctctatccatttattcattcatccatccatccaccttccacctaccatccatccatctctctccctccctcccatgtgtatcaggaccttggaataggctttggaaattcaaagatgattagggcaggccctccactctccagaaactcatggtcttatggggatttcagacatagaaactattttaacagtaacatggcctgagtatggagtcagaaaggttccaagtattctgggaacacagcgtttttgtttggagacacctggacaacaagtggaaacaaatgtatatcttcttcatcccaacatgggcatctgttacacccagaagagtatgtaagaagcacagggtttttatttcaaaaatccttttattgacatatgatttacatggagaaaattgtgtatgccatagcgtgcagtgcaaagaattattataaactgaacacgtctgtgtaactagaatccattttaaataagacaatgccaccagccccatggaagctcccacatgcaccttctaagaacttccctcaattaaggataatcattatcctgacttctaacagcatcgattagttttgcctcttcttgaatggacggtctatatatggacttagacagtatgttcttgtttccatctgtcctcttttgttcggtatttgtgtctggaagatatgtcagggttttttttttgttttagagacaggatctccctacattgcccaggctgtatcaagctcctggcttcaagcagttctcccacctcagcctcccaaagtgctggggtcgcaggcatgagtcactatgctggccccaatacatcagttttgatttgtggtagttgtagctcattcattctcactgttctgtggcaggggttgctaacacatttttctgtaaagggtcagatagtaaattctttagcctttgtaggccagacgatctttgttgcaactcattaactctgccagtgtagcatgcaaatagttacagacaatatgtaaatgaatgagtatagctgttttccactaaaactttatgtataatagcaagcagtgggccagatttggtccatgggctgtaatttgccagtccctgctgcgtggcattccattgtaatgcaaggttttaagcaaccatatgaaaatattgagctcagaatctagtttcttcagaggaaagatgtaagctggctctgggtccccagtggctttaggctccaaaactccagggtaccttggcattgacctttgtgtctgctctgcccttctctccccacctcagccatattgaaggtggtatcatcggtcctgcagcttggaaatatcgtcttcaagaaggaaagaaacacagaccaggcgtccatgccagataacacaggtacttgccactttttcctgatgaccaatgactttggggttgggggggtgggggaggtgacatttaaccactggttatttttcaaggtgaaggtatctgggattttaacaacagttggactaggttcttatcactcactttttcaaacttttcagtgctcaagaccctatgtggaaagttattgaatcagagcgcagggattaaaaaaaaacaaacctaatagttttatttatttgttcttttttttaaatacaaaattttacaagttttaatagagacgaggtctcgctgtgttgcccaagctgatcttgaactcctgagctcaagtgatcctcccaccttggcctcccaaaatgctgggattacaggcaagagtcatcacgtcctacccctaatagtgaccagacaagatcccgagggaccatctcttctaaaataccccacttaattgttttgttaaagaaatatttctcaagcccctgcaatatgccactgggatacagcaggaaatgacacaagaatagctcttcttacggtatctgtggtcgtcttggggagacagacctcaattgccctgagaattaggggtgccagataaaatacaggatgtccagataaatttcaattttaggtaaacaacaaacctttttttaaattttaattatgtcccttgtaacatttggaccgtgattataccaaaagagtattcttgtttatctgaaattcaggtttaactgagcatcctgtaattttccccctaaatctgataaacctacccacaaataaacagtattttgtgttttgagaagctggcctggctaccactatgcttgttggtggctgagctgagagcaaaacttaggtttcttatttcccagcccaggctgtatattgtgttgctttttcccgctccctagagcccaccttgatcaaacctgttgcaaccgcttactgggtttaccttgcccacagcctagacagagccaattaatcaagacaggggaattgcgatagagtaagagtaactcacgcagagccggctgcatgggagaacagagttttattattactcaaatcaatctccttgagcattcgtggatcagagtttttaagcataatgtggttagggggaggccagtgagttgggggtgctgattggttgggtcagagatgaaattacagggagtcgaagctgtcctcttgccctgagtcagttcctggacagaggccataagatcagatgagccagtttctcgatctgggtggtgtcagctgatccacctggtgccagggtccgcaaaaatatctcaagtactggtcttaggttttacaatagtgatgttatccccaggagcaatttagggagggtcagactcttgtagcctccagttacaggactcctaaaccataatttcaaacctttgggctaatttgttattcctacaaaggcagtctagtctccaggcaagaagggggtttgttttgggaaagggttcttgtgttttaaactataaactaagaggctaggcgtggtggctcatgcctgtaatcctaggattttgggaggcccaggcaggtggatcacttgaagtcaggagttcaagaccagcctcgccaacatggtgaaaccccatctctactaaaaatacaaaaattagccaggcgtagtggcaggcgcctgtaatcccagctactcaggaggctgaggcaggagaactgcttgaacgcaggaggcggagattgcagtgcgccgagattgtgccactgcactccagcctgggtaacagagtgagactctgtgtccaaaacataaaaaataaactataaactaagttcctgccaagttaattcggcttacacccacaaatggttcagtggagcttggaggttagaagcaaggtggagtccgttaggtcagatcttgttcagtgtctcagttataattttgcagtggcagtttcattctcaggtgtttgttatgtattagagtccctaaatctggcaaattaatggaatccggatgccaaggaaagacctcagggaaagagaaatgaaaaagtgctcttgccaagagatggggaaaaaaaaatcctaaaatcactctatttactctgccttgcacatgcaaagcagcatgtaatgctattttcatgttaagggaccagctcgtggtcacaccactgcacttcagcccgggcgacaggaagactgcatctcaaaataaaagaagagcatttaggttgactctagcattttgctattgcaaacaatgctgcaacacatatcctagaagggtgaaagaaatatttattgaacagtaactgttcaataaatgttactattaataactatttaatacttactaagtaactgttaaataaatctcaagggccagtggctcacgcctgtaatcccagcacttagggaggccgaggtgggcggattgcctgagttcaggacttcgagaccagcctgggcaacacggtgtaactccatctcaactaaaatacaaaagaaattagctgggtgtggtggcaggcacctataatgccagctactcgggaggctgaggcaggagaattgcttgaacccggaaggcggaggttgcagtgagctgagatcgcgccactgcactccagcctgggcgacagagcgagactctgtctccaaaaataaataaataaataaacaaataaataaataaataaatctatctatctcagggactttacatactttaccttatttagtcctgggtaccaacaaggtaccgaagagctgaccctttttaaagctgagaaaagcaagatgctgggagggtaaagagcttttccaaagtcacatgacttggaagtgtgaagggacagggacttgaaactagaactacctgaccctaaacccccaactggggcctgcttcagcccaccccaatcattgcctctcagcaaaatactggggagtgtgaccactaatgacagcagcctttaggacacttcaagctatattcatggtcagcgggtcccatttccccaagagaacccgctgtattcacagatcacaaatatcccatgcgatgtgtcttcttgccaagctatttcttttgtgatgcactcacgatgtttcttttctccatccagctgctcagaaagtttgccacctcatgggaattaatgtgacagatttcaccagatccatcctcactcctcgtatcaaggttgggcgagatgtggtacagaaagctcagacaaaagaacaggtaatgatgtacttatcacttatccatccatgcacccacccatccatccattcatccatctatccacctgttcactcattcatgtattcattaatccattcacccatggtctgcctctgcatctgtccatccatccatctttctacccactcattcatctgtctgttcatccatccatccatccatccattcatctgcccatctatctgctcacccatcatctctccatccctcactcatccatctgtccatccatccatgacccagccatctgtccatctgtccgtccatccatcacccatccagctgtcattccattcattcattcattcattcatctgtccatgcatccacccatccatctctttatccctcatttattcaatactagaatattcacagtcccatgtcaggttttgtttgtttgtttgttttttgtttttgagccagagccttgctctgttgcccaggggggggtgcagtggtgccatcgcagctcactgtagcctctgcctcccagattcaaacgattctcctgcctcagtcccccaagcagctgggactacaggcatgcaccacaacgcctggctaatttttgtatttttagtagagaagggtttttgccttgttggtcaggctggtcttgaactcccgacctcaagtgacccacctgcctcggcctcccaaagtgctgggattacagtgtgagtcactgcacccggccaagaataaaaatcttcaccaccagcctggcttatgtgaaaatggagcccattgagaataaccgggttcccctggttgccctctgcaggctgactttgctgtagaggctttggccaaggcaacatatgagcgccttttccgctggatactcacccgcgtgaacaaagccctggacaagacccatcggcaaggggcttccttcctggggatcctggatatagctggatttgagatctttgaggtacagctcggtgggatcctaagagccatggtcttggttgtctgagatgggctttttcttggaggagtcatgattttggagaaaggcatgtagatggctactgtagggtaggaggctgtctagttaagggtggatcattgagggtataagagacagaaatccaacaggaaatgcattggtttctggaactgagaaggccagacatgtagctggatcccgtaggcagggtctgatctcccgccatcgttctctctctctctctgccttcctccatattggctccattctcaagcaggctctcccctcacgggggcaagatggctgccacagctccagactgcctctcagtaatcctggtaaaaaaaaaaaaaaaaaaaaagcacatatctcttttctaacagttccaaccaaaatcttggaattaagtctcactgactcttactcacctgaattgggctacatggtcacctccaagccaagaactgtttgcaggagcttgcaatacctcatgtagtagaaacatggatattggatcctttacccatgggtttgaagaaagttctcagagaaagggaaggttttttttttgtcttgtcttgtttttttttttttgagacagagtcttgctctgtcgcccagactggaatgcagtgtcacaattttgtctcactgctgcctccgcctcctgggttcaagcaattctcttgtctcagcctcctgagtagctgggactacaggagtgtaccactgtgcccagctaattttttttttttttttagacagagtctcgctctgttgcccaggccggagtgcagtagtgcaatcttggctcaccgcaacctccgcctcccaggttcaagtgattctcctgcctcagcctctcgagtagctgggattagtgccaccatgcctggctacttttttttttttttttggtagagacagagtttcaccctgttggccaggctagtctcaaactcctgatctcaaatgatccaccagcctcggcctcccaaagtgctgggattacaggtatgagccactgtgcttggccaatttttgtatttttagtggagagaggtttcgctatgcttgccaggctggtcgcaaactcctgacctcaagtgatcctcccgccttggcctccctaagtgctgggattacaatcatgagcactacacccagccaggaggttttaagattgatagatgtcccgaaagaagtgtactaccgagtcactttctctctgcgcctctgttttcacatctgtaaaatgtttccacatctgtacatgcagtagcgtgccttacgaggtttgtccatccatagatggttgtgcagatggaggagataagcatctttaaggtgtgtgagggccatgtgatatcaacttcaccagccctggtggactctaggcagcatgttttggggcctcagccctgtctgggtgctgggatggcagaacaggatgtgggcgggccatgggggcgctgtcgggtggagcttctgtggggctccttgtcttctgacttcataccaagatgctcacgccccgcccccacgccatgtgctcaggtgaactccttcgagcagctgtgcatcaactacaccaacgagaagctgcagcagctcttcaaccacaccatgttcatcctggagcaggaggagtaccagcgcgagggcatcgagtggaacttcatcgactttgggctggacctacagccctgcatcgagctcatcgagcgaccggtgaggggcacgtgggcgtgcggggctccgtcacaccttgtacacgtgtgtggcctctgtggagccgacgtggaccccacactctccccatgcacatagcattcccccacccaatccatcacccagtcctgaaaggctgtaagctgaatccttgtgaactcttacaatttccattaacccacattttcatatcaaaggtattttctttaatttctgccttccttccatcctcttttttcttcctttttttcttccctaccctctttcccttccctttccttctctgccattgctttttttttttttttttttttttttatgacatggtctgactctgttgcccaggctggagtgcagtggcacaatcttgcctcactgcaacctccacctccctgcctcaagtgatcctcccgcctcagcctcccaagtggctgagactacaggcgtgcaccaccacgcccacctaacttttgtattttcagtagagacagggtttctactaattagccgggcctggtggtgcacgcctgtggtcccagctatttgggaggctgaggtgggaggattgcttgagccctggaggcagaggttgctgtaagccgagattgcgccactgcattccagcctggataacagagtgagaccctgtctccaaaaaaaacttttctaacaggaaccctaggtgaattcaagtcaagcaacaaattcatttgcaagaattatgaactcggccgggcgcggtggctcatgcctgtaatcccagcactttgggaggccgaggcgggcggatcacgaggtcaggagatggagaccatcctggctaacacggtgaaaccccgcctctactaaaaatagaaaaaatcagccgggcgccgtggcaggcgcctgtagtcccagctactcgggaggctgaggcaggagaatggcgtgaacccaggaagcggagcttgcagtgagtcgagatcgcgccactgcaccgtctgcctgggcgacaaggcaaaactctgtctcaaaaaaaaaaaaaaaaaaaaaagagttatgaactcttcatgatgttgcctgcgtgttgcccactagggggcggcagcaaacattatgttctgccttccatccctgttactggtccattgggcacagggtaatttgaaggtagatttggaagcatgggggtcataaactcatctttatatgtgggcaaatacagtatcagatctcggcggatgcccatgcgttgtgtatagttggccagctcttcatggaatgcctgaggttgggtgttctctctgattcaagccctacttgtctcccacagaacaaccctccaggtgtgctggccctgctggacgaggaatgctggttccccaaagccacggacaagtctttcgtggagaagctgtgcacggagcagggcagccaccccaagttccagaagcccaagcagctcaaggacaagactgagttctccatcatccattatgctgggaaggtaccagccacagggcccaggggactctgtctcaggggacccccagtggctgctcagcgcagagacagtctgagagtggcagaaccttgggctgcctggaaactgcaaagccatctgctgctaagcgaatcccaaccaagtcctattcgtaatttgtctacgcatctgtaaggcatcagctgtagccactctcatgttttccaaccgtgacgtccagacagttatttctttctgtttttgttggagacagggtctcgctttgtcgcccaggctggagtgcagtggtgcgatcatagctcactacagcctcaacctcctgggctcacacgatcctcctgcctcagcttcccaagtagctgggactacaggtgtacaccaccatgcccagctaaaatcttttttcctttttgagatggaattttgctcttgtcatccaggctggagtgcaatggcgtgatctctgctaactgcaacctctccctccgggttcaagagattctcctgcctcagcctcccaaatagctgggattacaggcacctgccaccacacccagctaatttttgtatttttagtagagaagggtttcgccatgttggccaggctggtctcaaactcctgacctcaggtgatccacccgcctcggcctcccaaggtgctaggattacaggcatgagccaccgtgcctggccgcccagctaaatttttaaattatgtatagatatggggtcttgctgtgttgcccaggctggtcttgaattcctgggctcaagagatctccctgcctcggcttcctgaagtgctgggattatgagcacgagccactgtacctggcctcagcctgcttttcttgtatagactctaaatccttcctgctacaagttatacccaacaggcggggccaactggaatggggtgactaatacatccacacctggcttcaacaaaaatctcccatgtcacggtcttgagtttgctattgccagcctgctctggccagggaaatctatgatagttgtattcatcatcatcatcatcatcatcaacatgccttggctgttattgtataggcccttgccctgtggctctcaagagtcctggataatgtacaaaggacatagcttagtctggcttgcagaattgtagtattctattgactcctcagtacctccactgcatcatgggcacaaacaatgctctctaccagggcctggcaacagagtccgatctggcccacagcttgttattgtaaataaagttttattggaacacagccatgcccatttgtatgcataatgtctatggctggctgcttttgtatactacagtgctagagttgagtagctgcgacaaagactgtatgacttggctgggtgtggtggctcacgcctgtaaccccagcaccaaggcaggtggattacttgaggtcagcagtttgagaccagcctggccaacatggcgaaagcccgtctctgctaaaaataaaaaataaaaaaaatttaaaaattagccagctgtgagattacaggcacacaactgtaacctcagctactcaggaggctgaggcaagagaactgcttgacccaggaagttggaggttgcagtgagctgagactgcaccactgcactccagactgggcaacagagaaccactctgtctcaaaaaccaaaacaaacaaacaaacaaaacattgtatgacttgccaagccaaaaatatctactatctgggccttcaccaaaagtttcccaactcctagcctatattcaagggggtatatgttcctttaagcatatagagacaacacttttcttttccctacttcatcagtggattttttttattattattttcagtcttctctcagatcaagcctacctattatcctgataacccacatcccatgataacccagcaaagctgtattatcagttcctttcatttaatattcaccatagtaaaaattacggctttgggcattgtcattgtttgagtcaggaatgtaaaaagcctatatgtcctttttctgtatatccatatatcaggatctctgagttacaaattatgctcattagagagtggaaaataggatgccatgcttaattaatttatttatttaattattttgagacagagtctcactctgtcacccaggctggagttcagtggcgcaatctcagctcactgcaatctccgcctcccaggctgaagcgattctcctgcctcagcctcccgagtagctggcattacaggtgtgcaccaccatgcctggctaattttttttttttttttgtatttttagtagacatggggtttcaccatgttggtcaggttggtcttgaacgcctgacctcaaatgatccacccaccttggccttccacagtgctgggattaccagtgtgaaccaccacgcttggctgccatgcttaatttctaaaccaggatgattgggaagatgatgaggggggagttttgcatgtcggcaggagggcatctgccgtcatgaaatctcttaatagtgtataactcacaggtactgtgctggcttaggaggagggaggctaccacagcagcgttagtaggagaatatggaatggaaactaggctttcccagcaatggctatcactggctgatgtcctactacgtgggcacaggtccctgggctgttggtctcttcactggtgtttgtggagtcccatcatggtggtcataaacgtcatttcctctctgacctcagaagatctggaaggacaatgggagggctggggtcctggccttggtttctaagtttctagtttcccaggggttctgaccagcagggtgtccttggcaggtggactataatgcgagtgcctggctgaccaagaatatggacccgctgaatgacaacgtgacttccctgctcaatgcctcctccgacaagtttgtggccgacctgtggaaggacggtaaggccttctctgctcgggtccatgttctgctttgagctggagaattgaacacccaagtcccccgactctcacacctgccccaggaggggaggcctttacatgggggcaggggaaggaagagcattggcatgggctggtgatgtctcgttgaaacaatttcttcctgagtgggggtccctgagcccctcaatcctacatgtcccgaggggattgaggtcctgaggtcagggctcaggcaatagaggagaaacagcatgccaggcacggggagttagactgccctgtccagagtcagaaggacttcactgtatcttgtctctgccacctcctagctctgtggtcttggatgagtcacttgatgtcattaagcttcattgtcctcattagtaaaacaggagatgcaataatagttgccgtctctactagaggtattatgagggttaaattagaccagtgatgctcaaactcaagcaggcatcatgaccccctggaaggctttgtttatttatttagggacagagtcttgctttgtcacccaggctggagggcggtggtgcaatcttggctcactgcagcctccaccttctgggttccagtgattttcctgcctcagcctcccaagtagctagcattacaggcacacaccaccatacctggctaatttttgtatttttagtagagacggggttcccccatgttggccaggctggtctcaaactcctgacctcaggtgatccgcccacctcagcctcaaaaagtgctgggattacaggtgtgagccactgcacctggccctctttggagggctttttaaaacccagatggctgggcctaccctaagatctaattctgcaggtctggggccagggatggggcgggcctgaaaacattcatcccaggtgatgctgctggtctagggaccacactccggctccctttgagaaccagtgaatagatgatccctgtgaagagctgctggagtgatgatgaggggagggggtttgctgtttgtccctggccatcagtgtccacagcaggttttattcttggcacagggcccatgggcctggggcttacaggactggtctccccttgttttaagcatgctaaaaaaagggctccaggaggggccagctgtgccctaaccatatgccaggctctgggcctagggaacaacatcgcaccctgggtctgtgtcatcccaggacacatgatgaagcctgtagtccctcctctgcgggacccacagtcttgtgggagagatgagactctcaaagacaagcagagagacaagcatgaggctgcgcatggtggctcacacctgtaatctcagcactttgggaggctgaggcaggaggatcagttgaggtcaagagttcgagaccagtctggccaacgtggcgaaaccccatctctactaaaaatacaaaaactaactgggcgtggtggtggtaatcccagctactcgggaggctgaggcaggagaactgcttgaacctgggaggcgcaggttgcagtgagctgagattgtgccattggactccagcctgggcaaaagagcaagactctgtcttgaaaaaataaaactaaaaataaaaaataaaaacaaaattagccgggtgtgctggtgggtgcctgtaatcccagctactcaggaggctaaggcaggagaatcacctgaacctgggtggtgaaggttgcagtgagccaagatcgtgccactgctctccagctgggcgacagagtgagagcttgtctcaaaaaaaaaaaaaaaaaaaaaagattgttacacagaatctgagtagaaggtgaagaaatggtgccatccatggcctgtgggttgggcttggcatgtgcaggacctgctgggctggtagaaaaagaaccttggaggtgatgatgatgatgatgatgatgatgatgatgatggccgggcgcggtagctcacgcctgtaatcccagcacattgggaggccaaggcaggggaatcacctgaggtcaggagttcgagaccagcctgaccaacatggagaaactctgtctctactaaaaatataaaaaaaatgagccgggcgtggtggcgcatgcctgtaatcccagctactgggaggctgaggcgggagaattgctggaacccgggaggcggacgttgtggtgagccgagatcacgccattgcactccagcctggccaacaagagtgaaactccgtctcaataaaataaaataatgataataataataataataataataataataataataataatacctactttttgttgagcacttactgatgtgccaggctatctcggagtgtgtgctgtatcttctgcctcagaatatttcttccgtggatacctacatggttacccactcatttcttgctggtttctgctcaaatatcaacttagcagagcccaccacctccttgtctaagagagcaccctcttcactctctctccgctttaccctatttttatttttctacgcacacctcactactcaagatattccatacttaacatctgtgatctctgtctgtctccttccctgtgatataagcggggtgagggggccgggtctttttttgttcacagcagtgtccccagggcctggagcacagaaggtcctcaataactatttgttggtggatgaaagattggaggctggcagggaataagtgccttctgtgccttatttttttttacccctgccctagaaggtagacggtattattacctcccttttgtagaaagggagactgaggcacaggatagtgccaagccaaggctagtcagtgagtggacagcgagagcaggcttgactcctaggtcagcgtgactccatcacagggaatttgttctttctgccactcaggtgctctcaggatttccccaatagacaatacttggaaaccctgactgccgaaggaggcgttggtgatggaaggaaagattggagtgggcaggttggtgggtggggctggggctgagcctctggcctatttaggggtgggtgggccagaggctgatgccaccctggctgtgccccatagtggaccgcatcgtgggcctggaccagatggccaagatgacggagagctcgctgcccagcgcctccaagaccaagaagggcatgttccgcacagtggggcagctgtacaaggagcagctgggcaagctgatgaccacgctacgcaacaccacgcccaacttcgtgcgctgcatcatccccaaccacgagaagagggtgaggcccgccgcccagaccctggggctcccagaagccagggctgtcccaagcggtcacagcgtccccagggcgccctctgcccccacctaccccgaggaccccattttccatgtggggaaggctatctgaatctcagacccattccccatccctggaggaaaaggaggaagggaggatgcatccagagacttttcagttgtggagttgctgtgcaggtcatccagccactcattcattcattatcccaggaagtattcactgggctctgccctgtcctgggtgctggggagcagtgttagaaaaattgtagcccttccctgtgggtttctcataatctggtgcaggcatcttcagcttggggcgattgtgtcctctatatggacatgctacagacatttttggttgtcacaaccaggagggggctgttagtcagcatctagtgggtaggggccagggatgccctaagcattgtacaatgcacaggatggtccctcaacccccagcacagaatccctacaagatgccagtagtgctgaggttatgggagacacggggagaggtaaacatacagctgatgatggtgatggaatgtggtcagttaggagaacaccaaagagccagggctcctcccacagcctcaggactcagagaaagcttctggtgaacttgaacgttaagaatgtgtggccatcaacttggtgacatggaaggcagggtggggcctaggataagcagggggcctaggataagcagagggcccaggctaagcaagagtgtggaggtgagaagtgaaggaactaggtaagaaaatgctagatagtgtccaggcgtgttgctcacgcctgtaatcccagctactcaggaggctgagaaacaaaaatctgttgaacccaggaggcggaggttgcagtgagctgagattgcaccacagcattccagcctgggcagcagagcgagactccatcttaaaaaaaaaaaaaaaaaaggaaagaaaatgctaaataggtcatttcatgttgcaaatgtgtgatggcatgaggtaggaatcagatggtgtgaggtaggattgaggctgaatgggtaggcaggggctagatcgtggtgctccttgtgttctttctggagcttggccttctctctctaggcatgccattgggggtgttaaagcagggctatatcatggtcagatttacattttaggaagtgaatgagggggctgggcatatgctagctcatgcctataatcccaacactttgggaggttgaggtgggaggatcacttgagaccaggtgttcaaggctagcctgggcaacatagcaagaccctatatctacaaaaacatttttaaaaattttccaggcatggtagcacatacctgtggtcccaaatacttgggaggctgatttgggaggatcacttgagcccaggagtttgaggctgcagtgagccatgatcgcaccactggactccagcctggctgacagaatgggaccctatctcaaaaaataaaaaggacaaagggattgaggggagaggcaagaccagagagagagaccaggtgggtggtttctgtggttgtccaggcaggagaagatagtggagacaatggtggtgaagagaagtgggggggttgggagatatttgggagctagaagcaatcaaactgctgatggacaggaagtgagggagacgaggtgatgaggaggaagccccaggttccagccaggcgatgctagtgtcaccaagaaccagagagatcatgaggcagccattgccgaagcaaagagatgaaaacccagaggggggcactgctttgcccctcggccctcagctaagccctccttgggtgcttctgttggtaccctcatggcctggccaggtgggtcatccaggtaggaggtttggggctttgctgcgccatggtttctggccccagggatccactgccctctttgacctttgcagtccggcaagctggatgcgttcctggtgctggagcagctgcggtgcaatggggtgctggaaggcattcgcatctgccggcagggcttccccaaccggatcgtcttccaggagttccgccaacggtaagtcccaaggtctggcccaggtagggcagggggtgagcgggactgggtggaggaatggatgctggaggtacccggggtgacttctgctctgtgtttcaagctacgagatcctggcggcgaatgccatccccaaaggcttcatggacgggaagcaggcctgcattctcatggtgagcccagaagtccaccagagacctcccaacctctggccgcaagccacctgctgctcttggtgggaccgttcttacccatgtcatcactggccaaatggcacagtggaaatcaggagctcttcctttccttccttttgcagatcaaagccctggaacttgaccccaacttatacaggatagggcagagcaaaatcttcttccgaactggcgtcctggcccacctagaggaggagcgagatttgaagatcaccgatgtcatcatggccttccaggcgatgtgtcgtggctacttggccagaaagtaaagatgctttcctgcatcctaatacctcaaacgcgaatcacaaacaggggcctttctgttctgattccctgattctaagaggccacctgtttaagatgcatcattgactgaatgacagccttttcttgaaggggaagaaatgcttctactttaaataaatgtaccaagttacgagtgcaggaagggaacgagttttagacctgggttctcatcgtggatgccccagtttttgctgatgaaccttgggcaagttactctacctctctgagcttccagttttttagctggaaactgagcataatcattttgacctcagagagctgttcatgaggtgtcactaagataacgcatgacgagagcttagaacagtgcgtggttctcaggtcagaaatgattgttgttgtttttacctccctccctcactccttccttccctccctcccttccttccttcctttcttcttcctttttgagacagagtctctctctctctctctgtcgcccaggctggagtgcagtggcgcagtctcaactcactgcaacctctgcctcttggactcaagcaattctcgtgtctgagcctcccgagtggctggaattagaggcgcccaccaccacactggcctaatttttgtatttttagtagagacaaagtttcaccatgttggccaggctggtctcaaattcctggtctcaagtgatccacctgccttggcctcccaaagtgctgggattataggcatgacccactgcgcccagcctagacatgttagaattggataaaccattgaggaaagaggacttgacggtgtctagatccccgtgtcccagtgggatttataaggcagggttttggagggtgtgatgtcccagctgttctgtgaagactgggagccggggaagggttcgggttccttaatgaaagtcataccccagggactgcagggacaggtggggtcgctctctgtctggggtgtgtgttgtcattgggcagagaccacaccctcaccagtaggaccctgatgtgtcaggttcattcattgacacatggacccaagatggtcaaggccagctttgggagctcttggccctcccgcaacagacctaacttgtcaagtttcgttactaagttccctgttgctgtccttcctggataactggggcaattttattcttaaagttttcctgtgtccaagatggcagccaagcagggaagacagaattacgttcactgttctatcgtttctcaatctatcgatagcccttaaacgggaagagtgctggttcagggtcacagtgtgaaattcctaaaacaacccaggagagaataggtttgacagggctgggtgtggtagctgacacctgtaatcccaggcactttgggaggccgaggcaggaggattgcttgagcccaggagtttgagaccagcctgggcaacatggcgagacccctatctctaccaaaaaaaaaaaactttaaaaattagctgggcatggtagcatgtgcccgtagtcccaactacttgggaggctgaggcaggaggatcatttaagcccaggaatttgaggctgcagtgagccatcatcacaccactgcactccagcctgggccgcagagccagaccctgtctctgaaaataaacaaataaataaataagttagtcagaaacagctggtgtaggctgggcatggtggctcctacctgtaatcccagcactttgggaggccaaggtgggtggatcacctgaggtcaggagtttgagacccacctggccaacatgggaaaccccatctctactaaaaatacaaaaattagccaggcatggttgtgggcacctgtaatccaagctactcaggaggctgaagcaggagaatcacttgaaccccggaggtggagtttgcagtgagctgagatcgtgccaccgcactccagcctgggcaacaagagcgaaactctatctcaaaaaaaaaaaaaaaaaaaaaagaaagaaagaaaaaagaaacagctagtgcagctggggagtacgggagcccccttaggaatgatgcacatagttgtgttttctgagtggtgtttggatctcagctaagtccagggcatgttgtgagccctgggtcttccttgtccactgaaaaaggctctgtcctgtagatgatttaagttgtttgcagccagacaacacatgtgtcacacagggtttctggaagaacctgagttggggagattggggcatgtccctgtgcaggttcaggatgctgcagggcagggctctgttgacagcagggtgtggcttcatgacccccgcaccttctcttcccccctccctagggcttttgccaagaggcagcagcagctgaccgccatgaaggtgattcagaggaactgcgccgcctacctcaagctgcggaactggcagtggtggaggcttttcaccaaagtgagtgctctgccccagcccccttcccaggggcccccagccctgcttcttcactctggagccttcacatttgggacaggaggtggtcgcaagtgggtgtggaatggagggctcgaactcagaccttgagcattggcggttctctggcccgaggaggccctgtcctttggcacataggctatagccaggaccttaacacaaagtattaatatttccatccgcactggaatccctcgtgtggcccatttatagccacacccacttcctccgtagccatggaaaccactctgttctccagttctgtaattttgatggttcaagaatgctgccgggggcggcggctcacgcctgtaatcccagcactttgggaggccgaggcaggcggatcacttgcggtcaggagttcaaaaccagcctggccaacatggcaaaaccctgtctctacttaaaatacaaaaattagctgggtatggtggcaggcacctgtaatcccagatactcaggaggctaaggcaggagaatctcttgaactcaggagacagaggttgcagtgagccaagatcatgcctgcactccagcctgggtgaaagattgagactctgtctcttctttctttttttttttatttaaaaaaaaggccaggcacggtggctcacggctgtaatcccagcactttgggaggccgaggcgggtggatcacaaagtcaagaaatcaagaccatcctggccaagatggtgaaaccctgtctctactaaatgtacaaaaattagctgggcgtggtggcaaacgcctgtagtcacagctactcaggaggctgaggcaagagaatcacttgaacctgggaggcagaggttgcagagagctgagatcgcgccactgtactgcactccagcctggtgacagagcgagactccgtctcaaaaaaaaataaaacaaatattctatacatggaattagagagcatccagactgttgcatgtatcaatactgcaggtttttttttttttactttttgcattttttgaaatggagtctcactctgttacccaggctggtcttgaactcctgacctcaagcaaccctcctgcttcaggctcccaaagtgctgggattacaggcatgagccacctcatctggccatagcatattattttttatttctggcagagtcagggcctccagaggactcaactggttcctgtagtggcactggttgcattgtccccatggcacaaagacatgctctgttgcaatagactaggcttctccttatatgcccttgagtgtatccactggtgcaaggctttttcaccaagcaaacagacattgagtgcctgctgtatcccaggcacatgctaggtgctgggggtgcagctgtgaacacacaccatggtccctgacctccatgaatattctagccgaattggtggggagtaaacaataaacagataatcacagagacagatacataatggcaaactgtgataagtgcatgaagcaagctgctggagtacatagcaggggcttccttgtgccaggcaggggcttgaaaacaaagagttaggaggcagcccagggaaggacagcagatgctgctttttggaaatgttcgtccccactgaaccaacttctgaaaaactatcctaagaaaatcgtcttagccaggtgtggtggctcatgcctgtaatcccagcactttgggtggccaaggcaggaggatcacctgggttcacgagttcgaaaccagcctggccaacatggcgaaaccctatctctactgaaaatacaaaaattagccaggtgtggtggtgggcacctgtaatcccagctactcaggagattgaggcaggagaatcacttgaaccgaggaggcagaggtttcagtgagctgagatcgtgccactgcactccagcctgggtgacagggcgagactccacctgaaaaagagaaaagaaaatcaagagttaagggcattcattatggccttatttacaatagcagaatttcagtgtccagtcctagctgaatgatgagttcaataatggttcatctatcaatggaatgttttcagctattaaaatgatggctttggctactgaataggtctgctaaaaaaaaaaaaaaaaaagacttctacctagctgtctagttggacactgtggcatgtgcctgtagtcccagctactctggagctggggtgggaggatcgcttgaggccaggagttcaaggctgcagtgagctatgattgtgtcactgcactccagcctgggtgacaaaacaagaccatcgctaaataaataaattaacttaaaagatggctatgtaaagttgtaagaatgatgtaacagcatggggtaatacatatcttataatttttaaaaaaattttatttgtggagacagggtctcactgtgtcacccaggctggagtgcagtggcacaatcgtggctcactgcagcctcagcctgcagggttcaagcgatcttcctgcctcagacccctcactagctgggactacaggcacacaccaccatgcctggttacttgtttttgtagagatggggtctcatgatgttgcccaggctggtcccaaactcctgggctcaagcgcttgcctcggcctcccaaaatgctgggattacaggcatgcatcactgttcctgtctgtatcatataattttaaataataaaagcagcctctacaactaggcagcatggtcttaagtctattttttaaacatagaaaaagagccaggaaggaaatgtaaacaatgttaataatgactttgatagggaggtgggtgggatatgaaagattttttttctcccttttgtccttggaaggaaatatcacttttcagcagtagttctctgttgggatggttctaaagtggggaagatgagactttttcctttcactttgtaccttttctggtgctctgatttagagctcctcagtcttgccactgttgatattttggggtgactaattctgttgtgggggctgtcctgtgcactgtagggtgtttagcagtatccctggcctctacccactggatgccagaggcaccccccaccccagctgtgacaatcagcagtgtctccagacaatatcccctagtggggatcggtgggggcaacattgtccctggctcggaaccactgatcgaatttattatgacaacatatccctttgccacaaaaacaaatgatgggctaaccgtgtgtgtgcaggtgaagccactgctgcaggtgacacggcaggaggaggagatgcaggccaaggaggatgaactgcagaagaccaaggagcggcagcagaaggcagagaatgagcttaaggagctggaacagaagcactcgcaggtacctgtatggatgcatggctggggttgctggggaacaggacttggccccgtggggctcacccgcctcctccccaccacctgcgtgcagctgaccgaggagaagaacctgctacaggaacagctgcaggcagagacagagctgtatgcagaggctgaggagatgcgggtgcggctggcggccaagaagcaggagctggaggagatactgcatgagatggaggcccgcctggaggaggaggaagacaggggccagcagctacaggctgaaaggaagaagatggcccagcagatgctggtaaggtgtcacaggggcagcccgtggtgggtagcaaatcacttgaccctcaccacaggcctgtggaggtgcatccagggatatgtgtccctgctgggacagatgatgagacgggggcttggagagggttggtcatctgatcaaggccacacagctgggattgggactggaacacagtgagcccactctgttctattgccctgccttgcatgtgctaaccccttttctcctaacagcaagcctgaatggaggataattgtatttgttagctattgctacataacaaaacatgccaaactcagcagctaaaaataaaaagtattgcatagtcaggaatttgagagtggcttaggtgagtggttctggctgagggtccggcctgaggttgcagtcaaggtgttggctgaggctgcagtcatctgaaggctcatctggggctggaggacccacttctacttggcttattcacacagctgttggaggaggcctcagttccttatcatgaaggcctctcccctcagggctgcttgagtgtccttccaatatggcagcagagttcccccagaaggagtgatctgagagaggagaaaggaagccgcaatgccttttatagcctaatctctgaagttacattccatcacttcttcctgatttttgttgttgttgttagaagcaaatctaacccccactcaaggggaggagaattaggctccacctttttggagtcgcaaagaacttgtggatagattttaaaaccaccatggtacctactgtgctcattttatagatgaggaggttgaggttccatgaagcagagcagcttacccaggtctttattttttttttttttttgagacagagtctcactctcttgcctaggctggggtgcgatggtgcgatctcagctcactgcaacctctgcctctcgggttcaagcgattctcctgcctcagcctcccgagtagctgggattacaggagcccaccaccatgcctggctaattttttttgtatttttagtagagacggggtttcaccatgttggccaggctggtcttgaattcctgacctcaagtgatccacccacctcggcctccaaaagtgctgggattacaggtgtgagccaccacgctcaggcctttatttcttccttttaggaggctacagagttctgggcatcttcaggcctagcccctgtattcattagtccccagatcaccacgagagtaaatctgttataaccaaagctgttactcttttccctccacaacaaaggaccttgaagaacagctggaggaggaggaagctgccaggcagaagctgcaacttgagaaggtcacggctgaggccaagatcaagaaactggaggatgagatcctggtcatggatgatcagaacaataaactatcaaaagtgagtaggggccgggtgcagtggctcacgcctataatccgagcactttgggaggccaaggtatgtggatcacttgaggccaggagtttgagactagcctggccaacagggtaaaactccatctctactaaaaatacaaagattagccaggtgtggtggccagtgtctgtaatcccagccacttgggaggctgaggcaggagaatcacttgaacctgggaggtagaggttgcagtgagctgagatcgtgccactgcactgcagcctgggtgacagagtgactctgtttcaaaaaaaaaaaaaagtggaatcaagtttctgcattaaaaacaacaggcttaccaggatcagggagattttggggatttgggactttcagttctcaaagcagaaaagcccttagaaaaccaggacaagctggtcaccgtagtcagtagtcactaaccagccccacctgcttttagttctttgagctggatgtcagcttggcccctactgtgagccaggctctgtgttagatgcaggtatgcatggtgaaggaggacccttcccttgtggggtttatactgtagtgagatggcaaataatcgtcatttaccatggtgatcagggctctgaaggaaacgttcaccatattttaagagtgcggcaggccgggtgcggtggctcatgcctgcaatcccagcactttgggaggctgaggcaagtggattacctgaggtcaggagttggagaccagcctggccaacacggtaaaaccccatctctactaaaaatacaaaaaattagttgggtgtgttggcgggcgcctgtagtcccagctactcgggaggctgaggcaggagaatcacttgaacgtgggaggcagaggttgcagtgagctgagatagcaacactgcactccaccctgggcgacagagtgagactctgtctcaaaaaaaaaaaaagaatacagcagtgggggatagaggaagggtattcatagaagacttcctggaggaggtgacatttaagcagaaacttaaagatgaaggagcagttagaggggagtagaagagcatctcagctggttggcccactgtgcaaaggccctggggcagggaagagctggccagtggcaggaatggaaggagggtacctttagctgaccatacaatatgagggacaaactggcacgagatgagaaatggccagtttttggaaattgttatgggacttctctttaccatttaaaactctagttgtattttgttataatgtgggtttttctttcaactgtttacatggaaatcactaaaagtgaaacatagattctagagaaaagaaaaatcctaaagctatctctttctctttccccaaaaaggaacgaaaactccttgaggagaggattagtgacttaacgacaaatcttgcagaagaggaagaaaaggccaagaatcttaccaagctgaaaaacaagcatgaatctatgatttcagaactggaaggtaaaccagctaccaagagatttatttttattttattttattattttttttagagatgaggtcttgctctgttgcccaggctgcagtgcagtggtgcgatcatggctcactgcagcccgaaactcctaagctccagtgatcctcctgcctcagcctcctgagcagctgagactacaggcgtgcatcaccacacccagctaatttttttttattttttattttgtagagatggggtttcactatgatgctcagtctagtctcaaactcctgggcccaagcagtcctcccaccttggcctcccaaagtgctgggattataggcatgagccactattcctgggcttgaatgggtatttttaaaagcaggaaaatcagaaaggaaatttgaggatggcagatcatcccatgagtgacaactaactctatgccacctctcgaaatcacccttagtcatcacatgcactaataatatgataaaagggctgggtgcggtggctctcgcctgtaatcccagcactttgggaggccgaggtgggcggatcacgaggtcaagagttggagaccagcctggccaacatggtgaaaccctgtctcaaaatacaaaaattagccaggcgtggtggcgggcgcctgtaatcccagctactcgggaggctgaggcaggagaattgcttgaacccgggaggcggaggttgcagtgagctgagattgcgccactgcactccagcctgggcaacaagagcaaaactccatctcaactaataataatattatgacaatataaggtgctgttcatcgggagataatggtccagaccgtgactatgatggttactgattgggggatgtgttcatctcctccgggtaaaatgcctgggcaggaaggctcatttccgggcatctctctggggcctccccttcctgaagagcaccttggtttttgcagtgcggctaaagaaggaagagaagagccgacaggagctggagaagctgaaacggaagctggagggtgatgccagcgacttccacgagcagatcgctgacctccaggcgcagatcgcagagctcaagatgcagctggccaagaaggaggaggagctgcaggcggccctggccaggtagcggggctggcaaggggcatttgctgtgtgtccatgtatcccctgggcccctgctcattcgctcattcgcagtggctgtcttggtcaaggcggccccaggcccttggcatgaacttcgtttcccaggccaggcctcccacaagccttctcgaccctgttcactcccccagatcctcaccttcgactttcttctcttccctgcaaacacatcatgtctttgcagttgatctcacctactcccatggtgttgctgctgcctcttcgacatccaggcttttctcatctagacccccttctgaatttccgattgcccaatgagtcaatttccaccgtcatctcaaacacccctgtctaaggcgggaatgaccttcctttccccagcccctccctctaagggccctcttttttgtgaacaccaatctcctcctttgtttctgccgacccacagcaagcagcaaccttcagattctgccagtccttctaaatgtcccccacccatttcctctggtttttccctcttcctggctcttagctggatttacactaatgctaatactgcagcagccactatgaatgattatttacctgctcactcggtgctaagttcttttcaagcaatacctttgcagacacctggccaggtgtactgccggtgtctttgaggaggaagctgagcctcctaggggtaacgcaacaggagcaatgtcattgcttctaagaggcagagctgggatttaagcctcaaagctttctgattgatcccctggcctggctcttttgtcggccaatttgtgctatgttgacagtgctacggtgatgaagggaaagcatctctctggggcaggaacctgctcacaaaactttgctggctggatgcagtggctcacgcctgtaatctcagcactttgggaagccgaggtggggggattgcttgaggccagcagtttgagaccaacatgggcaacatagcaagaccctgtccctacaaaaagttaaaaaatgagccaggcatggtggtgtgtgcctgtagtcccagctactcaggaggctgagatgggaggatcacttgagcccaggaggttgaggctaaagtgagctatgatcatgccactgcactccagcctgggcaacagagcaagaccctgtctcaaaacaataataacaacaaaacaaaaacctaacttcactggcttactagggaaaatccagtttccttagcctcaccctcagagcccatccaccctctgcagtctcaccccaacccaactatttcactttctctcttgttgctgccctttcacaagtacagtaaaatcaaagtgcttgcctctcctgcagcattctgccatttaacagggcttcttgcagcccaccttgatctctggtcaccacctccaccagatgcagagccccagtctgaatatcccccgcaagcagtggctggccaaatgctgtgcatggggcgggtactcagtcactgagcaaatgcagaaagaacagacagttgccagggaagaagaactgtccaacattcagaaagcatctacacagtccctactgtgaccaggtaccttgccagtctggggtcaatgctttgcattcttgcacacacatgcacacacgtgcatacacacgtacacacacccatgcacatgtacaacctgttttgatgtcagaccttggcactcacatcctatgttaatctcatatagtctggcatgtcaagaagcagacctggggacatggatagaaggtgtttgatgtctctgcaacataactgtctggtcccagaaaagtttttggccacattgtaagagaggaaaccaagggacctgggggttcattctgctgggtctctccctggaaggcttgacgatgaaatcgctcagaagaacaatgccctgaagaagatccgggagctggagggccacatctcagacctccaggaggacctggactcagagcgggccgccaggaacaaggctgaaaagcagaagcgagacctcggcgaggagctggaggccctaaagacagagctggaagacacactggacagcacagccactcagcaggagctcaggtgaggggcccatcaatcccaccatcctgctatcccactgcaccaatgggatgggggcagaagaggggacaaacccaaagcaaatcgtgcatcagcccctgtgcatttaccttcctggccgcggtttgctttaacttatagaagcatggttggctgtttcttttttttctttcttttttttttttttttgaggcagtctggctttgttgcctaggctggagtgcagttgtgccatcttggctcactgcaacctccacctctgagatttaagcgattctcatgcctcagcctcctgagtagctgggattacaggtatgtgccaccacacccggctaattttttgtttttagtagagatggagttttgccatgttgcccaggctggacttgaactcctggcctcaagtgatccacccacttccgcctcccaaactgctggtattacatgtgtgagccactgcacccgaccctcatcatcttatttctcatcagaagagtagtatataccagggatgtacaatcttttggcttcccttggccacattggaagaaaaagatttgtcttgggccacacataagatacactaacactaataatagctgatcaactaaaaaaattttacaaattggaaaaaacatctcatactgttttaagaaagtttatgactctgtgtcaggctgcattcaaaaccatcctcattggtaagcttggatatactcagagaacaatttgaaaactatagaaaagcagacataaaaaaaaatcacctttagggtcgggctcacgcctataatctcagcactttgggaggccaaagacaggtggatcacttgaggtcaggagttcaagaccagcctggccaacatggtgaaaccctgtctctactataaatccaaaaattacctgggcgtggtggcgcatgcctgtaaatcccagctactcaggaggctgaggcagtagagtcacttgaatctgggaggcagaggttgcagtgagctgagatcgcaccatcgcactccagcctgggtgacacagtgagtgagactccatctcaaaaaaaaacaaaaaacaaaaaaatcacccttagtcacaccagttaacattcttgagaaattccttcctgtctgtgtgtgtatcagtcagtccccaagctccaattcccaagtatgtgtgtgtatcacttttgtgttaaattttaaaaataaaattgatcagattggttttcaattgaagattcacttcaaatgaacaaacaataacaaactgcctgccagatcacgaatcctgactctagtgaaactaggtcattgattcattcagtaaacacataaatgtattttgatgcaatctgtggtgttggcatagcatgtatcatagcatatagctatgctagctgtgccaacaccatataccctggggtttacttcccccactttgggttttgtgcagtgtcacatgcacatagagcacagcgttctgctcccttgccgcttggcctttgatacagaagagcccagtgcatgggccaggtatggtggctcatgcctgtaatcccagcactttgggaggctgaagcagacagatcacctgaggtcaggagttcgagaccagcctggccaacatcatgaaaacctgtctctactaaaaagacaaaaattagccgggcgtggtggtgggcgtcggtaatcccagctacttgggagactgaggcaggagaatcccttgaacctgggaggcagaggttgcagtgagctgacatcattccactgtactccagtctggacgacggagcaagactcgataagaaaaacaaacaaacaaaacaaaaaaccaggctgagtgcggtggctcacacctgtaatcccagcactttgggaggctgaggcgggtggatcacctgaggtcaggagttcgaaaccagcctgaccaacatgttgaaaccccatctctactaaaaatataaaattagccgggcgtggtggtgggcacctgtaatcccagctacttaggaggccgaggcaggagaatcgcttgaacccgggaggtggaggttgcagggggccaagattgcgctgtcgcactccagcctgggcaacaggagtgaaactccatctcaaaaacaaacaaacaaaaccatggactcaaggtcaaggtttagcttctaattctggctccatcacacaatggctgtgacaccatgggtaaaactgcttaccctctcttagccttagtttcctcatttgtaaaatggaaataataacacacctgcctctttgggttgctctgaggattagatgatgtatataaaaaacttagctcagggcctggcatatagtaactgctcattaaataagagccaacattaatatttaagcaaaattttgcagttcacagacatcctttcaattctattactttgtgtatttgtttgccagtcattacagatgtcctaggcaggtgatatgctccacattttgcagctgaggaaattttaggtccagagatgttaggtgaatgacccaaggtcacacagctagagaggggtggtgatgaggactgcagctctgggtcctggaagagctctcattcttttgcacggcactgagatgaccctctgtctccacccaactgccattcactgtgttcctcccaccaagggccaagagggagcaggaggtgacggtgctgaagaaggccctggatgaagagacgcggtcccatgaggctcaggtccaggagatgaggcagaaacacgcacaggcggtggaggagctcacagagcagcttgagcagttcaagagggtaatgctttttggtgatgctttttggtgatgacacataagagtgacatcagcagcctcaaattactacaggtcagggtctgcataaagacaaaaaacaagttacataagattctaatgatgatgatagcagcttatatttatttacaaaatgcttcccatacaggctgggtgaggtggctcacgcctgtaatcccagtacttggggaggctgaggcgggaggatcgcttgagctcaggagttggagaccagcctgggcaacatagtgagaccttgtttctactaaaattttaaaaaagtaggccaggcgtggtggctcaagcctgtaatcccagcactttgggaggccaaactgggtggatcacctgaggtcaggagttcgagaccagcctggccaacatggcgaaaccctatctctactacaaatacaaaaaattagccgggcgcggtggtgcatgcctgtaatcccagctactcgggaggctgaggcaggagaatcacttgaacccaggaggcagaggttgcagtgagcagagatcatgccattgcactccagcctgagcaacagagcaggattccatctcaaaaaaataaaataaaataaaatattggccaggcctggtagtgcattcctgtggtcccagctatttgggaggctgaggtgggaggatcgtttgagcctgggaggttgaggctgcagtgagccctgtcatgccactgcactctagcctggacgacacagtgagaccttaatcaaacaataaaaataggctgggcacggtggctcaccatgtctgtaatcccagcaatttgggaggcaaggcgggcaaatcacttgagctcaggagttcgagaccagcctggccaacatggtgaaaccccatctctaccaaaaatataaagaattagctgggtgtggtggcatgtgcctgtaatcttagctactcgggaggctgaggcaggacaatcacttggacccaggaggaagaggttgcagtgagctcagatcgtgctactgcactccagtctgggcgacagagtgagccgccatctcaaaaaaagaaaaaaaaaaaagaatgaatagaaatgcttctcatacagtatgtcaattaatcttcacaaccaccctgtgagacgtgtactattaaactcattttacaagcaaagaaactgaggtcctaggtgcctagaggtgaagagacttacccaaggtcacactgctggtaagtgacagagccatgatttgcacccaaacagtctggtcctagaccccactttctggcctctacaggactgaaggcctataggatgggtggggcctatcaatatactgcccttcagggataagcaaaggtgtaacaacactttcggggagatttaaatgaaacttaaaactgggatcattctatccactttaatttctctgcagactggaggaaggccaggcatggcggctcatgcctcccgtaatcctaacactttgggaggccaaggagggaggattgcttgagcccaggactttcagatcgcctgggcaacatagcgatttttcttttgtaaaaaaaaaaaagactggaggaaacttgtcattatttgatttcaatggcagaacagctctctccggcataatttgagaatgactaggtcaaatcactctcccgttgttggaactctttgcggtgtatgggagtgggagctggtaaatagcagtaccgaatgctgaatcttgggtgctcttctctcctttggggtagtgcctgtgcttcattccccagggtaagttttttagcttgcgaccttcggccagattgttttcctgaaagcctgagttacattaccctcagcgttgcagctcctccacatccccttcagtggaagcttttggttctgctagattaagtgggtgcagcattgcctaaaaattttggggaatttgcatttggttctatcactagtgtattggtccgttgttgcactgctctacagaaatacccaagattggattatttgtttattttttgagcagtggagtcttactctgtcactcaggctggagttcagtggcgtgatcttggctcactgcaacctccacctcctgggttcaaatgattctcctgcctcagcctcccaagtagctgggactacaggcacacaccaccatgcccggctaatttttttttttttttttttttttagtagagatggggttttgccatgttggccaggctgatctcgaactcctgacctcaggtgatccacctgccttggcctcccaaagtgctgagatgacaggtgtgagccactgcaccaccctgagattgggtaatttctaaagaagagaggtttaattggctcacggttctgcaggctgtacagaaagcatagcagcttctgcttctggggaggcctcaggaaacttaccatcatggtggaaggcaacggggaggcaggcatgttttacatgaccagagcaggcagaagagagagaatggggagctgccagacacttttaaacaaccagatctcatgagggcagcaccaaagggatagtgctaaaccattagaaactgcccccaaaggccgggcgcggtggctcatgcttataatcccagcactttgggaggctgagataggcggatcaccaagtcaggagttcaagactagcctgaccaacatagtgaaaccccatctctactaaaaatacataaaattaggctgggtgcagtggctcacgcctgtaatcccagcactttgggagcccgaggcaggcagatcacctgaggtcaggagtttgagaccagtctggccaacatggcaaaaccccgtctctactaaaaatacaaaaattagctggacgtggtggcggtcgcctgtaatcccagctacttgggaggctgagacatgaaaatcacttgaacccaggaggtaaaggttgcagtgagccaagattgtgccactgcaccccagcctgggcaacagagtgagactcagtttcaaaaaaaaaaaaaaaaaattatggttggaagagtgaggccccagacagaatcactgaccctccccatgcttggggttcattagacgtgaacaggagctagaagccaagcccattcccagccaggcctctttgggaagacgcagttattaagaccaccagcagacggcatgtccattactgacccgcacaaagcaggtagaggtgcaaacctctgcccatctcaggtgcagggaaacagaggcctttgcctctaacaacttgaattctgatgtagagacctggttccatctgcttgtgggggaaacgtttaacatcagctcctacctgggctccccaggccctcgtgcggtttggccccagttctggggtcttaggctgggctaaggtttctgggagcccatgtcccctagggtccccgcttcactgctttgttaccaccaagagactccctgtccccatctgaggtctggcagctcttagtcatgtcttggagggaggacgggcatccagggctgaccggtcaacgtccagcacctcccagggactatgggaagactgagtggtgggtctcgtcctctcgggatacttgcgcttctctttccccttctctacaacctggaaagaagcccctcaccgcgtcctacttttgcccaacacgcttttttttttgagacaaagtctcactctgtcgcccaggctggagtgcactggcgggatctcggctcactgcaacccccgcctcctgggttcaggcaattctcctgcttcagcctcctcagcagctgggattacaggtgactgccaccatgcccggctaatttttatatttttagtagagacggggtttcaccatgttggccaggctggtctcaaactcctgacctcaagtgacctgcctgcataggcctcccaaagtgctgggattctaggcctgagccaccgcgcctggccccaacacactttttttttcctgtagggcaactcacatgcctacaggagctggttccataaaataagtttcccttaactaggacagaagtagcagtgtcaatcacacgacacctgtgaaggacgggggcggtgaaaggtgactgccccacctgcagagccagccgctacttagatgtggcagattgttgccttgaaggaaagcaagaccctctgtttccagatctttcgttgttgttggttttttgtttttgtttttaagtttaggattactgaggcatatgtagtaaaatttatccattttactgctccattaattttaacaaatgtgtattgtgtaactaccaccaccacagtcaccacatagaatgttagttattgattgattgattgagatggagtctcactctgttacccaggctggaatgcagtggcatgatcttggttcactgcaacctccacctcccaggttcaagcaatacttgtgccttagccaccccagtagctgggactacaggcgtgcgccaccatgcccggctaatttttccatttttagtagagatgcagtttcgccatgttggccaggctggtctcgaactcctcacctcaagtgatccacctgccttggcctcccaaagctacttatttctgaaacagggtctcactttgttgcccaggctggagtgcagtggtgtgatcatagctcactgcagcctccaattcctgggctcaagcaagcctgccatccgcctcctgagtagctgggattgctggtgtgtgccccccacacccagctaatgttttattttagtagagatgggggtctcactacattgcccaggctggtcttgtactcctggccttaagcgatccttctgcctgcttcccaaagtgctggggatgacaagtatgagctgccatggcatgccttcaaacattaaagttttttgaaaaagaagctgggaatccagatttttatgtgacatttattaaaatgtcggcaactcatttttttaaaagtagtgaaagggtcaaaggggacatgtcagcaggttggataccgcttgtgggattccagattgcaacccatgagctttaggaaaatagaatccaaaatatcagctgggtgcggcagctcacgcctgtaatcccagcacttagggaggccaagatgggtggatcacttgaggtcaggagttcgagagcagcctggctaacatggtgaaacctcgtctctactaaaaatacaaaaattagtcgggcatggtggcgggcgcctgtaatcccagctacttgggcagctgaggcaggagaatagtttgaacctgggaggcggaggttgcagtgagccaagattgtgccacggcactccagcctgggtaacagagttaagactccatctcaaaaaaaaaataacaacaaaaaaaccccaaatctcttactggtgattgtgtgccccctgttgtgtgccttcctggacctctctgagggaggaaagggcagggcctgaaacgttctcccggccacagcctccctgttatccctcccctctgcttccttcgccaggccaaggcgaacctagacaagaataagcagacgctggagaaagagaacgcagacctggccggggagctgcgggtcctgggccaggccaagcaggaggtggaacataagaagaagaagctggaggcgcaggtgcaggagctgcagtccaagtgcagcgatggggagcgggcccgggcggagctcaatgacaaagtccacaagctgcaggtgaggaggtggcgcggtggtgtggtgggcagtgctgggtggtgcccagttctgtggggaggagcctcttcccggctcgctgaggtctctcttgctgcaaggcaagtcctttcctctagttgcgttcctggaggagaggcgatgatctccctgttcaattaaatattaaaaaaaccttctggccaggcacggtggctcatgcctgtaatcccagcactttgggagacagaggtgggtggatcacctgaggtcaggggtttgagaccagtctggccaacatggtgaaaagtctctactaaaaatacaaaaattagccaggcgtggtcgtgggcacctgtagtcccatctactcgggaggctgaggcaggagaatagcttgaacccaggaggcagaggttgcagtgtgcggagaccgcaccattgtactccagcctgggctaaaagggcaaaactctgtctcaggaaaaaaaaaaaaaaagaaaaaaaacccttccttttccaatttgataagtatttattgagcacctgctgtatgccaggcactgtgcttaatcctgagatccaacagcaaggaagaagagacactgtcgctgccccagtaggactccagccgagtaaggggaagggaagggaagggaaagacatgaataatcacacaaatgaatgtcaaatgatgcagcaaagggaaggcacatgatgcccaagtgtaaataaccagggggcctaacctgggggaggaggagccacgaaaggcttccctaaggagcatggataagtctaccaggcagagggaacagcgtgtgcaaaggccctgtggtaagtagaaaaattaggagagagacatacagccagtagagctggagtgcccagctggggttgggggtagggggagatagtacagagtggggttggagggggagcttgtacccagatgatgtagggcttttgagaacctattacatgtatgttgatccttactctgggcaatgtgaagctgttgaggggttttaagctgctgaatgacatggtctttttgtctttggtcttctttcacttggcatagccatttaccctgccttgccactcatggggacgtggccaaagttttcacaaatgtttaacatgtccacagccagggaccaaggggcgagggaagaattaagtgagatgtttttttctcacatgcagttgagagcagggcttttgccgccctcatataagcagtgtcaagatcattcatatcctccttgtcaatggaagagatggaggggtaggctaacagcctcaaagggacttatgcagagacactagggagtaaaagccagagaatacagagaggacgtttttacctttagggcctgcgtctctggctttggccatcagggtcaaagagtaggagtgaggaaggaagggatgggacagcatccctgggacgttcaagtaccatcctggtctcccttctccagccttagagagtggaccagccagagcacctcgtctggactctcagacctgctgctttgtctctaccaaccttggcagggatctaggatccatttagtgggatcaggtcccagtcaataccattggggctcaaataagttcttagaaccacagagtctagggccagggtcccaactcataggtgacggagttcccttcaagccacagattctgttttttttgtgtgtgtgtgtgtttttttttttttttatcagagtcccatacctcacgggtattttctcaatcagtgaacacctcaagtactagcccatgtgttttgagtaaaaagggctcctttcaacgaggatccccttctagaggctttgactaaccagtctcttggcacccttagaatgaagttgagagcgtcacagggatgcttaacgaggccgaggggaaggccattaagctggccaaggacgtggcgtccctcagttcccagctccaggacacccaggtgagtgtcctgccacatcatccaggggacctggggggtggccttcctcggggcaggtccctgggacctctttgcatcccttttgcaggagctgcttcaagaagaaacccggcagaagctcaacgtgtctacgaagctgcgccagctggaggaggagcggaacagcctgcaagaccagctggacgaggagatggaggccaagcagaacctggagcgccacatctccactctcaacatccaggtgcctgccccgtgtccttgcttccttcatgggtcctctcaacttctctgcgctgagatcccccgcaggcagatcgcggtggagtgttggtgcgatggtgcttgaccccccagcttcccctgctattgggtttctccaacgaggagacatggtcttcgcttctcagagtctgtggggccagggacaggggccactcatggtccccctctcaccctaccctggacgctgtccttgtagctctccgactcgaagaagaagctgcaggactttgccagcaccgtggaagctctggaagaggggaagaagaggttccagaaggagatcgagaacctcacccagcagtacgaggagaaggcggccgcttatgataaactggaaaagaccaagaacaggcttcagcaggagctggacgacctggttgttgatttggacaaccagcggcaactcgtgtccaacctggaaaagaagcagaggaaatttgatcaggtagagggcgtggggtgtcccccactctggccatggacgctgggttggggaatcagctctgcagagtatgacgcgtggctctggcctgtgcctgcatcccctctccactctgtggggagccatgggaggctgtcttatcttgtcttgggcgaccatggagcattaacgctaccaggtcacagtaaggatggcaaagaagccttgatgactgtgacttttctgggtaccagcaccatgagggtcacctgcacacatggtgatgccttagtttctagcctgaagaaggaatgaggtgcttatttattcactaaatgtatttactgaatacctattgagtagtattccaagtaattcagtttctatacttttaataccactcttccctaagatttcattctgtaaaattccaagtacacagcaaagttgacagaattgtacggtgaacacctttaaggccaccacctggattcagtcattgacactgtattatatgaactttatcagatacttattttgagacaggatctagctctgtcacccaggctggagtgcagtggtgtgatctcagctccccgcaacctccaccactgggttcaagcgattctcctgcttcagcctttcatgtagccgggattataggagcacaccactatgtctggctaatttttgtatttttagtagagatggggttttgccatgttgtccaggctggtctccaactcctggcctcacatgatctgcctgccttggcctcccaaagtgctgggattataggtatgagccactatgcccggcccacatatttatttataaagactaattctatctatcatgccttatctcttgggtacatttcagagcaaattacagatgtcagtacatttccccttccacacctcaacattgcatattaattagagtttatttttaaacacaattttgcttcttttggggtaaaacttacatgtgatgagattcacaaatcttaattgtacgataaatggagacccctgtatgacccaaacccctaaataccaacttttaagatacattattatttagtaaatatgatttagtttacaagtgactcagggttattctaaaaatcagtttgagaggccaggcacggtggctcacgcctgtaatcctagcactttgggaggctgaggcaggtggatcacttgaggtcaggggtttgagaccagcctggccaacatcgtgcaactttgtctctactaaaaataccaaaattagccgggcgtggtggcgcacgcctgtaatccctgctactctggaagctgaggcaggagaatcgcttgaacccagggtggggtggaggttgcagtgagccaagattgcgccactacaccccagcctgagtgatggagtgaaaaccctgtctcaaaaataaataaaatgaggattgtacagtgaggctaaatgccagatgcctgcaggttccctacccctccctgactgacctcctagtgtcaggattctagataacatcccagtttctcctcttcccatcagctacctctcctctgggctgtcagctcatcttcaatgcttcgttatctggttgaaggcctgaggttgcttttattttcctgtcacatagagtgtagtgcagtggcacacatagtgtgggatttttgtgttgactgtgccatttagaggtccctgtctttgctgaatactggaagtttggcttttggatgttacaatttataatctgctctgttctctctgaagatgagattaacgtgagcatggaatgttctctgagttgcttctccaagcagagagatatgtgtgcagggccacccatgcttaccatttccctactgaggctcttaggatacttttgtaagatattaatagctacttgtggccatgaaacaaactaataactagcttctggcagctttaaatctcactttgacctcagtgtgctctaagcaacgtgggcaggtctagtggtttcgaagcacaaggatttggccaggtgtggtggctcacacctgtaatctccgtgctttgggaggccgaggcaggaggctcacttgagggtcaggagttcgagaccagcctggtcaacatggcaaaaccacatctctacttaaaatacaaaaattagccaggtgtggtggtgggcacctgtaatcccaactactctggaggctgaggcaggagaatcgcttgaacccacgaggcggaggttgcagtgaaccaagactgcaccattgcactccagcctgggtgacaaagtgagactccatctaaaacaaacaaacacacaaaccaacaaaaaaaaacaagtcagctgatttctggctctgcataaggttgatgtagaagtcagaacgccagatgattatataaattactcccatagctaacctacactgcttacacctgcacctcaatacattcagcaggacacagggcttcccccggtatttacaattcagtgacgctgaccccggatatgcctagaagtcacctctgggtcttgtgttgtagttgttagccgaggagaaaaacatctcttccaaatacgcggatgagagggacagagctgaggcagaagccagggagaaggaaaccaaggccctgtccctggctcgggcccttgaagaggccttggaagccaaagaggaactcgagcggaccaacaaaatgctcaaagccgaaatggaagacctggtcagctccaaggatgacgtgggcaagaacgtaagtggctctgggtggtttttctcgtccatgtttcgcctgcccaccctctgtgctattcaccagtccatgcgaggctagctcctggcctttttcatagcgaactatcatcggaaatggaaggaggtttttggactggtgcaggggctgggaggggctgagaatggcagtcgaggatgggtctgagttggggggtccgaggataaggctggggtctgaactctcaggggtcatcttgagtcccggccatgcatcctgtgggaggccaaagccacctccctgatctcctgaggtgccgctcacggtgggtttctcaatcgtcttcatgaagttgagcctcatagaatggggctgcccgctctgccggcaggtccatgagctggagaagtccaagcgggccctggagacccagatggaggagatgaagacgcagctggaagagctggaggacgagctgcaagccacggaggacgccaaactgcggctggaagtcaacatgcaggcgctcaagggccagttcgaaagggatctccaagcccgggacgagcagaatgaggagaagaggaggcaactgcagagacaggtgcgtgctgccggggaggccagcagagggaggtcgggtggcctttttcattcctatcaccactctcatggttggtgtggaaacttcgttttctttatttttttttgaaacagagtctcgctctgtcgcccaggctggagtgcagtggcgtaatctcagctcactgcaacctccacctcctgcctcagcctcccgagtagcttggattacaggcgcatgccaccatacctagctaatttttttttttttttcagtggagacaaggtttcaccatgttggccaggctggtcttgaactcctggcctcaagtgatccattctcctgttggcctcccaaagtgctgggattacagacatgagccacccacgcccggcgtgattccgttttctcatctgcaactggggatgagatgcccacctcacaagggggctgtgctggggaaggggtgcagtgatgtgctgcctaggtgagccaaaggacctcccaggggcaagtggggcagcacacatctctattcctcgcccagcttcacgagtatgagacggaactggaagacgagcgaaagcaacgtgccctggcagctgcagcaaagaagaagctggaaggggacctgaaagacctggagcttcaggccgactctgccatcaaggggagggaggaagccatcaagcagctacgcaaactgcaggtgggtgacactaggagcttggggcatgggtggagggagggcacagttcccctcaggccaccgaagtcagcagagcgggctccaggaagcaagcctgcacctgccattggtgtgggttcagctggggtttttctggaaccattcaggatttggtggctgtctcctgccctgggtagggcagcattattaggtatttggccactgccctcagatcacatcaggggctcagcttctcaggcaggtctgtggagcccacccagaatggtgctcccagcgcaccaccagccacctggaactgagagccatgctcgtgcaatgggaacttctttgtggtcaactgcagaaaatccaaggggtgggtgtgcaaagctgaactgggcagcagaacttgggggagtaaggacatctgagcttgtcctccctgttgactcatgcaggctcagatgaaggactttcaaagagagctggaagatgcccgtgcctccagagatgagatctttgccacagccaaagagaatgagaagaaagccaagagcttggaagcagacctcatgcagctacaagaggtaaagcctcgccttgctaggagagcctcagatgcgggtgtcacggtagcaccccttggcagctccagtctgtgcattcccagatttcatttcgtcctcctctggggtccacctgtctagaaagacacacgcttccctcctctatgtattcacggggcctcccctgagctcagaggaagaacatgtactttcaagggtggctgagttgtcagggtggactcttggtggggcttggcctttccctggcagacaacagccttcctccctcccacctaggacctcgccgccgctgagagggctcgcaaacaagcggacctcgagaaggaggaactggcagaggagctggccagtagcctgtcgggaaggtaggaaactgaatggaggaagagggctctgaagcagaggatggggggacaggcagcatcctcgacccccattttattttttaaattttttcgagacagagtttcattctgtcacccaggctggagggcagtggcacaatcttggctcactgcaacctccacctcccaggttcaagcaattctcctgcctcagccttctgagtagctgagactacaggtgtgtaccaccatgcctggctaatttttatatttttagtagaggtggggtttcaccatgttggccaggctagtcttgaactcctgaccttaggtgatcctcctaccttggcctcccaaagtgctgtgattacaggtgtgagccaccgtgcctggccctggacccccatttcaatgctgctgctgacgaagcgtcctctgagattggggacagacccatggtggttaggttttccgtcagcgctttcatgcctgtttgggggtgtggctgctttcattcattcccaataagtagctgtgtggggagaaggggaggccaggaagagtcagggaggagtgtgctggtccccatcccaatcccagctttgctgacacggacccggcctgagtcccggctgtccacttcctggctgtgtaactacagatgagtcttctaatcttctccaagcctcagtttcacccattagatgatgagggcaatacccctgaggcatgactccaaggagggggcatcttttaaggcgggggagggtagaggcccccaccatggccgcccttcccccaggaacgcactccaggacgagaagcgccgcctggaggcccggatcgcccagctggaggaggagctggaggaggagcagggcaacatggaggccatgagcgaccgggtccgcaaagccacacagcaggtgagggccgcctggacaccacagtcacgctgcctactgtctctcctgcagcaggatcctgcaccagtcaacacacgcgtggcggcttcctgtgtgcaggccctggattgagggacaagagggtggtggggcctgagagtagagatccagggcccttacaccagtgcccaggctgctgtcttcagaatactcctctccacgctgcagtgtctcattttccagccacggcgtggctggctccccgtacctcacggccatccctggagtccgggccttgggatgctctttcattgcgttttcccctagctgaagctctgaccttatccagtgagcccttggtgatgtcactgagcactagttccatggtgggcactagggaccatccagtaacctgcagccccttgtggtgtagggtgaacaggcatcattctccaggcgactccaggacagagaaagcaagggacaagtcactcgctcagcctgggtggcactgacacttgtggaagcacctcttttttttggagacagggtctctctgtggcccaggctggagtgcagtggcgcaatcttggctcactgcaacctctgcctcccaagttcaagggattctcctgcttcaacctcccaagtagctgggactacaggcacgtgccaccactgcccggctaatttttgtatttttaatagagacggggtttcaccatgttggccaggcaggtctcgaactcctgagctcaagtgatttacctgcctctgcttccaaaagtgctgggattacaggcgtgcgccaccacgcccggcctggaagaagctcttgagtggagttttacaggatgaaggagaggacagggtgcccgggatcaagggactcgtgcagaggccaaacaaggcaggaagaggcatggtctcagtgcgctctcttgggcttccctgagtccgcctcatggccttcactctcctccccaggccgagcagctcagcaacgagctggccacagagcgcagcacggcccagaagaatgagagtgcccggcagcagctcgagcggcagaacaaggagctccggagcaagctccacgagatggagggggccgtcaagtccaagttcaagtccaccatcgcggcgctggaggccaagattgcacagctggaggagcaggtcgagcaggaggccaggtatgcgggtgtggagttccgaacccagtttgcaggggggtgatggacagcaggagtcatagtgaagtcagggaacctcttccagcatcagttctggcttgtaagaagcaagctctgtgatgcctacagtgcaggtatgttgtgagaactgaacgtaaacacagcaaagtgccctgctggttcctggcctagggcaagcacctaaagtgtgagctgctcttagcatctccatggtcctcctgacattaacctgccttcccagcagtacatatgacttttcccagcctctgcagggatagcatgctgacagatcaaaaatccaaccaggctggacgtggtggctcacgcctgtaatcccagcaatttgggaggctgaggcaggtggatcacttgaggtcaggagtttgagaccggcctggccaacatggtgaaaccctgtctgtaccaaaaattagccgagtgtggtggcacatgcctattatctcagctactcaggagactgaggcaggagaatcactccaacgtgacacgtggaggttgcagtgagccgagattgtgccactgcactgcagcctgggtgacacagtgggacccttccacacacatacacacacacaaaaaaaaccccaaaaaacaaaagtccaaccggcagcccatttggtacacacactggaagccttcttaattatgggtcgaatgaggcatatgatcacagcacatttcttaccattggattctaaggattctcacccattctcttctagtagctttttcagtaattcgcacgccctgcaatgcacccatttaaagtgtataattcaagggctattcatatattcacaaacatgtaaaaacgatcaccacagtcattttgagaacattttcatcggctcaaacagaaaccccaggccatatgtggtatttcatgcccataatcccggcactttgggaggctgaggtaggtgggagcagcacttgagtccaggagttcgagaccagtctgggcagcatagcaagacttttttatttttatttttttgagacatagtctcactctgtttcccaggctggtgtgcagtggtgcgatctcagctcactgcaacctccgcctcaccctcccaagtagctgggactacaggtgcacaccactgtacccagcttgtaattgtattttttagtagggatggggtttcaccatgttggccaggctggtctcgaactcctgaccacaggtgatctgcccacctcggcctcccagagtactgggattacaggcatgagccaccacgcctggccagagactccgtttctatgaaaaacttttaaaagtctgagcatgctggtgtacgcctgtagtcccagctacttgggaggctgaggtgggaggattgcttgagccaggagttcaaggctgcagtgaactatgaactagggtgaagagcaggcattggagcaccactgcactccaacctgggtcacacagcaagaccttgcctcctccccgcaaaaaaaatagaaaccccatgccctgtaaccactcccttcagtccctggcaaccataatctactttctgtctctatgaatttatctattctggacacttgatatcaacggaatcacacactatgttgtctgctatgtgtcttctttcacttggcaagaattccaggctcatccatgctgtggcatgcattgatactttattccttttcatggctgaatactattccaccatctgactgattcttgagaggagtccagatacggggctcaggaaagcactcaagatgccacctccaggtgacacaccagctacaaggggtgccaccctccgctgaaaccacctgttttccttgctgtttgcagagagaaacaggcggccaccaagtcgctgaagcagaaagacaagaagctgaaggaaatcttgctgcaggtggaggacgagcgcaagatggccgagcagtacaaggagcaggtagcccctgccacccagcctccctcgagcccccagcccccagccggcctcccctaaccacccctccaactctccgcgacaggcagagaaaggcaatgccagggtcaagcagctcaagaggcagctggaggaggcagaggaggagtcccagcgcatcaacgccaaccgcaggaagctgcagcgggagctggatgaggccacggagagcaacgaggccatgggccgcgaggtgaacgcactcaagagcaagctcaggtgaggagcccgtggcccgggaggaccccgtctctcaggccagagaaaagcactgggggctcgggctcctttcggcctgcaaatgccccttgtgcccacagccgccactcccttctgtggtttattcctgcttctccttaatcactaagcttagtgtgggccaggcactgagatcagacccgggccctgccttgcctggtagcagctaaccttctagatcctttaacgatcgaccgtctcccatccggtcctccggctgaggaggaggaagaggctatccccactgtctcctccagcccctccttcattgcatcactgagtcttcacgacatccattgaagctgcaacaccaccccccgccacttcacctccttcctgacatgctctgctcctcctttctccccctcagcactgctgccatctgggctgcattattctcgggtatgggggctgtccgacattccccatcagaaggaaaaagatccctgaaaagtagcaggtgcttacatttctggcctctacccaccggctgcagtagtcccccaccaccctgcaatgtgacaaccaaaaatgtctctagatgttgccagaagtcctctagagatgggagggtacgactgccaccccgctgagaattcctgctgtcactggagtgggggctgttttctctcccatgcctctggtaccttgggggtcccccctgctcccaagggctgcttccaccaccctgtccatccatcccgattggctcccaggaggttttagctccgggcttcctgtctcccacaccactcctcacagttctccatgatttcaacatccaggtgggcgacgcagcctctcggttccttgaccctctgggtgatcctgctgcttctaccgggccaaccagtactcctaggagccctcacaatttgaccctcaggcatcccattgtctgcctggtgccacctttctttggctctgtccccaacggggtcttcactccattaatgccatcagcctctgacccagctccaaaccagctgtctagtaacccccgtcgcgcatcctcaacatccggttccccctcttgcattgctgcaatcatttggtgaaagcacaacccaaatgaaactcaagcttggctgggcacgggactcacacctataatcccagcactttgggaggccaaggcaggtgaatcgctttgagctcaggagttcaagagcagcaagaccccatctctacaacaaacaaacaaaaatcagccaggtgggatggcgcaaacctaaaatcccagctactcaggaggctgaggtgggacgatcagtggagccccagaggtcaaggctgcagtgagccatgatctagccaatgcacttaccctggatggacagagtgagaccctgtctcaaaaaacccaaaacccactctccaccttttcccacagagcaggccttgctcaggggtcctcccacacccctccctcatcttctcactctctgctgcttttcactttttctttgaacttatgatcgctcctccccattctctctcagctggggaccttacttcctacttaactcaaaagcagaaatgatcatgaaacgtgcacaagctcccactgcctcatcatcctacctccgtgcacctctgtacacttctattttttttccatttctatgctgaaccctctggcaccaaccgaggccaacacctccattggacccgaccctcttgttcactcaagcacatagctccaaaaatccttattttgcaaggttttctctttcatttgctccatcagcaaatggaataacctcttagccccatgtctaccttgctacccttactacaaaactggatgtgaatgccgaaaccctgtctctaccaaaaaatataaaaattagccaggtgtggtggtgcatgcctatagttccagctactcaggaggctgaggcacaagaatggcttaaaaccgggagagagaggttgcagtccagcctgggtgacagagtgagactcggtctcaaaaaaaaaaaaactgtatgtgaagagttgctggttcccctcgcccccacccatcactctcccagaagcctcccatgggtgacactaatggccagaggtcccctgacagggcagcagcacgtgacgcagtccatcatgcctctggcctaattcacttgcttccctggacttccccgacaccatccacacctgcttgtcccccgacctgtggggttgtccctcttcctctcctctgctgatccctcacctcgaaacctgcttgccactagaccgccccagggtatcaacttagttctcttttgggcagagtcttgctctgttgcccaggctggagtgcagtagcactatctcagctcactgcaacctctgcctcccagttcaagctatttttggcctatttttatatttttagtagagatggggttgcaccatgttgcccaggctggtcttgaactcctgatcttgtgatccacccgcctcagcctccccacgtgctgggattacaggcatggaccactgcacggccttagttgttttcatctctccccagcgctaggtgagaggtctcaactaatcttggcgctttagaattccatgtatatctaatgactcctcagttcatctctgagaagccctagcttcttcctagaacctcagaccaccctcccgttcccacatggatgtctaataggcagctcacaccaaacatgctgcaccccaagtcctgactgaaactcttcacccccaaactggctcctctctccagctcagcagctaaaatgatgaagttgccaacaattcacatcacaaacctcgtggtccttcttaacgttttggtctcctttataccccacatcccatctatgggagaatctggtcaactttccctaaagaatcctgcccaggctgggtgcagtggctcaccccttaatcccagcactttgggaggccaacgcaggctgatcacctgaggtcaggagttcaaggccagcctgaccaacatggtgaaaccccgtctctactaaaaacacaaaaattagccgggtatggtggggcgtgcctgtaatcccagctactagggaggctgaggcaggagaatcgcttgaacctgggagacacaggttacagtgagctgagatcgcaccactgcacttcagcctgggtgacagaccaaaactcggtctcaaaaaaaaaatctccagtgtctaggacagcaccaggcagagtgaacctttatccctcgggtcctagatattttccccgcttcattctcataccaccacagccatgtgctgagcctcttactacctttaataccaatgacttgatcttttaacagttttaatcatacatgaatataacggcaaataaacatacctcctctatatttttaaaccagcatcacctctatcaactggttacgatgaaagtaatatgataaaaatagtatcaagttcaatatctagctattgtggccacaacttgatcaccaagacctgaagcctacttctccactaaaaagggagtgacaacagccattagcaccaaatagactctctctgacatcataattagacttgtttaaaaagagttggaaaggaaatgactttctcagggcccagttcagttagcggatggcatgcccggaagccatctgaaatcacctctagagtttggggaccactgcgtgagacagggaaaagtccaaacccctctgagaaggggaagagagcagctggcgcagggcaccaagccttcagggaaaagccccactcgctgcatggtgagcgcttgttggtcccccatggataggagagaaaccaggcctaggctcccaaagtacagcaggggcctggaagcatctcccagggttgaggggtcagtggaggagagctgttctcactgtgaagactcctggggcaaagcgcggtggctcacgcctgtaatcccagcactttgggaggctgaggtgggctgatcacctgaggtcaggagttcgagaccagcctggccaacatggtgaaacttcatctctactaaaaacacaaaaatcagctaggcgtggtggcagatgcctgtaatcccagctactcgtgaggctgagacaggacactcctttgcaacccaggaggaggagcctgcagtgagccaagatcaagcctctatactccagccttcagagcaagactctgtctccaaaaaaaaaacaaaaaacaaaaaccctcagatgtgctctgctggcaaccagtccccctgcctctcctgagtggctgggctgagcgatggggatacagccactctgactccctaccccactgctgtctctgcttccctttctcaggcccagtgatttcttttctttttattatttatttttagacggagtctagctctgttgccaggctggagtgcagtggcgcgatctcggctcactgcaacctttgcctcccaggttcaagcgattctcctgcctcagcctcccaagtagctgagattacaggtgcgtgccaccacacctggctaatttttgtatttttagtagtggcaaggtttcaccatactggctgggatggtctcgatctcctgacctcgtgatccacctgcctcggtctcccaaagtgctggggttacaggcgtgagccaccatgcccggccggcccagtgattctttagcacacactggacacctcctgtgggttctgccccagacacttgagccttcttgggcagccaagggcaaagtggaacaaaaagaccatttttgccagttccgacacgaatacacacataatgcaggtggaaggtctgtcctgccttctgcatcttttgggtgcacaaaaacataaaatcaggcactagagccctgagggaggttggtaagcatgcctggctcctcagccaagaaggaactgtagtgcgagtttcaccaagttctatcagccagacgcatctcgacacaagccctctctaaagccagacccacttacctaccactggctacactgccagttacctccggcaagagctgtacaaggcctccacctctcctctcttgctagaggcccgaaagctaatgaagagcaagtaatcataaaccaagggacaggcggctgcaggttccttgcctgggacttcttggcttctgttccaacactgatttctcaaactagcttgctcaaatgcttttacttccctgaaccagtatgcaatcatgggatttataggaggttcttaaaagtagctctaaaggacagacattttcctttccatttaaaaaactgagccgggtgcagtggctcacacctgtaatcccagctctttgggaggccgaggtgggtggatcacttgaggtcaggagttcgagaccagcatggccaacatggtgaaactccgtctctactaaaaatatgaaaattagccagccacggtggtgcatgcctgtaatcccagctactcgggaggctgaggcaggagaatcgcttgaacccgggaggtggaggttgcagtgagcagagatagatcatgccagtgcactccatcctgggtgacagagtatcaaaaaactgcttatcctttcatctaccagcctcaccaaatgctcttggcgtcaggtgattcactgcaacgttgacttaagggtgcttttaatgccaggtgcggtggttcatgcctgtaatcccaaatcccagcaccttgggaggccaaggcaggaagatcattgacatcaggagttggagacaagcctgaccaacatagtgcaaccccatctgtactaaaaatacaaaaattagccaagcacgtggggcctgcctgtaatcccagctactcgggaggctgagacaaggggatcacttgaatccaggacgtagaggttgcagtgagccaagatcgcacccctgcactccagcctgggtgacagagactatctcaaaataaaaaagagtgcctttaattattaaatcgaagcaaatgtctttaacaattaagaatatacttaaccgggctccttcttgtttgctgatggtaacctccggggattctctctctgtttcagagggccccccccacaggaaacttcgcagtgatgcaccaggtatcatgccttcagcttcgcagctgtgtgttgtctcagtatccatttcttttctgcccaatgcgcccctctgcccaccccaatttttaaacccttgcacatttccacgagattcttgcaaaatctggaggcttggatatctttgtgcaaagctttcattgaaaccaagatcaggatgacaaatagacctcatctcttgacccactgtccttcctgcctctgggcagcacatgtgacatgacacccaacagtgtgcgcccttatcactgcatcttgacgagatggcagaggctgtgtgtgtagcttggatttttcttcctttcataccaaaagccactcttacgtggttagggcactcagcagtgctgtcctcccttgtccagtgaagacactgcactgaatgaatatgacagttccactatctgggcacattcctggagaacgtacttggcttctagttggctggtctgggtcacaagtcagagatcacaaagttcacggtaactgcggcgcggcaaccagtcctcccatgattcagctttcacaggcttgtctgcgaaggaaatgagctcactgcgatgtctgacaaatgccgggggctgcacgtggcttgagtgatgtctagctacaaactgcattttcagcacacggggtggaagctgaccaccgcaaagccaagcacagtcctggcagagccttttctggaggcttcacgggcatgtacatgttcagggactggggagtggatacccaagactcaaggatgcacacagggcccttcccaagaaagcatgaagaggtctctgctgctctgggattttgcttttttttttttttttttttgagacggagtctcgctctggagtgcaatggcgcaatcttggctcaccgcaacctttgcctcctgggttcaagcgattctcctacctcagccttctgagtagctgggattacaggctcccgccacctcgcccagctaatttttgtatttttattagagacaggatatcaccatgttggccaggctggtctcaaactcctgacttcaggtgatccgcgcgccttggcctccccaaatgctgggattacaagcatgaccaacttttcacaggtgaagttaggccatgtggatctgacttcacctcatggagaggccaaaccaaccctcatttgtgtccatcttcatttttggagaatctcagctttgctgtcactaccaaaatacttaaagcgcagggtgaggtcttgttaagagccagttttgtgggggagcagatgagtttctaggacacttcaagcagctctcctaccagctgattgggatcataggataagccaaattccagggtgggctgaagtgcagaacccactggtcagtgggaaactgagtccttgcaaactagcaggtgcttacactcaagatgattcccgaggccttggataagctgagtccacgaatagaatccaaatgctaggccaggcacagtgggtcatgcctataatcccagcactttgggaggccgaggcgggcagataacttgaggtcaggaccagcctggccaacatggtaaaaccccgtctctcctaaaaatacaaaaattagccaggagtggtggcatgtctgtagtcccagttacttggaaggctgaggcaggagaatcgcttgaacctgggaggcagaggctgcagtgagccaagatcacgccactgcactccagcctgggcaacacagcgagactctatttcaaaaaaaaattccagattctccaggatcagaccctttaagaaaacctttaggggggtcccttagttcctgtaacaggtatagttggtgtcaaccttggtctaggatttgaaaccagttccaagaaaagcacttcagccaaaacagagtatcttgcaggctgacagccaagcaaggagcttcaacggcccagggcacaatgtatttcttaggtcaagggagcaaatttatccattaagcttttccagttagcaaatagactcttccaagagccaaaaagagagtgcctagagcactgatgtggaggttagggactacttcccagctcatcagatttttttttgtttttttttttggagacagtcttgctgtttcccaggctggagtgcagtggcacaacgttggctcactgcagccttcacctcctgggttcaagcaattctcctgcctcagcctcctgagtgactgggattccaggcgcctgccaccacgcacggctaatttagtatatttagtagagacggggtttcaccatattggccaggatggcctcgaacaactgacctcacgagtgatctgcccacctcggcctccccaagtgctgggattacaggcatgagtcgcagcaactggccaacccatcagggtttgaacctggagttaaaactgtgacgaagagagctgtgtggggagcgtacagggaacagtcaaactgctgctcctctgcgctgaatttgagcatccttctgagtcaagcgcttggaaaacagtgctaaaaaagaaaaagacttaagggtcacatctagagagagaaggatggagagttctctagtagggctgcaagtccagaagcttctctgtgaagctgggctaggagtgtttactttgaagtggctgcagctttaagtatttattcctgatcgctgcactgcgggaagtcccatcctttatagccaggtgggctttcccagccggggtctctcccatcctctgtcaacaaaagggtcatttgcgaattcctcttctcagtgatcatgaatctctgggccttgatttttttttttttttttttttgagacggagtctcaccctgtcgcctaggctggagtgcagtggccacatctcggctcactgcaagctccgcctcctgggttcatgtcattctcctgcctcagcctccctcccgagtagctgggactacaggcacccgccagcacgcccggctaattttttgtatttttagtagagacacggtttcaccatgttagccaggatggtctcgatctcctgacctcatgatccgcccgcctcagcctcccaaagtgctgagattacaggtgtgagccaccatgcccagccgagttgttccttttgactaaagaattggtcactgagttgtgttcatccttatggcttcttatccaacccttgcgtggggagcaaaagtctgctctcttctttgatgtcctaaaataagacctgtcttccgattcaggtcaaacagggccagatggccagagcccaacataattatttgttgcggttgctgaaaagagttaagtgtttcttctgaacggtgaaggctggcagcaggcagatctgatttttccttcttctgcccactctcttcctcctacccaaagtctcccctcacgtgaccagcccttcctgtgaagtcgaggtgataaactcaagagagaaccagcgcagagaggagatggcagcattaaggagagacaggggtgtcctactggctggagctaaaatccacctcagaggccaggtgcactggcacacacctgtaatcccaacactttgagaggctaagacaggtggatcgtttgaggccaggagttcaagaccagcctgggtcacatggcaaaatcccatctctgctaaaaatacaaaaattagccaggcgtggcagtgtgcacgtgcatgtagtcccagctactcaatactgaggctcaaggactgctggaactcaggaggcagaggttgcagtgagccaagatcatgccactgcactccagcctgggtgagagagactcttaaatttcttttttaaatccaccttgaaggccaggtgtggtggcccacgcctgtaatgccagcgctttgggaggccaaggtaggagaactgcttgagctcaggagttccagaccagcctgggcaacaatatcaagacctcatctcaatttaataaaataatccaccttggattaacacgtataatttccttttctaatattcactgggcacctgttttacgccatgtgcggtatgttccacgatcagcaaaacagatgcagcagtccctgcagtggggaaaactcagtccatgaacattcacaccagcagggggtgctgtctcgccttttaaccagggagcccctctgtgtccttctcaaggctgcccttgtccatttcaccttcttccaattcaaatcttgaaaactcacctctaaggcgaatgggggtgaggagatacagaagaaaaacagtatgttctctcttcaactctgccccatgggctatgaataaagtcagaagacaaaatcccctgcttggtttttggcgtttttttcctattctaaatcaaagaccacagcagaccagaatcctgtggcttctcaaatgaccaagcctgacatattgaaaagcagatcgtcttgctttgaaaaaccttctccacccacccccgcaaccaatttcagctgattaaattcaatcactcatgccttaagactggcaatgatttgttgacttcaacttgaatatctgcatcttatttgtgccgtgtgtgttttctgccataaaaaaaatttatattgcaataggactatagctacaagtttaaaatagatttataaaaaatctatcccaaccatgaagatttctttgctaaataatgtgttttcttacaacccacaggcgaggaaacgagacctctttcgttccttctagaaggtctggaggacgtagagttattgaaaatgcagatggttctgaggaggaaacggacactcgagacgcagacttcaatggaaccaaggccagtgaataagcaactttctacagttttgcaccacggcaagaaaaccaaaaaccaaaacaaacaaacaaaaaaaacccaacaacaacccagaacaaagcaaaacccagcagactgtacttagcattgtctaaatccattctcaaattccaaatatcacagacacccctcacacaaggaatataaaaaccaccaccctccagcctgggcaacgtagtaaaacctcatctatacaagaatttaaaaataagctgggcgtggtggtacacacctgtggtcccagctactagggaggctgagccaggaagaacgctccagcccaggacttcgaggctgcaatgagctataattgcatcattgcactccagcctgggcaacagagaccctgtctcaaccaccaccaccaccaccacccctactacccctgtattcaaggtaaaaattgaagtttgtatgatgtaagagatgagaaaaacccaacaggaaacacagacacatcctccagttctatcaatggattgtgcagacactgagtttttagaaaaacatatccacggtaaccggtccctggcaattctgtttacatgaaatggggagaaagtcaccgaaatgggtgccgccggcccccactcccaattcattccctaacctgcaaacctttccaacttctcacgtcaggcctttgagaattctttccccctctcctggtttccacacctcagacacgcacagttcaccaagtgccttctgtagtcacatgaattgaaaaggagacgctgctcccacggaggggagcaggaatgctgcactgtttacaccctgactgtgcttaaaaacactttcactaataaatggttataaatcacaatgtcgttggcttttctgttgagctgttttctatagaggaaaaggagttggggaaggctgggttttgcttcatcgtcccaaagattctctgaagtcagggttaacgtcatgaatgcagaaactgaggcctagagaggtgaaatcaattgcctacaaccccacagccagccagagagcagagcagagatgcaaagtgagactgtctaagggggttactgggccgctcagcagggagggcaggggagagaaataaggtgatgtgtggtctaagggccactgccccctgccctcgaacatgactgggaagaacatcttgactcatcaaaaccagtatcttaagaaaaatacaggatttccttgattttttgagttaaaacacaaggtcttgtccaatgagtcagcaaacactttccacaaaacgtcagatggtggctgggtacagtggctcacacctggaatcccagcactttgggaggctgagatgggaaaatcacttgaggccaggagttggaggccagcctagccgagagagacccccgtctctataaaaaaaaggtgttttttttttgttgttgttagtaagccaggcaggatagtgcacacctgtactcccaacctcttggaaggctaaggcaggaggatcatgtgagccaggagttccaggctgcagtgagctatgatcacgccactgcactgcagcctaggtaacagtaacaccttgtctctcacaccaccaccaccacccacccagccagatagtattttagcctttacaggctacatatggtcttgccgaatattcatcttctttaaaacaacccttaaaaacataataaatcattcttagagtaagggccataaaaacaagctgtaggccctgtccttctttcagcttgagtgttttagacagacatgcctgcaaaggctctgttcaacacaaacgatgccgtataccaccaactccatgggatcagacagatttgggagacaggaaacatggaaacaaaggactccatcttgtgaccagatgctaatatgccttgaatgacgcacaaacacatcccggatacatttctaaaaacctggcttgaatagaaattttcaaaaagattttttcatattttttaacttggttaaaaaaagtttttcaccactctgtgggaaaacattaaagtataaacatacaaagcctctttgaccagaagcccaacaagttcaacattcgtttctcttgattttattgatcttttaaaaaaataaaaggacatcttctgtggatacaggttaggatgtttctagggtaagaaacccaccatcgcagcgtaattctctgcggaatttcagtagcacttggaaagttctgttttcaacctgaaatttttgctgttcttccagaaaataacttagtaacaaaatgaaggccgtgaagctgcaggcacactccagaaattagtgtgttcttttaactcgtgtcccaaagagacagcagttcctaacatgcagtgatgagtggacacaccatggtgcgttggaaatcccacgttcacgtctttgacaaggaagcctcctacaatgatcttgtgctttaattttacttgatggtcaccctggttacttcattatgcctttgaatgaagtcctgttcttagtggctgcattaccaaggccatcttgccccaaagacccctcagggtcctgaggcagaattccccccaccccaccaggggactcaggaaaatgaatgatcgcagtttgccaaaagaggtcagatttcccactgacgctggttggtctggaaaattactctgaaaactcgaacgcacctctaggaatctcaatgagaagctaagaagcaggctacagtctcagaggtttatgacacctttttttttttttttggagacggagtctcactctgttgcccaggctggagtacagtagcgcgatcttggctcactgcaccctccacctcccgggtccaagcaactctcctgcctcaacatctggagtagctggaattataggcacgcaccactgcacccagctaattttttgtatttttagtagagatggggtttcaccatgttggccaggctggtcttgaactcctgacctcaggtaatccacccgcctcggccttccaaagtcttaggattaccggcctgagccaccgcgcccagcctattccagtttttaaaaaggcatgtgactgttaagttctctgttcttagacatgatttcagtacaccacaaagcactgggagattttgttctggaagacgattccacctggttgggagttggggggaagagcctctgagagaagctccatcccacatttacggagacttgggacattaaaaacacctgtcaagaccaatcaggggccaggcacggtggctcaggcctgtaattccagcactctgggaggctgaggcgggaggatcacttgaggccgggagttcaagaccagcatggccaacatggtgaaaccccgtttctcactaaaaatacaaaattagtgggtgtagtggcacactcctgtagtcccagctacttgggaagctgagataagagaatcgcttgaacctaggaggcggaggctgcggtgagccgaaattgcaccactacactccagcctggacaagacagggcaagagcatgactctgtctcaaaaaagaaaaaaaaaaaaaagaccaatcaggacctccgcttgggttagtgcaacacaatggggcatgggaacgatggctcatgcttgaaatcccagcattctgggaggccgagatgggaggatcacttgaggccaggagttcaagaccacactgggcaacatggcaaaaccccgtctctattaaaaatacaaaaaattcagccaggtgtggtggtgggtgcctgtaatcccagctacctggaagactcaggaacaagaaccgtttgaacccaggaggcggaggttgcagtgagctgagatcacgccaccacactccagcctgggtgacagagcaagactctatctcaaaaacaacacggtagcctcatcaccgacaacttagagcccttcccagagagccccttttgtccctctttgcaatgcacacggtggcaggtaaggatgaaaagacatttcccagggacaaaccccagagcacaggtgatggcctcggtcattggcttgggccgcaaagctaactaactatggtgactgctcttatttctcaaactaacttaaaacaaaaacctagtgtaaaaagacgacaaaaggtaacgacttccgcaccaacaccaagaccttcagcttccgtggttttcctaaagcaacatcttgactaccccctgggctgacggcagcggcgatgaagacatgtgtgaaggcggcttcccaaattccaggcgcttccccaaccttcagacagagcaaaccaaattaagctgacataacagctgtgacaaactggctagcaccggggcccagagagttataagggtgaacatcaagagtcaggagcagggtctcacagggtctcaattttctctcctgtgaaatgaagaagaggacactggctacctggctctcagattccaaggtcacacaaaacgcccagtctcagacccactagaaaaatccatctcttacctattgtttgtttgttttacagcctacgcaacatagtgagaccctgtctctatgaaaaatgcaaacaaaaattagctgggtgtggtggcctgcatgtgtagtcccagctacttggtaggctgaggtggaaggatcgctggagcccaggaggcggaggttgcagtgagccgagatcacaccaccgcagtctagcctgggtgacagagtgagaccctgtctccaaaaaaaaaaaaaggccaggcatgattgctaacgcttgtaacccccagcacttgggaggtcaaggtgggaagatcgcctggaaaattaatctgaaaactcacctctagaaatctcaatgagaagcagactacagtctcagaggtgtattctcaaactcaaagccaggaggtttgagaccagtctgggcaacatagcaagactgtttctataaaatataaaaaaaattagccaggggtggtggtgtgcacctgtagccccagctacttgggaggctgaggcaggaagatggcttgagcccaggaggacgaggctgcagtgagctatggtcgcaccactgcactccagcctgggtgacacagcaaaaccctgtctcgtagaaagaaaacaaacaaaaattaatttttttttttttcttgagaaagagtctcactctgttgcccagagtggagttcagtggtgcaatcttggctcactgcaacctccacttcctgggttcaagtgattcttgtgcctcagccacccaagcagctgggactacaggcatccgcgaccatgcccggctaattttcgtatttttagtatagatagggtttcaccatgttgcccagtttggtcttgtgaactcctggcctcaagtgatccacccacttctgcctcccaaagtgctgggattacaggtgtgagccacttcactgcacctggcctaaaaatccacgtgtaaaggtctcaaagttatgtgcatgccatggaaaatattcttaatttcctgtcacgtgtctgctacaaacccatcaaattcctacggcttggggcccagagagatggtagtcacacaccttgcagaattcctgaatctgaaagctgccccttttttttctgagacaaggtctcgcttcatcacccaggctggagtgcagtggctgggaacacggctcactgcggcctcaacctccagagctcaattgatccgctgccctcagcctcccaaagtgctgggattacaagtgtgagccactgagcctggccctgattttctttaggcaagaaaattaatgacactgttagagatcagatctgcactgtcccatcgggtggctggtttcaggaacatagtctgggctagaagttagtgccagtttctcaaaggttctacagatttaaaaagaaaaaaaagggctggttgcagtggctcacgcctgtaatcccagcactttgagagcccgaggtgggtggatcacaatgtcacgagatcaagaccatcctaacacagtgaaaccccgtctcgactaaaaatacaaaaaattagctgggcatggtggcacacgcctgtaatcccagctactcaggaggctgaggcaggagaattgcttggacttgggaggcagaggttgcagtgagctgagatcatgccactacactccagcctaggcgacagagcaagacgtctcaaaaaaaaaacaaaacaaaacaaaaaaaaaaacttcaggggaagcagagccatgactgatgctcaattccccaaataagggctttatttttatttaactaattaattaactttttgatatggagtcttgctctgtcacccaggctgctgtgcagaggcacaattttggctcactgcaatctctgcctccagggttcaagtgattctccttcctcagcctcctgagtagctgggactataggcacatgctaccatgcctggctcatttttctattttttttggtggagatggggttttaccaatgttgcccagactggttttgaactcctgacctcaagtgatccacctgccttggcctcccagactgctgggattacaggcgagcgtcaccacacctggcccaaataagggcttttatacaggacattctcacagtgtaaccgtgagtagcagctgtagaatcaaatgataaaaatgaccttcttggccaggcatggtagcccacacctgtcgtcgcagcactttgggaggatgaagggtgaggatcacttgaagctcagagtttgagaccaaactcggcaacatggcaaaacctgtctctagaaaaaatacaaaaaattagccgagcacggtgacacgcacctgtactcccagctactcgggggactgaggtgggaggatcgtttgagctgggaggcagagggtgagccatgatcctgccatcgtattctagcctaggtgacagagtgagaccctgtctcacaaaacaagaccctctctctagccctttgttcaagccacaagacaccacctaatgctgcctgcagggagcagaggagaggataaggtttgctgaaataatcctataatttaaaaagacacatggctgtgggctgggggtgagtgtctcttgcctggggcaggcgggttctccccgccagcgagaggtttattagaaggtactgaccccttatcacccaaaggcacgctggtgctgcttggccgtctctccccgccatctctgttcttgctgctccgcccagaggctgggccacctgttcggtttggggactgatcgtacacgaggttccggcaggaagcgagtttggactccagtgcctggacagaaatacacttttatctctcaagttataggcaaggactattctgtcttaccagagcctgtacagaagaacgaaccccagacagtggttctcaaactgttgtgcactggaattccaaggtgggaccccaagaggaatccaacgtatatgccagtctcagaaccaagcaccttaagtatttgggagctggctgggcacaatggctcacacctataatcccagcactctgggaggccaaggcaggaggatggcttgacatcaggagtttgagaccagcctgggccacaaagtaagatcccatctcagtttttttttttgttttgttttttacttttttagacgctgtgtcacccaggctggagtgcactggtgagatcacagctcactgcagcctcaacctcccaggctcaaccaatccctcccacctcagcctcctgagcagctggaattataggcatccgcaatcatgcccagttaataaaaaaaatttttaatgcaaaaaattttttttaattacgaaaaattttttaaaatgtttgggagctgcctggaaaaagatcacggctcactgcagcctcaaccaatccttccacctcagcctcctgaatagctaggactatgcacaatcatgcttggcttaaaaaaaaaaaaaaaattcttttttaattacaaaaaattttttaaaatgggagctttctggaaaaatcactaacctaccaattatccaactccgcttgtaggaagtaggaaatccacttctggaatccttcaccctttggtttaccttgttaaacctctgcagaatggcaagaagtttggtaaggacttggtctggctacaacagaccctgaggaaaccaaaaggacactgacagcaccccaggcttctctatactccaactaggctaaatactgaaatgcagacctgcttctagaatagcaaaccagacagccaaaaaccagaagtaaaaacaaaagaaatgagttgcaagcttctattaagttgtagctacaaatacactgtgtacagtgacaacttggtaggagttaaattatgtggccttctaggcatcatttttaaaaataaactacaaagaatacctatgtttttacttaagcacaaaaggatccctccctgtaattaacataaaagctgaaaggccaaattctttgccctaggctttcaagattttttttttttttttttttgagaccaagtctcactttgtcacccagcggtgcgatctcagctcactgcaacctccgcctcccggattcaaacaattttcctgcataagcctctcaagtagctgggatcgcaggtgcccaccaccattcctggctaatttttgtatttttagtagagatggggtttcaccatgttggccaggctggtcttgaattcctgacttcaggtgatccacccatctcggtctcccaaagtgtcaaaattcacttaaaccccaagaaacaaaccaaaaaaaaaaaaaaaaaaaaaaaaggtggcagtttttttctcttctgagacaacgtcgtgctgtcacccaggatggagtgcagtgttggaatctcagctcactcagcctcaacctcccaggctgaagcaatcctcccacctctcagcctcctgagtagctgggaccaccagtgtacaccatcaggcctggctaatttttgcattcttgtagaggccaagtcggggcagggggtttcaccatgttgcccgggctggtgtcagactcctgagctcaagtaatctcccaccttggcctcccaaagcactgggattacaggtatgagcacccggccaaaagagaaggcagtttccaagtgctccttaatttttcgagttaaggaaaaaacacacatatcaccctaatttcccaaatttcctagaggaaaaacggtaaaaggaaagagacatacatagggttcagagcagggcttcgagtcagagctctgagtgtctggcagtaactcccacaggaagctctaatgattcccagggatgctaaaggagcagccacacctaaaactcaccacactgctatgaaaggggctggacgcattggctcatgcctgtaatcccagaactttgggaggccaacctgggaggatcacttgaggccaggagtttaagaccagcctgggcaacacagcgatacccacattactacaaaaaaatgaaagtatcagccaggcatagtggcgcacacctgtggtccaagctcctcgggaagctaaggtgagaggatcgcttgaacccaggattttgaggctgcagtgagttgtgatcataccactacactccagcctgagcaacagagcaagaccctgtctctaaaaaaaaagaaaaaaagaagagagggaaggaactagatcaacccccttcacacatcctgaaagacaggcaggaaggcaccaaacgccaggaaagtgtggtcttaccccgactttccgcagtaggtctcccacaatgttgagggctgatatccgggccgcaggtgtgaggggggtccccccggtggagtcgtccaggcctgggtgtgcaaagggaagagcatgtaactcaccaacctatagtcatgtctgtgcgttaacatcgctagatccaaaaccacgggacaggagggacactgacgcctttcctcggatcccaaaagctaccctatttctttccgtagttaaccgcatcacacacccaaggcccgtatgacaaccaatttttcaagtccttgtgatgactgcaacaaatacttatttttacatgttagtcttgctctgtcacccggactggagtgcggtgatgtgatctcagctcactgcaacctccgcctcccaggttcaagcgattctcctgccttggcctcttgagtagctgggattatagccatgtgccaccacacccggctaatttttgtatttttagtagagacagagttccatcacgttgtccaggctggtctcgaactcttgacctcaaatgatctgcccgccttggcctccaaaagtgctgggattacgggcgtgagccaccatgcctggcctttaacaaattttttttttaatagagacagggtctcactatgttgcccaggctgatcatgaactcctagtttcaagcgatcctcccaccttggccgcccaaagggctggtatttacaggcatgagccaccgtgcccagccacattagtctttttaaacaaacccaaaacaaatccttttgaaattgtagaaaatccatatagttaattaacataatggcatctgtgatagatacaagaactatagacaggatgatccagctttacaagggtcccgctctgcagagcctctcttctccaagtggggtccatgcaccagcagcacatgagaactgttagaaatgcagaatctctcggccaggcacagtagctcacacctgtaatcccagtgctttcagaggccgaggcagttcgatcagttgaggtcaggagttcaagaccagcctggccaacatggcaaaatcttgtttctactaaaaatacaaaattagctgggcatggtaacaggtgcctgcctgtaatcccagctactcgggaggctgaggcatgagaatcgcttgaatccaggaggcagaggctgcagtgagccaagatcaatgccgctgcactccagcctggccgacagagcaagactttgtctcaaaaaaaaaaaaaaagagagaaagaaatttcaggccccacccaagacccacttgatctgaggtacattctaccaagatccccaggtaagctacatgcatattgaagtgtggaaacatagccaggcatggagttgcatgcctctagtcccagctactcaggaggctgaggcaggaggatcactggagcccaggagttggaggctgcagtgagctatgattgcaccactgcactccagcctgggccacagaccaagactgtgtctctaaaaacaacaatgaaataaagtatgcaaaatggctctagactggggctaggcacagtgactcatacatgtaataccaccactttcaggggctgaggcaggcagatcacctgaggtcagtagtttgagaccagcccggccaacatggtgaaaccccatctctactaaaaatacaagattagccaggcatggtggtgggcacctgtaattcaagcttactcaggaggctgaggcaggagaatcacttgaacctgggaggagggggttacagcgagccaatatcgcaccattgcactccagcctgggcaacagagcaaaactccatctcaacaaaactaaacagaagggctctgcaccggaattctagaagtctcactggtctcttcatgcccaggggacaagctaagggataaggtagtagatggtagggtaagccctggagcctgcctgcctgggtctgaatcccaaaccatctgccattcaattgcttcatgactctgcttaactcagagcctcactttcatcaaacggggacagcacctgcatcctgggcctgcggcgaaggctgcaggctggccagcacacactgagcactccttaactgtctgttattaatatctgctgtaaaaggcctgatcggaagctgtcagcagaggggctggggtgagaactgagattctttttttctgcccatgcagcacacgttacgctgagtctagctctcggtggatgtattactaaacccacagaacgctttttacttttttgtatttggtcagtgacatttcaaatttgggaggttttatattcaacaagaggatttttgaccaggcgcggtggctcacacctgtaatcccagcactttgggatcagccgaggtgggcggatcacttgagtccaggaatttgataccagcctgggcgacatggcaagactgtgtctccacctaaaatacaaaagttagccaggtgcctttagtcccagctactccggaggatgaggtgggagaatcacttgagcccacgatgaagaggttgcagtgagccaagatcacgtcactacactccagcctgggcaacagagtgagatcctgtctcaaaaaaaaaaacccaacaaaaaaaaagaggatttctggctttgaagaatggaaaaagctgcagatgaagggccaatcctcgtagctgcagagtggcagccacccgctctgggtggggtttccatttcatcagactccactactgcctcttacccagtcctcactgatctcaatgcccatccccaagaacatcccagtctactctctgctcaaagcctgagagcaaatcaggctctgagcctgatgcaaatcatcacacccccaggacccaccccagattcttacccagaaacactttgtgaaccgagaaaatcctgcaattcccactccccttaccacgtctgaagctcccaggtgtgtttaaacttgagctgggtcctcggtgagcaatgggcgtggacggcacggagcccgtggcctgcacagctgtgtctgtcctctcagcttccactgagctgggcatgggggtcctgggtttctcctgcttctgctgcacggccagttcctgccgcaaatctgtgccagaaaaaggattcaggaattcaagtcctcagccaggcgcagtggctcatgtttataatgccagcactttgggaggccaaggcaggtggatcgcctgaggtcaggagttcgagaccagcctgaccaacatggtgaaacctcatctctattgaaaatacaaaaattagcccagcatggtagtaggcacctgtaatctcagctactcaggaggatgaggcatgagaatcatttgaacctgggaggccagggtggcagtgagctgagattgctccagcgcactccagtctgggtgacaagagcaagactacgtctcaaaaaacaaaaagggaatttaagtccttgcttagggttggtggggtgcagggagagaggttcaacagtagataccagtcagaaaaaagacctactggggtgaaacactccaggtagaaaccccaaataaagggaaacccacaggaccttgcctagcagacttggaactctacaggatgtttctcttgactaacaaaatggtttcagatttttaaaaagctatgacagtgacacactaatgcttttattattgaaaaaacaattccaacatagcagtgtatttagaacactaaatgaaaatatgcccgggagcagtgactcatgcctgtaatcccagcactttgggaggctgaggtgtaagaatcacattaatccagtaagtcgaggctgcagtaagccatgatcataccacttcagcctgggcgagagtgagacctctggctcaaaaaaaaaaaaaaaaaaaaaaaaaaaagaaaaaaaaaaaaaaaggccagttgcactggctcaagcctataatcccagcactctgagaggtcgagatgggaggattgcttgaggtcaggaattttcaggccaacatggcaaaaccccgtctctattaaaaatacaaaaaattagccatgcgtggtggtgagcgcctgtagtcccagctgcttgggaggctgaggcaagacaatcgcttgagcctgggggacaagcagtgagtgcagtgagctgagatcacgccactgcactccagcctgtgtgacagagcaagactgtctcaaaaataaataaagtatgctttccagactatccccaaatgctcctcctcactcatcatcaccataacatgtgggagagcttttcaaccattgttctctgaatttttttttttttttttttttgagatggagtttcactctcttgcccgggcttaagtgcagtggcacagtctcggctcactgtaaatctgcctcccgggttcaagtgattctcctgcctcagcctcccaagtagctgggattacaggcacgcaccaccacacctggctaatttttgtatttttagtagacacagggtttcaccatgttgtccaggctggactctaactcctgacctcaggtgatccacccaccttggcctcccaaagtgctgggaatacaggcgtgagccactgcgcccagctgttctctccattttcaaacataaactttatacatatgtatgtatctactgagcataaaacaagaaaattttttattaagcattactggaaacatacaatatgttgtcctgtgtatgacttactctccccacttcagtggtatgtcttggcaatgatttttgttttagagacagggtctgactcagtcacccaggctggggtgcggtggcacaatcatagctcaatgtaaccttgaactcctgggctcaagtcatcctcccacttcagcctcctaagtagctggaactacagacatatgccaccaggcctaatttttacaattttcatttttgtagagatggggtatcactatgttgtccaggctcatcttgaactcctaggctcaagcaatcctcttgcgtccgtctctcaaagcactgagattacaggcatcagccactgtgcctagccttggcaatctttctaccacaacatttctatctactgttcattttaaccattaacatttcacaaaatacatctatgtacttcatttaaccacttcattactgatggacatctaggaacaactactttattaaacttaagaatttttactttttatcccccacctactggttacacattagaaagcaaatcgacgttataaataattaattgggccagcaacagtgacccacccctataatcccagcactttgggaggccgaggcaggcagatcgcctggggtcaggagttcaagaccagcctggccaacatggtgaaaccccatctctattaaaaatataaaaattagccaggcatggtggtgcacacctgcagtcccagctactcaggaggctgaagcaggggaatcgctgaacctgggaggcagaggttgcagtgagcagagatagcaccactgcactccagcctggacaacagagcaagacgccatctcaaaaaaaaaaaaaaaaaaaaaaaaaaaggtaaaaacaacttggacaatccactaatgaatgtcttttttttttttttttttttgagacaagagtctcactctgtcacccaggctggagtgcaatggtgtaattttggctcactacaacctccacctcccaggttcaagcaattctcgtgcctcagcctcctgagcagctgggattgcaggcacccaccaccataccctcatgttttctatttttagtagagatggggtttctctatgttgtccaggctggtctcaaactcctgagctcaggtgatccacctgcctcagcctcccaaagtgctgggattacaggtgtgaaccactgtgcctggccaaatgcctcattacagtttcaacattctacctctggaagtgccaactgaaaaagagcaaatgctgatgaggtttcaaagttttagccaaatatattggttgccatcaagtcacaaaaataataggctagctggcaattccaccagaaatttctccccacaacatctttgcttcttaagagacagggtctcactctgtcacccaggctggagtgcactggtgccatcatagctcactgcatactccacctcctgggctgaagcaatcatcccaccttggcttcctgagtagctgggactacaggcacatgccatcacacccagctaatctttaaatgtttttgtaaagatggagtcccactatgctgcccaggctggtctcaaactcctgggctcaagagatcctcggcctcccaaagtgctgggattacaggtgtgagccactgtgccagatctccccacaaaactctctgttcctactgagcatcagggtagtttgctgtgtttgtgaattacagaccaggaagcatctttctggaaataaattctgctgcccagaggcagaatcccaatacaaggacttcatctgtgaaccccaaagctatttctctaaatacccataaggggcccttacagggctggatgtctgactgttctcagctccagccagggcccaaggcaagagtctgcccagtgcagtccgacaccctctgattagacaacctgggtgcagagcagggtgtggggtccctgtaaagataatgctgggagagcttgtgggacaagatgttgctcaggtagggagaggggaccatgctggtgaagacaccaaggcctcctgacctctggcttcatccttcagtctctgaacagattccaggagattctctttttcatcaagttcactttccaggaaggcatttctttcgatggcctgattcaagcgctgctcaaagtcttcgagagacatgatcgtggcgctggcgaagagaaaagcagagttatccaagaggacaaaccgcagcatccctccagcaccgcggatccaggaggtgcgaagggtcagacacacctgggcacaagtcccagccccaaacttcctagatgccacagagtgggccaagtcccttaaccttctggggcatgggctctttacctgcagaatgggactcatcatagctcatggggtgcacgaggctgtcatgaggattaaataagatgctgcccacacagcactcagcaataagccaaagccctatcaggactgcatgtggcatttggtggtttgagaagaccactatgctccatcttctcttgcaagctcacaatgccaaccagcattaaaaataacctaatatgactgggcaaggtggctcatgcctgtaatcccagccctttgggaggccgaggcaggtggaagacctgagatcaggagttcaagaccagcctggcaagctt

SEQ ID NO: 922 - DNA, 3745 bp, Homo Sapiens
gaattcggcacgaggccattgaatcccagtcctaacagaagtactgcgaatcttgtggcctcattctgaacaaaagggattagagaagaaaaatctcttgatataaggcttgaaagcaagggcaggcaatcttggttgtgaatattttctgatttttccagaaatcaagcagaagattgagctgctgatgtcagttaactctgagaagtcgtcctcttcagaaaggccggagcctcaacagaaagctcctttagttcctcctcctccaccgccaccaccaccaccaccgccacctttgccagaccccacacccccggagccagaggaggagatcctgggatcagatgatgaggagcaagaggaccctgcggactactgcaaaggtggatatcatccagtgaaaattggagacctcttcaatggccggtatcatgttattagaaagcttggatgggggcacttctctactgtctggctgtgctgggatatgcaggggaaaagatttgttgcaatgaaagttgtaaaaagtgcccagcattatacggagacagccttggatgaaataaaattgctcaaatgtgttcgagaaagtgatcccagtgacccaaacaaagacatggtggtccagctcattgacgacttcaagatttcaggcatgaatgggatacatgtctgcatggtcttcgaagtacttggccaccatctcctcaagtggatcatcaaatccaactatcaaggcctcccagtacgttgtgtgaagagtatcattcgacaggtccttcaagggttagattacttacacagtaagtgcaagatcattcatactgacataaagccggaaaatatcttgatgtgtgtggatgatgcatatgtgagaagaatggcagctgagcctgagtggcagaaagcaggtgctcctcctccttcagggtctgcagtgagtacggctccacagcagaaacctataggaaaaatatctaaaaacaaaaagaaaaaactgaaaaagaaacagaagaggcaggctgagttattggagaagcgcctgcaggagatagaagaattggagcgagaagctgaaaggaaaataatagaagaaaacatcacctcagctgcaccttccaatgaccaggatggcgaatactgcccagaggtgaaactaaaaacaacaggattagaggaggcggctgaggcagagactgcaaaggacaatggtgaagctgaggaccaggaagagaaagaagatgctgagaaagaaaacattgaaaaagatgaagatgatgtagatcaggaacttgcgaacatagaccctacgtggatagaatcacctaaaaccaatggccatattgagaatggcccattctcactggagcagcaactggacgatgaagatgatgatgaagaagactgcccaaatcctgaggaatataatcttgatgagccaaatgcagaaagtgattacacatatagcagctcctatgaacaattcaatggtgaattgccaaatggacgacataaaattcccgagtcacagttcccagagttttccacctcgttgttctctggatccttagaacctgtggcctgcggctctgtgctttctgagggatcaccacttactgagcaagaggagagcagtccatcccatgacagaagcagaacggtttcagcctccagtactggggatttgccaaaagcaaaaacccgggcagctgacttgttggtgaatcccctggatccgcggaatcgagataaaattagagtaaaaattgctgacctgggaaatgcttgttgggtgcataaacacttcacggaagacatccagacgcgtcagtaccgctccatagaggttttaataggagcggggtacagcacccctgcggacatctggagcacggcgtgtatggcatttgagctggcaacgggagattatttgtttgaaccacattctggggaagactattccagagacgaagaccacatagcccacatcatagagctgctaggcagtattccaaggcactttgctctatctggaaaatattctcgggaattcttcaatcgcagaggagaactgcgacacatcaccaagctgaagccctggagcctctttgatgtacttgtggaaaagtatggctggccccatgaagatgctgcacagtttacagatttcctgatcccgatgttagaaatggttccagaaaaacgagcctcagctggcgaatgtcggcatccttggttgaattcttagcaaattctaccaatattgcattctgagctagcaaatgttcccagtacattggacctaaacggtgactctcattctttaacaggattacaagtgagctggcttcatcctcagacctttattttgctttgaggtactgttgtttgacattttgctttttgtgcactgtgatcctggggaagggtagtcttttgtcttcagctaagtagtttactgaccattttcttctggaaacaataacatgtctctaagcattgtttcttgtgttgtgtgacattcaaatgtcatttttttgaatgaaaaatactttcccctttgtgttttggcaggttttgtaactatttatgaagaaatattttagctgagtactatataatttacaatcttaagaaattatcaagttggaaccaagaaatagcaaggaaatgtacaattttatcttctggcaaagggacatcattcctgtattatagtgtatgtaaatgcaccctgtaaatgttactttccattaaatatgggagggggactcaaatttcagaaaagctaccaagtcttgagtgctttgtagcctatgttgcatgtagcggactttaactgctccaaggagttgtgcaaacttttcattccataacagtcttttcacattggattttaaacaaagtggctctgggttataagatgtcattctctatatggcactttaaaggaagaaaagatatgtttctcattctaaaatatgcattataatttagcagtcccatttgtgattttgcatatttttaaaagtacttttaaagaagagcaatttccctttaaaaatgtgatggctcagtaccatgtcatgttgcctcctctgggcgctgtaagttaagctctacatagattaaattggagaaacgtgttaattgtgtggaatgaaaaaatacatatatttttggaaaagcatgatcatgcttgtctagaacacaaggtatggtatatacaatttgcagtgcagtgggcagaatacttctcacagctcaaagataacagtgatcacattcattccataggtagctttacgtgtggctacaacaaattttactagctttttcattgtctttccatgaaacgaagttgagaaaatgattttccctttgcaggttgcacacagttttgtttatgcatttccttaaaattaattgtagactccaggatacaaaccatagtaggcaatacaatttagaatgtaatatatagaggtatattagcctctttagaagtcagtggattgaatgtctttttattttaaattttacattcattaaggtgcctcgtttttgactttgtccattaacatttatccatatgcctttgcaataactagattgtgaaaagctaacaagtgttgtaacaataatccattgtttgaggtgcttgcagttgtcttaaaaattaaagtgttttggtttttttttttccagaaaaaaaaaaaaaaaaaaaaaaaaaaaaaattcctgc

SEQ ID NO: 923 - DNA, 160 bp, Homo Sapiens
  misc_feature (23)..(23): n is a, c, g, or t
  misc_feature (36)..(36): n is a, c, g, or t
  misc_feature (46)..(46): n is a, c, g, or t
  misc_feature (94)..(94): n is a, c, g, or t
  misc_feature (150)..(150): n is a, c, g, or t
aatttcaccataattttattttntatttacagtttncagttttccnccagcagcctgaggaaactcaaaggcacagttcccagatactccgagngaacctccatctctggcaacagtttccataacaacaggaatcagggatgtggaggncgatgtagta

SEQ ID NO: 924 - DNA, 557 bp, Homo Sapiens
  misc_feature (54)..(54): n is a, c, g, or t
  misc_feature (171)..(171): n is a, c, g, or t
  misc_feature (257)..(257): n is a, c, g, or t
  misc_feature (276)..(276): n is a, c, g, or t
  misc_feature (289)..(289): n is a, c, g, or t
  misc_feature (435)..(435): n is a, c, g, or t
  misc_feature (445)..(445): n is a, c, g, or t
  misc_feature (451)..(451): n is a, c, g, or t
  misc_feature (487)..(487): n is a, c, g, or t
  misc_feature (508)..(508): n is a, c, g, or t
  misc_feature (515)..(515): n is a, c, g, or t
  misc_feature (522)..(522): n is a, c, g, or t
  misc_feature (538)..(538): n is a, c, g, or t
  misc_feature (555)..(555): n is a, c, g, or t
ttttttttttttgagacggagcccgctctgtcgcccaggctggagtgcagcggngtttaggctttttaagggaccccctcccaatcagggcaacagagggatgcccaaggtgaccgccaacaccttcctggggggctgactccagggctcaggaggaagggaccagccttnttcgccaagagggggagccctagcatgcacttctgggctggctttacccaaatagtgaggcaccccaggtttgggagacctccctntccccactccaaacaccantgggtcagggggntgccagccagccaccttccagcagcccagggcagggaaggccggaaatgatggcaggcccaaatttcctttttgggtgggggttttcctgttaagttggggggagccgcccaggggcagggattcattaaatggggttgattcttnaggttttttnggttcntaacccggagaaagccagggttttggaaggtttganttttttttttccacgggccanttgtttnccagagnctttaaggctttgggnaagaccagttttggttnag

SEQ ID NO: 925 - DNA, 247 bp, Homo Sapiens
atgtcatctatggaattgcgtcctttttcttcttgtatgggatcattctgttggcagaaggcttttacaccacaagtgcagtgaaagaactgcacggtgagtttaaaacaaccgcttgtggccgatgcatcagtagaatgttcgttttcctcacctatgtacttggagtagcctggctgggtgtgtttggttctcatcggtgccgtgtttatgttctacaacaaatggtcaacttgtgaagtcatca

SEQ ID NO: 926 - DNA, 599 bp, Homo Sapiens
ttttctctctcatggtagggttatgagtcagttgccaaaaggtggggacatttcctgatgcatttgcaacactgagaagttatcttaagggaggctgggccccattctactcatctggcccagaaagtgaacaccttgggggccactaaggcagccctgctaggggagacgctccaacctgtcttctctctgtctcctggcagctctcttggcctcctagtttctacctaatcatgtccctggtggaggccatcagcctctggaatgaaggggtgctggcagcggacaagaaggactggaagggagccctggatgccttcagtgccgtccaggacccccactcccggatttgcttcaacattggctgcatgtacactatcctgaagaacatgactgaagcagagaaggcctttaccagaagcattaaccgagacaagcacttggcagtggcttacttccaacgagggatgctctactaccagacagagaaatatgatttggctatcaaagaccttaaagaagccttgattccagcttcgagggaaccagctgatagactataagatcctggggctccagttcaagctgtttgcctgtga

SEQ ID NO: 927 - DNA, 1449 bp, Homo Sapiens
atggtggagaagggccccgaggtctcagggaagcggagagggaggaacaacgcggccgcctccgcctccgccgccgccgcctccgccgccgcctcggccgcctgcgcctcgccagccgccactgccgcctcgggcgccgccgcctcctcagcctcggccgccgccgcctcagccgccgccgcccccaataatggccagaataaaagtttggcggcggcggcgcccaatggcaacagcagcagcaactcctgggaggaaggcagctcgggctcgtccagcgacgaggagcacggtggcggtggcatgagggtcggaccccagtaccaggcggtggtgcccgacttcgaccccgccaaactggcaagacgcagtcaagaacgggacaatcttggcatgttggtctggtcacccaatcaaaatctgtcagaagcaaagttggatgaatacattgccattgccaaagaaaagcatgggtacaacatggaacaggctcttgggatgctcttctggcataaacataatatcgaaaagtcattggctgatttgcccaactttacccctttcccagatgagtggactgtggaagataaagtcttatttgagcaagcctttagttttcatgggaaaacttttcatagaatccaacaaatgcttccagataaatctatagcaagtctggtgaaattttactattcttggaagaagacgaggactaaaactagtgtgatggatcgccatgcccggaaacaaaaacgggagcgggaggagagcgaggatgaactggaagaggcaaatggaaacaatcccattgacattgaggttgatcaaaacaaggaaagcaaaaaggaggttccccctactgagacagttcctcaggtcaaaaaagaaaaacatagcacacaagctaaaaatagagcaaaaaggaaacctccaaaaggaatgtttctttctcaagaagatgtggaggctgtttctgccaatgccactgctgctaccacggtgctgagacaactagacatggaattggtttcagtcaaacgacagatccagaatattaaacagacaaacagtgctctcaaagaaaaacttgatggtggaatagaaccatatcgacttccagaggtcattcagaaatgtaatgcacgttggactacagaagagcagcttctcgccgtacaagccatcaggaaatatggccgagattttcaggcaatctcagacgtgattgggaacaaatcagtggtacaagtgaaaaacttttttgtaaattatcgacgccgcttcaacatagatgaagttttacaagaatgggaggcagaacatggtaaagaagagaccaatgggcccagtaaccagaagcctgtgaagtccccagataattccattaagatgcccgaagaggaagacgaggctcctgttctggatgtcagatatgcatctgcctcctga

SEQ ID NO: 928 - DNA, 419 bp, Homo Sapiens
tcatgactgaaaaggagctttggaaatcactgcataaggcttgatttatttgcacaactttctttagggttgcagctagaacaaacctgtgcgctttgaaatgttaccttctgctctctgttcccaagtacagagaaataatgttgcaaatctcacttctgctgaacattatgcttcctgatgcatttagcagacactaaacatttgtcatactctaaacaaagttacaaaggactagaagaattcttgttctgtatttaggaaacccactcacattacttgatatttggggtatttaagtcatggaaagggtatttcttctagggaggcagtggattctaaagtgtatggcttaaccagtcagttgagtgtctactcttgtgtgttcacaggtgtacacaaggttttggggtaattag

SEQ ID NO: 929 - DNA, 318 bp, Homo Sapiens
  misc_feature (175)..(175): n is a, c, g, or t
actggtttttcgaagctttatcaacatttcaaatattttattattgcatcaccagaactataacagtgagaaaaggtatagttgtttctaggcatgttaacgaagcaggtgtttcctttgtgtcctatctttgcattaattttaaataaccttcaccacagctacagtttttttnctgggctctatcagctttaatgcaacggcagaagcttaagcaactggtcatgagaggtcaagtggtttacttctgtatcccttccatgtacaagagacatccatttgattctcaagagagccaaataggtcagcctcttcagc

SEQ ID NO: 930 - DNA, 447 bp, Homo Sapiens
  misc_feature (369)..(369): n is a, c, g, or t
ttttttttttttttttgctgagaccggtaatattctttgtttatagtagtaatatcatttggaatagcgtgtttaagagtaataaatacagtctcttggacacgggactcacttatcagttcatactacaataaaatcattttggaaaatatactactaataatatatttcaccaaaaaacaatattacaattttctttaaaattataccaattatgactcatacaatagcaacacctagaaaacattttgtctgacgtcataaaatgagtgcagatataaaagaatcaacagcagataatgcacctaattcatggattaaagacaaagattaaaaaggaaagaagagtttgtcattttacatatcagnggaaatataataagttaagtctacaataatctgggttgaatgcatcacacttacacattgaaaatttatcagactgac

SEQ ID NO: 931 - DNA, 328 bp, Homo Sapiens
aggtaaagtaagtgggaaatgaggtaagcttgctagctacacaaatcatcttcacaactcgaagctcaaataccctcagtgttcagctggtgtatcttcactatttgatgtgcagtaaatattctcgcttctttttcactataagagcaacgtcattttcagtgtccacaagctggattcacgtagatcccccaaatccttaaacatctgtgaccgttggtgtataaacggtcgaagcatttgatcaacttcctaaaaaaaaagtgaaaaaaattatagtgatagatttcatgtcatcagtaaaaaatgtgtgtgtatgagtggggtg

SEQ ID NO: 932 - DNA, 1086 bp, Homo Sapiens
agcatagtgcctggcacagtgcaggttctcaatgagtttgcagagtgaatggaaatataaactagaaatatatccttgttgaaatcagcacaccagtagtcctggtgtaagtgtgtgtacgtgtgtgtgtgtgtgtgtgtgtgtgtgtaaaaccaggtggagatataggaactattattggggtatgggtgcataaattgggatgttctttttaaaaagaaactccaaacagacttctggaaggttattttctaagaatcttgctggcagcgtgaaggcaacccccctgtgcacagccccacccagcctcacgtggccacctctgtcttcccccatgaagggctggctccccagtatatataaacctctctggagctcgggcatgagccaccaaggccacccatccaggcacctctcagcacagcagagctttccagaggaagcctcaccaagcctctgcaatgaggttcttctgtgcacgttgctgcagctttgggcctgagatgccagctgtccagctgctgcttctggcctgcctggtgtgggatgtgggggccaggacagctcagctcaggaaggccaatgaccagagtggccgatgccagtataccttcagtgtggccagtcccaatgaatccagctgcccagagcagagccaggccatgtcagtcatccataacttacagagagacagcagcacccaacgcttagacctggaggccaccaaagctcgactcagctccctggagagcctcctccaccaattgaccttggaccaggctgccaggccccaggagacccaggaggggctgcagagggagctgggcaccctgaggcgggagcgggaccagctggaaacccaaaccagagagttggagactgcctacagcaacctcctccgagacaagtcagttctggaggaagagaagaagcgactaaggcaagaaaatgagaatctggccaggaggttggaaagcagcagccaggaggtagcaaggctgagaaggggccagtgtccccagacccgagacactgctcgggctgtgccaccaggctccagagaaggtaagaatgcagagtgggggg

SEQ ID NO: 933 - DNA, 516 bp, Homo Sapiens
  misc_feature (382)..(382): n is a, c, g, or t
  misc_feature (400)..(400): n is a, c, g, or t
  misc_feature (427)..(427): n is a, c, g, or t
  misc_feature (433)..(433): n is a, c, g, or t
  misc_feature (446)..(446): n is a, c, g, or t
  misc_feature (455)..(455): n is a, c, g, or t
  misc_feature (460)..(460): n is a, c, g, or t
  misc_feature (468)..(468): n is a, c, g, or t
  misc_feature (508)..(508): n is a, c, g, or t
tttttttttggagagacagggtttccatatgttgcccaggctggtcttaaactcctaggctcaaacaaccctcccacctcagcctcccaaagtgctgggattccaggcatgagccaccaagtactagttgtctaccctagtgattgcgcggcttactgggaactgcaactcactgttgctgcccagcttcgtgacagatactgtactgcatatcgccagcctgggaaaagatcaaaacccaatattcaaagtatagttttgactgaatgtgtgtccctttcataccatcgtaaagtgcataaattgtaagttgaagaccatctatatattattgtatgtctttttttctttcttaggtcagttcccgctatgttttccgggntggagtggggcagtgggntatttcacaggatcagtgatcattggnacactncagccttcaactnccggggttnagggnattttgcnccaggccttgggttagttaggggttcaggggcaccttttnttaggggt

SEQ ID NO: 934 - DNA, 2640 bp, Homo Sapiens
cttggcacgaggctttgtgccacagccggcgacccggagccgagagcgggcggcggagcctgagctggacgcggccacgccggcgcggcgggatatgtggtgcctgtcataagctccagagagctgccttccacaagaccagcagaagagtgggcaaacatgaaatccaatcctgctatccaggctgccattgacctcacagcgggggctgcaggaggtacagcatgtgtactgaccgggcagccctttgacacaatgaaagtgaagatgcagacgttccctgacctgtaccggggcctcaccgactgctgcctgaagacttactcccaggtgggcttccgtggcttctacaagggtaccagtccagcactaatcgccaacatcgctgagaactcagtcctcttcatgtgctacggcttctgccagcaggtggtgcggaaagtggctggattggacaagcaggcaaagctgagtgatctgcagaatgcagccgccggttccttcgcctctgcctttgctgcactggtgctctgccccacggagctcgtgaagtgccggctgcagaccatgtatgagatggagacatcagggaagatagccaagagccagaatacagtgtggtctgtcatcaaaagtattcttaggaaagatggccccttggggttctaccatggactctcaagcactttacttcgagaagtaccaggctatttcttcttcttcggtggctatgaactgagccggtccttttttgcatcagggagatcaaaagatgaattaggccctgtacctttgatgttaagtggtggagttggtgggatttgcctctggcttgcggtatacccagtggattgtatcaaatccagaattcaagttctttccatgtctggaaaacaggcaggatttatcagaacctttataaatgttgtgaaaaatgaaggaataacggccttatattctggactgaaacctactatgattcgagcattccctgccaatggagcactctttttggcctacgaatatagcaggaagttgatgatgaaccagttggaagcatactgaagtgtcttggtgggcctgagccaagcacaggtgtttgaggactacagttcatctcagggtttcttggagtacaagaccagtgtgaagttattctgatttcttgggaattttgctttttgtcttcccttctaccctacatcttaaactttatggaagaacctctattttgcatcatatcatttctgtccataattgtactgaaatagaaaagtgaccgctcttgctcttggtaaaatatagagtggtcagtagccttatgcacctaattcaaaaggtggaatatagttctgtcagggcttttacgtaaacctccacttgtacatgcaatttggacagttatgtgttgagggaaatacagtttggtaccttgtttatttcaaatatcagaaaaacccagaggtgatcatttctcatgaagatgcttataaatggttgcttaacccttctagatgtagggtctgcttaatgtgtgtacttttctaagtggtggcacgtgcctgtagtcccagctactcaggaggctgaggcaggagaatcgcttgaacccgggaggcagaagttgcagtgaactgaaattgtgccactgcactccagactgggtgacacagcgagacttcatctcaaaaaaaaaaagaaaagcaattgtacttaactatgccatatgtagtatgtattcactgaccaaaaattcactgaccaaccaaccaaactccacacttcatctgatcccccatagacttggggatggacagctgttctttggccatatggtataagaggatcattcttgtcactacttaagttagcctcatcattttgtgctgctccaacaccagcagggtatctcccaataaagtgttcctaagcagcctgtatactgagtgcaagcaggctaacaattttaataatagtccataccatgtatgtgtttctgtcagcagaatgtacatgttgtacaaaacctccaggttccttaagctttttgctgtccatgaatcctctgtggcaactgtaatcacagagccagaagccagagggccagggatatgagaggctgacaaacatcaggggacatctggggaggagatccctgtcatgtctcttgtgccatggagctattatggctggtcttccatttgctttttctttaagtgaaaaccatttttctactttgcttttctctccatacttaaatggtcagtagctactgagtggtgctttatctgaataggcctggatcgaagtaaaatagaaatgggactggctttccacaggaagtaaactgcttcagagcccacagtcccctgctcagtgtccggaaagaagtcagtcatccctgttggcagtaaatcttcccacaggccgtccattagagatttaactagatatgttcaatagaaagagtctgaggcaagtggaaatgaggaacggaaacttaggttgggagaatattttttttttattcattctgtttgcttaattcagagtacagtttgtgctatttcatatctgtactccaggcagaaatataacttgaaaatactgtgtctaaagaaatttcagtggtctatcatt

SEQ ID NO: 935 - DNA, 421 bp, Homo Sapiens
gttcagtttggagtctggcacaactccattatgtggattagagagtaagatattatggatgataaagtactaaatgaaacataatatttatttataaaagtgtgtagattgttaaatcacaaaaagagtgctatgaccattatgtatgaggaaacaggcctttgacctcctggaaagcactgctcaaaagtcattagtgcccatttttgaattccccaaacagaaagcttcttagaaaacacgctgagattttatttacagggaattctttgacacatttcaattggtgtgtagtcaagtatagcaagtacttaataatgactgaatttcatgttcctacagtcatacatattcattagaagttttatgttgttggtctgatctgattcttctttgtttgtgggtggaacggcactgagag

SEQ ID NO: 936 - DNA, 2461 bp, Homo Sapiens
ccgcagccgccgccgccgccgccgccgcgatgtgaccttcagggccgccaggacgggatgaccggagcctccgccccgcggcgcccgctcgcctcggcctcccgggcgctctgaccgcgcgtccccggcccgccatggccccttcgctctcgcccgggcccgccgccctgcgccgcgcgccgcagctgctgctgctgctgctggccgcggagtgcgcgcttgccgcgctgttgccggcgcgcgaggccacgcagttcctgcggcccaggcagcgccgcgcctttcaggtcttcgaggaggccaagcagggccacctggagagggagtgcgtggaggagctgtgcagccgcgaggaggcgcgggaggtgttcgagaacgaccccgagacggattatttttacccaagatacttagactgcatcaacaagtatgggtctccgtacaccaaaaactcaggcttcgccacctgcgtgcaaaacctgcctgaccagtgcacgcccaacccctgcgataggaaggggacccaagcctgccaggacctcatgggcaacttcttctgcctgtgtaaagctggctgggggggccggctctgcgacaaagatgtcaacgaatgcagccaggagaacgggggctgcctccagatctgccacaacaagccgggtagcttccactgttcctgccacagcggcttcgagctctcctctgatggcaggacctgccaagacatagacgagtgcgcagactcggaggcctgcggggaggcgcgctgcaagaacctgcccggctcctactcctgcctctgtgacgagggctttgcgtacagctcccaggagaaggcttgccgagatgtggacgagtgtctgcagggccgctgtgagcaggtctgcgtgaactccccagggagctacacctgccactgtgacgggcgtgggggcctcaagctgtcccaggacatggacacctgtgaggacatcttgccgtgcgtgcccttcagcgtggccaagagtgtgaagtccttgtacctgggccggatgttcagtgggacccccgtgatccgactgcgcttcaagaggctgcagcccaccaggctggtagctgagtttgacttccggacctttgaccccgagggcatcctcctctttgccggaggccaccaggacagcacctggatcgtgctggccctgagagccggccggctggagctgcagctgcgctacaacggtgtcggccgtgtcaccagcagcggcccggtcatcaaccatggcatgtggcagacaatctctgttgaggagctggcgcggaatctggtcatcaaggtcaacagggatgctgtcatgaaaatcgcggtggccggggacttgttccaaccggagcgaggactgtatcatctgaacctgaccgtgggaggtattcccttccatgagaaggacctcgtgcagcctataaaccctcgtctggatggctgcatgaggagctggaactggctgaacggagaagacaccaccatccaggaaacggtgaaagtgaacacgaggatgcagtgcttctcggtgacggagagaggctctttctaccccgggagcggcttcgccttctacagcctggactacatgcggacccctctggacgtcgggactgaatcaacctgggaagtagaagtcgtggctcacatccgcccagccgcagacacaggcgtgctgtttgcgctctgggcccccgacctccgtgccgtgcctctctctgtggcactggtagactatcactccacgaagaaactcaagaagcagctggtggtcctggccgtggagcatacggccttggccctaatggagatcaaggtctgcgacggccaagagcacgtggtcaccgtctcgctgagggacggtgaggccaccctggaggtggacggcaccaggggccagagcgaggtgagcgccgcgcagctgcaggagaggctggccgtgctcgagaggcacctgcggagccccgtgctcacctttgctggcggcctgccagatgtgccggtgacttcagcgccagtcaccgcgttctaccgcggctgcatgacactggaggtcaaccggaggctgctggacctggacgaggcggcgtacaagcacagcgacatcacggcccactcctgcccccccgtggagcccgccgcagcctaggcccccacgggacgcggcaggcttctcagtctctgtccgagacagccgggaggagcctgggggctcctcaccacgtggggccatgctgagagctgggctttcctctgtgaccatcccggcctgtaacatatctgtaaatagtgagatggacttggggcctctgacgccgcgcactcagccgtgggcccgggcgcggggaggccggcgcagcgcagagcgggctcgaagaaaataattctctattatttttattaccaagcgcttctttctgactctaaaatatggaaaat

SEQ ID NO: 937 - DNA, 411 bp, Homo Sapiens
ctgatttttgcttaacacatttttttaggaatgcatctatcctattataacagagatacttaatatattatagctttgataagttgttagcatccgtgaagagaacactgtctacatccgaagaatctggccccatttctgaaaaaggaactgatattcttggagcctcagaaacgctgctgcagacaccatgcatagccactgcctcagttcaccctcacgacactatggcaccttgcaagacgatcattagtatcttcactttgtaagaggtctgagctggcccagcaaacctggctcctaaaacaacagcctttacctatagaaatcagcacacaaacaccaccattgataacaaatgtttaaatacgaattggcatcttcatgaggaaatcagcaggaaagccaagc

SEQ ID NO: 938 - DNA, 257 bp, Homo Sapiens
  misc_feature (238)..(238): n is a, c, g, or t
ttaaagttaaaaacaatcagtgatattcgaaatagcaatgctggaaatcacaggtcagatttaaaagggaaaaggaaacatcttgagcattaaaacctctatttctcacctggacatcttcacaaatgttattcttgccacttcctccctgccctcgccccctttactatgtatctcagtaggacgccaatcattctgctctttattcagagtccgacacaagcccccacgtcctagncaagttttccccggtttcc

SEQ ID NO: 939 - DNA, 1310 bp, Homo Sapiens
aagcttggcacgagggaaatgaagcctgtgatttggactccacagtgtctgctcttgccctggctttttacctagcaaagacaactgaggctgaggaagtctttgtgccagttttaaatataaaacgttctgaactacctctgcgaggtgacattgtcttctttcttcagaaggttcatattccagagagtatcttgatttttcgggatgagattgacctccatgcattataccaggctggccaactcaccctcatccttgtcgaccatcatatcttatccaaaagtgacacagccctagaggaggcagtagcagaggtgctagaccatcgacccatcgagccgaaacactgccctccctgccatgtttcagttgagctggtggggtcctgtgctaccctggtgaccgagagaatcctgcagggggcaccagagatcttggacaggcaaactgcagcccttctgcatggaaccatcatcctggactgtgtcaacatggaccttaaaattggaaaggcaaccccaaaggacagcaaatatgtggagaaactagaggcccttttcccagacctacccaagagaaatgatatatttgattccctacaaaaggtaaagtttgatgtatcaggactgaccactgagcagatgctgagaaaagaccagaagactatctatagacaaggcgtcaaggtggccattagtgcaatatatatggatttggaggcctttctgcagaggtctaacctccttgcagatctccatgctttctgccaggctcacagctatgatgtcctggttgccatgactatctttttcaacactcacaatgagccagtgcggcagttggctattttctgtccccatgtggcactccaaacaacgatctgtgaagtcctggaacgctcccactctccacccctgaagctgacccctgcctcaagtacccaccctaacctccatgcctatcttcaaggcaacacccaggtctctcgaaagaaacttctgcccctgctccaggaagccctgtcagcatattttgactccatgaagatcccttcaggacagcctgagacagcagatgtgtccagggagcaagtggacaaggaattggacagggcaagtaactccctgatttctggactgagtcaagatgaggaggaccctccgctgcccccgacgcccatgaacagcttggtggatgagtgccctctagatcaggggctgcctaaactctctgctgaggccgtcttcgagaagtgcagtcagatctcactgtcacagtctaccacagcctccctgtccaagaagtga

SEQ ID NO: 940 - DNA, 354 bp, Homo Sapiens
  misc_feature (99)..(99): n is a, c, g, or t
  misc_feature (138)..(138): n is a, c, g, or t
  misc_feature (150)..(151): n is a, c, g, or t
  misc_feature (181)..(181): n is a, c, g, or t
  misc_feature (186)..(186): n is a, c, g, or t
gtgtttttaaagccaatagaatgtttcattattgttagcttcactgaattttattattccttaactattttactctcttgtaggagatctatgcttgtnaattagctaagagatctggagtagctaattacataaatntttatgtatatnnatgtcagtgtataggtgacatttgcgacanaagtnctaggtcattgttttggaaactatcccagttcgtgtaacatatatccatcccattcaggaagcatctgggtatgtagctgcatggcagccctctccatgccctcttgtaaaaatcccttaatggtgcattatcagttgtgttatagaaacctgcttaaaaggtttcat

SEQ ID NO: 941 - DNA, 1672 bp, Homo Sapiens
aaaaaaattaaaaaaaaaaaaaaaaacagaaaaaaaaacatagtacatgccaagatattattatgacaattacaaatacaaataaattatgatctttgacctcagcatatttattaactaaaagggaagataaaacaggcacataactataacaggggcaccagtcatgggcgccgcagccgctcaggcgcctctcgggctgcctgcggcctccgctcgccttctgctgctagcgacgtcggtgcttctgctcttcgccttctctctgcccgggagccgcgcgtccaaccagcccccgggtggtggcggcggcacgggcggggactgtcccggcggcaaaggcaagagcatcaactgctcagaattaaatgtgagggagtctgacgtaagagtttgtgatgagtcatcatgtaaatatggaggagtctgtaaagaagatggagatggtttgaaatgtgcatgccaatttcagtgccatacaaattatattcctgtctgtggatcaaatggggacacttatcaaaatgaatgctttctcagaagggctgcttgtaagcaccagaaagagataacagtaatagcaagaggaccatgctactctgataatggatctggatctggagaaggagaagaggaagggtcaggggcagaagttcacagaaaacactccaagtgtggaccctgcaaatataaagctgagtgtgatgaagatgcagaaaatgttgggtgtgtatgtaatatagattgcagtggatacagttttaatcctgtgtgtgcttctgatgggagttcctataacaatccctgttttgttcgagaagcatcttgtataaagcaagaacaaattgatataaggcatcttggtcattgcacagatacagatgacactagtttgttgggaaagaaagatgatggactacaatatcgaccagatgtgaaagatgctagtgatcaaagagaagatgtttatattggaaaccacatgccttgccctgaaaacctcaatggttactgcatccatggaaaatgtgaattcatctatctactcagaagggcttcttgtagatgtgaatctggctacactggacagcactgtgaaaagacagactttagtattctctatgtagtgccaagtaggcaaaagctcactcatgttcttattgcagcaattattggagctgtacagattgccatcatagtagcaattgtaatgtgcataacaagaaaatgccccaaaaacaatagaggacgtcgacagaagcaaaacctaggtcattttacttcagatacgtcatccagaatggtttaaactgatgacttttatatgtacactgaccatgtgtatgtacatttattatgtctttttttaaagaatggaaatatttatttcagaaggccttatttttggacattttatagtgtagtactgttggctcgatatttgaatattcagctacgacagttttggactgtttagtagtctttgttttatgtttttaaatacagaaattgcttcacaaatttgtaccacatggtaattctaagacttgttctttacccatggaatgtaatatttttgcaaagatggactacttcacaaatggttataaagtcatatccacttcttccacaatgaccacagcaaatgacccaagcatgaactaaagaagag

SEQ ID NO: 942 - DNA, 331 bp, Homo Sapiens
ttttttttttttttttcaatgtttcattggtcatgatgatcaaaaaatgatggttcacacacacacacagacctcatcccacctgctgcagggtggaagcaacaccactggtactcacaccccctttggttgggttctctggtgcgccctgcagccgctgccccacccaggactctgtccttcaccctgaagttctaccgccctggttttcatttttcctcaacatggtgcctggaggctcaatgtccaggtagagatgtgaaaatcacatctgcgccgggcagggttgcaatgtccttgagttcttctccatctccctttcccaaactct

SEQ ID NO: 943 - DNA, 483 bp, Homo Sapiens
aatatatccggcctatccgataaaaatggtgatgtgtgcatttctattcttcatgagcctggggaagataagtatggttatgaaaagccagaggaacgctggctccctatccacactgtggaaaccatcatgattagtgtcatttctatgctggcagaccctaatggagactcacctgctaatgttgatgctgcgaaagaatggagggaagatagaaatggagaatttaaaagaaaagttgcccgctgtgtaagaaaaagccaagagactgcttttgagtgacatttatttagcagctagtaacttcacttatttcagggtctccaattgagaaacatggcactgtttttcctgcactctacccacctattgctggacttctgttgtacaagttggcaaacactggctggaactgggctgcaatataacatgccagttatcaatgcttgcaagagcctaacaagtgccaactttcagatgaat

SEQ ID NO: 944 - DNA, 677 bp, Homo Sapiens
aaaaaagatactctacataaagaatccttcatataaaaagttctttcttgtagtacatttaaagttttaattcactcatgtataactgagagttcctttgagccctttttaggcagggaggcatgtctgtcatctagcgtgtggcccagtaagtgattattacattggaatcagtttttcagtcttttaaaataaattctgtgccataagaataaaagataaagagaaaaattaatgttaactatttttagcttattataactatgtcaacaagtgtttattaatacctattatgggaaagtcactgtggttggcattgaaaattacatcatctttaaagcagtatttgtccccagatggactcatcactagcaaagactaggttcattggaaggcatagggtgagagaatgggaagatgaagtggaggcgggttgttaaagtgctgtcagtgagtgattttgtctacttgaataatggtccatgtttgggggcatattgtgtttcataagaagtgaaaggtatttgcaaagtaagctacaaatgacccataaatctgttaacaacagtcctttaatatgcaaagatgaaaaacaagcattactggctcccaaaggggaactggtgcttggtgatgtgcaaatggggctggtggttaagaagaactattaccggttt

SEQ ID NO: 945 - DNA, 1280 bp, Homo Sapiens
tgccgcagcccccgcccgcccgcagagcttttgaaaggcggcgggaggcggcgagcgccatggccagtccgggctgcctgctgtgcgtgctgggcctgctactctgcggggcggcgagcctcgagctgtctagaccccacggcgacaccgccaagaagcccatcatcggaatattaatgcaaaaatgccgtaataaagtcatgaaaaactatggaagatactatattgctgcgtcctatgtaaagtacttggagtctgcaggtgcgagagttgtaccagtaaggctggatcttacagagaaagactatgaaatacttttcaaatctattaatggaatccttttccctggaggaagtgttgacctcagacgctcagattatgctaaagtggccaaaatattttataacttgtccatacagagttttgatgatggagactattttcctgtgtggggcacatgccttggatttgaagagctttcactgctgattagtggagagtgcttattaactgccacagatactgttgacgtggcaatgccgctgaacttcactggaggtcaattgcacagcagaatgttccagaattttcctactgagttgttgctgtcattagcagtagaacctctgactgccaatttccataagtggagcctctccgtgaagaattttacaatgaatgaaaagttaaagaagtttttcaatgtcttaactacaaatacagatggcaagattgagtttatttcaacaatggaaggatataagtatccagtatatggtgtccagtggcatccagagaaagcaccttatgagtggaagaatttggatggcatttcccatgcacctaatgctgtgaaaaccgcattttatttagcagagttttttgttaatgaagctcggaaaaacaaccatcattttaaatctgaatctgaagaggagaaagcattgatttatcagttcagtccaatttatactggaaatatttcttcatttcagcaatgttacatatttgattgaaagtcttcaatttgttaacagagcaaatttgaataattccatgattaaactgttagaataacttgctactcatggcaagattaggaagtcacagattcttttctataatgtgcctggctctgattcttcattatgtatgtgactatttatataacattagataattaaatagtgagacataaatagagtgctttttcatggaaaagccttcttatatctgaagattgaaaaataaatttactgaaatacaaaaaaaaaaaaaaa

SEQ ID NO: 946 - DNA, 7969 bp, Homo Sapiens
gcaacctttccaagggagtggttgtgtgatcgccatcttagggagtgagtgtggccgggcttctcctgtggcgggtgtggggagcggcagccagagctcctgtggggccgctgctttggcggtgggccagccgggagcagcctctttcgaaggccgccgtgacctcttcaagggcgtggagacgggaaggaaaaggccggttggggttccagggcgccggtaacgttaacggcgccttgcctgtcctctaaccgtcgctccctcctcccctagaaagatgttctcgtccgtggcgcacctggcgcgggcgaaccccttcaacacgccacatctgcagctggtgcacgatggtctcggggacctccgcagcagctccccagggcccacgggccagccccgccgccctcgcaacctggcagccgccgccgtggaaggtgagatcagaccctgcccaatacagtcgtgtggtctacttgtgggccgcccagcctttgaggcctggacccggcttggaggacagggaaggacgagtccagcccgctgcaccgtagacggcgcccagttgcttgccctggggtatcggccttttccaccataggcgggtgtcagatccttggccttccctcaagggcgtggaagcgtgaggccctgtgtccttcgtgacctccgtgtgccgaggaagagaggccgtgactagctctttctcgccgtgagctcgcttggtcagcaaactaagtactgggtaaactctcctcccgaaactactgaccacccacagttctactaactatattacctgtcctttgatttgcccttagttttcttaaaaatagtcctttcctaagtttatatttgtcgacgccaggtcagtcatttttgcacttaattgtatatgagataactagatgtctgttttcgtgcgactggaggaggcagcttgcagcctacataggcaatagaaaggagataattggtgggcgtccctttggtgtgattatctcttgggattcttggtggttgggcccagctttaacttagttgtgtgtgttttaaatcctagtgaagtatgtacatacagagaaacctgaaaaccgatgtaggagtcctaagaatgttatctaccttgtgcctgtaaaatcgaaagatttttttctttaaatcattcatgtgcttctgttgtctttagtatgatagagtccttatttacactatctgtcgttcagtttaaaagttaaagctaacattatttgtgtattaaatgtatttgactgcaggaatttgtgcgtatccgtttttatgttacaggagttcttaagtggggatagtattggttagtggctgggataaactttgaagttgtttgcaagccttttacatgtcgagtgatctttctgagtttcgtttgtactctgaagtgtgctcttaccagtggttaataatttgaagtttgactttaattgtaaaagccgttaatgtagaaaacttttaaaaaaattaatatggcagaatacgagctattaatagtatcagatacagaaccctcataatttttaaatgatctgaatttggcagtgaatttttttttaaccgacttaattgtggccaaagctattcagctgtgataatagtatctcacagggaaacattttctttcattcagtggccttagtcatctctgaagaaatacttacttgatttttttttttccaatcaaacagagcagtatagctgtgactatggatctggcagattctttatcctttgtggacttggaggaattattagctgtggcacaacacatacagcattggttcctctagatctggttaaatgcagaatgcaggtttgttttgcatgctggactagagcatattgaagcatgactgactgttaagttataagatatagtcatctaacaagctgtgtggaaacctaactgtccaggaggtaagtttatgaccagtaacatgagttttatattaaaatgcatggtgtgtcttctcttactacagagtacagttgtgaatttggctccgcgaagtattatgcactgtgtggctttggtggggtcttaagttgtggtctgacacacactgctgtggttcccctggatttagtgaaatgccgtatgcaggtttgtattgagatgacaacattgaaagtatctctcatgtgacttaactctaaataaaatcttaaatgagaatttgaagacatcacaactgctagaaacttcagtaggaaaccacatagaatttctttaaattgtgggctttattttgactagtgttttaaatccaataaatgcctctattgtttgagtaaattgttcacttttagagtctggctgtaaatggctctttgctgctgctcttcacttctggccggagttcttcaagcttactagtgccccaaatagtcatttaacaagcacctatgtgttggagtgggtaaacaagtctgtgtattatgtgaagtaacaatgtcctttatctactaataagaccaaggcaaagagtacatgtagatttatttaaagtgctcttaatatcttagtatgaaaattttgtcagattagcctcttgtttatttacacaacattttaaaataatttgaatatattttaattaagatcattgaaacaaaaacaagacatcgaaaatttattgttccaaactggattagaagtctacttacctaaaagagaaatgaatttgaaatattaggagggagaggaaggtgagtataccatcccttctagtactggcagaaatagataagcttttcctccccccccattagttaatgtaatggatatgaaatgtacctttgctaaaacgtgttatgcatgtctcttgaagtgaatttagtttatgtgctttttttttttaacttgtgtttagtttgtttagtgttcacaaaactttatgctataagctacttaaagaactagcatatgttaggaatacagttatatctattatctagacagtagcttttaaaaagtaggaggtgggccaagcatggtcggccccagaccgtggaatgccgagcattttgggtagcggaagcaggtgggtcacttgaggtcggagttcgagatcagaactcaatctagccaacatggtgaaacctcatctctgctaaaatacaaaaattagctgggcatggtggcgtgccctgtagtcgcagctactcggaggctgaggcaggagaatcgcttgaacctgggaggtggaggttgcagtgagctgagatcacaccatggcactcatcctgggctacagagcagactcaaaaaacaaacaaacaaaaaacacaaaaaaagtagtaggagttgggtggtaagaaatctgttaagaatcagttttgttacgtatttttgttgaaattttaccctcttaactatcactccaagacttaagtttgacacagaaagcttttgttgaaattttaccctcttaactatcactccaagacttaggtttgacacagaaagctagaccttaatgtacaacagtttctatttataaaagtaatcaaatgaacaataataaacagtgataagcataaactaataaaagttatatgaatgtagttcctcactcaaaatatcttaatattttcagatgtcagttgaccttggataactgaagccacagaaaatgaactcttggataagggagagctactgtatttctttttttttttttgagatggagtcttgctctgctgcccaggctggagtgtagtggtgccatcgtgctcactgcaacctccacctccctcaggctcaagcgattgttctgtctcaccctcaccctcccgagtagctgggattacaggtgcacgccacatgcccgtccaattttttatattttagtagagatggggtttcactgtgttgcccaggctggtcttgaactcctgagctcaggtaatccacctgcctcagcctcccaaagcgatgggattacagatgtgagccaccgtgacctggcaggaattactgtagttaccttttgtgtagttgctgaaatttattatggaacccaaacaaaaataatcatgagattaaatttttatgttagctgtttggtgcatttaattttttttttcttgttttaaataaaggtggacccccaaaagtacaagggcatatttaacggattctcagttacacttaaagaggatggtgttcgtggtttggctaaaggatgggctccgactttccttggctactccatgcagggactctgcaagtttggcttttatgaagtctttaaagtcttgtatagcaatatgcttggagaggtatgtaattaactttaaaattgaatgttccgagtgtttaagactttccgagtgttcttagatttttgtctgtcttgcctattttagcactgaagaaaatggtcctacaaagtgagcaactgttttaatcgtatgcctgtgtcagcagagacaggttgataaatgtattcattaaattacaattctccttttaatatactatcttgttttctaagtaagttggattttgagttttttagagaagggctctgggactcctttgcgtagttccggggcatggcatctagatattttttgaatattcatgttgttcacatagttacgtgttttgttaatgaggttatgagaccacatatatattccatatcatcgtgtgttactttataaaatgtctgaagcttagttgttttctagaactgtcacttcaattgaaaaccaacacaacaacaattcacatcccttccttgtgttttggattttaggagaatacttatctctggcgcacatcactatatttggctgcctctgccagtgctgaattctttgctgacattgccctggctcctatggaagctgctaaggttcgaattcaaacccagccaggttatgccaacactttgagggatgcagctcccaaaatgtataaggaagaaggcctaaaagcgtaagtaaacacttaaaaatttatactatgaaagtacttattttaagtgaacttcatttttttttgtttttttttttgttttgtttttttgacgaaaagtctcgctctgtcacccaggctggagtgcagtggcgtgatctcggctcactgcaagctccgcctcccggttcacgccattctcctgcctcaatcccaaagagctaggactacaggcgcctgcactgcccagctaattttttgtatttttcagtatagacggagtttcaccgtctccatctcctgacctcatgatccgcccaccttggcctcccaaaatgctgggattacaggtgtgagccaccagcacccggcttcttttttttttttctttgagacggagttttgctcttgttgtccaggctggagtgcaatggcatatctcagctcactgcaacctccgcctcccaggttcaagtgattgtctgctcagcctgctgaatagctgggattacaggcatcaccaccacgcctggctaattttgtatttttagtagagactccatgttggtcaggctggtctcgaactcctgacctcagtgatccaccgcctcgcctcccaaagtgctgggattacaggcgtgagacaccgcgtctggctgtgaacttcattttttagtattaagcctaccagactttttaaaaagactattataacatttaatgtctatttacctgtatgtagaacataaacttgagaggtaaagataagttaatacatggtttgagccctggactgagttttttttttttccctagagtaaggaccatttgtcggtctacaaatgacttgatgtttggcctaaacatttactattaacttttagggagggcttgttagtatccttgtgatctattcacagttaagaatttccatgaccacaacatgcttccttagatccacctttgtggatgaatcttgaactgagttccacttgtaaacttcttgtttcttgtggttccagtagtcaaagaaacatccagcaacttttttggttgtatagtcaaaggtgcttgagtcattggcatgtaagagaaatatacctgcatgttagtctaacgtatctgatagaaatgacatgcatttactggccatttgttactatcaggactcgactcgtgtgcggacatttctgttaataatgacagtctctgatagatgagtgtatgcaactgtgtaaaacaagtctcttgatttcctagattctacaagggggttgctcctctctggatgagacagataccatacaccatgatgaagttcgcctgctttgaacgtactgttgaagcactgtacaagtttgtggttcctaagccccgcagtgaatgttcaaagccagagcagctggttgtaacatttgtagcaggttacataggtacgaattacttagaacacacttgtctgaaattatgaacaaataatcatttccattattggcgttttttgagagggaaaaatactccaaaggttataaagcagtgtttttgtttttttggtttcctgaggcatagtctcgctctgttgcccaggctggagtgcagtggcatgataatagctcactgcaacctcctcctcctgggttcaagtgattcttctgccgcagcctcccaagtagctgggacaggcatgcaccgccatgccgcgctgatttttgtttttgttttttgtttttttttgagatggagttttgcccttgttgcccaggctggagtgcagtggtgcaatcttggctcactgcagcctccgcctcctgggttcaagcgattctcctgtctcagcctcctgagtagctgggattgcaggcgtctgcactacgcccggctaatttttagtatttttagtagagacggtttcactatgttggccaggctggtctcaaactcctggggcaggtgatctgcctgcctcgcgctcccaaagtgctgggattacaggcgtgagccaccgccgacctggcctgatttttgtaaagatggggtttcaccatgttgatgagtctggtctcaaactcctgacctcaggtgatgtgcctggcctataaagcagttttatcttcccataacattttatatgctttttaggattcataaatacttgctaactagttcctaaaagggctgtttcatgggatgtcattattaggcttgggaatgtattgatcttactgttgcaccatttttttgttgttgtttattaagaattttatacagaaagtgttgaataaaatctgaaaaactttaaaagattgttccgttttacatagatagacagcttgataactgtacccgtgtcaccctgagtctgatttttattttagaactagaaaaatattattttaaaatcataaaaatgattattggctctgtgaagttttgtttttaactggcactgtatgggatcctttatcttttttcagctggagtcttttgtgcaattgtttctcaccctgctgattctgtggtatctgtgttgaataaagaaaaaggtagcagtgcttctctggtcctcaagagacttggatttaaaggtaggatgatgtttttttcttgaaagaaagaacaacagttttggatatgttgcatttttttcatttgcttttcctgtttgaaccaggtgtatggaagggactgtttgcccgtatcatcatgattggtaccctgactgcactacagtggtttatctatgactccgtgaaggtctacttcagacttcctcgccctcctccacccgagatgccagagtctctgaagaagaagcttgggttaactcagtagttagatcaaagcaaatgtggactgaatctgcttgttgatcagtgtttgaagaaagtgcaaaaggaacttttatatatttgacagtgtaggaaattgtctattcctgatataattactgtagtactcttgcttaaggcaagagtttcagatttactgttgaaataaacccaactgttcatg

SEQ ID NO: 947 - DNA, 429 bp, Homo Sapiens
tttttttagtagcgatggggtttcgtcatgttgcccaggctggtctcaaactcctgagctcaagcgatccgcctgcctcgtcctcccaaagtgctaggatttcaggagtgtgccaccacacctagccaacctgggtttgttttaatgctctgctgtggctatcttgaaattcttcctaatttttgaacaaggagccctacatctacattctgcaccaagtcccagtagttacctagccagtcctgccgaacactaactccattcagtcacttcaagacatcttgtaagtctgggaagctgtgccaaaagaaatggggtgtggtcaggcaaggggtgaggctttgggctgaggtgtgggggctgctcagcacaggggagcccagggttcctggaacggggcaagacaccagcatggaccaaggaaacagg

SEQ ID NO: 948 - DNA, 891 bp, Homo Sapiens
agggtacgagacgggggtgaatcggacgaggcggagagacctgggcttggcgcgggcgggagctgcggcggatacccttgcgtgctgtggagaccctactctcttcgctgagaacggccgctagcggggactgaaggccgggagcccactcccgacccggggctagcgtgcgtccctagagtcgagcggggcaagggagccagtggccgccgacgggggaccgggaaacttttctgggctcctgggcgcgccctgtagccgcgctccatgctccggcagcggcccgaaacccagccccgccgctgacggcgcccgccgctccgggcagggcccatgccctgcgcgctccgggggtcgtaggctgccgccgagccggggctccggaagccggcgggggcgccgcggccgtgcggggcgtcaatggatcgccactccagctacatcttcatctggctgcagctggagctctgcgccatggccgtgctgctcaccaaaggtgaaattcgatgctactgtgatgctgcccactgtgtagccactggttatatgtgtaaatctgagctcagcgcctgcttctctagacttcttgatcctcagaactcaaattccccactcacccatggctgcctggactctcttgcaagcacgacagacatctgccaagccaaacaggcccgaaaaccactctggcaccaccatacccacattggaatgctgtcatgaagacatgtgcaaattaccagagggctgcacgatgttctctctcctccccaggggtgaggcctcaggaccagggaacaggtatcagcatgatggtagcagaaaccttatcaccaaggtgcggagctgacttcttccaaagaagttgtggttccgggcgcgggccattgc

SEQ ID NO: 949 - DNA, 427 bp, Homo Sapiens
  misc_feature (377)..(377): n is a, c, g, or t
  misc_feature (419)..(419): n is a, c, g, or t
ctctcaattggtttaataccacgatagaaaagataaatattttaggatggaatcttaaatatgtctgtccttttgtttcatatagttgaaatcaattcagtattgtttctacattaggtgtttcaaaaacagtcacctttgcaacagaagagctcttttgttgaaaatgattcacaatatatttcagttggaatgtcaggtggtatttctcttaccaacacctcacagaatctatgccaagctgctctaccaccaatgcaagtatttttttaaaggctacttaaaataaactttcttcaccagccaacttctaatttgggagacagtgtggcattgggtggaagggacctcgttcaggaataaggtttggaatgtcntacttgaactaaggagggattttttgttcgttttgggggggnggaggatt

SEQ ID NO: 950 - DNA, 1468 bp, Homo Sapiens
gtcgaccccgcccccacctcctatcgagccctggctctccgggcagctggaggggtcgcgctgcgcctgttggggctgcacctcggaccagggcttctgctgcatctgcagccatgtcgggccgctcagtgccacatgcccacccggccaccgccgagtacgaatttgccaacccgagccgcctgggtgagcagcgcttcggagaaggtatggcacagacaccacccccttgccccccacccccaccccctgaaattctgggctgacctcccaacgttgctggcctccaccccactctgggcttaactgatctcctgggaccagccaccccccaccccagactacccctcatcccctccaagcagagatctttcccattcctgctgacctcaagacacacttggtgcttgcagtgctgatacctgctctttgccggcctgggtgtgcctccttgtcccccttctatccacccaggccgtttggtgcctcctcctcctccccctcctcctccttctcctcctcctcctccctttcctttccgttctctttcccctcttccgagctgccttctcctcctagctacagtgtggcctccctcccgttccctactcctcctgactcccctcttgctcttcccaatccctcctctccagatttcccatttcgcccctgtgccagcctcatcctccctcatcctgcctcttgccttctctctgccctttaggcctcctgccagaagagatcctgacccccacactctaccatggctactatgtccggcctcgggccgccccagctggggagggcagcagggcaggggcctccgagcttaggctcagtgagggcaagttccaggcatttctggatgtgagccactttaccccagacgaggtgactgtgaggactgtggataacctgctggaggtgtctgcccggcacccccagcgcctggaccgccacggcttcgtgtcccgagagttctgccgcacctatgtcctgcctgctgatgtcgacccctggcgagtccgagctgctctctcccatgatggcatcttaaacctggaagcacctcggggtggccgacatttggacacagaggtcaatgaggtctacatctccctgctccctgcgcctcctgatccagaggaagaggaggaggcagccatagttgagccctgattgccacagacccagcacccagcaaatccctctctacctcccaaggtgatatgggcagctgcccaccactccagaggtagcagcatccttgggggaagggaaaggtgcatggtccacaatgtatggtttggtcccatgggacatgtcatagccttggtttagttttgggtggagctgaataaacccaaatctcagggccttgtttgtactgctccctattctgtggccgggaagctgggatggggagggagggaggaggtcacagccagctagacaaaaagctcctcag

SEQ ID NO: 951 - DNA, 426 bp, Homo Sapiens
taaattcgcggccgcgtcgactttttttactcttatgttatgaatatttatttttttttttttttttttttttttactcttatgttatgaatatttatttttttctccttaaaaatgtacaaaaaataaaataactgtatttatagtttatagattccccctctcccatttacaaaactattaagttacatttacctttttttttttaaaaacatgagagcaaattgtacatatatcaatctcccttgcttggctttaagaaagggccgttcatagcatttggcacaaaccctctatttctgttgcatttgcatgattttaaataagaaggaaaataaacatttgatttatttcatgcttcctaagtttctgggcagggacatgccttactcttttagaaaccaattccaagatgacatctgactg

SEQ ID NO: 952 - DNA, 731 bp, Homo Sapiens
  misc_feature (464)..(464): n is a, c, g, or t
  misc_feature (470)..(470): n is a, c, g, or t
  misc_feature (695)..(695): n is a, c, g, or t
gcggccgccgggccccggggttgaggcgaggagcccgcgggcggccggtcgggcggggcggcggcgctgacagcatcctgaggttagcattacacttctcccagtggagcccatgacttctgatcaggacgctaaggttgtggctgaaccgcagacgcagagagtccaggagggcaaggacagcgctcatttgatgaatggtcctatatctcaaaccacttctcagacaagttccattcccacctttgagtcaggtaccagcaactaaggtttcagagctgaaccctaatgcagaagtgtggggggctcctgtgttacatctggaagcaagcagtgctgctgacggtgtgagtgctgcatgggaggaggtggctggccaccacgcagaccgtggcccgcagggatcggatgccaatggtgatggtgaccagggccatgagaatgccgcattgccagacccgcangagtcngacccagcagacatgaacgctctcgctctgggtccctcagaatatgactctctgcctgaaaatagcgagacaggaggaaatgagtctcaaccagacagccaggaagacccccgagaagtacttaagaaaacattggaattctgcttatctaaggagaaccttgctagtgacatgtatcttatattacagatggatagtgaccagtatgtgccaatcacaaccgtnggctaccttgaccacatcaagaagcctaacactgat

SEQ ID NO: 953 - DNA, 555 bp, Homo Sapiens
  misc_feature (31)..(31): n is a, c, g, or t
  misc_feature (517)..(517): n is a, c, g, or t
  misc_feature (551)..(551): n is a, c, g, or t
agatgtgaaggttgtcatcctgggacagatnccatatcatggacctaatcaagctcacgggctctgctttagtgttcaaaggcctgttccgcctccgcccagtttggagaacatttataaagagttgtctacagacatagaggattttgttcatcctggccatggagatttatctgggtgggccaagcaaggtgttctccttctcaacgctgtcctcacggttcgtgcccatcaagccaactctcataaggagcgaggctgggagcagttcactgatgcagttgtgtcctggctaaatcagaactcgaatggccttgttttcttgctctggggctcttatgctcagaagaagggcagtgccattgataggaagcggcaccatgtactacagacggctcatccctcccctttgttcagtgtatagagggttctttgggatgttagacactttttcaaagaccaatgagctgctgcagaaagtctgggcaagaagcccattgaattggaagggaggctntgattcattcagcttagggggttggccttttagnagtt

SEQ ID NO: 954 - DNA, 477 bp, Homo Sapiens
  misc_feature (10)..(10): n is a, c, g, or t
  misc_feature (39)..(39): n is a, c, g, or t
  misc_feature (63)..(64): n is a, c, g, or t
  misc_feature (120)..(120): n is a, c, g, or t
  misc_feature (400)..(400): n is a, c, g, or t
  misc_feature (453)..(453): n is a, c, g, or t
ttcggcacgnggggagcctccgcctggggggcccccatnccctggctgtcccccagctgcgcnnccccgccccacccccgcggctgagccaccaccggtgcagtggtctccgcttgggancgaggccttgagcttcgttccacagcttctttgcatcttggatttcggggcggccccctcccccacctctctctgcctttttgtaccccgctttttttctgcgttctgctcggtttttgtagccgtctgtttttgcaccccatttcgttttgtttctagacggtttgggggggggtgaagctgcattcataccccttcctcttgttattctcccctgctctgacagcaccccttttcatcgcagttggggggcctaggatcggtgcatcttccgccgcgntgccagcaaccccgcagcggtgggtcgtgcaacccggaatctgcagcagttgnatatctgaggggggtttctttgcc

SEQ ID NO: 955 - DNA, 422 bp, Homo Sapiens
  misc_feature (292)..(292): n is a, c, g, or t
  misc_feature (336)..(336): n is a, c, g, or t
  misc_feature (399)..(399): n is a, c, g, or t
  misc_feature (408)..(408): n is a, c, g, or t
cggatactgctggtttctgccttctccatgctgagaacaaaatcacctattcactgcttatgcagtcggaagctccagaagaacaaagagcccaattaccagaaccacattaagtctccattgttttgccttgggatttgagaagagaattagagaggtgaggatctggtatttcctgggtctaaattccccttgaggaagacgaagggatgctgcagttccaaaagagaaggactcttccagagtcatctacctgagtcccgaagctccctgtcctgaaaaccacagacantatgggtcccaaatgactgactgcaccttctgtgccttcagccnttcttggacatcaggatcttctgtttccacatccacacaggccattacatttattcaaaccantgttatggnacaggtgtagggca

SEQ ID NO: 956 - DNA, 295 bp, Homo Sapiens
tttttttttttttttttttttaagcacatagctacatatttattaatcaggaaaacatatatagagaaatttaccctcaataatcagaaaatatacattcttttcaagtacaactggaagcattcactaaattaactatgtactaggccacaaagatgcaacaatatactccaaaaagttaatatcatgcaaatcatgttctctgacaataatccaatatagaaagaaagcaatgatacaattttaaaagaatataccagcaaactaaatatctaagaaaaccttcagttaaaag

SEQ ID NO: 957 - DNA, 323 bp, Homo Sapiens
  misc_feature (194)..(194): n is a, c, g, or t
  misc_feature (217)..(217): n is a, c, g, or t
  misc_feature (225)..(225): n is a, c, g, or t
  misc_feature (247)..(247): n is a, c, g, or t
  misc_feature (267)..(267): n is a, c, g, or t
ctttgtcagttttgtacattcccaagcatgccagcttctgtgcccatggaccttgctgcatcctgcacagcagggttcagtttcatgtatctttgtcttttcctctagaacctgcctttttcaaatatccctgccttttcccaccttggaaacatatactgtatgtggaaagagttgatatatggcaaagtaantcaaacctgggccatgtactttnggaaaagnaaggcataggaggatggaattnttgggtgtttcttcacaacnttaaacggaaaaatttcgttggcggatcttgatttccaggaaggaattcttttttg

SEQ ID NO: 958 - DNA, 421 bp, Homo Sapiens
  misc_feature (137)..(137): n is a, c, g, or t
ctggctggtaactctcagctgccctggccaataactgacatgtagaaggagggtacaaaagacgggctcccttgctttaaggaggcctaactgtggtgccatttgtgctcagagttccccatgagagcaagcggaantaggtctccacgtgagaccacactctggctcagccttagcctttttctcgccctgtcttgcttccctcacccccttctcctgagagcatttccccaataattcacttgaacaagaatgctcagcttaggctctgcttctagggaacctggacccatgacacgctctgttagcttcctgaggagactatcttgttagttcccctaggaacaaattcctgtcttgggactctgcttatgatcactcccttcattcccctggccaagaatggacagctcagtggagg

SEQ ID NO: 959 - DNA, 364 bp, Homo Sapiens
  misc_feature (39)..(39): n is a, c, g, or t
  misc_feature (253)..(253): n is a, c, g, or t
ggcacgagtttagctatttatatatgcagtactctcagncatatgcagaaatacttttttttttttaattaatagttacaggcttgttggtccagtgggatttgggtagggggagaaagataccttctaaaatggatcaatagaaccaaaataatacagcatgttctataaccacaaggaaatcaaatgatcctgtcatgattccagttagtcataactatgttagcagtgctaaatgcattttagaaatggngacttctgtggttttcctagcatttgtctctaacaaatggtgaaataattactcatggccctctctgccattgtctttcattttttcacagtgaaattagacccctttact

SEQ ID NO: 960 - DNA, 316 bp, Homo Sapiens
  misc_feature (261)..(261): n is a, c, g, or t
cccgcgggaacacagctagggagtgggtaggagcaggatctgccgacgagggcagaggcggaaaatcctcgggcgatgagctgaagaggcccgggtccgggagggatgctgggagcttgactcactcgcacaccatgtgtccctccgcgcgcagacgggggacttttcggtggggattttgggcgccgaccagacgcggcattttcggaaaatagcgccctgtgcagctgaagcgctttgtgtgtagcggggccgcgtcanccggccgggtacgaggcgcctcgggtccccgcaccacctcctgctgccttcccgt

SEQ ID NO: 961 - DNA, 487 bp, Homo Sapiens
  misc_feature (454)..(454): n is a, c, g, or t
cagccaggtcggccgcccccaccaggtccagttccagagcccaggccggtcggccgggcccgcgtgccctcggcgggctgcgcagagcgcgggagcggtttggggctgggcatgctgggagcccctcgggcaacggccgccgccgccacagccacacagccgccgccactgcgtccgtccccggtgagcgccgctgacgcgcggagatgaaattcccggcctcggtgctggcgtccgtgttcctgttcgtggccgagacaacggcggcgctcagcctgagcagcacctaccgctcgggcggggaccgcatgtggcaggcgctgacgttgcttttctcgctactgccttgcgcgctcgtgcagctcacgcttctcttcgtacaccgcgacctcagccgcgaccgcccgctcgtactgctgctgcacctgctgcaacttgggccccttttaggtgntttgaagtcttctgcatctactttcagtcaggt

SEQ ID NO: 962 - DNA, 2947 bp, Homo Sapiens
ggcgggaaacagcttagtgggtgtggggtcgcgcattttcttcaaccaggaggtgaggaggtttcgacatggcggtgcagccgaaggagacgctgcagttggagagcgcggccgaggtcggcttcgtgcgcttctttcagggcatgccggagaagccgaccaccacagtgcgccttttcgaccggggcgacttctatacggcgcacggcgaggacgcgctgctggccgcccgggaggtgttcaagacccagggggtgatcaagtacatggggccggcaggagcaaagaatctgcagagtgttgtgcttagtaaaatgaattttgaatcttttgtaaaagatcttcttctggttcgtcagtatagagttgaagtttataagaatagagctggaaataaggcatccaaggagaatgattggtatttggcatataaggcttctcctggcaatctctctcagtttgaagacattctctttggtaacaatgatatgtcagcttccattggtgttgtgggtgttaaaatgtccgcagttgatggccagagacaggttggagttgggtatgtggattccatacagaggaaactaggactgtgtgaattccctgataatgatcagttctccaatcttgaggctctcctcatccagattggaccaaaggaatgtgttttacccggaggagagactgctggagacatggggaaactgagacagataattcaaagaggaggaattctgatcacagaaagaaaaaaagctgacttttccacaaaagacatttatcaggacctcaaccggttgttgaaaggcaaaaagggagagcagatgaatagtgctgtattgccagaaatggagaatcaggttgcagtttcatcactgtctgcggtaatcaagtttttagaactcttatcagatgattccaactttggacagtttgaactgactacttttgacttcagccagtatatgaaattggatattgcagcagtcagagcccttaacctttttcagggttctgttgaagataccactggctctcagtctctggctgccttgctgaataagtgtaaaacccctcaaggacaaagacttgttaaccagtggattaagcagcctctcatggataagaacagaatagaggagagattgaatttagtggaagcttttgtagaagatgcagaattgaggcagactttacaagaagatttacttcgtcgattcccagatcttaaccgacttgccaagaagtttcaaagacaagcagcaaacttacaagattgttaccgactctatcagggtataaatcaactacctaatgttatacaggctctggaaaaacatgaaggaaaacaccagaaattattgttggcagtttttgtgactcctcttactgatcttcgttctgacttctccaagtttcaggaaatgatagaaacaactttagatatggatcaggtggaaaaccatgaattccttgtaaaaccttcatttgatcctaatctcagtgaattaagagaaataatgaatgacttggaaaagaagatgcagtcaacattaataagtgcagccagagatcttggcttggaccctggcaaacagattaaactggattccagtgcacagtttggatattactttcgtgtaacctgtaaggaagaaaaagtccttcgtaacaataaaaactttagtactgtagatatccagaagaatggtgttaaatttaccaacagcaaattgacttctttaaatgaagagtataccaaaaataaaacagaatatgaagaagcccaggatgccattgttaaagaaattgtcaatatttcttcaggctatgtagaaccaatgcagacactcaatgatgtgttagctcagctagatgctgttgtcagctttgctcacgtgtcaaatggagcacctgttccatatgtacgaccagccattttggagaaaggacaaggaagaattatattaaaagcatccaggcatgcttgtgttgaagttcaagatgaaattgcatttattcctaatgacgtatactttgaaaaagataaacagatgttccacatcattactggccccaatatgggaggtaaatcaacatatattcgacaaactggggtgatagtactcatggcccaaattgggtgttttgtgccatgtgagtcagcagaagtgtccattgtggactgcatcttagcccgagtaggggctggtgacagtcaattgaaaggagtctccacgttcatggctgaaatgttggaaactgcttctatcctcaggtctgcaaccaaagattcattaataatcatagatgaattgggaagaggaacttctacctacgatggatttgggttagcatgggctatatcagaatacattgcaacaaagattggtgctttttgcatgtttgcaacccattttcatgaacttactgccttggccaatcagataccaactgttaataatctacatgtcacagcactcaccactgaagagaccttaactatgctttatcaggtgaagaaaggtgtctgtgatcaaagttttgggattcatgttgcagagcttgctaatttccctaagcatgtaatagagtgtgctaaacagaaagccctggaacttgaggagtttcagtatattggagaatcgcaaggatatgatatcatggaaccagcagcaaagaagtgctatctggaaagagagcaaggtgaaaaaattattcaggagttcctgtccaaggtgaaacaaatgccctttactgaaatgtcagaagaaaacatcacaataaagttaaaacagctaaaagctgaagtaatagcaaagaataatagctttgtaaatgaaatcatttcacgaataaaagttactacgtgaaaaatcccagtaatggaatgaaggtaatattgataagctattgtctgtaatagttttatattgttttatattaa

SEQ ID NO: 963 - DNA, 340 bp, Homo Sapiens
cgagcggccgcccgggcaggtacttttttttttttttttttttttttggtatttagaaataatttctagtgctaatttatttttagtgatattttgcacagactctccaaataaaaaaccaagaacgaccaattttattgggaaaatactatatgtaacaaactttattttttgatgagtgaagactatttttctaattttgcttaaaaattttaggtttagccttaggtaatacagttaatagagagaatgtttactaccatgcataaattcaaaagacttgttagtttagattgtcaatttaatgttgaacaaagttgcttgaaattttcagatgaaa

SEQ ID NO: 964 - DNA, 493 bp, Homo Sapiens
  misc_feature (184)..(184): n is a, c, g, or t
  misc_feature (238)..(238): n is a, c, g, or t
  misc_feature (262)..(262): n is a, c, g, or t
  misc_feature (267)..(267): n is a, c, g, or t
  misc_feature (408)..(408): n is a, c, g, or t
  misc_feature (448)..(448): n is a, c, g, or t
ttttttttattcagtctccgtaaaaactgtcaaaaattgccagcgctgattatatttcaagtcatcacggtggggtattgggaaaatttccaattagcaataatcgcgtctcggataaatctcattggctacggtactgccactgtgcaaagctagcttgacgtaggactttgatggtcatgtntaacacctcacaggggcagaacctcctccatccccgactccaaagactcatgtnatcagtacgcaagaaagttcaganatganacctctggttgtattccacctttgggacatgggggatgtctttagttcaaagtcacaaataaatgcaggttctacaattcagaagcttcatatccctgctggagtattacatgtttattcaggatggaccacttttcttancaacagtttctaaacctttgccaagtctgggaattctggnaggaaaaattctaaaaacaatcctcccgccccattcctgaaaaaa

SEQ ID NO: 965 - DNA, 420 bp, Homo Sapiens
  misc_feature (14)..(15): n is a, c, g, or t
  misc_feature (229)..(229): n is a, c, g, or t
  misc_feature (307)..(307): n is a, c, g, or t
  misc_feature (329)..(329): n is a, c, g, or t
  misc_feature (339)..(339): n is a, c, g, or t
  misc_feature (393)..(393): n is a, c, g, or t
  misc_feature (400)..(400): n is a, c, g, or t
  misc_feature (408)..(408): n is a, c, g, or t
  misc_feature (416)..(416): n is a, c, g, or t
cagtgtccacaaannaagctttattgaaatacattcacgttcattcatttatatattgtcaagggctgcttttgcactacatatggtcagagtgggtagttatgacagattgaatggcccacaaggcctaaactatttgctatctgatcccttacagtaagtaaagttagccaacttgtgatttagacagtagaggaatcaaatgaaatagcatcaaaaagttgtaggntcattggggccattctaaccctaaggtcagaggaaggaaatgggaatggggaagtaggagtggtgaacaggaaaggancacaatacatctgaggtggggncgcacacatnttgaggtaggttaaaaatcttctgaggggctttcttgtttaggggggatgcccnaaaagtnggggcctnccccgggnggtt

SEQ ID NO: 966 - DNA, 538 bp, Homo Sapiens
tttttttttttttttttcatactgttgttcagcccatatcacacgatcatcatcagataatctcttagtgatatgaaaggcactccttcgagaccttctggggtggtttttatgtttgaataagtagtgattttcaagtgaaccaatctgacccaaaaggtcatagcccagctcctcggcgatggccgaggctgcttccgggcccccggggatctccgctgcccattcattgacaaattgccttttcgcttttgcactgttcagtgcacaccaagcgcaaaagaggacgaaagcagtgcactgcagactccaggctcttcgctccatagctcacacactcgcttgaacaagagtgggaagggaagaggaaaaagaagcaagataggagaaaagccagacagactcccccttcccaccctcgggctctagaccactcctggctcctggttgctctgcgaagagctaggaggcgcgagaggagaggctgggcggcggcgaacgctcattgaagcgcttcgcctcgtgccgaattcttggc

SEQ ID NO: 967 - DNA, 415 bp, Homo Sapiens
  misc_feature (36)..(36): n is a, c, g, or t
  misc_feature (341)..(341): n is a, c, g, or t
  misc_feature (374)..(374): n is a, c, g, or t
  misc_feature (381)..(381): n is a, c, g, or t
tttttttttaaatcttcatagagacgccttagcagnaagctatcggctttgacagtacaccgaaatcctggcagtgaaccataaattgaccattaccataaaaagagctgctaaacgagaaaccatgtgctcagtataaaactaatttcatgctttcaaaagcacacagtggcttctagcaagatagtggccctgggacttgccgagacagattggtgaacacaaatggtttgctcctgatgcgtctgcttagccaagctttacgtgtactggcagtaaaagaggttctcgagccttctatcaaacaaatacacacttagctataactttaaagctgaagntattaaaacagctgcctcaaataaaatatagcnggaaaancacatacacttattatacatacacaccccatgtg

SEQ ID NO: 968 - DNA, 597 bp, Homo Sapiens
  misc_feature (68)..(68): n is a, c, g, or t
  misc_feature (76)..(76): n is a, c, g, or t
  misc_feature (82)..(82): n is a, c, g, or t
  misc_feature (331)..(331): n is a, c, g, or t
  misc_feature (339)..(339): n is a, c, g, or t
  misc_feature (367)..(367): n is a, c, g, or t
  misc_feature (523)..(523): n is a, c, g, or t
  misc_feature (531)..(531): n is a, c, g, or t
  misc_feature (540)..(540): n is a, c, g, or t
  misc_feature (576)..(576): n is a, c, g, or t
ggtgatagtgacccagcttctgggctgctggctgtgagatcaagctgtggcaaacacaatggtcctgncctttggnaaaagncagaaacaaacttgctagggcataaagcatcctccatttctgcctgggctgttccatcctcttcaacagccccatgaagaaggggctctccccattttatggacaagaagacagactcagctgggtcaagtgggcttgcccagggatcacacaggttcagctgtggaagacccagggcccctggctttcagtctttgggtccagctgtctcctccaggcagtgctgccagtgtccaggcatatggcttngcaaagtnggagaacctctgcttggggtctcgattngagaaaggaatggcttcctctcccctgatgtgagccgtcccagggccatgttgccgtaaggggtgcacagcctgtccactagcccagtgcggaagcacagctgtgttccacgtgcagttcctcagaaggagaggaagctttaggtggggccaaganccagattntacataagntttccacttagacaaggtacctaagcaaggttgttncttagtttcccattgtaagag

SEQ ID NO: 969 - DNA, 551 bp, Homo Sapiens
agagcgcgcgcttgcggacgcggcggcattaaacggttgcaggcgtagcagagtggtcgttgtctttctaggtctcagccggtcgtcgcgacgttcgcccgctcgctctgaggctcctgaagccgaaaccagctagactttcctccttcccgcctgcctgtagcggcgttgttgccactccgccaccatgttcgaggcgcgcctggtccagggctccatcctcaagaaggtgtcggaggcactcaaggacctcatcaacgaggcctgctgggatattagctccagcggtgtaaacctgcagagcatggactcgtcccacgtctctttggtgcagctcaccctgcggtctgagggcttcgacacctaccgctgcgaccgcaacctggccatgggcgtgaacctcaccagtatgtccaaatgtactaaaatgcgccggctgatgaagatatcattacactaagggccgaagataacgcggataccttggcgctagtatttgaagcacctaaccaggagaaagtctcagactatgaaatgaagtcgatggattc

SEQ ID NO: 970 - DNA, 493 bp, Homo Sapiens
aagtgattatttcactgaaggctagacaacaattccgagaaagagacggagagagagggaagaaaaagacagatagatattggggggaaggagaagactggagaagagagggaagagaggacagcggagagagagcaccagagagagagggagagagagagagagcgctagagagagggagcgagcatgtgcgatgagcaatagctgtggaccttacagttgctgctaactgccctggtgtgtgtgagggagagagagggagggagggagagagagcgcgcttcgcgagagagcgagtgagcaagcgagcagaaaagaggtggagagggggggaataagaaagagagggaaggaaaggagagaaggcaggaagaaggcacgggacgagacaaccatgctgtgctgtatgagaagaaccaaacaggtttaaaaaaatgatgacgaccaaaagattgaacaagatggtatcaaaccagaagataaagctcatagg

SEQ ID NO: 971 - DNA, 567 bp, Homo Sapiens
gcttaattcgtcacgaggactgaagattaagtagtatgctagcgattcctagttcctcgacattttcctgtgtgcctggcaaataaatacctgtctcctacgaccctgagctgttagccctctctgttccatgacaggggccagatcttccagctcctcccagaaggagcacccaggctggcttcttcccactgaaagccctccccagcgaaccaacctcagttctatgcagtggctggggatcaggcatccagaccgaagtcacctctgcctgctccagcttgggtcagctgggtctgaccagggggccagatccgagccgcacctgccggcccccagccccagctccagctcctgacctctcccagcctggcctggctgttcctccagggctgatggctgtcaacccatccttgtgagttcatatggactgctgcccctcgaaagggagagggtcggccccatgtccccagggagcattccatcagggacaacgtacatactgtgatgtaaacttttttttttcccccccaggggcaaaagtgtgagatgccttaatctttcctt

SEQ ID NO: 972 - DNA, 336 bp, Homo Sapiens
  misc_feature (4)..(4): n is a, c, g, or t
  misc_feature (13)..(13): n is a, c, g, or t
  misc_feature (17)..(17): n is a, c, g, or t
  misc_feature (103)..(103): n is a, c, g, or t
  misc_feature (106)..(106): n is a, c, g, or t
  misc_feature (108)..(108): n is a, c, g, or t
gcgncgcgccttnaggngatgcccgcgcctccgccgcctgagaggaggtcgagctgccgccgggggattgctggaggagcttggagtgcggggcgcccggcantgngngagccgccacagccatggattgcaaagatagaccagcttttccagttaagaagttaatacaagcccgtctgccgtttaagcgccttgaatcttgtcccaaaggggaaagccgatgacatgtcagacgatcagggtacttctgtgcaaagtaaaagccccgatttagaggcctctttggacaccttgggaaaacaagctgtcatgtggggttctgacattaggacttta

SEQ ID NO: 973 - DNA, 293 bp, Homo Sapiens
ttgtcagagaagtcggcgcggaagctccagaggccgtccagctccttgcactcccgcgacgggctctcctgggggtacagcatcccgccctgcagccccagcgcgcagccccacaacaacggcccgagcgccgcccaggcaaccgccgacccccgggccatgcttcccggtcccccgctcggccaccgtctgcggcgctaagaaaagccggggaggtgcccgaggggcgggtccgcgtgacccccggtggtcggtgatgcgcctgaagccatccgcccactgggaacccagct

SEQ ID NO: 974 - DNA, 443 bp, Homo Sapiens
  misc_feature (309)..(309): n is a, c, g, or t
aaaaagataccaaggaaaaacataaagacacacatggcaaagacaaagaaaggaaagcgtctctcgaccaagggaaagagaagaaggagaaggctttccctgggatcatctcagaagacttctctgaaaaaaaagatgacaagaaaggcaaagagaaaagcctggtacatcgcagacatcttcacagatgagagtgaggacgacagagacagcctgcatggggagcgggttcaagatgggagaggccagcgacttgccgaggacggacggcctccaggagaaggaggaaggacgggaggctatgcctcngacaagacacaggaagtcttctgacaagcagcaccctgagaggcagaaggacaaggagcccagagacaggagaaaggaccgaggggcttgccgacgccggggagagaccaaaaagagaaagtctttgaaaagcc

SEQ ID NO: 975 - DNA, 658 bp, Homo Sapiens
  misc_feature (567)..(567): n is a, c, g, or t
gataagaaaatggagaatactgtatttgctttagaaagtttttacatatagataaacacgcagtttaagataacagtaaaagcgccctacagggagtgagagatacctctgaagctgctaagaaatactggaaatagcttttgcataagaatactacaatctcactctccgcttttgctagcgacagggtccctctttctaacccaggccaccatgcctctgctggactgccaagtcgacaccaggagcaccgagtgggaggagaaccccaaaaagaaaagagacagttgagcggggagaaagacagagagagggagaggagagaaagagaaagggagaggagaaaaagcaatatcatatacaggcaatttctacacatatattacaaactgggaaaatgaccgatcattaagatatacataattcatataaaattttgaaataaaaataaaaatctgttacagtcataactattctttttccacatttataaccagtacccacacaggcagtgacagagtggagagaaaaaggtgcttacgaagaaaatgattgtctgctggacangaaacagaagattgcatttgtgtgaccagtgcttgactaaataacgatggaggatagaatgaatgaagcgagagatataaaagaggagaga

SEQ ID NO: 976 - DNA, 453 bp, Homo Sapiens
gttggccgagggggccgtacggaggtggcagctgtgggaggaggcggcgtggaaggccgaggagctcaagcccggaccaatccccacgttccgggccgcgaccctgaccctgcagcgtaccgggaagcgaaaccggccggatgggccgctgagcccgaatcgggcactgtgtggagccccctggagctgagatcaggatgttccgcttcatgagggacgtggagcctgaggatcccatgttcctgatggatccctttgctattcaccggtcagcatatgagccgtatgttgtcaggtggctttggatatagccccttcctcagcatcacagatggcaacatgccagggaccaggcctgccagccgccggatgcagcaggctggagctgtctccacctttgggatgctgggaattgtcgggtggttcatggacatatttgggatatgatacatg

SEQ ID NO: 977 - DNA, 4208 bp, Homo Sapiens
tctttaagatttgtagctactaagaaagaaaggagctttttttccttgggccttcaaactgaaagaaccgcatgagcctgacggcgcatggtcttaacatcaggctgtgcaggaagaagctatctgcagatggatgccagcacacacaaggaagcagagctctggcaacattgagtcaaagcaaggacacaacatcagagggacggcagagaatccttgtgtgtagtctttggtggcagtttgaaaattgcaaggagggactttaagactacttctgatttgcaaagatggtctgtgctccgagcaggctaaagtgactggacgagacgcactgttggagaaataaaaatgacttcccattatgtgattgccatctttgccctgatgagcttctgtttagccactgcaggtccagagcctggtgcactgtgtgaactgtcacctgtcagtgcctcccatcctgtccaggccttgatggagagcttcactgttttgtcaggctgtgccagcagaggcacaactgggctgccacaggaggtgcatgtcctgaatctcgcactgcgccaggggcctggccagctacagagagaggtcacacttcacctgaatcccatctcctcagtccacatccaccacaagtctgttgtgttcctgctcaactccccacaccccctggtgtggcatctgaagacagagagacttgccactggggtctccagactgtttttggtgtctgagggttctgtggtccagttttcatcagcaaacttctccttgacagcagaaacagaagaaaggaacttcccccatggaaatgaacatctgttaaattgggcccgaaaagagtatggagcagttacttcattcaccgaactcaagatagcaagaaacatttatattaaagtgggggaagatcaagtgttccctccaaagtgcaacatagggaagaattttctctcactcaattaccttgctgagtaccttcaacccaaagcagcagaagggtgtgtgatgtccagccagccccagaatgaggaagtacacatcatcgagctaatcacccccaactctaacccctacagtgctttccaggtggatataacaattgatataagaccttctcaagaggatcttgaagtggtcaaaaatctcatcctgatcttgaagtgcaaaaagtctgtcaactgggtgatcaaatcttttgatgttaagggaagcctgaaaattattgctcctaacagtattggctttggaaaagagagtgaaagatctatgacaatgaccaaatcaataagagatgacattccttcaacccaagggaatctggtgaagtgggctttggacaatggctatagtccaataacttcatacacaatggctcctgtggcaatagtatttcatcttcggcttgaaaataatgaggagatgggagatgaggaagtccacactattcctcctgagctacggatcctgctggaccctggtgccctgcctgccctgcagaacccgcccatccggggaggggaaggccaaaatggaggccttccgtttcctttcccagatatttccaggagagtctggaatgaagagggagaagatgggctccctcggccaaaggaccctgtcattcccagcatacaactgtttcctggtctcagagagccagaagaggtgcaagggagcgtggatattgccctgtctgtcaaatgtgacaatgagaagatgatcgtggctgtagaaaaagattcttttcaggccagtggctactcggggatggacgtcaccctgttggatcctacctgcaaggccaagatgaatggcacacactttgttttggagtctcctctgaatggctgcggtactcggccccggtggtcagcccttgatggtgtggtctactataactccattgtgatacaggttccagcccttggggacagtagtggttggccagatggttatgaagatctggagtcaggtgataatggatttccgggagatatggatgaaggagatgcttccctgttcacccgacctgaaatcgtggtgtttaattgcagccttcagcaggtgaggaaccccagcagcttccaggaacagccccacggaaacatcaccttcaacatggagctatacaacactgacctctttttggtgccctcccagggcgtcttctctgtgccagagaatggacacgtttatgttgaggtatctgttactaaggctgaacaagaactgggatttgccatccaaacgtgctttatctctccatattcgaaccctgataggatgtctcattacaccattattgagaatatttgtcctaaagatgaatctgtgaaattctacagtcccaagagagtgcacttccctatcccgcaagctgacatggataagaagcgattcagctttgtcttcaagcctgtcttcaacacctcactgctctttctacagtgtgagctgacgctgtgtacgaagatggagaagcacccccagaagttgcctaagtgtgtgcctcctgacgaagcctgcacctcgctggacgcctcgataatctgggccatgatgcagaataagaagacgttcaccaagccccttgctgtgatccaccatgaagcagaatctaaagaaaaaggtccaagcatgaaggaaccaaatccaatttctccaccaattttccatggtctggacaccctaaccgtgatgggcattgcgtttgcagcctttgtgatcggagcactcctgacgggggccttgtggtacatctattctcacacaggggagacagcaggaaggcagcaagtccccacctccccgccagcctcggaaaacagcagtgctgcccacagcatcggcagcacgcagagcacgccttgctccagcagcagcacggcctagcccaacccaggcccaacccggcccaacccagcccagcccagctcagctcagctactccaagggcaggaccaatggctgagcctcgtgtccagactcagagggctggattttggttcccttgtaaagacagagtgaatttcagtataaagatcacccgttgtattcaccccacacccagggctagtataaacatgaccctgggcttctgtaccacactagaattcatgtgagaaagctaaaatggtggtcttctccaccagcccctcacaggcttgggggttttctatgtgaaacacatgccagtttttaaaatgctgctttgtccaggtgagaacatccataatttggggccctgagttttacccagactcaaggagttggtaaagggttaatagccagatagtagaaccagtgaggagatgcggccaaagattctttatatctgaaccaagatgtaaaacaagaaatgctttgaggctttctaagcgatcctcctgtctaatttgcacctttgtctggatgcactcttctgaccttgctgccacaacctgtggggtctgatgtgtcccaagatgggtgctgccctcagggactgcaccctgacaagtgttaaggcaacattccttgcttgtgccctgggccaaaaccaatgctgatgaccttatcagcttcctgtttcttcccatactgcatacaccactgcaaaatgtcttaatgcaaattttgtatttcttacaggcctacagaaattgaaaatgaccaaaatcaggaaccacagatttgtgcccattcctaatattttgttctgcaaattaatgtataatttgaggtgaaattcagttataaagtcaaggacgaatttgcacagtgatatatttctatgtgtatgcaagtacaagtatataatatgtcacctggcacattcattttctcagttgaagaagagaaaatttgaaaatgtccttatgcttttagagttgcaacttaagtatatttggtagggtgagtgtttccactcaaaatatgtcaacttaaaaaaaaataggccctttcataaaaaccaaactgtagcaagatgcaaatgcatggcaaatctgtcggtctccagttggttatctgaatagtgtcaccaattccaccaagacagtgctgagattggaaagggcactcatttggattgccttacttctcttgccttaaatatatcccatatatttaatatgtcaaaaagggcttgaggtgaatttcattaaatggaataatatgatgccactttgcagctaaaataagctcagtgatacctccttgtt

SEQ ID NO: 978 - DNA, 521 bp, Homo Sapiens
  misc_feature (14)..(14): n is a, c, g, or t
  misc_feature (36)..(36): n is a, c, g, or t
  misc_feature (45)..(45): n is a, c, g, or t
  misc_feature (79)..(80): n is a, c, g, or t
  misc_feature (140)..(140): n is a, c, g, or t
  misc_feature (146)..(146): n is a, c, g, or t
tttttttttttttnttttaactgtgtttgtgcaagnccacacatngtcaacaggcgttgtaagcagcttccatttattnntgagtaaatatctttgtaaaataaatcatgtggtaacacaatacacaaattaaatacatntttcanaaagcttgccagtataccgcaaaattcacaaacatagtttttttaaaaaataaaatatgttcagagcacccttgatataaaatgcctgacccccatccttggacaaggccacctgaagacatcttatggtaggtgggtttctgtgggagtcagcgggggcctcctggagggaagggtttctactctcacctattacccatcccacattccatctgaattttgatccttctccaaagagctggtaactgagagggctagagcacgccaccaggcctagctccaagcacggggatcagggtgcacaattagggccaggagcacccagagtcctcaacacaagccattgagagaagccagaaatgcaatctccacact

SEQ ID NO: 979 - DNA, 371 bp, Homo Sapiens
  misc_feature (333)..(333): n is a, c, g, or t
tcactgcatgtgtattcgtgagttcgcggttgaacaactgttcctttactctgctccctgtctttgtgctgactgggttacttttttaaacactaggaatggtaatttctactcttctggacttcaaactaagaagttaaagagacttctctgtaaataaacaaatctcttctgctgtccttttgcatttggagacagctttatttcaccatatccaaggagtataactagtgctgtcattatggaatgtgacaagtttattttcctttacaagtccagctgtgaggaggacttcttggggtgggaaacagggggcgatggaaggaggaaaanggggcagagaaagctgtttgatgcctttggggtgaaaa

SEQ ID NO: 980 - DNA, 398 bp, Homo Sapiens
  misc_feature (17)..(17): n is a, c, g, or t
  misc_feature (346)..(346): n is a, c, g, or t
  misc_feature (365)..(365): n is a, c, g, or t
  misc_feature (370)..(370): n is a, c, g, or t
  misc_feature (381)..(381): n is a, c, g, or t
ccatggtatgtgtatanttataaacagaaacacatagttgaatagtacatcttggctccacgccacacctatgggttcccccttccttcttctccagcatgtcttttcaagctgaaggctagtaattgaagaatgttgtttactttttcaggtacaggtgtattacaaagatccaaagccaattttgatttttacaatgacacaaaatactgtaccacttgtggagtgtatgaagcagtaagggagtaagggggtgtgcacacatacaaagagcattcgacaatggtcatcctgtactacagcaagatgggctgattacccaaatactgggaaaaagccagagtgnacactttttaaagggtttnttgcnggatacagggngggccaatggggggcaa

SEQ ID NO: 981 - DNA, 514 bp, Homo Sapiens
ttttttttttttttaatggtggctgtgaattgcagggtactttgaaggccgccaactgaaccaagagtagtaactagattaattatatgacagaaagagtgaatttagccttggggtatttattaacttctattatttagatatgcaattttgtttaccactatctcttcacagcattcatatgttaactaagctcttttgtgttaacaagtttatgacaagactgtgaaagtaaaaataatttatctgcttgaagacaaaaaagggaaggagaacaaggatagaaacattgtgaattaatttgtacaaatagaaagcagaccagcaggacaggagctcttttgcagtgctgccggatggtgtctagaaaaatcccagtaatcatgtaggctccatattatttttgcctggggcaaaatgatgtatcttctgtatttagcttttaaaattagtgaaacaaatggcattatttattaaaattctactcaggataaaaaaaaactcgtgccgaatt

SEQ ID NO: 982 - DNA, 623 bp, Homo Sapiens
gacccccactaggctaggacaggctgggtgaatcggacgagggcgacgttcggcggcattgcgaaaacttccccacggctactgcgtccacgtggcggtggcgtggggactccctgaaggcagagcggcagtggcgcccgtgaagtcgtgagtcgagtcttcccgggctaatccatgccgggttggaggctgctgacgcaggtcggcgcccaggtgctgggtcgactcggggactggcctgggtgctgccctgggcccggggaacagaacacacatctggcttttttgttagaggtcttcatggaaagagtggtacatggtgggatgagcatctttctgaagaaaatgtcccattcattaagcagttggtctctgatgaagataaagcccaattagcaagtaaactgtgtcctctgaaagatgaaccatggcctatacatccttgggaaccaggttcctttagagttggtcttattgccttgaagctgggcatgatgcctttatggaccaaggatggtcaaaagcatgtggtcacattacttcaggtacaagactgtcatgtcttaaaatatacgtcaaaggaaaactgtaatggaaaaatggcaaccctgtctgtaggagga

SEQ ID NO: 983 - DNA, 1700 bp, Homo Sapiens
gcagccgcccgggcccccgccagcctccctcctcgcgtccctcggtgtcctccgcgggccggcgcgatgcggctgggcccgaggaccgcggcgttggggctgctgctgctgtgcgccgccgcggccggcgccggcaaggccgaggagctgcactacccgctgggcgagcgccgcagcgactacgaccgcgaggcgctgctgggcgtccaggaagatgtggatgaatatgttaaactcggccacgaagagcagcaaaaaagactgcaggcgatcataaagaaaatcgacttggactcagatggctttctcactgaaagtgaactcagttcatggattcagatgtcttttaagcattatgctatgcaagaagcaaaacaacagtttgttgaatatgataaaaacagtgatgatactgtgacttgggatgaatataacattcagatgtatgatcgtgtgattgactttgatgagaacactgctctggatgatgcagaagaggagtcctttaggaagcttcacttaaaggacaagaagcgatttgaaaaagctaaccaggattcaggtcccggtttgagtcttgaagaatttattgcttttgagcatcctgaagaagttgattatatgacggaatttgtcattcaagaagctttagaagaacatgacaaaaatggtgatggatttgttagtttggaagaatttcttggtgattacaggtgggatccaactgcaaatgaagatccagaatggatacttgttgagaaagacagattcgtgaatgattatgacaaagataacgatggcaggcttgatccccaagagctgttaccttgggtagtacctaataatcagggcattgcacaagaggaggcgcttcatctaattgatgaaatggatttgaatggtgacaaaaagctctctgaagaagagattctggaaaacccggacttgtttctcaccagtgaagccacagattatggcagacagctccatgatgactatttctatcatgatgagctttaatctccgagcctgtctcagtagagtactggctccttttataatttgttaccagctttacttttgtgataaaatattgatgttgtattttacactcttaagtcttaaccacagtcagaattatcttaatgtagaattataattttggctcttttaggaaaaaacaaaatctgatatttttccaaacgtattgagcaacaaaatattaatattgtgccatatgacaacaaagtctttcctaaatactccatctgtttagtactgtattgtggaatatttgagttctatttccagacttgaaaacatggaggattttagagatgcctgaacaatattatttaagtagtatgtgaccgagctataaattttttgtttttgttctaagtagatttaatttgggaactgacaggacaatgtttttaggtttagcattttgtttaaaaacctttaaagaaacctttagaaggacttagacctcacatattaatgttgagaagttctgcttaattttaaaatggtttctataaagggttttattgtatgaaatagaactttatatttttgcatatgtatagaggataattatatttaatgtataactatagcattatggtgagtggaatttgacattgtccaaacctttttcatttttgagtgattaaaaatgaaatgtcctttgtaaa

SEQ ID NO: 984 - DNA, 5217 bp, Homo Sapiens
ctcggggccacggtccccccgcagcgctagtcccgggcccgcgagcaccggcccccgccacccgcaggttgcggagggaggagggcgggagcgggcggcgcggagccgggaggcgggggaggggccggcgtccgaggcggcggcggcggcggctggagcagcctctggcagcagcggggagaatgggagtgcggggcgccagaccgccgcggggtgtcacggccgccacgaagcctgcgaggcgcggggccggcgcccgcggcttttaaacccgggaaggcgcggcggcggcggcggcggcgggcagatcgcggcgcgcaccaggcgccggggcggcggccgaatggagagaaagggctcggcggccggggccaaggggaacccgagcccgcccgcggccggagaggggcagcggccaccgccgccgctgtgcgtcccgggcggcggcggaggagccccagcgaggggccaggtcggggcggcggccgagccggccgagctcatccgacgagcgcacgagttcaaaagccaaggggcgcagtgctacaaggacaagaaattccgtgaagccataggcaaataccaccgggcgttgctggagctgaaggggctgctgccgccccccggggaacgggagcgggactcgcgcgcggcctccccggctggggccctgaagcccggccgcctctcggaggagcagagcaagacggtggaagccatcgagatcgactgttacaacagcctggcagcctgcctgctccaggctgagctggtaaactatgaacgagtcaaggaatattgcctcaaagtcttgaagaaggaaggggagaacttcaaggccctttaccggtctggtgtggccttctaccaccttggggactatgacaaagcactctactacctgaaagaagcaaggacccaacaaccaacagacaccaacgtgattcggtatatccagctgacggagatgaaactcagccgatgctcccagagagaaaaagaagccatgtaaccaggaagcagctccagagctgcgcccacgcctgaccggggacttccaggcatcccctggcagagagccccgtcctggattctgtccctttctccccacttcttctggctcctcatttttcctcctgttgcaccccagctctttgtctcctcccagtacgaaaaggagagatgcaaatttggaatctggtaggtcgcccagacaatggagacatcctctcctctagcaggtcagcgactgagaggggcctgacttctgctgggacagctggagaggagtctcatgggctgggatgctgttgtggctttgactttggccagtgcttctgacagaggcggagcctggcaagtgtaccatcccacaggcagcaggcacacagcccatgggctggatccttccacactttcctgacagaccagaaccagagcatctcgaggcaactgttagaaatccagggacgagacaaacagagaagcgctggtgaagccaacatagagactgtcaatgtgtacactggagttcccacccccaccccccacccgtcacttagcccctgcctccttcccccactcgttgtcttggcttgtgctttctcctctccccatcggggatccgagactctgccaggattcacatgccactgaagcccactcagtgccctctggtgaccacacataccattcccccggactcccacccagcaggcagctgtgaccgcagaagggcaggatgaagtgggccaaggtttgggacaggttgactgtgtaggtgacagggagggaaagatgatggccaggggaaagagcatcgtataggctaggggattgaactgtggactgattccgtgtaaataaaaataaattaacaggtagtagttcctgtcagttctgttggaagcagcccactccctcacttttactccttcctccaaccctcaatcagagctacttacagccaggcaggatggggctttccccaaagcaattggccgtttgtccagtggcagacaatggtggctacagcctttgtgcttttaagagtgggctgggattgtggagactgcccaggggcttggctttgtcagaacttgtacaatcttcttttgatgaaattatctgaactcaacatctagcacatagaatgtgttcaacaaatgcttgttgaatgaataaattatgactgcagactggctctcctgccttaaactaatttcatcccagcctagtctcctgatgtctgtgctcgttatgctatgccatgttgcttcagtcaaacaagaaacacttactgagggcatattgtttgcccatcattgtgcaatatgctgtgggacatgggatgtcgtctcagtcttcaaggaaatggaagggttaagaaatgcatatgagattattaccaatgacacctttaatttatatgatgctttaaaattatcagagcactttcatgtatttttcgtgtgactagtgaaaaagacaatgttgtacaaaattaaaatatatacagatgcaataatgtgaatagttaggatttattaaatgcattatcttcagatctttacatgtataatctcatttctttcatgcagttactctgggatactgttcccatttgatgggtaagaatattgaaaaccagaaaaattaattatcccaaggttgcatggcctttagtggcatagctaggatttgaaccaggcctgcctgactccagagctctggctagtatctatgctatacttagttgcctctctataagtataatattgggcaattataaccatttgagaacaggacaatatgtattaacctgaaaagtgttcatgatgtcagtgatagtacatggcctccttatgtatttactcaagggccccaaaagaccagaggccagaatccctagtagtcagagcagtgacaggtcagaaaaaggcagctgaggtccaatagttatgtctgtgtattgctcattctacttactgatggagccagcatgtatctcaacaactcacctagcattcatcacccatccccagcattgggaaagggtcacaattaagaccgaaaggaaacacaaagttaaatatgggttaattatgtaagcagatgccccaccacggcaggatccaatcacagccgaggggcccagaagagagcagcgtaagttatattcacatagttccccaaaggctttcaacgggggctacaggaaggtgctagaaatattgaggggcctgccattactcacctagagctcactctctggagaagaggaaaaggaagaagctatttccgctgccacattctccccaatccctactatattatgctgtctttcctcttcctcctagctggctttacatgaccctaacccaaaactaccctatggccccacacgggaatgtgttcaaacgccccgacccccacccccacccccattcccaagcctccaacttagaacgtttgtgatttggcagatggtttgttaggatctgaaggatgaagagaagggtagaggtcacctggagaatgagttcaaactgccagggtcttcccttggtctttgtgcgtcaggaaggactccgagtaattattccctatgcagagacaggagagaggtcttgtttacatgagtgtgctggggcagggctggacaatccaggatatgattgtagccatcccatgtagaaagatcaaaaaccagaacgaaatgaagacagcctctcagaacctcatagaacaagcgtccaggtcatctgcttgtttggtgacttagatatacaggcttactggaactccattcactgtgacctgaagttaaataatcccaaagagaaaaagctacctggggtattggttgatgtttggggtgatagggctgaattttctgtgcatttgtccaacaaaggctttagagcacaaaaccaggttcattctccctaccaaatcttcagcttccttctcctcatccctccccaaaacaagaactgtgatttaattccgtacgttgcggatgtcactgctgacctatgtagctggagtactaatcaggcatctgacctgcactgtcatcccctgcctggacttttgcgatggactctttgggggaaaaactaacgctttttaattattgtgaaagcatcatgtgtgtattgtagaagttttaggaaaaaaaggacaaaatccaatccataagcttaccacccaagacaaacgtgtattcttttgaatataccttttagttctttttggtgtaaatgtacacacgcacacacagttgtggatttttttaaacaaaaactggatacactgaatatactctttaataacttttcaagtgtgtatttatattttagaatatgtaatcctacacagatacaaaattcaaaaagtacaaactgctctgtagtcagaagtaaatcttctccctaccccgtctgccagcatctagtttccctctaatttattttgcatcctagtggagatgcttacacattgtcaaacatatgtatatattcttttatcacacacaaatggcagcatattggacactttttgttttttgctccttctgttccttcacttaataatatcacgaacattttcggcatatcaaactttctcaacagcatcttcattgtatggatggaccctttttttatcatcaatcctcaaatagtgattatttcatttgttcccaatcttcattgtaaatagtgttgcaactgacattcttgtagctaaattttgcacatgtctataacgatttccttaggataaactccaagaagagacttgcttggctatttttaagaattttgatacatgttgccaaccaccctccagaaagtttgtaccaaaacgctctcctatttggatcctagagagtaccctgtttcctgcaccctaacactaggtatcatcacttatcaaatctttcccaatttggtagctgggataatagtatgtcaatgttattttaactttctttgattcttcgcgaataacattttcatatgcttattgaccatttgtacttctttctttgtgaattttctatttatttgatattggtatgtttattatcaatttgtaattttattaagaatattatttttgtcaagaaatgctgcaaatatgctttccaagtgctttgctttcaaattttgtttatggtgctttttgacatacataaattcttaattctgc

SEQ ID NO: 985 - DNA, 145 bp, Homo Sapiens
tctgagccagtcgttagcgcgcgaggcgcggggagcctgggaccaggagcgagagccgcctacctgtttccgccgtttacggcacggcagccaccatggcgctcctgctgtgcttcgtgctcctgtgcggagtagtggatttcgc

SEQ ID NO: 986 - DNA, 279 bp, Homo Sapiens
  misc_feature (56)..(56): n is a, c, g, or t
gggcggtggtcgccggctggggcgcgacggtggcccagttctgggcggggtgggtncccagccgggggaccccttggcgccgggccctccctctccccgttcttttcccccttcccagttctttcttctgcggaaccttcacccctccagtgggtgcgggaccctaggcaggaggccaggcaccgccgctctgtctgggggccccgaagcagttaacgggccggtcagcaaagtggtaaagccggtgccctctgtgggggctttgggccaggggtctcc

SEQ ID NO: 987 - DNA, 451 bp, Homo Sapiens
  misc_feature (363)..(363): n is a, c, g, or t
  misc_feature (427)..(427): n is a, c, g, or t
ggcacgaggcaaaatgaaactatatgaacaaaatcagctctcatttcactgctagactttggtgttttctttaagaagtagccttgttaatgcttagttttgccttggggaccttaatgtgtcattaactgcctggaaatacctttcatttaaaaaagtatactttagtacctaatgttcaatttagtatcgatctggatattttagcaaattttgacttttcaaagacaaagtttctgtcttgtaatgtttcttggggccggctatactgcctttcatctaaaactcactacagttcactggggccgtttgggtaacaggggtaaccgggggcataattagggtgcttggattgacaagagnagttaccagtaccagaagtcaggttctattttaacccccatccttttccaattggatgtttttnttttccacccattattccactgtt

SEQ ID NO: 988 - DNA, 508 bp, Homo Sapiens
  misc_feature (28)..(29): n is a, c, g, or t
  misc_feature (40)..(42): n is a, c, g, or t
  misc_feature (44)..(44): n is a, c, g, or t
  misc_feature (47)..(47): n is a, c, g, or t
  misc_feature (50)..(50): n is a, c, g, or t
  misc_feature (63)..(63): n is a, c, g, or t
  misc_feature (94)..(94): n is a, c, g, or t
  misc_feature (417)..(417): n is a, c, g, or t
  misc_feature (452)..(452): n is a, c, g, or t
  misc_feature (463)..(463): n is a, c, g, or t
  misc_feature (487)..(487): n is a, c, g, or t
ggctctccgctgcgctgcgctgccatcnnggccgctcccnnngnggngantgggggtgtccgncatgagcccgggatccgcctccctccgccanacccgcacagatagactcatcctgaaagtcgctgttgttctcctgctgagcaagaatggaggccccactggtgagtctggatgaagagtttgaggaccttcgaccctcctgctcggaggacccggagagaagccccagtgtttctatggttcatctccccaccatctcgaggacccctccctctccgagcttgagaatttttcttccgaaataatcagcttcaagtccatggaggacctcgtaaatgaatttgatgagaagctcaatgtctgctttcggaactacaacgccaagaaccgagaacttagctcccggtgaagaancagttacagatccaaggagggaggaaggagacccnttcagggacgnaggagttaaggaaagtcttaaatngcccctctccctggtttcagt

SEQ ID NO: 989 - DNA, 383 bp, Homo Sapiens
tttttttttttttttttggtctgagaatgatggacatttagacactggcgccaggtttgcgcctgaccggcgccacacaggggtgggcggagcaaagacacacaggtgggctacaggtgtcacacggcaccagccagggcccggggtggctggggtgaggatgggtgtttggccactgaccaggagtcaggtcaagtccagctggtcagtgccacgggctccaggaggggagggcagtgccataaccctcctggtgtccagcgtcaccaggcggtcgtcacataaagcagcctcggcccggggcccgggtctgcagcatgtgggcagggtcagcttttcttccatggcgggtggcattgtctggggcggatactggctctcga

SEQ ID NO: 990 - DNA, 420 bp, Homo Sapiens
  misc_feature (398)..(398): n is a, c, g, or t
ttcaacacattgctaatccagatattttcccgcagtttttctttgaataacagagcaattaatttacttttactatgaagagtcatcattttagtatgtattttaagcaatccaccaagaactcagtaggcagctgagaggtgctgcccagagaagtggtgattagcttggccttagctcacccacacaaagcacaacaggctttgaactattccctaacagggcatttattctttttttttttttttttgtgagacggagctcgctcgtcgcccaggctagacgtgcagtggcgcgatctcggctcactgcaggctccaccccctgggttcacgccattctcctgcctcagcctcccaagtaagctggggactgcaggcgccccgccaatcttccgncccggctaattttttgtatttt

SEQ ID NO: 991 - DNA, 351 bp, Homo Sapiens
  misc_feature (77)..(77): n is a, c, g, or t
  misc_feature (196)..(196): n is a, c, g, or t
tttagtagagacaagatctcgctatgttgctcaggctggtctccaactcctgagctcaagcaatcctcctgccttgnctctgaaagtgccaggcaggaaagattacaggcatgagcaccatgcccagccttattttacaattttactattgcatttctaataaatgacaaccctgataactgaattggcagtaccnttctgtgtttacagtgcaatacaatattgtattcagcacatgagaaagaattctagtaattaatatctacgcatataattgttttttaaaacttagccgtttaatacatccacatttatgttcccttaggcaaagacattggttctgaaatgtct

SEQ ID NO: 992 - DNA, 697 bp, Homo Sapiens
atccttaattaaattaatcttcccccccccccccccggccgcggcaaccagcacaccccggcacctcctctgcggcagctgcgcctcgcaagcgcagtgccgcagcgcacgccggagtggctgtagctgcccggcgcggcgccgccctgcgcgggctgtgggctgcgggctgcgcccccgctgctggccagctctgcacggctgcgggctctgcggcgcccggtgctctgcaacgctgcggcgggcggcatgggataacgcggccatggtgcgccgagatcgcctccgcaggatgagggagtggtgggtccaggtggggctgctggccgtgcccctgcttgctgcgtacctgcacatcccaccccctcagctctcccctgcccttcactcatggaagtcttcaggcaagtttttcacttacaagggactgcgtatcttctaccaagactctgtgggtgtggttggaagtccagagatagttgtgcttttacacggttttccaacatccagctacgactggtacaagatttgggaaggtctgaccttgaggtttcatcgggtgattgcccttgatttcttaagctatggcttcagtgacaaaccgagaccacatcactattccatatttgagcaggccagcatcgtggaagcgctattgcggcatctggagctccagaacccgcagatcaaccttctt

SEQ ID NO: 993 - DNA, 2263 bp, Homo Sapiens
tgaaattcagggactctttggtggagcaattaccagtcaacttcagggtattatgataaactctgatctggggaggaaccaggactacatagatcaaggcagttttcttctttgagaaactatcccagatatcatcatagagtcttctgctcttcctcaactaccaaagaaaaacatcagcgaagcagcaggccatgcaccccccaaaaactccatctggggctcttcatagaaaaaggaaaatggcagcctggcccttctccaggctgtggaaagtctctgatccaattctcttccaaatgaccttgatcgctgctctgttgcctgctgttcttggcaattgtggtcctccacccactttatcatttgctgccccgatggatattacgttgactgagacacgcttcaaaactggaactactctgaaatacacctgcctccctggctacgtcagatcccattcaactcagacgcttacctgtaattctgatggcgaatgggtgtataacaccttctgtatctacaaacgatgcagacacccaggagagttacgtaatgggcaagtagagattaagacagatttatcttttggatcacaaatagaattcagctgttcagaaggatttttcttaattggctcaaccactagtcgttgtgaagtccaagatagaggagttggctggagtcatcctctcccacaatgtgaaattgtcaagtgtaagcctcctccagacatcaggaatggaaggcacagcggtgaagaaaatttctacgcatacggcttttctgtcacctacagctgtgacccccgcttctcactcttgggccatgcctccatttcttgcactgtggagaatgaaacaataggtgtttggagaccaagccctcctacctgtgaaaaaatcacctgtcgcaagccagatgtttcacatggggaaatggtctctggatttggacccatctataattacaaagacactattgtgtttaagtgccaaaaaggttttgttctcagaggcagcagtgtaattcattgtgatgctgatagcaaatggaatccttctcctcctgcttgtgagcccaatagttgtattaatttaccagacattccacatgcttcctgggaaacatatcctaggccgacaaaagaggatgtgtatgttgttgggactgtgttaaggtaccgctgtcatcctggctacaaacccactacagatgagcctacgactgtgatttgtcagaaaaatttgagatggaccccataccaaggatgtgaggcgttatgttgccctgaaccaaagctaaataatggtgaaatcactcaacacaggaaaagtcgtcctgccaatcactgtgtttatttctatggagatgagatttcattttcatgtcatgagaccagtaggttttcagctatatgccaaggagatggcacgtggagtccccgaacaccatcatgtggagacatttgcaattttcctcctaaaattgcccatgggcattataaacaatctagttcatacagctttttcaaagaagagattatatatgaatgtgataaaggctacattctggtcggacaggcgaaactctcctgcagttattcacactggtcagctccagcccctcaatgtaaagctctgtgtcggaaaccagaattagtgaatggaaggttgtctgtggataaggatcagtatgttgagcctgaaaatgtcaccatccaatgtgattctggctatggtgtggttggtccccaaagtatcacttgctctgggaacagaacctggtacccagaggtgcccaagtgtgagtgggagacccccgaaggctgtgaacaagtgctcacaggcaaaagactcatgcagtgtctcccaaacccagaggatgtgaaaatggccctggaggtatataagctgtctctggaaattgaacaactggaactacagagagacagcgcaagacaatccactttggataaagaactataatttttctcaaaagaaggaggaaaaggtgtcttgctggcttgcctcttgcaattcaatacagatcagtttagcaaatctactgtcaatttggcagtgatattcatcataataaatatctagaaatgataatttgctaaagtttagtgctttgagattgtgaaattattaatcatcctctgtgtggctcatgtttttgcttttcaacacacaaagcacaaattttttttcgattaaaaatgtatgttaaaaaaaaaaaaaaaaaaaaaaaaaaaaaa

SEQ ID NO: 994 - DNA, 4249 bp, Homo Sapiens
gggaaagcgaggagccgcggcggcgtggagccggcgggcccgggcgggggctccccggagccctaccaccccaccctgggcatctacgcccgctgcatccggaacccaggggtgcagcacttccagcgggacacgctgtgcgggccctacgccgagagcttcggcgagatcgccagcggcttctggcaggccacagctattttcctggctgtgggaatctttattctctgcatggtggccttggtgtccgtcttcaccatgtgtgtacagagcatcatgaagaaaagcatcttcaatgtctgtgggctgttgcaaggaattgcaggtctattccttatcctcggtttgatactctaccctgctggctggggttgccagaaggccatagactactgtggacattatgcatctgcctacaaacctggagactgctccttgggctgggccttttataccgccattgggggcacagtcctcactttcatctgtgctgtcttctctgcacaagcagaaattgcaacctctagtgacaaagtacaggaagaaattgaagaggggaaaaacctgatctgcctcctttagtttggaagagacaatgccattttctcccttgagtaatcttgtgaaacagtccacagtttcatcatttgagtcaagtggagaactaacctttacctaccaaagccacgttccacggcccgaggcttaaacaggaccaatgagaggccacatccagctacgcaaagttactggacatgcggtctgcagtgcacattataaggaatggaacatgaaaatagtatataatcctagacctggagttgccaagttctgtcagactccatctcccccaggttcaatgatggatgataatctaaatcattagggcagcagtttctctggtaacggaagagaccgtccgccagatctgcaggctgtttctgctccaacactgcttgcttgtgagcatctctgcctcagaatggggttttgggttggagttcttgttttcctctgttctttcaagttgtctccaacgaacagaaaactataaacttactggggacaggatgtgtgctaaagggcacagcaagacactgtcttttgcttagctgaccaaaggggtcagcagggatggcgtggagtcatgctgtggaacttattctaggctgaatcctagggtaaggtggatcaactgaactgtcactccagagattttagaaatttgagtaaagaaacaataaggacctatacaatcatatgagaacaaaaatatgaaatcttgctagtgaagacgtattttttcttcttcccagcagccaggctagcaccagttctggcccagtctcctcttcttctggagatcacatgtttttcttctaaggttaggattgtgctttgactgcgaaaggaaacctcactgtttcctccttccagggactgaggtctccaagctagctgtggcttatgcagatgttcactgggaggacctgccagaatctcggcacttggggggagacctttactcccagtttggtgaccatgctgtagtcagctctatttccaatcccgacagtagcagaatggcattctacaacaaaaagaagctagttatgggagttaagtttttgtagttactggtgttgatcctgaaagcagactgagataacattaaattgctgcaactgaagaactgcagccaagaccttaattccaggaaagcacagaggacaaagttaattcaaaaagaggcgctagatcaaggtcacagcactgcctacacctgtttacaaaaagaatcaaataccactatgaataaggattcaggggtttttaatctactttccataaattaccaatatcactgattcaggaagatagtatctcagaatgaccagagcagcacagaaacaagctactctgacattatgggagcttcaaaattgtatcatgatacagaaacactccttagcactttaagaaagtgagatggaactgccagatttctggaaggagaaaaagtgtaggtatttgggttcattaatctgctcacttgaggactttgttttgaaaaagtaccttctgtggacaaggtattgtgctaccagctatacaaccctgacttcagagtttgcaaccttgccctgagtgaatcatgttaaagctgtctgagtctaaagcaccgtatcttggtgcagaacagataattatacagagatggaatgggacaaccgcagttttactacattctggtgtttggcctatatgagaaaccatcttctcacagattaagggctaagggcaaaaggggtgggaggtgtggaactagccttaatgagtttcccattcctgaaccaaaattcaaagtgagtgagatgtaaatcctgtgattttggtgaagaaaaaaacgggtatcttcatagcagcctaggaaaccttaaccatatctctaacaccacacagaaagaggctggaggagccactggacaaagcttctgtctctgtgtgtacatttataatgttctaaccaagtctcaaaccttgatgaaaaacacaaaatttttccataaacttatcagaagactcacttttctttctttcttggatagagaaaccattttctgacactaggtttacaatctcagtgtccttacaagttaagtcctaagctcacaggatcctccgagcatgtccatcacctgctctttggctaaggtggcagtgtacctctagatcaacctgggaacagtcacaagggagtgtgacttcttggccataataaactcactcgatagtgtttatgttattaatctgaatgcaacagaagacaaaagcacaggcatgcacacacacagaaccccaaaccactaaaaactacctaaacactgacttagtaaatagtaaaaaggtaatgttgggacttttaaaccttgaatccattagccaggcttgggatgaaaggaccatctaaaatcatgctagtctaaaccatgctcttccacacagctgtttaaaaaccactgggtatgaggaatatgctagaaagaaatgttaaaaatagattgttggctcacacttatttttctaataaataggaccattattactaccaggaaagtcttatttattttgcctgaaattggcttaaagaaagtctcatgacgggatgggatgggctgcgcttctcaatgaactctgaggcagaaatatttgccttggattctgtggattctttaaacctgtgtgctaataattcaaacaatgttgcattaattgtataagggtttttgtatagttttcaaacatctgtggtgtaatgatctttgttaaacatatattctgtaaagtgccatagtctttttttatgtgtagcatatttaaaaatatatatgtatattatacatacacaagtttgtgtgaaagatgtgcaataacaaaggtgtatgtatgttttgttgttttgttttggaaactggacaggagtcaaaacagggatgtttgtttctgttttggcaaaggagagttccacatttttgccttcatggcttattcagtaacccataattttaatgctacacaaatcttatgtgaagaaaagactggtatgaaatcattttttcctgggtctaaaataatcgctagtgttatgtcaaagttaagcccgcacgccaggcccagttaatgctagtctttcatgtgaaatgtgaagctgccatgttgccttttctcttagtaggataactagtagctggtacataatcactgaggagctatttcttaacatgcttttatagaccatgctaatgctagaccagtatttaagggctaatctcacacctccttagctgtaagagtctggcttagaacagacctctctgtgcaataacttgtggccactggaaatccctgggccggcatttgtattggggttgcaatgactcccaagggccaaaagagttaaaggcacgactgggatttcttctgagactgtggtgaaactccttccaaggctgagggggtcagtaggtgctctggagggactcggcaccacttgatattcaacagccacttgagccaaatataaaattgtatttacagctgatggactcaatttgagccttcaaacttgtagttatcctattatattgtaaactaatacattgtctagcattgatttggttcctgtgcatatgtattttcactatgtgctcccctccccagatcttaattaaaccagattttgcaattc

SEQ ID NO: 995 - DNA, 345 bp, Homo Sapiens
  misc_feature (19)..(19): n is a, c, g, or t
  misc_feature (93)..(93): n is a, c, g, or t
  misc_feature (273)..(273): n is a, c, g, or t
  misc_feature (337)..(337): n is a, c, g, or t
ccttgataattcctctctncctcccaccagcaccataaacagtccataagagttaaaggaaacgaagataaatgcaggaaaagtttacagttnaggggaaatgaactgtacttcacatgcttcattatttagcatatttttttgtgcgattataaaattaataaagaactcagaactttatggatactatccctattaacactcaccccatagtcaagacagtatgagaggcccaaggctttattcagtacagaaagtgacgtaggagaaagntaccacctctgggaaagaccgggcagtttcctaccaggggacacacggtaaaccacaacacagnccctgacc

SEQ ID NO: 996 - DNA, 349 bp, Homo Sapiens
  misc_feature (152)..(152): n is a, c, g, or t
ggtaggaaaaggtgctagccaggaggaggagaaaggagcagagtatgtagcaagtatccttaaggttttgcactttaggatccaagaaggcgaggagcagaggagttctggaattcccttggagggaaaaaagactaccagacctcaccacntacctggaaacccaggcctgaagaccatccaccctcggcctttacggctgctctaacaaaactggaagatttgttattgaagagattccaggagagttcacccaggatgatttagctgaagatgatgtcatgttactagatgcttgggaacagatatttatttggattggcaaagatgctaatgaagttgagaaaaa

SEQ ID NO: 997 - DNA, 248 bp, Homo Sapiens
ggctgtttggagtgtaccgtcctcagtaatgaatccagaagaacaaatcgtgacatggcttatatctttgggagttttagagtcccctaaaaagaccatctgtgatccggaggagtttttaaagttctcgctgaaaaatggggtagttctgtgcaaactgatcaacagactcatgcctggctctgtggaaaagttttgtctggatccccaaactgaagctgactgcatcaacaacatcaatgacttcc

SEQ ID NO: 998 - DNA, 2257 bp, Homo Sapiens
aatcgaaagtagactcttttctgaagcatttcctgggatcagcctgaccacgctccatactgggagaggcttctgggtcaaaggaccagtctgcagagggatcctgtggctggaagcgaggaggctccacacggccgttgcagctaccgcagccaggatctgggcatccaggcacggccatgacccctccgaggctcttctgggtgtggctgctggttgcaggaacccaaggcgtgaatgatggtgacatgcggctggccgatgggggcgccaccaaccagggccgcgtggagatcttctacagaggccagtggggcactgtgtgtgacaacctgtgggacctgactgatgccagcgtcgtctgccgggccctgggcttcgagaacgccacccaggctctgggcagagctgccttcgggcaaggatcaggccccatcatgctggacgaggtccagtgcacgggaaccgaggcctcactggccgactgcaagtccctgggctggctgaagagcaactgcaggcacgagagagacgctggtgtggtctgcaccaatgaaaccaggagcacccacaccctggacctctccagggagctctcggaggcccttggccagatctttgacagccagcggggctgcgacctgtccatcagcgtgaatgtgcagggcgaggacgccctgggcttctgtggccacacggtcatcctgactgccaacctggaggcccaggccctgtggaaggagccgggcagcaatgtcaccatgagtgtggatgctgagtgtgtgcccatggtcagggaccttctcaggtacttctactcccgaaggattgacatcaccctgtcgtcagtcaagtgcttccacaagctggcctctgcctatggggccaggcagctgcagggctactgcgcaagcctctttgccatcctcctcccccaggacccctcgttccagatgcccctggacctgtatgcctatgcagtggccacaggggacgccctgctggagaagctctgcctacagttcctggcctggaacttcgaggccttgacgcaggccgaggcctggcccagtgtccccacagacctgctccaactgctgctgcccaggagcgacctggcggtgcccagcgagctggccctactgaaggccgtggacacctggagctggggggagcgtgcctcccatgaggaggtggagggcttggtggagaagatccgcttccccatgatgctccctgaggagctctttgagctgcagttcaacctgtccctgtactggagccacgaggccctgttccagaagaagactctgcaggccctggaattccacactgtgcccttccagttgctggcccggtacaaaggcctgaacctcaccgaggatacctacaagccccggatttacacctcgcccacctggagtgcctttgtgacagacagttcctggagtgcacggaagtcacaactggtctatcagtccagacgggggcctttggtcaaatattcttctgattacttccaagccccctctgactacagatactacccctaccagtccttccagactccacaacaccccagcttcctcttccaggacaagagggtgtcctggtccctggtctacctccccaccatccagagctgctggaactacggcttctcctgctcctcggacgagctccctgtcctgggcctcaccaagtctggcggctcagatcgcaccattgcctacgaaaacaaagccctgatgctctgcgaagggctcttcgtggcagacgtcaccgatttcgagggctggaaggctgcgattcccagtgccctggacaccaacagctcgaagagcacctcctccttcccctgcccggcagggcacttcaacggcttccgcacggtcatccgccccttctacctgaccaactcctcaggtgtggactagacggcgtggcccaagggtggtgagaaccggagaaccccaggacgccctcactgcaggctcccctcctcggcttccttcctctctgcaatgaccttcaacaaccggccaccagatgtcgccctactcacctgagcgctcagcttcaagaaattactggaaggcttccactagggtccaccaggagttctcccaccacctcaccagtttccaggtggtaagcaccaggacgccctcgaggttgctctgggatccccccacagcccctggtcagtctgcccttgtcactggtctgaggtcattaaaattacattgaggttcct

SEQ ID NO: 999 - DNA, 1882 bp, Homo Sapiens
gggcaggaagacggcgctgcccggaggagcggggcgggcgggcgcgcgggggagcgggcggcgggcgggagccaggcccgggcgggggcgggggcggcggggccagaagaggcggcgggccgcgctccggccggtctgcggcgttggccttggctttggctttggcggcggcggtggagaagatgctgcagtccctggccggcagctcgtgcgtgcgcctggtggagcggcaccgctcggcctggtgcttcggcttcctggtgctgggctacttgctctacctggtcttcggcgcagtggtcttctcctcggtggagctgccctatgaggacctgctgcgccaggagctgcgcaagctgaagcgacgcttcttggaggagcacgagtgcctgtctgagcagcagctggagcagttcctgggccgggtgctggaggccagcaactacggcgtgtcggtgctcagcaacgcctcgggcaactggaactgggacttcacctccgcgctcttcttcgccagcaccgtgctctccaccacaggttatggccacaccgtgcccttgtcagatggaggtaaggccttctgcatcatctactccgtcattggcattcccttcaccctcctgttcctgacggctgtggtccagcgcatcaccgtgcacgtcacccgcaggccggtcctctacttccacatccgctggggcttctccaagcaggtggtggccatcgtccatgccgtgctccttgggtttgtcactgtgtcctgcttcttcttcatcccggccgctgtcttctcagtcctggaggatgactggaacttcctggaatccttttatttttgttttatttccctgagcaccattggcctgggggattatgtgcctggggaaggctacaatcaaaaattcagagagctctataagattgggatcacgtgttacctgctacttggccttattgccatgttggtagttctggaaaccttctgtgaactccatgagctgaaaaaattcagaaaaatgttctatgtgaagaaggacaaggacgaggatcaggtgcacatcatagagcatgaccaactgtccttctcctcgatcacagaccaggcagctggcatgaaagaggaccagaagcaaaatgagccttttgtggccacccagtcatctgcctgcgtggatggccctgcaaaccattgagcgtaggatttgttgcattatgctagagcaccagggtcagggtgcaaggaagaggcttaagtatgttcatttttatcagaatgcaaaagcgaaaattatgtcactttaagaaatagctactgtttgcaatgtcttattaaaaaacaacaaaaaaagacacatggaacaaagaagctgtgaccccagcaggatgtctaatatgtgaggaaatgagatgtccacctaaaattcatatgtgacaaaattatctcgaccttacataggaggagaatacttgaagcagtatgctgctgtggttagaagcagattttatacttttaactggaaactttggggtttgcatttagatcatttagctgatggctaaatagcaaaatttatatttagaagcaaaaaaaaaaagcatagagatgtgttttataaataggtttatgtgtactggtttgcatgtacccacccaaaatgattatttttggagaatctaagtcaaactcactatttataatgcataggtaaccattaactatgtacatataaagtataaatatgtttatattctgtacatatggtttaggtcaccagatcctagtgtagttctgaaactaagactatagatattttgtttcttttgatttctctttatactaaagaatccagagttgctacaataaaataaggggaataataaa

SEQ ID NO: 1000 - DNA, 397 bp, Homo Sapiens
  misc_feature (181)..(181): n is a, c, g, or t
  misc_feature (300)..(300): n is a, c, g, or t
  misc_feature (319)..(319): n is a, c, g, or t
  misc_feature (368)..(368): n is a, c, g, or t
  misc_feature (380)..(380): n is a, c, g, or t
  misc_feature (387)..(387): n is a, c, g, or t
acataactatcaactaaaactgttcctaattccctcagtcagtgttgccttcttcaaaattaggtactgccaatggaagatgattggatatggacattaaagggagccaagatcccctttctttagacaaaatcagaaccaaaacaaaaaaatatgggtataaacaattaataaccagggnttatttataaactattatgggaccgagctttgcacagggtttatgccaaaaaagacaggtttagggccaaaggaaggaaaatgccctgtgtcagggaggcagttttcagggacagcagnggaactggggcactcgggntctcagtgcccacacaggggcttcatgctaacagggttcccgactttanccccttttcatncacacanatttttgggg

SEQ ID NO: 1001 - DNA, 1506 bp, Homo Sapiens
aggcggacaaagcccgattgttcctgggccctttccccatcgcgcctgggcctgctccccagcccggggcaggggcgggggccagtgtggtgacacacgctgtagctgtctccccggctggctggctcgctctctcctggggacacagaggtcggcaggcagcacacagagggacctacgggcagctgttccttcccccgactcaagaatccccggaggcccggaggcctgcagcaggagcggccatgaagaagctgatggtggtgctgagtctgattgctgcagcctgggcagaggagcagaataagttggtgcatggcggaccctgcgacaagacatctcacccctaccaagctgccctctacacctcgggccacttgctctgtggtggggtccttatccatccactgtgggtcctcacagctgcccactgcaaaaaaccgaatcttcaggtcttcctggggaagcataaccttcggcaaagggagagttcccaggagcagagttctgttgtccgggctgtgatccaccctgactatgatgccgccagccatgaccaggacatcatgctgttgcgcctggcacgcccagccaaactctctgaactcatccagccccttcccctggagagggactgctcagccaacaccaccagctgccacatcctgggctggggcaagacagcagatggtgatttccctgacaccatccagtgtgcatacatccacctggtgtcccgtgaggagtgtgagcatgcctaccctggccagatcacccagaacatgttgtgtgctggggatgagaagtacgggaaggattcctgccagggtgattctgggggtccgctggtatgtggagaccacctccgaggccttgtgtcatggggtaacatcccctgtggatcaaaggagaagccaggagtctacaccaacgtctgcagatacacgaactggatccaaaaaaccattcaggccaagtgaccctgacatgtgacatctacctcccgacctaccaccccactggctggttccagaacgtctctcacctagaccttgcctcccctcctctcctgcccagctctgaccctgatgcttaataaacgcagcgacgtgagggtcctgattctccctggttttaccccagctccatccttgcatcactggggaggacgtgatgagtgaggacttgggtcctcggtcttacccccaccactaagagaatacaggaaaatcccttctaggcatctcctctccccaacccttccacacgtttgatttcttcctgcagaggcccagccacgtgtctggaatcccagctccgctgcttactgtcggtgtccccttgggatgtacctttcttcactgcagatttctcacctgtaagatgaagataaggatgatacagtctccatcaggcagtggctgttggaaagatttaagatttcacacctatgacatacatgggatagcacctgggccgccatgcactcaataaagaatgtatttt

SEQ ID NO: 1002 - DNA, 351 bp, Homo Sapiens
  misc_feature (283)..(283): n is a, c, g, or t
  misc_feature (291)..(291): n is a, c, g, or t
  misc_feature (330)..(330): n is a, c, g, or t
  misc_feature (335)..(335): n is a, c, g, or t
  misc_feature (341)..(341): n is a, c, g, or t
  misc_feature (348)..(348): n is a, c, g, or t
atatcctggagccctataaaatatgtctgctcaggttgagccacggcgcccggctcacagcctctctttcaaacatgcagttcgtttcttgtgtagggtttaatgaaagtgtagctgcccaagctttggaacttagtgcaaaagtttaccattcaggtgtgatattaataattaaatgtttccagggaagccagcagggatggttaaatccacaaaaactctgcttaatatcttttttttttttttttttttttgagacagagtcttgctctcttgcccgggntgggagtncagtggggcgatcttggcccactgcatcctccacctccnggggntccagnaattttnccc

SEQ ID NO: 1003 - DNA, 454 bp, Homo Sapiens
  misc_feature (6)..(6): n is a, c, g, or t
  misc_feature (376)..(376): n is a, c, g, or t
  misc_feature (420)..(420): n is a, c, g, or t
  misc_feature (447)..(447): n is a, c, g, or t
tccganccattacacagctctggggttccttggtctctgaatctccactgccttgtgttacaagagtgagagccaaggggatagtggtattcacagctgtgccagtttttcctctgttggctgaacttttagaggctgagtaagtcacccctctgtagtctcacatgatgagcccggaacagacagaatgtcatcctgtgagtgaaacttgactcacctatgtgtagttgctctgcacatgagagaaagtgcatgcaaaactagcccttcttgaattaatagcatggataggcagtgtcggttggtcagtgtttgaaggttccccccacatttctgtctcaggagttaaataaaggctatccactcaatgtttctnaaagtatggtttgcagaccacattcactgatttagccaggggtncttatttaaactgcaggtttcctaggnaacctag

SEQ ID NO: 1004 - DNA, 3881 bp, Homo Sapiens
gctgaagtgttcgaccagcaggaggttttctcctcagcccactcgctgcatccagatcagctcaccccgcgccctttcctgcccaccaggactctgatagcccctggcagccacagcccattttgccaagatgtctagagtagccaaatatcgccggcagtgagtgaagaccccgacatcgacagcctgctgggaccctgtctcccgaggagatggaggagctggagaaggagctggacgtggtggacccagacgggagtgttcccgtggggctgcggcagagaaaccagacggagaaacagtccacgggtgtgtacaaccgggaggccatgctcaacttctgtgaaaaggagaccaagaaacttatgcagagggagatgtccatggatgaaagcaagcaagtggagaccaagacagatgccaagaatggacaggaaaggggcagagatgccagcaaaaaagccctgggccccagacggaactcagatctggggaaggagccaaagaggggtggtttaaagaaaagcttctctagagacagagatgaagctggtggcaagagtggcgagaagcccaaggaggagaagatcatccggggcattgacaagggccgggtcagggctgcagtggataagaaggaggcagggaaggatgggagaggagaggagagggcagtggccaccaagaaggaagaggagaagaaagggggtgacaggaacacaggcttgagcagggacaaggataaaaagagagaggagatgaaggaggtggccaagaaagaggatgatgagaaggtaaaaggggagcgtaggaacacagacaccagaaaagagggtgagaagatgaaaagagcaggtgggaacacagacatgaaaaaggaggatgagaaggtaaaaagaggaactgggaacacagacaccaaaaaggacgatgaaaaagtcaagaagaatgaacccttacatgaaaaggaagccaaggatgacagcaagaccaaaacacccgagaaacagacgcccagtggccccaccaagccctctgaaggaccggccaaggtggaggaggaggcagctcccagcatatttgatgagcctctggagagagtgaagaacaatgaccccgagatgactgaggtgaacgtcaacaactcagactgcatcacaaatgagatcttggtccggtttactgaggctctggagttcaacactgtggttaagctgttcgccttggccaacacgcgagccgatgaccacgtggcctttgccattgccatcatgctcaaggccaacaagaccatcaccagcctcaacctggactccaaccacatcacaggcaaaggcatcctggccatcttccgggccctcctccagaacaacacgctgaccgagctccgcttccacaaccagcgacacatctgtggaggcaagacggagatggagatcgccaagctgctgaaggagaatacctccctgctcaagctgggctaccattttgagctggccgggccccgaatgactgtcaccaatctgctcagccgcaacatggacaagcagagacaaaagcggctgcaggagcaaaggcaggcacaggaagccaagggagagaagaaggatctgctggaggtacccaaggccggggccgtggctaagggctccccaaaaccttcacctcaaccatctccaaagccctctccaaagaactcacccaaaaaagggggtgctccagctgccccaccaccccctccccctcccttggctccaccccttatcatggagaacctgaagaattcactctcaccagctacccagaggaagatgggagacaaagtcctccctgcccaggagaagaactcccgtgaccagctattggctgccatccgctccagcaacctcaagcagctcaagaaggtggaagtgcccaaactgcttcagtaggaccaggctgccaggcaccatctgccaatgccatgactgctcaggcctcacctcccagggctacacagaccctgcccaccccatccctggctgacctgctgtggatgtccctattctgccatgggagcgtccaggcctgggtcacgctcaaggaaggatgccttatctcttctcactttccttttcttgtctctgaggctctccaaattttgctttagtacatggagctcaggtttctggacaagaagagtccttttagcacatcactgagaagatggcactgtccagggcccatgtagctggcaagctgcaaaaggcctgtgatccaggaaagatgtcccacagggaccacatccaccccagccccactgccctccagggccaggattcaggcctctgaggagcccacggggcaaagctgctgggccagtggcactctgtgtgggaaaatggcagaaagatggagaggcatgggggcccaaaggggagcgtggggaggggctgaggataccccaaagtccaggctaattagaggatgtggcaggggcagtggcctggatgcacagtgcctgatgggagtaggctccagacaggaggagtgggacagacagcagctggacttgaaggtttgatgccaaagcagacattttcctcacacccacctgctgctgtatgaatagctgtgtatctgtttttccataagattttgataatatatacaaacctttagctgtgaatggctgtgccccacctgttgtcctgaactgtgagtcctgatcctaaccctgggctccctggaggactctagaagctcaggttccctgccacactatttgagttggccaagaaataaattcacatcctcagaaagtgcagcatggaggaaaatctgaactctaagcagaagactctccactgacctggttgtccaggtctagaaggccaggcctctactaggtctgctcctgaaccagtcctgctgcctggagtcagtagccagagttgttctcaggggtgctggggcagagtggagcccagggtgctgggatggctatattaggcatgttcagggatgctcattccatgactctgcctaaccatgggctcagggccaggtcctcacagcagtcacaggcccaggaaggcggcaggcagagaagtggagtgactatttggagaatagcacccatatctgtgtgccctagggctcagaggggcctcatcttccccagccctccccacctgctcaccaattccacttcctgccccaactgcaggaatgctgacaatgctgccatgcccaccatcgggtgtaggtgaaaggcatctttctgaatttcattctcttgaaggtgctgccaccccttggcactgtggaactgccaccttgggtctgtgtcacttgtaggtttctctgcctccaggttgcctcaacagcaggaggcacagcagtttcaccatctttgaggtgagggtggggtgccccagctaggaagcaagatcgctgtgctaggtctgaccaaaaccagagggcagtctagtcctgggggtaaagccctcagatcccagggtacactcttctccattccctccacccacttgcctgtcaccccagtcacctaagcaatcactgggcccagaggagaggagacagacacacactggctcctggacctaaagggtatgagctggagctaaggccagctagagcttccactgtcagccctcactgtcagccccactgcacccccctgtgcctgctgggcactgggcactagctagatgctttaggttgcttcagctgatccttcaactctgtgaggtggataccaatattctattttgcagatagaatttggcccagagaggttaactaatatatccatgatcacacagctaataaaagtcagagctcaggaaaaaaaaaaaaaaaaaaaaaaaaaaaaaaaa

SEQ ID NO: 1005 - DNA, 244 bp, Homo Sapiens
ttttttttttttttttttttcaagatttacccattttttattttttataaaacaagctacaaatagtttccctctctccttcacaaaggaaaaccacacaacaccacctacacacacgatcctgtgggagacaagatgcctggggagatctcgaagatccaaacatctacaggcaggcgccgtctccatgtgtgcatgcttcctccaggcctgaaagtggggccagtgtctcgtgcaaggccca

SEQ ID NO: 1006 - DNA, 3198 bp, Homo Sapiens
ttgggaggagcagtctctccgctcgtctcccggagctttctccattgtctctgcctttacaacagagggagacgatggactgagctgatccgcaccatggagtctcgggtcttactgagaacattctgtttgatcttcggtctcggagcagtttgggggcttggtgtggacccttccctacagattgacgtcttaacagagttagaacttggggagtccacgaccggagtgcgtcaggtcccggggctgcataatgggacgaaagcctttctctttcaagatactcccagaagcataaaagcatccactgctacagctgaacagttttttcagaagctgagaaataaacatgaatttactattttggtgaccctaaaacagacccacttaaattcaggagttattctctcaattcaccacttggatcacaggtacctggaactggaaagtagtggccatcggaatgaagtcagactgcattaccgctcaggcagtcaccgccctcacacagaagtgtttccttacattttggctgatgacaagtggcacaagctctccttagccatcagtgcttcccatttgattttacacattgactgcaataaaatttatgaaagggtagtagaaaagccctccacagacttgcctctaggcacaacattttggctaggacagagaaataatgcgcatggatattttaagggtataatgcaagatgtccaattacttgtcatgccccagggatttattgctcagtgcccagatcttaatcgcacctgtccaacttgcaatgacttccatggacttgtgcagaaaatcatggagctacaggatattttagccaaaacatcagccaagctgtctcgagctgaacagcgaatgaatagattggatcagtgctattgtgaaaggacttgcaccatgaagggaaccacctaccgagaatttgagtcctggatagacggctgtaagaactgcacatgcctgaatggaaccatccagtgtgaaactctaatctgcccaaatcctgactgcccacttaagtcggctcttgcgtatgtggatggcaaatgctgtaaggaatgcaaatcgatatgccaatttcaaggacgaacctactttgaaggagaaagaaatacagtctattcctcttctggagtatgtgttctctatgagtgcaaggaccagaccatgaaacttgttgagagttcaggctgtccagctttggattgtccagagtctcatcagataaccttgtctcacagctgttgcaaagtttgtaaaggttatgacttttgttctgaaaggcataactgcatggagaattccatctgcagaaatctgaatgacagggctgtttgtagctgtcgagatggttttagggctcttcgagaggataatgcctactgtgaagacatcgatgagtgtgctgaagggcgccattactgtcgtgaaaatacaatgtgtgtcaacaccccgggttcttttatgtgcatctgcaaaactggatacatcagaattgatgattattcatgtacagaacatgatgagtgtatcacaaatcagcacaactgtgatgaaaatgctttatgcttcaacactgttggaggacacaactgtgtttgcaagccgggctatacagggaatggaacgacatgcaaagcattttgcaaagatggctgtaggaatggaggagcctgtattgccgctaatgtgtgtgcctgcccacaaggcttcactggacccagctgtgaaacggacattgatgaatgctctgatggttttgttcaatgtgacagtcgtgctaattgcattaacctgcctggatggtaccactgtgagtgcagagatggctaccatgacaatgggatgttttcaccaagtggagaatcgtgtgaagatattgatgagtgtgggaccgggaggcacagctgtgccaatgataccatttgcttcaatttggatggcggatatgattgtcgatgtcctcatggaaagaattgcacaggggactgcatccatgatggaaaagttaagcacaatggtcagatttgggtgttggaaaatgacaggtgctctgtgtgctcatgtcagaatggattcgttatgtgtcgacggatggtctgtgactgtgagaatcccacagttgatcttttttgctgccctgaatgtgacccaaggcttagtagtcagtgcctccatcaaaatggggaaactttgtataacagtggtgacacctgggtccagaattgtcaacagtgccgctgcttgcaaggggaagttgattgttggcccctgccttgcccagatgtggagtgtgaattcagcattctcccagagaatgagtgctgcccgcgctgtgtcacagacccttgccaggctgacaccatccgcaatgacatcaccaagacttgcctggacgaaatgaatgtggttcgcttcaccgggtcctcttggatcaaacatggcactgagtgtactctctgccagtgcaagaatggccacatctgttgctcagtggatccacagtgccttcaggaactgtgaagttaactgtctcatgggagatttctgttaaaagaatgttctttcattaaaagaccaaaaagaagttaaaacttaaattgggtgatttgtgggcagctaaatgcagctttgttaatagctgagtgaactttcaattatgaaatttgtggagcttgacaaaatcacaaaaggaaaattactggggcaaaattagacctcaagtctgcctctactgtgtctcacatcaccatgtagaagaatgggcgtacagtatataccgtgacatcctgaaccctggatagaaagcctgagcccattggatctgtgaaagcctctagcttcactggtgcagaaaattttcctctagatcagaatcttcagaatcagttaggttcctcactgcaagaaataaaatgtcaggcagtgaatgaattatattttcagaagtaaagcaaagaagctataacatgttatgtacagtacactctgaaaagaaatctgaaacaagttattgtaatgataaaaataatgcacaggcatggttacttaatattttctaacaggaaaagtcatccctatttccttgttttactgcacttaatattatttggttgaatttgttcagtataagctcgttcttgtgcaaaattaaataaatatttctcttacctt

SEQ ID NO: 1007 - DNA, 420 bp, Homo Sapiens
  misc_feature (3)..(3): n is a, c, g, or t
  misc_feature (64)..(64): n is a, c, g, or t
  misc_feature (224)..(224): n is a, c, g, or t
  misc_feature (376)..(376): n is a, c, g, or t
ctntcggcacagaaatatatttgccaaattgtaagaataattttaatgcaaacacttgtgtggnctgccacctattcaagaaacagaatcatgccaatctacatgtgcctcctctgtccagtttaggtcccaacggagtctaaactagaaatattttctagaagctcaagtggaatattgactttctctgctctttcaaatcatactcccactaaaagtttttnctgagctagagatcttgtataaaagggtcatcattgactaaaaataacaacaatgtattcttccctgaatggcaagagttcaaagacttattgaaaattaattccctttagaagtagtctttggggagcaaatcattgagagaccatggganaaatctggggtaaagtacatgtataggagtattttaaagggatt

SEQ ID NO: 1008 - DNA, 338 bp, Homo Sapiens
  misc_feature (306)..(306): n is a, c, g, or t
cagatcagcaatcttgtttgtattttcttccaaacatttaaaaccttgattattgacatactgaaattggcatacattttgttttcatgcagataacagaatagacatggagcagatccctcagaaatcagttataaatattaaattgtattgaacattcatagtaaaaaatatgtcgtaaagtgctgaagtcatgtaagtctgcaaaactgccacaagctcaaagttctcaagcagtgacagagatttgctacatccaccttgttttagattatgcctgtttttgacaggacactttgtcatttncctcccccaccctccccaaagttttatagatt

SEQ ID NO: 1009 - DNA, 563 bp, Homo Sapiens
  misc_feature (11)..(11): n is a, c, g, or t
cgagagggcanaaaaccttcgggctaggtagcgaggcctgggtggttgggagcggcgtggagcccaatcgttcgctccccttcccgggtccgcgcgcggcgccgcctccgccattgctgcgagcaggagcaggagacgcggagctcggagcgctgagctgacctgccggagccgggcgtgggctgcagcctcggagctcccggaacgatggtgaagttggggaacaatttcgcagagaagggcaccaagcagccgctgctggaggatggcttcgacaccattcccctgatgacgcccctcgatgtcaatcagctgcagttcccgcccccggataaggtggtcgtgaaaactaagaccgagtatgaacctgaccgcaagaaagggaaagcacgtcctccccaaattgctgagttcaccgtcagcatcacggagggtgtcaccgagaggtttaaggtctccgtgttggtcctcttcgccctggccttcctcacctgcgtcgtcttcctggttgtctacaaggtgtacaagtatgaccgcgcctgccccgatgggttcgtcctcaa

SEQ ID NO: 1010 - DNA, 595 bp, Homo Sapiens
atttggccctcgaggccaagaattcggcacgagggtgagttcctccggccgggctgcggggctccgctcagtccgggagcgcagctgggccgcggcgctccgacctccgctttcccaccgcccgcagctgaagcacatcccgcagcccggcgcggactccgatcgccgcagttgccctctggcgccatgtcgcagaacggagcgcccgggatgcaggaggagagcctgcagggctcctgggtagaactgcacttcagcaataatgggaacgggggcagcgttccagcctcggtttctatttataatggagacatggaaaaaatactgctggacgcacagcatgagtctggacggagtagctccaagagctctcactgtgacagcccacctcgctcgcagacaccacaagataccaacagagcttctgaaacagatacccatagcattggagagaaaaacagctcacagtctgaggaagatgatattgaaagaaggaaagaagttgaaagcatcttgaagaaaaactcagattggatatgggattggtcaagtcggccggaaaatattcccccccaggagttcctctttaaacacc

SEQ ID NO: 1011 - DNA, 10172 bp, Homo Sapiens
atggggagaagacggaggctgtgtctccagctctacttcctgtggctgggctgtgtggtgctctgggcgcagggcacggccggccagcctcagcctcctccgcccaagccgccccggccccagccgccgccgcaacaggttcggtccgctacagcaggctctgaaggcgggtttctagcgcccgagtatcgcgaggagggtgccgcagtggccagccgcgtccgccggcgaggacagcaggacgtgctccgagggcccaacgtgtgcggctccagattccactcctactgctgccctggatggaagacgctccctggaggaaaccagtgcattgtcccgatttgtagaaatagttgtggagatggattttgttcccgtcctaacatgtgtacttgttccagtgggcaaatatcatcaacctgtggatcaaaatcaattcagcagtgcagtgtgagatgcatgaatggtgggacctgtgcagatgaccactgccagtgccagaaaggatatattggaacttattgtggacaacctgtctgtgaaaatggatgtcagaatggtggacgttgcatcgcccaaccgtgtgcttgtgtttatgggttcactggtccacagtgtgaaagagattacaggacaggcccgtgtttcactcaggtcaacaaccagatgtgccaagggcagctgacaggcattgtctgcacgaagactctgtgctgtgccaccactggacgggcgtggggccatccctgtgagatgtgtccagcccagcctcagccctgccgacggggtttcatccccaacatccgcactggagcttgccaagatgttgatgaatgccaggctatcccagggatatgccaaggaggaaactgtatcaatacagtgggctcttttgaatgcagatgccctgctggtcacaaacagagtgaaactactcagaaatgtgaagacattgatgagtgcagcatcattcctgggatatgtgaaactggtgaatgttccaacaccgtgggaagctatttttgtgtttgtccacgtggatatgtaacctcaacagatggctctcgatgcatcgatcagagaacaggcatgtgtttctcgggcctggtgaatggccgctgtgcacaagagctcccggggagaatgacgaaaatgcagtgctgctgtgagcctggccgctgctggggcatcggaaccattcctgaagcctgtcctgtcagaggttctgaggaatatcgcagactttgcatggatggacttccaatgggaggaattccagggagtgctggttccagacctggaggcactgggggaaatggctttgccccaagtggcaatggcaatggctatggcccaggagggacaggcttcatccccatccctggaggcaatggcttttctcctggcgttgggggagccggtgtgggggccgggggacagggacctatcatcactggactaacaattctgaaccagacaatagatatctgtaagcatcatgctaacctttgtttaaatggacgctgtataccaactgtctcaagctaccgatgtgaatgcaacatgggttataagcaggatgcaaatggagattgtatagatgttgatgaatgcacatcaaatccctgcactaatggagattgtgttaacacacctggttcctattattgtaaatgtcatgctggattccagaggactcctaccaagcaagcatgcattgatattgatgagtgcatccagaatggggttctttgtaaaaacggtcgatgcgtgaactcagatggaagtttccagtgcatttgcaatgccggctttgaattaactacagatggaaaaaactgtgttgatcatgatgaatgtacaactaccaacatgtgtttgaatggaatgtgcatcaatgaagatggcagcttcaagtgcatctgcaaaccaggatttgtcttggctccaaatgggcgttactgtactgatgttgatgaatgccagaccccaggaatctgcatgaatgggcactgcatcaacagtgaagggtccttccgctgtgactgtcccccaggcctggctgtgggcatggatggacgtgtgtgtgttgatactcacatgcgcagtacctgctatggaggaatcaagaaaggagtgtgtgtgcgtcctttccccggtgcagtgaccaagtccgaatgctgctgtgccaatccagactatggttttggagaaccctgccagccatgccctgcaaaaaattcagctgaattccacggcctttgtagtagtggagtaggtatcactgtggatggaagagatatcaatgaatgtgctttggatcctgatatatgtgccaatgggatttgtgaaaacttacgtggtagttaccgttgtaattgcaacagtggctatgaaccagatgcctctggaagaaactgtattgacattgatgaatgtttagtaaacagactgctttgtgataacggattgtgccgaaacacgccaggaagttacagctgtacgtgcccaccagggtatgtgttcaggactgagacagagacctgtgaagatataaatgaatgtgaaagcaacccatgtgtcaatggggcctgcagaaacaaccttggatctttcaattgtgaatgttcgcccggcagcaaactcagctccacaggattgatctgtattgacagcctgaaggggacctgttggctcaacatccaggacagccgctgtgaggtgaatattaatggagccactctgaaatctgaatgctgtgccaccctcggagccgcctgggggagcccctgtgagcggtgtgaactagatacagcttgcccaagagggcttgccaggattaaaggtgttacgtgtgaagatgttaatgagtgtgaggtgttccctggcgtttgtccaaatggacgctgtgtcaacagtaagggatcttttcattgcgagtgccctgaaggccttacgttggatgggactggccgtgtatgtttggatattcgcatggagcagtgttacttgaagtgggatgaagatgaatgcatccaccccgttcctggaaagttccgcatggatgcctgctgctgtgctgtcggggcggcttggggcaccgagtgtgaggagtgccccaaacctggcaccaaggaatacgagacactgtgcccccgcggggctggctttgctaaccgaggggatgttcttactgggcggccattttacaaagacatcaatgaatgcaaagcatttcctgggatgtgcacttatgggaagtgcagaaatacaatcggaagcttcaaatgccgttgcaatagtggctttgctctagacatggaggaaagaaactgcacggacatcgacgagtgcaggatttctcctgacctctgtggcagtggaatctgcgtcaatacaccgggcagctttgagtgcgagtgcttcgaaggctatgaaagtggcttcatgatgatgaagaactgcatggacattgacggatgtgaacgtaaccctctcctttgtaggggtggcacctgtgtgaacactgagggcagctttcagtgtgactgcccactgggacacgagctgtcaccatcccgtgaggactgtgtggatattaatgaatgctccctgagtgacaatctctgcagaaatggaaaatgtgtgaacatgattggaacctatcagtgctcttgcaatcctggatatcaggctacgccagaccgccagggctgtacagatattgatgaatgtatgataatgaacggaggctgtgacacccagtgcacaaattcagagggaagctacgaatgcagctgcagtgagggttatgccctgatgccagatgggagatcgtgtgcagacattgatgaatgtgaaaacaatcctgatatctgtgatggcggccagtgtaccaacattcctggagagtatcgctgcctctgctatgatggcttcatggcttccatggacatgaaaacatgcattgatgtcaatgaatgtgacctaaattcaaatatctgcatgtttggggaatgtgagaacacaaagggatccttcatttgccactgtcagctgggttactcagtgaagaaggggaccacaggatgtacagatgtggatgagtgtgaaattggtgctcataactgcgacatgcatgcctcatgtctgaatatcccaggaagcttcaagtgtagctgcagagaaggctggattggaaacggcatcaagtgtattgatctggacgaatgttctaatggaacccaccagtgtagcatcaatgctcagtgtgtaaataccccgggctcataccgctgtgcctgctccgaaggtttcactggtgatggctttacctgctcagatgttgatgagtgtgcagaaaacataaacctctgtgagaacggacagtgccttaatgtcccgggtgcatatcgctgcgagtgtgagatgggcttcactccagcctcagacagcagatcctgccaagatattgatgaatgctccttccaaaacatttgtgtctctggaacatgtaataacctgcctggaatgtttcattgcatctgcgatgatggttatgaattggacagaacaggagggaactgtacagatattgatgagtgtgcagatcctataaactgtgtcaatggcctatgtgtcaacacgcctggtcgctatgagtgtaactgcccacccgattttcagttgaacccaactggtgtgggttgtgttgacaaccgtgtgggcaactgctacctgaagtttggacctcgaggagatgggagtctgtcttgcaacaccgagatcggggtgggcgtcagtcgctcttcatgctgctgctctctgggaaaggcctggggaaacccctgtgagacatgcccccctgtcaatagcactgaatattacaccctgtgtcccggaggtgaaggcttcagacctaaccccatcacaatcattttagaagacattgacgaatgccaggagttaccaggtctctgccagggtggaaactgcatcaacacttttgggagcttccagtgtgagtgcccacaaggctactacctcagcgaggatacccgcatctgtgaggatattgatgagtgttttgcacatcctggtgtgtgtgggcctgggacctgctataacaccctgggaaattacacctgcatttgcccacctgagtacatgcaggtcaatggaggccacaactgcatggacatgagaaaaagcttttgctaccgaagctataatggaaccacttgtgagaatgagttgcctttcaatgtgacaaaaaggatgtgctgctgcacatataatgtgggcaaagctgggaacaaaccttgtgaaccatgcccaactccaggaacagctgactttaaaaccatatgtggaaatattcctggattcacctttgacattcacacaggaaaagctgttgacattgatgaatgtaaagagattccaggcatttgtgcaaatggtgtgtgcattaaccagattggcagtttccgctgtgaatgccctacaggattcagttacaatgacctgctgttggtttgtgaagatatagatgagtgcagcaatggtgataatctctgccagcggaatgcagactgcatcaatagtcctggtagttaccgctgtgaatgtgccgcgggtttcaaactttcacccaatggggcctgtgtagatcgcaatgaatgtttagaaattcctaacgtttgcagtcatggcttgtgtgttgatctgcaaggaagttaccagtgcatctgccacaatggctttaaggcttctcaggaccagaccatgtgcatggatgttgatgagtgcgagcggcacccatgtggaaatggaacttgtaaaaacaccgttggatcctataactgtctgtgctacccagggtttgaactcactcataataatgattgcctggacatagatgagtgcagttccttttttggtcaggtgtgcagaaatggacgttgttttaatgaaattggttctttcaagtgtctatgtaacgaaggttatgaacttaccccagatggcaaaaactgtatagacactaatgagtgtgtcgcccttcccggctcttgctctcctggtacctgtcagaatttggagggatccttcagatgcatctgtcccccagggtatgaagtaaaaagcgagaactgcattgatataaatgaatgtgatgaagatcccaacatttgtctttttggttcctgtactaatactccagggggcttccagtgcctctgcccccctggctttgtactatctgataatggacggagatgctttgatactcgccagagcttctgcttcacaaattttgaaaatggaaagtgttctgtacccaaagctttcaacaccacaaaagcaaaatgctgctgtagtaagatgccaggagagggctggggggacccctgtgagctgtgccccaaagacgatgaagttgcatttcaggatttgtgtccatatggccatggaactgtccctagtcttcatgatacacgtgaagatgtcaatgagtgtcttgagagcccaggcatttgttcaaatggtcaatgtatcaacaccgacggatcttttcgctgtgaatgtccaatgggctacaaccttgactacactggagtacgctgtgtggatactgatgagtgttcaatcggcaatccgtgtggaaatggtacatgcaccaatgttattgggagttttgaatgcaattgcaatgaaggctttgagccagggcccatgatgaattgtgaagatatcaacgaatgtgcccagaacccactgctgtgtgctttacgctgcatgaacacttttgggtcctatgaatgcacgtgcccgattggctatgccctcagggaagatcaaaagatgtgcaaagatctggatgaatgtgctgaagggttacacgactgtgaatctaggggcatgatgtgtaagaatctaatcggcaccttcatgtgcatctgccctcctggaatggcccgaaggcccgatggagaaggctgtgtagatgaaaatgaatgcaggaccaagccaggaatctgtgaaaatggacgttgtgttaacattattggaagctatagatgtgagtgtaatgaaggattccagtcaagttcttcaggcactgaatgccttgacaatcgacagggtctctgctttgcagaggtactgcagacaatatgtcaaatggcatccagtagtcgcaatctcgtcactaagtcagaatgctgctgtgatggtgggcgaggctggggccaccagtgcgagctttgcccacttcctggaactgcccagtacaaaaagatatgtcctcatggcccaggatatacaactgatggaagagatattgatgaatgtaaggtaatgccaaacctctgcaccaatggtcagtgcatcaataccatgggctcattccgatgcttctgcaaggttggctacaccacagacatcagtggaacctcttgtatagaccttgatgaatgctcccagtccccgaaaccatgcaactacatctgcaagaacactgaggggagttatcagtgttcatgtccgagggggtatgtcctgcaagaggatggaaagacatgcaaagaccttgatgaatgtcaaacaaagcagcataactgccagttcctctgtgtcaacaccctgggggggtttacctgtaaatgtccacctggtttcacacagcatcacactgcttgtatcgacaacaacgaatgtgggtctcaacctttgctttgtggaggaaagggaatctgtcaaaacactccaggcagtttcagctgtgaatgccaaagagggttctctcttgatgccaccggactgaactgtgaagatgttgatgaatgtgatgggaaccacaggtgccaacacggctgccagaacatcctgggtggctacagatgtggctgcccccaaggctacatccagcactaccagtggaatcagtgtgtcgatgagaatgaatgctccaatcccaatgcctgtggctctgcttcctgctacaacaccctggggagttacaagtgcgcctgcccctcggggttctccttcgaccagttctccagtgcctgccacgacgtgaatgagtgctcgtcctccaagaacccctgcaattacggctgctctaacacggaggggggctacctctgtggctgcccccctgggtattacagagtgggacaaggccactgtgtctcaggaatgggatttaacaaggggcagtacctgtcactggatacagaggtcgatgaggaaaatgctctgtccccagaagcatgctacgagtgcaaaatcaacggctatcctaagaaagacagcaggcagaagagaagtattcatgaacctgatcccactgctgttgaacagatcagcctagagagtgtcgacatggacagccccgtcaacatgaagttcaacctctcccacctcggctctaaggagcacatcctggaactaaggcccgccatccagcccctcaacaaccacatccgttatgtcatctctcaagggaacgatgacagcgtcttccgcatccaccaaaggaatgggctcagctacttgcacacggccaagaagaagctcatgcccggcacatacacactggaaatcactagcatccctctctacaagaagaaggagcttaagaaactggaagagagcaatgaggatgactacctcctaggggagcttggggaggctctcagaatgaggctgcagattcagctctattaaccgttcacagacttgggcccaggctcaaatcctagcacagccagtctgcagaagcatttgaaaagtcaaggactaattttaaagaggaaaaataataataactcttgtttctttcctccctgtcttagactttgaatgttgaccctcacagggagggataatttagactctggtatggccaaagatttgagctcaaaggcaaccgtggttactgtattttttatataacttcattttaaaatatattaaaagaaacctaaatgttcaagatatcagcatatggcactaaatgcacaaaaataatgtgagcttttttttttttttcctgttagcagtctgtaacactttgggtattttgctatagttgctaattaaaaaaatatagatgtttatttatttttaatgcagtaatatatggagaaatgaacaaactatgtaaacaaaaagggaaactcacttgtttttctttagatttataaatttgagctattttttttagaggtgctttttaaaaatccaatagatacaagagatgtttcctttggttttctgccagtcatccagctgatacacacctgatcgattttaaagaaagccacacagagctgaatcgggcagtgctaatcaataatttaaaagacatgaatgtcattagatcctttataacgtagatcgaagccaaagcagctcatttgtgacaacatttcatatcaccagacacaccaggcaacagaagttgaagcacaaccactgtagcaaaataccttgactgcttgtgagaccattagcattgcaggccaaaccgtactgtatttccttctcataacctcaaggaaccatatgtgctacccacaacacctcattcttacccagggtgcgctgcgtcctcatggtactgtaggcagctgaagaaccgccgttcccttgaaagggaacacctggcattctgtggtgtttcgtgctgtcttaaataatggtgcatttattatgttcaagttatttcaggattgccatatgtgcaaacaaatcatgcaatgcagccaaggaatatatgttgttgttgttgttttaaacccattttttttttagaattttcattaatactgtagttatacaccatatgcctcattttatcatagcctattgtgtatgaaagatgtttgtacaatgaattgatgtttagtttgctttagtcatttaaaaagatattgtaccaggatgtgctattaagagcacgtatccattattcttctcaacccaagaacctgtttcctggaccagtgaccaaacctcatatgtgaaatggccaaagcacatgcaggctcctggttgttcctctcaaacctgtgctgaccaaagattagtaaccagttatacccagtattttgaggttttattgtttttttaataactaaaaaaaaactcgtgccgaattc

SEQ ID NO: 1012 - DNA, 368 bp, Homo Sapiens
  misc_feature (200)..(200): n is a, c, g, or t
  misc_feature (207)..(207): n is a, c, g, or t
  misc_feature (293)..(293): n is a, c, g, or t
  misc_feature (302)..(302): n is a, c, g, or t
  misc_feature (313)..(313): n is a, c, g, or t
  misc_feature (346)..(346): n is a, c, g, or t
aaatatattggctcagtaacagaaaaaaaaaatagcccttgattaaaggtttgatctatcccacgtaagaaagattaaaagcaaagctagaaaagatcagatttgtttctaaataacttatctgcgtcctaaaacaaaactaaaaaatttttttaaatacagtaatgtattaaaacatactgaaactcaatacatacagngaaacgnagataaggaataaggaagtccaagtgcaggcggcttcattacctgttaattccaaggcacttggggggagggccagggcagggggnttcacttgngggccacggantttgggggacccggcgtggggccaacacaggcnggaaccctgttctttttaccac

SEQ ID NO: 1013 - DNA, 443 bp, Homo Sapiens
ggcacgaggcggagacgacggcggcggcagcgctccaactggctcctcgctccgggctccgccgtcgagccgggagagagcctccgccagcggccaggcaccagccagacgacgccagcgaccccggcctctcggtggcaccgcgctaactcaggggctgcataggcacccagagccgaactccaagatgggaggcaagctcagcaagaagaagaagggctacaatgtgaacgacgagaaagccaaggagaaagacaagaaggccgagggcgcggcgacggaagaggaggggaccccgaaggagagcgagccccaggcggccgcatagcccgccgaggccaaggagggcaaggagaagcccgaccaggacgccgagggcaaggccgaggagaaggagggcgagaaggacgcggcggctgccaaggaggaggccccgaaagcgg

SEQ ID NO: 1014 - DNA, 350 bp, Homo Sapiens
  misc_feature (145)..(145): n is a, c, g, or t
  misc_feature (231)..(231): n is a, c, g, or t
  misc_feature (277)..(277): n is a, c, g, or t
ccggcccaactgcggcgtcatcccggctataagcgcacggcctcggcgaccctctccgacccggccgccgccgccatgcagccctccagccttctgccgctcgccctctgcctgctggctgcacccgcctccgcgctcgtaaggntcccgctgcacaagttcacgtccatccgccggaccatgtcggaggttgggggctctgtggaggacctgattgccaaaggccccgtntcaaagtactcccaggcggtgccagccgtgaccgaggggcccattnccgaggtgctcaagaactacatggacgcccagtactacggggagattggcatcgggacggccccccagtgctt

SEQ ID NO: 1015 - DNA, 415 bp, Homo Sapiens
  misc_feature (402)..(402): n is a, c, g, or t
agtaattttgtcgctagttactgtattactggaaaatgtattcctaggctttaagatttgggaagcgtgtgagtctaacttctcaaacagaatttgacaaggacgtagcagtgttttaaaaagtcagggaaaggaaagaggtgtgttcagcattcctgccccatcttaacatattctttttctcgtcttaacagtggtaatattttatgttattttggtttgatttttgtttgtggcatatggctctgctgtcctgtgactctaagtagaagagaaaatagtgccaattaattcttcatgggagatgcacctctctgcaagtcttggaaccaatgttttgagggaaaagtgctttcagctggggctgatggaggacacctttggcacttctttccccgccantgggggcacttga

SEQ ID NO: 1016 - DNA, 5440 bp, Homo Sapiens
  misc_feature (61)..(61): n is a, c, g, or t
  misc_feature (148)..(148): n is a, c, g, or t
  misc_feature (214)..(214): n is a, c, g, or t
  misc_feature (387)..(387): n is a, c, g, or t
  misc_feature (886)..(886): n is a, c, g, or t
  misc_feature (1628)..(1628): n is a, c, g, or t
  misc_feature (1631)..(1631): n is a, c, g, or t
  misc_feature (1634)..(1634): n is a, c, g, or t
  misc_feature (1662)..(1662): n is a, c, g, or t
  misc_feature (2506)..(2506): n is a, c, g, or t
  misc_feature (2590)..(2590): n is a, c, g, or t
  misc_feature (2761)..(2761): n is a, c, g, or t
  misc_feature (2814)..(2814): n is a, c, g, or t
  misc_feature (2827)..(2827): n is a, c, g, or t
  misc_feature (2870)..(2870): n is a, c, g, or t
  misc_feature (2944)..(2944): n is a, c, g, or t
  misc_feature (3842)..(3842): n is a, c, g, or t
  misc_feature (3896)..(3896): n is a, c, g, or t
  misc_feature (4096)..(4096): n is a, c, g, or t
  misc_feature (4130)..(4130): n is a, c, g, or t
agctcagatgccagagggaaccagccctccttctttgcatgcccccctgctgggaaggccnacagctacccgccaccttcgccctctgcaagacacccagaggaggctctttccagtggcacagtcatggggttggagggggcacagncagcccagccaggattcctcatgggaagtgtgtggtgcctctttagacttgcctgctaacgggagnctctgcccataacttcctcttcccactggagttcgttcaggaagccagaaccagcatggggatgctcagccctccaagatcccctaggaccatgggcagcccacccctcagcccagcttttgcctactttgaagacctcaaggacaagagggccctaatcttaccgagccagnccctcctcaatccaaggccttcttaggcgttgccaaggaaactgatgcagcagccaaagagcctggcccaggtctccatgacaacctaccacagcccaccagggtccatccatctgtgatgtcacctgagccccaaatggatgccctcccacccccaccacacttgtcacaatcagatgtcacagtctgatagcaggtccctgtcacaaaatacctcacagcctgacctgcaaccctcagacccctgagagatgagcagggagctaagacactcctcatgccttgaccacaccctgtgtttatgccccttttgggtgggggcctgaacctccaggccctggatgtgccctgggtggctggctcagcctacagctagagggaagaagggagaccttgacgactcgaagtgctgctcctgctggcattcaacacccattggcctggatttccccaactctgggcaacttccagtccaggagcagaataaccagagccacgnccagggccagggctggggcagattatttatttttagcagagttgctggcagctgcctggtgggtgctgggaggtgggatggggactgagtttaatcccttccctcttctgggctggggtatcctccccagggttcaagcaggcatctccacctgcaactctgtcagagctgcccccacccccaacaccctctcagggcctccaggggtcatgggtgacacaaccctcacactcaccactgaaggttaggctcattagggagaatcttcaactccaggatggggagtggaaaggattttgtgtgaatttaggacaccccctaaattctagctcagcctgagcctatggggagtgggtgtcatgggcagagaagggggatctctgtccagcctgtaactagcttacttgctaaaaggacgagccgggacttggggagaggaaagggagaattcagtctcacggggccagaccgaattcttcctccagagggcagttgctgcttttggctgattgggtttaccccgctgcctgcctccccatcacgtactcccaccgcaacctcgctctctctctccttctcacacacaccctcaagctccggacctcgcctaaccggtcagcccctctattcccagacagctaccgctactcccctggcgggtagggcggggtgtcggggatgtaaggtccgaggaagagggtgggggattccccctggtgggggtggacagacacgtcagccnccncancagcgtggaccgggggcgggagcggggncgggtggaggcttaaataaggcgactctggaccagagcccatgcggctgagaaggcggtggctgcagcagcagcggcggcggaaaccctaaagtccgagtccggactacgagtgcgtggcctcctaatccggatcctagtcctgagcgtgtctgtgtgcgagtgggtgagtgtcctggcggagcggggtcggggcggctgcagatggatgcgccaggtccggaggggtcccgggtgaggcgccgcgacctgggggctgggagggctgcggcgggacctcggccggagcatcccgcctgactccgggttggcaggtgcgccccgggtcccgcctcctcgcggcttacacggccactcgggttcctgatcccctagacggtcccggacgcgatgaccctgaacggcggcggcagcggagcgggcgggagccgcggtgggggccaggagcgcgagcgccgtcggggcagcacaccctggggccccgccccgccgctgcaccgccgcagcatgccggtggacgagcgcgacctgcaggcggcgctgaccccgggtgccctgacggcggccgcggccgggacggggacccagggtcccaggctggactggcccgaggactccgaggactcgctcagctcagggggcagcgactcagacgagagcgtttacaaggtgctgctgctgggggcgcccggcgtgggcaagagcgccctggcgcgcatcttcggcggtgtggaggacgggcctgaagcagaggcagcaggtgaggggaccagccgttcaggggaggggcatcccggggctaggactaggggctgagaccggtactcaaagccgcaaatacgttnaattatattgttgttgttgttgttattattattattattattattttattattattattttgagacagagtttcgctctttttnccaggctggagtgcagtggcctcgatctaggctcactgcaacctccgccttcaggtttcaagggattctcctgcctcagcctccagagtagctaggattacaggcgcctgctaccacgcccggctaatattgtgtttttagtagagttggggtttcaccatgttggccagntggctggaatttctgacctcgtgatccgcccaccaccttggcttcccaaagtnctgggattacagncgtgacagccgcacctggccaatactgtggaattctattggcnctttcagaatcattgccctacctacccacttcataaatggggaaaggaaaggagaaatcgggacaccccccagncctttggtaggaagaaatgcccaggtagaaggccagggcatagatatggctactctgtgggatgggactggacatccctccctgcctatcagggacaggtcagtttctaacagagtttctaaccagagggatttctaagagaggagccctaggtggccaaggtccaggggggatgtgggtgaaggtcaggcacaccatgccctccagcccccacttccctgcctggcactgctgttgccacataccagcatctgcaagtggagtggagggtaaaggagggctctggggaagagttggagggtgtggccagaacaggaaacctggcagcagcggctttgacaaccagctggtaacctgtctactgccttctgctagggcacacctatgatcgctccattgtagtggacggagaagaggcatcactcatggtctacgacatttgggagcaggtagggtgcaagcagagacccagggcaggggagggaggagtgagttgggttagaggtctgggagtgccaggctcgtgtcgggggcatgaggactgttgggcagatgtgtgttgtgtgttctccaggacgggggccgctggttgcccggccactgcatggccatgggggatgcctatgtcattgtgtactcagtgacggacaagggcagcttggagaaggcctcagaactgcgggtccagctgcggcggcacgtgcaaacagatgatgtgcccatcatcctcgtgggcaacaagagcgacctggtgcgctctcgtgaggtctcggtggatggtgagtaggcggcaggttgcagggggaggagagcccatcggcctctgatccaggcagtcttggctcagcttgagtccctggggatcatcagaggctaaaaatgttcagaaagaaaactngggaaatgggagagagctggtgcctgctcacagggctccggaaggccccacagntggggaaagaaccaaatctgataggggagctgggcaccgcaggcctcctcctgccccctcttggtcctggcctggctggttgggggggtaaatgggtggaagagagtgtaggggaacaggccaggaggtcagagctgtgtgctaggtctgggccattcttagagtagacttggcactggggaagacccttcccacttggnctcagcatccttttctgtggacccagtactgagnccctcagaggaaccagcagtgattggtgacttgtctccgcaaccccagtccactggatcattcattcatcatgatatataacctcgaattaaaaaatactaagttgtgccgggcatgggccagggggtcgtaacgcctgtaatcccagcactttgggaggccgaggcgggtggatcacgaggtcaggagatcgagaccatcctggctagcatggtgaaacccccatctctactaaaaatacaaaaattagccgggcgtggtgcgggcgcctgtagtcccagcgactcgggaggctgaggcaggagaatggcgtgaacccgggaggcggagctttcagtgagcagagatttggccactgcactccagcctgggagacagcgagactctatctcagaaaaataaaataaaataaaataaaatactaagttgtccaacatagttctcattttcctgtgtttactactgtcgtactttgtttaaatatcaggcttcaaattatttcaataaatggatctccttttgagggccactgttttgggggctccttaaacgcaggactctgcctcagtacaggagctggggtctctgctgtttccggggaggaccttgcaaattctcgagtggcagcttccatgggtggccactgttggaggggactcctacttcacccaccctttgtttactggtgcctgcctttccccaccacaatgtccaggcgctgtttgaaggtgtcgtgcgccagatacgcctgcgcagggacagcaaagaagccaacgcacgacggcaagcaggcacccggaggcgagagagccttggcaaaaaggcgaagcgcttcttgggccgcatcgtagctcgtaacagccgcaagatggcctttcgcgccaaatccaagtcctgccacgacctctcggttctctaggtcccacccgctcccactatggtgggagacgaacggaagggttggtgggctggcccagccaactgccccgggtgcctcagagcaggctcagactctgggtccctcggagctgccagccgggcacccccaacctcatggtcatggacagatagacagtgctgccctgcgaagtggctctcaggggccagtgagggctgggcccacagagatgcatgcgcaggctcatatgcgtcccaagcagccgcagcgcagccgccgggcaggcctgcgtgccgggagaggactctgccttttttcacagcccgggtgtgcctgccctggagggaggctcttcagtgcggtagctacttgtttacatgcagatttttgtaataaaggctatttcctgata

SEQ ID NO: 1017 - DNA, 405 bp, Homo Sapiens
  misc_feature (17)..(17): n is a, c, g, or t
  misc_feature (21)..(22): n is a, c, g, or t
  misc_feature (353)..(353): n is a, c, g, or t
  misc_feature (368)..(368): n is a, c, g, or t
atgagtaataaatcaantatnnatatattctggcattcccttgatccccaaataaagaaaataagccaagttagatggacacacatagtaataaatttctgtaagtttaaaaagactagactaaaacatagactgctttatgcatcttttttcaaattagcattttcttctgtaggtcttcattctctgcatggctttgctcaggctgttccctctgccgggaatgcccttgctttcttttcacccgatggcaaactgctggctccaaccgcccaggaatcaggactaaagaccatctcctttatggaggctttccaggacctcctggagtaggttaatatggtattttcccntcctttgtggttccnggctatggatcattccataactctactacaggccctt

SEQ ID NO: 1018 - DNA, 138 bp, Homo Sapiens
  misc_feature (82)..(82): n is a, c, g, or t
ggccattaccgaagcggatgaaaacaaacactaacgatggcggcgccgggaagcgaccggctgctgggcttaaggcgggtgngaccgcttatcagtgagggaagcactgaagagcgccagtcgacgtgggtgcgacaa

SEQ ID NO: 1019 - DNA, 495 bp, Homo Sapiens
  misc_feature (261)..(261): n is a, c, g, or t
  misc_feature (274)..(274): n is a, c, g, or t
  misc_feature (346)..(346): n is a, c, g, or t
  misc_feature (361)..(361): n is a, c, g, or t
  misc_feature (399)..(399): n is a, c, g, or t
  misc_feature (409)..(409): n is a, c, g, or t
  misc_feature (415)..(415): n is a, c, g, or t
  misc_feature (430)..(430): n is a, c, g, or t
  misc_feature (436)..(436): n is a, c, g, or t
  misc_feature (453)..(453): n is a, c, g, or t
  misc_feature (461)..(461): n is a, c, g, or t
  misc_feature (474)..(474): n is a, c, g, or t
  misc_feature (487)..(487): n is a, c, g, or t
  misc_feature (494)..(494): n is a, c, g, or t
tttttttttttttataatatttatttattcattttaaaataacaaactcattacaaattaacataaataacattttaattgaaaaatgacttgcaaacgcaaaaaaaactagtgaaaagtggcattgtttcacatctttgcaaagctcttaaatatctagcttaatcaaaaattgttttagtctcttatctgcttctgccttcagtctactatgacatgttgttttggttgaggagtattattaaattctgcctcacaggnatatataactggnaaagggagttggggacctttccttaaaggggttgttgcaggtgtggaaatcctgaaacccgtatccccaggnccaccccgttccccnttaaaatccatgggggctatccttgggcctttttaaangtatggtttncccccnggccataccttttgngggggntatatacctggggtttngggggggnatacctgggttcncctggattccccnggggctnc

SEQ ID NO: 1020 - DNA, 634 bp, Homo Sapiens
ggcacgaggggccgccctccccagcagacagcaatggcagcacctcttcacaaatgtggcctcatggttggctaccagtgtggacaggtcttccgggcatgctgtgtcaagagccaggagaccggagatttggatgtcgggggcctccaagaaacggataagatcattgaggttgaggaggaacaagaggacccatatctgaatgaccgctgccgaggaggcgggccctgcaagcagcagtgccgagacacgggtgacgaggtggtctgctcctgcttcgtgggctaccagctgctgtctgatggtgtctcctgtgaagatgtcaatgaatgcatcacgggcagccacagctgccggcttggagaatcctgcatcaacacagtgggctctttccgctgccagcgggacagcagctgcgggactggctatgagctcacagaggacaatagctgcaaagatattgacgagtgtgagagtggtattcataactgcctccccgattttatctgtcagaatactctgggatccttccgctgccgacccaagctacagtgcaagagtggctttatacaagatgctctaggcaactgtattgatatcaatgagtgtttgagtatcagtgccccgtgcccta

SEQ ID NO: 1021 - DNA, 1145 bp, Homo Sapiens
gctggctatgctagtcgcttcatcgtgatcgctgatttcaggaaagattcgaagaatctcggggtacagtggcacaagggaatccccatcgaggtcatcccaatggcctatgtcccagtgagccgagctgtgagccagaagtttgggggcgtggttgaagttcgaatggctgtcaacaaggctggtcctgtggtgacagataatgggaattttatcttggactggaagtttgaccgggtacacaaatggagtgaagtgaatacagctatcaaaatgatcccaggcgtggtggacacaggcctattcatcaacatggctgagagagtctactttgggatgcaggatggctcagtgaacatgagggagaagcctttctgttgaccctgcaaggagcagagtgtgttcaccttgagtctccagcccacagccaaggtggacgtacctctccaggagcctttgccttaatgtatctctgcctggacaacttgtggtgggggggtggggggaatgagtgggagggggagttaaatccagtcttatgaagtattgttattaaatgtctttttaaaaagagaaatataaacatatatttttactattaaaatattcagttttttaaatgaagtagaacttgagttcatgttttatatgaaatatttaccaaaaaaaaaaatgaggtaaactgtatttaaaacctttgacttgagtctgctggtaaagcttgttacttgtctgctaccctctgatttgtttttagttagttttattgtgagcacacatagtacctagttacatcttaagatcaggtttataaaactgtggagtggagcggtatggtatggaatgacttggaatgtaagctgtcagggagaaaatgttgttacacttttgctaagatctgggggtttcttcatattcctgctgttggaagcagttgaccagaaatgcttgccagtactgccaaagcactgctgtgaaatgtgaagtactttgttttttttatttttaatgattttctttttgttattaatatttttctctgttcctttgttattacttgcatggtttggcgtcagaagtcctacctctttatattgtttgcaggtttaaataaaacagtgtggtgccaaaaaaaaaaggaattc

SEQ ID NO: 1022 - DNA, 409 bp, Homo Sapiens
  misc_feature (98)..(98): n is a, c, g, or t
  misc_feature (110)..(110): n is a, c, g, or t
  misc_feature (121)..(121): n is a, c, g, or t
  misc_feature (139)..(139): n is a, c, g, or t
  misc_feature (223)..(223): n is a, c, g, or t
ctgtcccgacccccggcctggcccactccgacccatacccggccgaaggttccgctggacacgcaggcggcctccggagcagcccaagcccatgaggncagcgcgcccgnccgccggtgcntgacgagacggagctccntggcccccagaggaggagcagaggatcaatgcggttcaagaatcgattccagcggttcatgaaccatcgagctccagccaatgncagctacaagccaacttgctatgaacatgctgctaactgttacacacacgcattcctcattgttccggccatccgtgggcagtgcctcctccatcggctgtctgatgactgctgggaaaagataacagcatggatttatggaatgggactctgtgccctcttcatcgtttctacagtatttcacaa

SEQ ID NO: 1023 - DNA, 343 bp, Homo Sapiens
  misc_feature (13)..(13): n is a, c, g, or t
  misc_feature (15)..(15): n is a, c, g, or t
  misc_feature (17)..(17): n is a, c, g, or t
  misc_feature (68)..(68): n is a, c, g, or t
  misc_feature (154)..(154): n is a, c, g, or t
  misc_feature (208)..(208): n is a, c, g, or t
  misc_feature (293)..(293): n is a, c, g, or t
  misc_feature (323)..(323): n is a, c, g, or t
  misc_feature (339)..(339): n is a, c, g, or t
agaagtacttttntntntgaatcgacttgtgcctcagtatactcattttttttttaaggaaactattncttgggaataattttcagtttacagaaaaattgcatagatagaaaagagaatattcatggtacccacacccagtttccctgcacantaataactgatgactaaactcccaggctttatccaaatttcacctattctttcngctccagaatccagctcaggctcccacattgcacttggtgggatttaacttttgagccaccactcccagccccgtttgttttctngactagtcctttgcagaaaaactgggaganttatgggactaggggnccag

SEQ ID NO: 1024 - DNA, 4915 bp, Homo Sapiens
gagaatcagagagagagagagagtctgtgtctctgggaaagaagaacatctctgcttcacagtgatttgcgctgggggagaggcatcaattggcttcggacccaagggggagacgagaccaggtcaccccggttaagaccaagtgagcgttgcccctccctctcccaactctctacccgggaatgtctcggcgaaagcagcggaaaccccaacagttaatctcggactgcgaaggtcccagcgcgtctgagaacggtgatgctagcgaggaggatcacccccaagtctgtgccaagtgctgcgcacaattcactgacccaactgaattcctcgcccaccagaacgcatgttctactgaccctcctgtaatggtgataattgggggccaggagaaccccaacaactcttcggcctcctctgaaccccggcctgagggtcacaataatcctcaggtcatggacacagagcatagcaaccccccagattctgggtcctccgtgcccacggatcccacctggggcccagagaggagaggagaggagtcttcagggcatttcctggtcgctgccacaggtacagcggctgggggaggcgggggcctgatcttggccagtcccaagctgggagcaaccccattacctccagaatcgacccctgcaccccctcctcctccaccaccccctccgcccccaggggtaggcagtggccacttgaatatccccctgatcttggaagagctacgggtgctgcagcagcggcagatccatcagatgcagatgactgagcaaatctgcaggcaggtgctgttgcttggctccttaggccagacggtgggtgcccctgccagtccctcagagctacctgggacagggactgcctcttccaccaagcccctactacccctcttcagccccatcaagcctgtccaaaccagcaagacactggcatcttcctcctcctcctcctcttcctcttcaggggcagaaacgcccaagcaggccttcttccacctttaccacccactggggtcacagcatcctttctctgctggaggggttgggcgaagccacaaacccacccctgccccttccccagccttgccaggcagcacagatcagctgattgcctcgcctcatctggcattcccaagcaccacgggactactggcagcacagtgtcttggggcagcccgaggccttgaggccactgcctccccagggctcctgaagccaaagaatggaagtggtgagctgagctacggagaagtgatgggtcccttggagaagcctggtggaaggcacaaatgccgcttctgtgccaaagtatttggcagtgacagtgccctgcagatccaccttcgttcccacacgggtgagaggccctataagtgcaatgtctgtggaaaccgttttaccacccgtggcaacctcaaagtgcatttccaccggcatcgtgagaagtacccacatgtgcagatgaacccacacccagtaccagagcacctagactatgtcattaccagcagtggcttgccttatggtatgtccgtgccaccagagaaggccgaggaggaggcagccactccaggtggaggggttgagcgcaagcctctggtggcctccacaacagcactcagtgccacagagagcctgactctgctctccaccagtgcaggcacagccacggctccaggactccctgctttcaataagtttgtgctcatgaaagcagtggaacccaagaataaagctgatgaaaacacccccccagggagtgagggctcagccatcagtggagtggcagaaagtagcacggcaactctcatgcaactaagtaagttgatgacttcactaccaagctgggcactgcttaccaaccacttcaagtccactggcagcttcccgcttcccctatgtgctagagccttgggggcctcaccctctgagacatcaaagctgcagcaactggtagaaaagattgaccggcaaggagctgtggcggtgacctcagctgcctcaggagcccccaccacctctgcccctgcaccttcatcctcagcctcttctggacctaaccagtgtgtcatctgtctccgagtgcttagctgtcctcgggccctacgccttcattatggccaacatggaggtgagaggcccttcaaatgcaaagtgtgtggcagagccttctccaccaggggtaatctgcgtgcacatttcgtgggccacaaggccagtccagctgcccgggcacagaattcctgccccatctgccagaagaagttcaccaatgctgtcactctgcagcagcatgtccggatgcacctggggggccagatccccaacggtggtactgcactccctgaaggtggaggagctgctcaggagaatggctccgagcaatctacagtctccggagcagggagtttcccccagcagcagtcccagcagccatcaccggaagaggagttgtctgaggaggaggaagaggaggatgaggaagaagaggaagatgtgactgatgaagattccctggcagggagaggctcagagagtggaggtgagaaggcaatatcagtgagaggtgattcagaagaggcatctggggcagaggaggaggtggggacagtggcggcagcagccacagctgggaaggagatggacagtaatgagaaaactactcaacagtcttctttgccaccaccaccaccacctgacagcctggatcagcctcagccaatggagcagggaagcagtggtgttttaggaggcaaggaagaggggggcaaaccggagagaagctcaagtccggcatcagcactcaccccagaaggggaagccaccagcgtgaccttggtagaggagctgagcctgcaggaggcaatgagaaaggagccaggagagagcagcagcagaaaggcctgcgaagtgtgtggccaggcctttccctcccaggcagctctggaggagcatcagaagacccaccccaaggaggggccgctcttcacttgtgttttctgcaggcagggctttcttgagcgggctaccctcaagaagcatatgctcctggcacaccaccaggtacagccctttgccccccatggccctcagaatattgctgctctttctctagtccctggctgttcgccttccatcacctccacagggctctccccctttccccgaaaagatgaccccacgatcccatgagcctgtttttctgtacctgctgctctttgtcccacagagcagaaacagcttcacaaaaggacctcccagagttatgagccctgattttgtctttttctctaagttcttaacatgttatgtccctagtggcttttctgtagtccctgagcttggaaattactgtgcttacaaggggatggccccctaaggaatttttcttccctcctcattctttgtacctgaggaacatagattctctgcagctttctcaaggggaaccctctccagcttccctggtgtgacccttcttccccctcctctctcctctccctttccctttggtaggtgcacctgagcacctacatttggcattgcagcctagccaaaaagggctggcagctgtctctggagggcccagtgccactcctctggggtgacctttctgctcagctggtgggtatgggtcccctatctttctagaaccagtatgtggcattcctgtcaaatgggctgcccatgaagccctggaattccagctccacctccactaccactccaagcctggccccaccagtgctgtttggcctaggaactgtggctgggaaggtgcctccaacaatgggatccagggaagccaaggagaagacagcccccctcctatttcagcctcctgcacccaaggcagtgcctgagaagcccatcatagacaagaagtagcaaactgtacattccttcttcctccccctgctccagaaggtgccggtactgaagatgctccagtaattggtgacccaaccctaggaagtagggagaaatgaaggaagggcataggaaattttcccaggtaaatcccctgatggtcacattaaggtaaaggttttggctggtcagtgtgccaagacctctccagcttctcattcatgatgacctctcaaagttgggaaacaagctgatttcttgccaagaggtctcccaggagatatttgggaaatgtgaagttcgtatctttaaggagcacttttggtcagcatggttgatgaactaatgatgagagagttaaggaatgttgctagaacatagggcttgctggtacctatgtgactaagaaagggacatgatgtaagggaaaaggcctcaaattcttgtgaatgtggacattctcgttaatattcttttgggctaatagtgacatagtgtgcagaggtgtaccagggatcatgggggatttcctagcactagtatgcttctagttttagataactccctcctttattccctggccccttgtattttccttatcttcctctttcaagacccctacccattttgcctatccgtaggctggggcttgtgtctttgtcattgtctggttcttaagagtcccagactttgggagaccagctccaggtggcgtcctccctgcctctccgtcttgtaatgagttgtagtatttactcttaacataggatcatttggaacaggagttctgaggaggagagagtgagggttttgctattgactgacttgaacgatggcttctcctcaagctgtaggctccagagcttcctaacctagtaaaatgtcaagaacagacgggagatattagtgtctttccctctatcattaaaggtgttttaaccaagaaaaaaagaaaaaaaaaaaaaaaaaaaaaaaaaaaaaaaaaaaaaaaaaaaaaaaaaaaaaaaaaaaaaaaaaaaaaaaaaaaaaaa

SEQ ID NO: 1025 - DNA, 395 bp, Homo Sapiens
  misc_feature (340)..(340): n is a, c, g, or t
  misc_feature (375)..(375): n is a, c, g, or t
aaataactcaggctggagtacagtgacgtgatctcagcaactaaaacataccataattcaaaattaggttacagaatctaagtttatttcataagtattttattttttgatttttgtgttgaaaaaaaaatctgttttttctttttccaaaaacattcattgtacatttaggtagacatttctaaaaagagagacatgtgtcttgggacccccacgtttcattatttagctgtgaatttcttttaatctacccacttcttttaaatcgcaaacaaattacttggcagctttctttagtctctggcagaaaattactcaagtaattgtctttatggatggnctttccttcctatttatataaccacggaaaaaggnggattttgcattcactggtc

SEQ ID NO: 1026 - DNA, 411 bp, Homo Sapiens
agcggccgctcgcgatctagacggcaggcgcgaatcccagcggccggcgggcggcggggatacttctacatagacataatcaagttttgactatttggaaaccaagcatcattaaaattctctcaaactcctaattgcgaagaatcgataacatttcaagaagtgataacatttctctgaacaagaaaagaagtgattgaccacgttttaaaagtactctggcactggtgctgtgttttcttcccctccctaaatttgaagaactatggagaaatggtacttgatgacagtagtggttttaataggactaacagtacgatggacagtgtctcttaattcttattcaggtgctggtaaacccggctatgtttggtgattatgaagctcagagacactggccagaaataactt

SEQ ID NO: 1027 - DNA, 2185 bp, Homo Sapiens
tttttaaattttgcatttgacttaaagtgccatgagaaaatttgcatactgcaaggtggtcctagccacctccttgatttgggtactcttggatatgttcctgctgctttacttcagtgaatgcaacaaatgtgatgaaaaaaaggagagaggacttcctgctggagatgttctagagccagtacaaaagcctcatgaaggtcctggagaaatggggaaaccagtcgtcattcctaaagaggatcaagaaaagatgaaagagatgtttaaaatcaatcagttcaatttaatggcaagtgagatgattgcactcaacagatctttaccagatgttaggttagaagggtgtaaaacaaaggtgtatccagataatcttcctacaacaagtgtggtgattgttttccacaatgaggcttggagcacacttctgcgaactgtccatagtgtcattaatcgctcaccaagacacatgatagaagaaattgttctagtagatgatgccagtgaaagagactttttgaaaaggcctttagagagttatgtgaaaaaactaaaagtaccagttcatgtaattcgaatggaacaacgttctggattgatcagagctagattaaaaggagctgctgtgtctaaaggccaagtgatcaccttcctggatgcccattgtgagtgtacagtgggatggctggagcctctcttggccaggatcaaacatgacaggagaacagtggtgtgtcccatcatcgatgtgatcagtgatgatacttttgagtacatggcaggctctgatatgacctatggtgggttcaactggaagctcaattttcgctggtatcctgttccccaaagagaaatggacagaaggaaaggtgatcggactcttcctgtcaggacacctaccatggcaggaggccttttttcaatagacagagattactttcaggaaattggaacatatgatgctggaatggatatttggggaggagaaaacctagaaatttcctttaggatttggcagtgtggaggaactttggaaattgttacatgctcacatgttggacatgtgtttcggaaagctacaccttacacgtttccaggaggcacagggcagattatcaataaaaataacagacgacttgcagaagtgtggatggatgaattcaagaatttcttctatataatttctccaggtgttacaaaggtagattatggagatatatcgtcaagagttggtctaagacacaaactacaatgcaaacctttttcctggtacctagagaatatatatcctgattctcaaattccacgtcactatttctcattgggagagatacgaaaagaggaaacgaatcagtgtctagataacatggctagaaaagagaatgaaaaagttggaatttttaattgccatggtatggggggtaatcaggttttctcttatactgccaacaaagaaattagaacagatgacctttgcttggatgtttccaaacttaatggcccagttacaatgctcaaatgccaccacctaaagggcaaccaactctgggagtatgacccagtgaaattaaccctgcagcatgtgaacagtaatcagtgcctggataaagccacagaagaggatagccaggtgcccagcattagagactgcaatggaagtcggtcccagcagtggcttcttcgaaacgtcaccctgccagaaatattctgagaccaaatttacaaaaaaacgaaaaaaataaggattgactgggctacctcagcatacatttctgccacattcttaagtagcaaaaaaggaaaagtgctttcctcctctgcaggatgtaaggtttatcagccattaaaacttagacttctctagcttttcactagctgtgaaccagccttcctgtccatggacgtgaaactgcatagtaatgagactgtgcacactgatgtttacaagattgaaagagtctttctccgaaaatcatggtaaagaatactgagacaatgaaaaaaaatcaacaaaatatgctttctggagaactgtaccttctatggtttgcttgcacatcagtagtttctgctgaacgtgctgtcataatgaagagatttccaagattttttttcctgattagaacgggtagccagtatattaaatattgatagaaaaataaaagaactggaaccagattcagaa

SEQ ID NO: 1028 - DNA, 399 bp, Homo Sapiens
ggtcctgctgctcacaggacagacggctcgctcccctcttccagcagctgctcgtacaggcactgatgatttcgctgggaagtgtggcgggcactttgcctaagcgtggatggctcctcggcaattccagcctaagtgaaggcgctcaggagcctcctgctggaacgcgacccatctctcccaggaccccggggatcttaaggtcattgagaaatactgttggatcagggttttgttcttccacactgtaggtgaccccttggaataacggcctctcctctcgtgcacatacctaccggtttccacaactggatttctacagatcattcagctggttataagggttttgtttaaactggtccgagtttactgatgtcattttgtttttggtttatgtag

SEQ ID NO: 1029 - DNA, 2650 bp, Homo Sapiens
agggacagcccagaggaggcgtggccacgctgccggcggaagtggagccctccgcgagcgcgcgaggccgccggggcaggcggggaaaccggacagtaggggcggggccgggccggcgatggggatgcgggagcactacgcggagctgcacccgtgcccgccggaattggggatgcagagcagcggcagcgggtatggcaggcagccggcgggccggcctccagcgcaggtgcccgagaggcaggggctggcctgggatgcgcgcgcacctgccctcgccccgccccgcccgcacgaggggtggtggccgaggccccgccccgcacgcctcgcctgaggcgggtccgctcagcccaggcgcccgcccccgcccccgccgattaaatgggccggcggggctcagcccccggaaacggtcgtaacttcggggctgcgagcgcggagggcgacgacgacgaagcgcagacagcgtcatggcagagcaggtggccctgagccggacccaggtgtgcgggatcctgcgggaagagcttttccagggcgatgccttccatcagtcggatacacacatattcatcatcatgggtgcatcgggtgacctggccaagaagaagatctaccccaccatctggtggctgttccgggatggccttctgcccgaaaacaccttcatcgtgggctatgcccgttcccgcctcacagtggctgacatccgcaaacagagtgagcccttcttcaaggccaccccagaggagaagctcaagctggaggacttctttgcccgcaactcctatgtggctggccagtacgatgatgcagcctcctaccagcgcctcaacagccacatggatgccctccacctggggtcacaggccaaccgcctcttctacctggccttgcccccgaccgtctacgaggccgtcaccaagaacattcacgagtcctgcatgagccagataggctggaaccgcatcatcgtggagaagcccttcgggagggacctgcagagctctgaccggctgtccaaccacatctcctccctgttccgtgaggaccagatctaccgcatcgaccactacctgggcaaggagatggtgcagaacctcatggtgctgagatttgccaacaggatcttcggccccatctggaaccgggacaacatcgcctgcgttatcctcaccttcaaggagccctttggcactgagggtcgcgggggctatttcgatgaatttgggatcatccgggacgtgatgcagaaccacctactgcagatgctgtgtctggtggccatggagaagcccgcctccaccaactcagatgacgtccgtgatgagaaggtcaaggtgttgaaatgcatctcagaggtgcaggccaacaatgtggtcctgggccagtacgtggggaaccccgatggagagggcgaggccaccaaagggtacctggacgaccccacggtgccccgcgggtccaccaccgccacttttgcagccgtcgtcctctatgtggagaatgagaggtgggatggggtgcccttcatcctgcgctgcggcaaggccctgaacgagcgcaaggccgaggtgaggctgcagttccatgatgtggccggcgacatcttccaccagcagtgcaagcgcaacgagctggtgatccgcgtgcagcccaacgaggccgtgtacaccaagatgatgaccaagaagccgggcatgttcttcaaccccgaggagtcggagctggacctgacctacggcaacagatacaagaacgtgaagctccctgacgcctacgagcgcctcatcctggacgtcttctgcgggagccagatgcacttcgtgcgcagcgacgagctccgtgaggcctggcgtattttcaccccactgctgcaccagattgagctggagaagcccaagcccatcccctatatttatggcagccgaggccccacggaggcagacgagctgatgaagagagtgggtttccagtatgagggcacctacaagtgggtgaacccccacaagctctgagccctgggcacccacctccacccccgccacggccaccctccttcccgccgcccgaccccgagtcgggaggactccgggaccattgacctcagctgcacattcctggccccgggctctggccaccctggcccgcccctcgctgctgctactacccgagcccagctacattcctcagctgccaagcactcgagaccatcctggcccctccagaccctgcctgagcccaggagctgagtcacctcctccactcactccagcccaacagaaggaaggaggagggcgcccattcgtctgtcccagagcttattggccactgggtctcactcctgagtggggccagggtgggagggagggacaagggggaggaaaggggcgagcacccacgtgagagaatctgcctgtggccttgcccgccagcctcagtgccacttgacattccttgtcaccagcaacatctcgagccccctggatgtcccctgtcccaccaactctgcactccatggccaccccgtgccacccgtaggcagcctctctgctataagaaaagcagacgcagcagctgggacccctcccaacctcaatgccctgccattaaatccgcaaacagccaaaaaaaaaaaaaaaaaaaa

SEQ ID NO: 1030 - DNA, 1782 bp, Homo Sapiens
cctgaaaacatggtaaagacatacagtgcttttatgcacattgttaagctaaatcaaggtcatttataatcattttccttttttatttaagattttaagtaaacaaattttagaattttcagcatttcaaaaatgattttatttttcaagtcttaaattcaatattttacacctatgttttgaggctaaaaatatgaaattatataatgtatgatacagggttatcaaatatctaataatttttgaaattagctcttgtttttggtttttttgttgttgtttttacagatttcaggttacaaactgcaaagtttatgcataattaagtatggtatggttgccagaaaagcctaaaattactacttagaaaatttaagactgtttacccccattgtcttgtacttgcgagctaacttgtactattcttgtgaaagcactgtcatcttttagtagcaaattttgataatgtttctcgtggaaaaaaaaatcagtatctatctttagaacaatgtaattataatgtgggaagtgtgcatgaatgagagagagtgtgtgtgtatctgtgtgtgtgtgcgcgtgtgtgtgtgtcttttaatagtttatgccagcaatctttgcttgaatgtttaacgatgccttcagtgtgatgctggccaatagatgattgcagtttaaaatgtcattattgtgcaggcttggataactaacattccatgatgtagcttgtttctgatgagatgattgtaggtacatttttctcattatccaatcatctgtgggatacttagttttctaatgtgccattatctatttttattctgcagttatgttcaaaatacagtacatattttaaaatagaataaattgttaaacataaaattttaaaagtagtagatgtgcgtaagaaaactttgtaaaatagttatgagtcctacccagtagcaacttctggcattcaagcaggattccactatgtaaatatctgtaatgcatttataataagttgtgtagtttgtcctgcatccatactacactatttgctaaagtctcagtgccatctcctaatgagactgacattttaaaagtctgtatggaatatccttgataattcaaggaaatatccctcctgcctaagttccaaactgggaaacattcaaattatataaatgacatttcaggactttaagtatgaagataatgggaattttattgttttgctttttaaaatgagagcatttttatttgataattttttttaaatttttaatttttaactaatttcattattttaaagtaatcagtttttcaaatcatgattttgatatcattattctaaggagttatctcaaaggcacaaaatatgaattctgcaagaaggctattttttattgtagtttgaatgggttaggaaaagcctcaatttttcactcttaagtccttcagtacatttttctttcatcttattacttatgcaagttaaggttctttggtaacagaattcttgcaactgtaaaataaaactacatagatgtaagaagtcatgtaaacggttaacaagcttaccaaggttagcaaaactttcattgtaaatcagtctgtactgagcaaataaaaatcattattagttgtataaacacaaattccattttgactttcaggatgtcatactacttctgtacctagcattttcagtccttatatttgcaatgttacacaaactgtactattttcttttatgtgcagtttgcatgagtaaaccatcagagaataaattctatcttt

SEQ ID NO: 1031 - DNA, 296 bp, Homo Sapiens
  misc_feature (20)..(20): n is a, c, g, or t
  misc_feature (44)..(44): n is a, c, g, or t
  misc_feature (120)..(120): n is a, c, g, or t
  misc_feature (194)..(195): n is a, c, g, or t
  misc_feature (272)..(272): n is a, c, g, or t
  misc_feature (290)..(290): n is a, c, g, or t
accaatctgaagtgggagcnggcccctgagcagtgttctctgtnctgagcggcgggactgagctgttgagttagagccaacatgagtgagctacaaggtgctggggcaaccaatggaaangacaagacatctggtgaaaatgatggacagaagaaagttcaagaagagtttgacattgacatggatgcaccagnngacagaacgtgcagcggtggccattcagtctcagttcagaaaattccagaggaagaaggctgggtctcagtcctagntgggagaaccccctcctngtccac

SEQ ID NO: 1032 - DNA, 515 bp, Homo Sapiens
  misc_feature (427)..(427): n is a, c, g, or t
  misc_feature (435)..(435): n is a, c, g, or t
  misc_feature (496)..(496): n is a, c, g, or t
  misc_feature (504)..(504): n is a, c, g, or t
ttttttttttttatcttttgggtgtggaaacatgtgagtgtattatttatttttgaataaataatacaataaaatataaaacatacacttattgtggccctctgcacaagcaatctggttgtgcagagtcttggtgtcccctgctagtcttagtacctgtatagagctcttcagactgggtgtcgtgttgcagaggctagcaccattcctgatgtcaccctgggtgagacgtggtcctcagaatccagacttccttttttgtctttttccttcttccacatgttctaagaaaacatagatttctggccaggcatggtggctcacgcctgtaatcccagtactttgggaggctgagacaggtggatcacgaggtcaggagttcgagaccagcctggccaacatggtgaaaccctgtctccagtaaaantacaaaanatagctgggtgtggtggtgcatgcctataatcccagctactcaggaggctgaggcaggagnattgcttnaactcgggaag

SEQ ID NO: 1033 - DNA, 322 bp, Homo Sapiens
tttttttttttttttttgggtctttggtagttttgcttgaaatatacttgcaatggcattaagtaaaggaaaataaagaacaatatcaaaagcttgtgctgaaagaagaatttcatgaataaaatgacgagaaccatccattaggccttcagataacttatgaaaacttcttcgctcatttcttgatgttaacttgtggcggacattttttgttacagcttttgtgtatgtcagagagaggaatccatgctgctgatgagtgccatctacaagttttgtagttgtcacagatttttctttgcattgtacaaatactccttca

SEQ ID NO: 1034 - DNA, 545 bp, Homo Sapiens
ggcacgaggcccgcgcgcgggggcgcccaggccactgggctccgcggagccagcgagaggtctgcgcggagtctgagcggcgctcgtcccgtcccaaggccgacgccagcacgccgtcatggcccccgcagcggcgacggggggcagcaccctgcccagtggcttctcggtcttcaccaccttgcccgacttgctcttcatctttgagtttatcttcgggggcctggtgtggatcctggtggcctcctccctggtgccctggcccctggtccagggctgggtgatgttcgtgtctgtgttctgcttcgtggccaccaccaccttgatcatcctgtacataattggagcccacggtggagagacttcctgggtcaccttggacgcaggctaccactgcaccgctgccctcttttacctcagcgcctcagtcctggaggccctggccaccatcacgatgcaagacggcttcacctacaggcactaccatgaaaacattgctgccgtggtgttctcctacatagccactctgctctacgtggtccatg

SEQ ID NO: 1035 - DNA, 227 bp, Homo Sapiens
  misc_feature (30)..(30): n is a, c, g, or t
ttgatttcctccgttccgtctatgccgttnttggcttctccttccgcctggcactgtccacccggccatctggcttcctgggggacccttgcctttgggaccaggccgaacaggtccttaaacaggccctgaaggaatttggagaaccctgggacctcaactctggagatggtgccttctatggacctaagatttgacgtgcacctccacggatgccctggggccgg

SEQ ID NO: 1036 - DNA, 270 bp, Homo Sapiens
ttgagtcatatgaatatagtttggctccaccgcgaggggtggagtgcagacggctagaggaggagaatgccatgctcaggaagcgggtagaggagttaaagaagcaggtcagcaacctgctggccaccaatgaggtactactggaacaaaatgctcagttccgcaatcaggccaaggtcataaccctgagctccactgcaccagcgactgagcagactctggcccccactgtgggcagcatccacctcgagctggtgtgccaaccccgag

SEQ ID NO: 1037 - DNA, 673 bp, Homo Sapiens
  misc_feature (447)..(447): n is a, c, g, or t
  misc_feature (534)..(534): n is a, c, g, or t
  misc_feature (547)..(547): n is a, c, g, or t
  misc_feature (587)..(587): n is a, c, g, or t
  misc_feature (612)..(612): n is a, c, g, or t
  misc_feature (617)..(617): n is a, c, g, or t
  misc_feature (644)..(644): n is a, c, g, or t
  misc_feature (649)..(649): n is a, c, g, or t
  misc_feature (666)..(666): n is a, c, g, or t
ctttattaggaatataaaacctaatctatgtacaggacacgtcggtgtcagggtgaggggtggccacaaggcgggccatggctgggaccggccgctctcctcggtgtggtacctggagcggagggtcaggcacaggtaggaacggggctcacaggccgagcagagccccctctggcccctactcaattccttcctgcttgtcttttatggccacccgaaagcgctcctccagcagggacagctcactgatgaggtcggtgatggcgttggtaaaggcttcctgggggctgtagtccggcgtggtctgcactcggatgatgatcttgtgctccaaggggtgggggactttgtagccagcaaatagcacttgcgggtcttttaggagttgtgatttaatgatgtttcccagtgtgtggtcttctttgttgatggtgaataaacaggcantgggtaccttggtgtcctgttaatggtgatcttcttctcgccctcgaagagcaagaacgactcgaaggctggaagggcttcatgctnccgccgccgtcgnttcagacccaaggtcagccgccgcgcaaaaaagcctcttncgaattctgcacccggggatcatantttanacggcgcaccggtgaactcactttgtncctangaagtaattcaacttgngaacagg

SEQ ID NO: 1038 - DNA, 405 bp, Homo Sapiens
  misc_feature (367)..(367): n is a, c, g, or t
  misc_feature (372)..(372): n is a, c, g, or t
  misc_feature (386)..(386): n is a, c, g, or t
gtgggctcatgatggggcagcaccttacatgaggcagaactgccatagaaacagacatgatgtgtttccaacacaccctccaggttgcccttgtcagcatgcaagcactcttgttcagggcgcctaataataatatttatataacccttcacaatttaaacaaaactttcccttgtataacttcactttgtcctaacaaccacataccataagaattatctccattttgtacaggaggaaattgacaatcagagagtataaatgatgtgcccaagatcacacagcaaggattggcagtatttatttaaacccatgtcacctggctccaaatccctcactcctttcctattataccatacaagactcnccggnggtcttagcaaagncctttcctcttggtcttca

SEQ ID NO: 1039 - DNA, 4517 bp, Homo Sapiens
ctgattccataccagaggggctcaggatgctgttgctgggagctgttctactgctattagctctgcccgggcatgaccaggaaaccacgactcaagggcccggagtcctgcttcccctgcccaagggggcctgcacaggttggatggcgggcatcccagggcatccgggccataatggggccccaggccgtgatggcagagatggcacccctggtgagaagggtgagaaaggagatccaggtcttattggtcctaagggagacatcggtgaaaccggagtacccggggctgaaggtccccgaggctttccgggaatccaaggcaggaaaggagaacctggagaaggtgcctatgtataccgctcagcattcagtgtgggattggagacttacgttactatccccaacatgcccattcgctttaccaagatcttctacaatcagcaaaaccactatgatggctccactggtaaattccactgcaacattcctgggctgtactactttgcctaccacatcacagtctatatgaaggatgtgaaggtcagcctcttcaagaaggacaaggctatgctcttcacctatgatcagtaccaggaaaataatgtggaccaggcctccggctctgtgctcctgcatctggaggtgggcgaccaagtctggctccaggtgtatggggaaggagagcgtaatggactctatgctgataatgacaatgactccaccttcacaggctttcttctctaccatgacaccaactgatcaccactaactcagagcctcctccaggccaaacagccccaaagtcaattaaaggctttcagtacggttaggaagttgattattatttagttggaggcctttagatattattcattcatttactcattcatttattcattcattcatcaagtaactttaaaaaaatcatatgctatgttcccagtcctggggagcttcacaaacatgaccagataactgactagaaagaagtagttgacagtgctattttgtgcccactgtctctcctgatgctcatatcaatcctataaggcacagggaacaagcattctcctgtttttacagattgtatcctgaggctgagagagttaagtgaatgtctaaggtcacacagtattaagtgacagtgctagaaatcaaacccagagctgtggactttgttcactagactgtgcccttttatagaggtacatgttctctttggagtgttggtaggtgtctgtttcccacctcacctgagagccattgaatttgccttcctcatgaattaaaacctcccccaagcagagcttcctcagagaaagtggttctatgatgaagtcctgtcttggaaggactactactcaatggcccctgcactactctacttcctcttacctatgtcccttctcatgcctttccctccaacggggaaagccaactccatctctaagtgctgaactcatccctgttcctcaaggccacctggccaggagcttctctgatgtgatatccacttttttttttttttgagatggagtctcactctgtcacccaggctggagtacagtgacacgacctcggctcactgcagcctccttctcctgggtccaagcaattattgtgcctcagcctcccgagtagctgagacttcaggtgcattccaccacacatggctaatttttgtatttttagtagaaatggggtttcgtcatgttggccaggctggtctcgaactcctggcctaggtgatccacccgcctcgacctcccaaagtgctgggattacaggcatgagccaccatgcccagtcgatatctcactttttattttgccatggatgagagtcctgggtgtgaggaacacctcccaccaggctagaggcaactgcccaggaaggactgtgcttccgtcacctctaaatcccttgcagatccttgataaatgcctcatgaagaccaatctcttgaatcccatatctacccagaattaactccattccagtctctgcatgtaatcagttttatccacagaaacattttcattttaggaaatccctggtttaagtatcaatccttgttcagctggacaatatgaatcttttccactgaagttagggatgactgtgattttcagaacacgtccagaatttttcatcaagaaggtagcttgagcctgaaatgcaaaacccatggaggaattctgaagccattgtctccttgagtaccaacagggtcagggaagactgggcctcctgaatttattattgttctttaagaattacaggttgaggtagttgatggtggtaaacattctctcaggagacaataactccagtgatgtttttcaaagattttagcaaaaacagagtaaatagcattctctatcaatatataaatttaaaaaactatctttttgcttacagttttaaattctgaacaatttctcttatatgtgtattgctaatcattaaggtattattttttccacatataaagctttgtctttttgttgttgttgttgtttttaagatggagtttccctctgttgccaggctagagtgcagtggcatgatctcggcttactgcaacctttgcctcccaggtttaagcgattcttctgcctcagcctcccgagtagctgggaccacaggtgcctaccaccatgccaggctaatttttgtatttttagtaaagacagggtttcaccatattggccaggctggtctcgaactcctgaccttgtgatctgcccgcctccattgtgttgttatttgtgagaaagatagatatgaggtttagagagggatgaagaggtgagagtaagccttgtgttagtcagaactctgtgttgtgaatgtcattcacaacagaaaacccaaaatattatgcaaactactgtaagcaagaaaaataaaggaaaaatggaaacatttattcctttgcataatagaaattaccagagttgttctgtctttagataaggtttgaaccaaagctcaaaacaatcaagacccttttctgtatgtccttctgttctgccttccgcagtgtaggctttaccctcaggtgctacacagtatagttctagggtttccctcccgatatcaaaaagactgtggcctgcccagctctcgtatccccaagccacaccatctggctaaatggacatcatgttttctggtgatgcccaaagaggagagaggaagctctctttcccagatgccccagcaagtgtaaccttgcatctcattgctctggctgagttgtgtgcctgtttctgaccaatcactgagtcaggaggatgaaatattcatattgacttaattgcagcttaagttaggggtatgtagaggtattttccctaaagcaaaattgggacactgttatcagaaataggagagtggatgatagatgcaaaataatacctgtccacaacaaactcttaatgctgtgtttgagctttcatgagtttcccagagagacatagctggaaaattcctattgattttctctaaaatttcaacaagtagctaaagtctggctatgctcacagtctcacatctggtgggggtgggctccttacagaacacgctttcacagttaccctaaactctctggggcagggttattcctttgtggaaccagaggcacagagacagtcaactgaggcccaacagaggcctgagagaaactgaggtcaagatttcaggattaatggtcctgtgatgctttgaagtacaattgtggatttgtccaattctctttagttctgtcagcttttgcttcatatattttagcgctctattattagatatatacatgtttagtattatgtcttattggtgcatttactctcttatcattatgtaatgtccttctttatctgtgataattttctgtgttctgaagtctactttgtctaaaaataacatacgcactcaacttccttttctttcttccttcctttctttcttccttcctttctttctctctctctctttccttccttccttcctccttttctctctctctctctctctctctcttttcttgacagactctcgttctgtggccctggctggagttcagtggtgtgatcttggctcactgctacctctaccatgagcaattctcctgcctcagcctcccaagtagctggaactacaggctcatgccactgcgcccagctaatttttgtatttttcgtagagacggggtttcaccacattcgtcaggttggtttcaaactcctgactttgtgatccacccgcctcggcctcccaaagtgctgggattacaggcatgagccatcacacctggtcaactttcttttgattagtgtttttgtggtatatctttttccatcatgttactttaaatatatctatattattgtatttaaaatgtgtttcttacagactgcatgtagttgggtataatttttatccagtctaaaaatatctgtcttttaattggtgtttagacaatttatatttaataaaatggtggaatttaaa

SEQ ID NO: 1040 - DNA, 874 bp, Homo Sapiens
  misc_feature (479)..(479): n is a, c, g, or t
cagcgggggcaaacttaaggctaaggtacgaggccgggtggttaacgggcttccacagcgcgggggaacgggaggctgcaggatggtcaagctgacggcggagctgatcgagcaggcggcgcagtacaccaacgcggtgcgcgacgggagctggacctccgggggtataaaattcccgtcattgaaaatctaggtgctacgttagaccagtttgatgctattgatttttcttgacaatgagatcaggaaactggatggttttcctttgttgagaagactgaaaacattgttagtgaacaacaacagaatatgccgtataggtgagggacttgatcaggctctgccctgtctgacagaactcattctcaccaataatagtctcgtggaactgggtgatctggaccctctggcatctctcaaatcgctgacttacctaagtatcctaagaaatccggtaaccaataagaagcattacagantgtatgtgatttataaagttccgcaagtcagagtactggatttccagaaagtgaaactaaaagagcgtcaggaagcagagaaaatgttcaagggcaaacggggtgcacagcttgcaaaggatatggccaggagaagcaaaacttttaatccaggtgctggttggccaactgacataaagaaaggtgggccatctccaggggaatgtagaagcaatcaagaatgccatagcaaatgcttcaacctctggctgaagtggagaggctgaaggggttgctgcagtctggtcagatccctgggcagagaacgcagatcagggccactgatgattggtgaagagaagattggcaaagccccaggccccaacgggtctgagcagggaggcggatgttaatac

SEQ ID NO: 1041 - DNA, 3414 bp, Homo Sapiens
cgcggggcggacgccgcagggcgtgtcacgaggtgagcggggcgggccgagcgccggcgcggggcgcggcgaggctcccgcaccccccgccgcagtcgcgggcctctcccggagaagatggcggatcgcgcggagatgttttctctctccaccttccactcgctgtcgccgccgggctgcaggcctccccaggacataagcctggaagaatttgacgacgaagatctgtctgagatcactgatgactgtggcctgggcctcagctacgactcagaccactgtgagaaggacagcctctccctggggcgctcggagcagccgcaccccatctgctccttccaggatgacttccaggagtttgagatgatcgatgacaatgaagaggaggacgatgaggacgaggaagaggaggaggaggaggaggagggagatggggaaggccaggagggaggagaccctggctcagaggcacctgcccccgggccccttatcccctccccttccgtggaggagccccacaagcaccggcccaccaccctccgtctgaccacactgggggcccaggactccctaaacaacaacggaggctttgacctggtgcgtccggcctcctggcaggagacagcgctatgctcacccgccccggaggccctcagagagctcccgggccccctccctgccacggacaccgggcccggcggggcgcagtcgccagtgcgcccgggttgcgactgcgaagggaaccggcctgcggaaccccctgcgccaggggggacttcgccctcctcagatcccggcatcgaggctgacctgagaagccgctcgagcggcggccgcgggggacgtcgcagcagccaggagctgtcctcgcccggctccgactcggaggacgcgggcggcgcgcgcctggggcgcatgatctcgtccatctcggagacggagctggagctgagcagcgatggcggaagcagcagcagcggccgctcctcgcacctcaccaactccatcgaggaggcctcgtcgcccgcctcggagccggagcccccgcgcgaacccccgcgccgccccgccttcctgcccgtgggccccgacgacaccaacagcgagtacgagtcggggtcggagtcggagccggacctcagcgaggacgcggactcgccctggctgctcagcaacctggtgagccgcatgatctccgagggctcctcgcccatccgctgccccggccagtgcctgtctcctgcgccgcgcccgcccggggagcccgtgtcgccggccggcggggccgcccaggactcccaggaccccgaggcggccgcggggcccggcggcgtggagctggtggacatggagacgctgtgcgcgccgccgccgcccgcgcccgccgcgcctcgacccggccccgcgcagcccgggccctgcctattcctcagcaaccccacgcgtgacaccatcacgccgctgtgggccgcgcccggccgcgccgcccgcccgggacgagcctgctccgccgcctgctccgaggaggaggacgaagaggacgacgaggaagaggaggatgccgaggacagtgcggggtcccccgggggcaggggcacgggcccctcggcgccgcgggacgcgtcgctggtgtacgacgcggtcaagtacacgctggtggtggatgagcacacgcagctggagctggtgagcctgcggcgctgtgctgggctgggccacgacagcgaagaggacagcggcggggaggccagcgaggaggaggcgggcgcggcgctgctaggcggcggtcaggtctcgggggacacctcgccggacagccctgacctcactttctccaagaagttcctcaatgtcttcgtcaacagcacatctcggtcctccagcaccgagtcctttggccttttctcctgtctggtcaacggcgaggagcgagagcagactcaccgggctgtgttcaggttcatcccgcggcatccagacgagctggagctggatgtggatgaccctgtgttggtggaggccgaggaggacgacttctggttccgtggcttcaacatgcgcacgggggagcgcggtgtgtttcctgccttctacgcccatgcggtgcccggccctgccaaggacctgctggggagtaagcggagcccctgctgggtggagcgctttgacgtgcagttcctgggctccgtggaggtgccctgccaccagggcaacggcatcctgtgtgcagccatgcagaagattgccactgcccggaaactgaccgtccacctgcgccctcctgcctcctgtgacctcgagatctctcttcggggggtcaagctgagtctgagcggaggagggcccgagttccagcgctgcagccatttcttccagatgaagaacatctccttctgcggctgccatccccgcaacagctgctatttcggcttcatcaccaaacaccccctgctgagccgcttcgcctgccacgtctttgtctcccaggagtccatgaggccggtggcgcagagtgtgggccgcgccttcctggagtactaccaagagcacctggcgtacgcctgccccacggaggacatctacctggagtagcctgcccaccgctctgtctcctggccgtctgctccaggcgcagctggggctgaggatgtctcaagaggccaccatggctttggcaaggactggattggggggacatgggaccttacgcttgtgggggtctgcgggctgggaactctcgtcctcggtccccagggcgcagctgttggggctgcgggggagtggagcccccgtgcccctgcttttcctcagatccgttctttctctgtgttgtcctcctccttcccttcccagtctcccttttctctctcctggtgtctctgcccctctctgtgcctgcaaaccttatcctctattcttcactttggggtcagaacttcgggggtgtggaggaggtgcggctctagggacaggtaatgtcggcttccaagtgatgccctcctgccactcccctgcgatttataagggaattttaatttttatagtgaatctcaagggatcatcccatccttgaccacagggacaagaggggccccctcgccccagccccaccccacatggagctcagggggaagcagggaggggttcccaaaagagccctgcggaggctaggagtggttcttgatgctcacctgaagcccctagacgctgctaggagggggggccctcctgggcccccaatacccctccgcttgccgctgctagcgcacccctgcagtccagcgtgcatccaccccacgcacgccccgtgctgtgttcctgggccctgcccatggcctcaataaactctctgcttggtgtgaaaaaaaaaaaaaaaaaaaaaaaaaaaaaaaaaaaaaaaaaaaaaaaaaaaaa

SEQ ID NO: 1042 - DNA, 74822 bp, Homo Sapiens
gatccctttaccattatgtaatgcccttcgttgtcttttttgatctttgctggtttaaagtctgttttgtcagaaactaggattgcaacccctgctctttttttgctttccatttgcttggtaaattttcctccatccttttattgtgaacttatgtgtgtctttgcatctgagatgggtctcctgaatacagcacaccagcgggtcttgactctttatccagtttgccagtctgtgtttttaattgaggcatttagtccatttacatttaaggttaattttattatgtgtgaatttgatcctgtcatcatgatgctatctggttattttgcacagtagttgatgcagtttcttcatagtgtctttggtctttacagtttggtgtatttttacagtggctggcaccagtttttttttttgtttgttttgttttttttttccatatttagtgcttctttcaggagctgttgccaggcaggcctggtggtgatgaaatccctcaatatttgcttgtctgagaaggattttatttctccttcacttatgaagctttgtttagctggatatgaaagtctgggttgaagattcttgtctttaagaatgttgaatatcagacccaagtctcttctggcatgtagggtttctgctgagggatccattgttagtctgatgggcttcactttatagatgacctggcctttctctctggatgccttgatattttttccttcatttcgaccttggagaatctgatgattatgtttcttgaggttgatcttctcatggagtatcttagtggtgtcctctgttatttcctgaatttgaatgttgacctgtcttgctatgttggagaagttttcctgcataatatcctgaagtgtgtttttcagcttggttccattctccccgtctctttcaggtactcaaatcaatcataggtttggtcgttttacatagtcccatgtttctgagaagttttgttttttctttttcaatcttttttctctaatcttgtctgcctgccttatctcagcaagatggtcttcaaactctgatattctttcttctgcttgattgatttggctattgatacttgtgtatgcttcacaaagttcagctccatctggtcacttatgtccctctctaaactggttattctacttagcagctcctctaaccttttatcaaggttcttagcttctttgcattgggttagaacatgctcctttagttcagcagaatttgttgttacccaccttctgaaacctgcttctgtcaatccttccatctcatcctccatccagttctgcacccttgctggagaactgttgttaacatttggagaagatggactctggccttttgagttttcagcattttttcattgattctttctcatcttcatgagtttgtccagttttgatctttgaggctgctgaccattggatgaggttttgtgaagacttttttgtttttctttcaatgctcgggttcctcttctgcagggctgctgtggtttgctgggggttcacttcaggccctattcacgtggtttgctcctgcgcccggagctgtcactcaaggaggctggagaacagcaaagatggatgcctgctccttccttttgcatctctgacctcgaggggtaccaacctgataccagtagaaacgctcctgtatagggtgtctgacaacgcctgttggagggtctcacccagttgggtggtatagggagtaggacccatttaaggaagcactttggctattccttggtggggtggatgtgccgtgctgggggaatcccacttgtctgggctgcccagattcctcagaactaacaggaggaaaggctatgtctgctggtctgtagagactatggccacccctccccctatgggttcaagcccagggagatcagagcccctggctggagttgttggagttcctgcagagaggccccacccagtgagggatgggtcagagtcagcacactctggctgcagtctgccacagccagtgtgttgggctttggggattagtcttgggccaagccctctagccaccctggctccagcaggggaaaagcgcagcctggagctatagagatggctgttgcccttccttttccttgggagcttagtgtgttaggcagctagcagtcccagtgttggctgccacctctcccctaagagttcagacagcttagacaacaggcagctgcccctccccctgggaactctgtaggcttaagcagattctagctgagtggctgttgagaatctacatggctccctggttagtaccctaggccccagtggtgtgggctcacaagtggggacttcctatccgatctatggattgcacagttccatggaaaaagcacagtttcccaggctgggtagcatgctcactcactgtctcctttggctgggggttgggggctcccatgccccatgtggctctcaggtgagccattgtaccatattgttcttcctttctctctgtgggtcatgccagctgcctagtcagtcctgatgatggaacttggatacctggattgctggtgctagattcacacactgttttggttattttcgatgggagcctccaatcaccactgcttctagttggtcatcttcgccccacatccccggaagattctctttgaatagtgattcagattaatagttcaagacacatttatggtctcataggaaagtggagaattctgtagacatttaatgtatgtgatgcttaaataatagcagtgacaatgcattcagtaacttaataaaaattaaaaaaagtaaactatagggtattatgtaagagtacagagatatgaaggaagccagaagagtctaataaatgtttgtcatcaaaataaattttattaaaaactctaatagccaaaatgcaatttttatgaggggatagagccatttacaaacagggattcagtgtgttaaatataacactgaaggaatgaggtaatattaagcttggctaagactgttttttttttccactcttgagcagtttaaccattgtgcttaagttgttcagttaaataagtcagatatattgtttgtttcttcattgccctgattggttgcctgatgaaacagttcagtcacaatggctgagttatggctgaattgaaggtgcccataaatacagactagagaggattatgtacttttcaaattggaagacacattatagattgcctagtccaatacatgtaaccaaatctgcctaacagagctagtctataaaatctcattttggcgggaacttggaaggacgaaggatacttttttggaaaatctgacatttgcctcttgcatggtactgaaaagagcttggattgaggagtcagaagacttgagtttaagtcttagttctatttcatatagcaatgtaaacttgggcaggtcacaaggtttggatgcctaccccctcaatggtaagatgggggcagtagtaccaccacacaggcctgtagaagaactgtacagttgttcattgtgtttgtgtttattagtaataatcatgtgtagaacacatttgactggaggcagtttgtatttataggctatctcttattgctcatgggtgtccctttattttcactaaataagttgtgaaatgcctaagtgttagaaatctgttattttattattccctattgcaacaaatatggtgctgtccccacaagatgattttacttcgtactgttgaccaattgactgaatctttgcctaatcataggagacatcgagtggtggctaccaatgagagagaacatgtaatggaatgtcattagctgctgtgtattctaccagtaaatgcactcatgttaatgttatgtatcattagttttgaaaatgtgtactagaagctttttgctttatgaaattagctgaatttatgaagataatttgcatttttattttaaacataccttttatgataagattttgatttgaaccaaagtatattcacaaaatattgttctcagttgaagaactttaatgagaaatgtacgtcctgtatcattctgtcatacatttagcttattgtctgctggaagacctgatctttgtccaaaagtttgctttcctttgcaacacattgtgctatttttcatgccaactcattattctgcctatcattagatactattaattcaatacccataaatgagcacctactatgggtcagaaactgtgctgtctaccaaggatttagagagaaatataatacaatccttgtcctcaaggaatttactgtctggccatgggaacataattttcataaagtcaccataaagcattatggcaaaggcagtgatggtgttctgtacacagtattttaagattcctgtatttcctccctgtctcctaaccagccagagagggatcaaggaaggcagggagtgaggagatgagagacagaggacactactccatggaggacattaatgcctttttaagaagttgagtttaaacccatctactatgaggaacatggcaagtgtaagcattggagtcaaagatttccatgttagatcactctggcatttgtgtgtaagtggaatttgaaggggacagcaagaacaaagacagctacattaggtagaaagccattgcagtagtctggaatagagatgatgagttctacttgtggttattttccatggaactgtagactgcctagtgtcagaagactctcctttcattctttaaatatttatatagttaatagttaatgaacacctaccatatgctgggcactgggtatgaagagacaatgagaacatttagttactgtgaaaatagaaaaaaatgcagaaatgtgacaagtgctatgacgtaggtataatcaggtatatggcagcaccagtgaggaactattaactcaccttggaaaccaggaaacacaccactgaaagtcctccagggaaagaaggtacaggtacagaggcatccaagcatgggaaattgtatgtgaacaggcacagaggcatagggacacatggtctcttcagggaaacgtgactaattctgcatatctggagcacaggaacctggcggtgtgtgtgaagggtgctatgccactgaaagactatgtggtttgcttggaaagtgtttaggaaaaattttaagtggggatacaacctattggatttatgttttggaaaaatctccctccagcaattaaatggacttcctaaagaaaagcatagaccaaaggagacaggaaagcaaggataaggatctgaataaaggagacagttggagaatagatgaaagggctcaaattcaagaattacttaggaggtgaaaattattctagagattccacaggactcagagcctatgtgaatgcatgaccaagaggactgcagggaaagccagggttcagttaaggtgaggaggtcaggcatgagtctatgaaaaaatggaatatgtgtggtcatactttttcatttttttagagccatggggtataagttctaaggtcacagatagtgtaaatgtttggggatatgggaatgaaagcaacagtgaaagaatatggattgaaagactacgaatgaagagtctgggggaagaacaggtgaatgaagggactgccacttagagcatctaccaagaataatcaactaagtcattcattcactccaaaaatgttcacttagtgagtttattccattcatatgttgtatatatatttatattttatttatttattatttattgggtttatttatttataacaaacatatatttgtgactgagcatcaacaatgtactaggtactctgtgaggtactggggatacagtcatgaaccatgtgtaccaggaaaggacctactagactcaatgtttgaagttagctttcatgttaagttgacgtggtgttcatgctggctgagccctaggtggtgagagaaaacacgccaggagcggctgttactcctataggaggcagcatggcacagtctatattggagtctcaggagagcacagaatatcctggaatgcacaggctctggactcatccaggcctgagtctgagttctgcttcagtgtgtactgttatgtccctgagaaaggaattcaatccctctgtgtcagtcttatcctttgtaaaataaggataatgatagccactttggaaatctacttgagtattcatatgaggtgcatataaaggttaagtaaagagcgtggctcagagtatgcacaaaaataattaattgtagtcatcattattatttggtatatatatttagagccataggagaatcaaagacctggatcttcaggagatagagacctgctctgaaggcactgaagccagtgtggactgaagttgcacgtaacatcaaagacagctctgttggtggccatagagattggcttcctgtggaaggaccttaaggttgcagctactggaaatttgcttacctttctacactttttattttttaataagtgagagctttacattgtctaatagagctgaaccacattatttcacttccttagattaagtgtccaaattcctttacaggcaattaaagctaatgaaaaataatttatgtgtctagaatctgttataactatcagatctcagtgattaatttggtttatgatgcagaaaacctgcacagtctaagataaaattgaaaaagagcaacatgaggtgaggtgagctagaactgtgatatcagcccaacacattttgctaacagaccgagtatgctggagtttaatcaactgaagagaacagtgatgcttattgagtgtgctaattctctaggcagaaagcttcccagagcacacacagcaaagataaacaaggccatgactcggtgtggagagcctgcacaattgtggaggctgaaggatcaaacaaagacaattatgatctcggttgtcacagcaattctgtttatttgggttagattgagtttatggagggtttgttatttaggagtcattttagaaggcagactagagttattattactacaggagatgttgaacctgtgtctgattttattatagtgggtaatgtttacagtaatataaaacagtcgagtagcaacattattattttcagacaactcatctggtgttctaacttccaacaacgtcctcctgaccaccttacagtgccatctctccctccagaggcaatgtttaaaatactggaataaatctttgaatcattttttaaaattggacattattcaactatttcaaattgaacattatttaaaaagcagagtttaaagcagttatctctccttactcccagtggaaacccttgactccaagttgacatagctgagatgactgggctttgtaaacagctagacttcagttcaacatccatttccactagctgtgtgaccttgggcaagtcacctattattttggggacctttgaacctatctataaaatggcagtaactatgccagtctagggtatctgcgagtagcaaatgggaaagcctgtttgagcatagagtgcaagagcctgcaatgcatgttctctccctctctcttcgcctcactaaaccactcactggacagggacctgacagaggatataaccaagctcagatcccagaggcttgaattctaagtgtccccaacatttactcataggtgtccttgggcaattcatttgcctcactgggctccagcctgagaattgggttcaggagacccaaggtttttcttggcttcttgaggagcctcctcacttccataggtttgctcaggcagtctctgctgctggcataagtcttcttcatcttctacctgtcctaatgccttctgtttctccagctcatagtgatcctttgctctctgcaatagcataaggttttctttgtgtattactcactgggtgtgggattgtgagcagccttcttttattcattaacctttccagttttttgttcttttctccctctctagaataaaaaatctctctgaggaaaggcatgtgttttatgcttcttggctttcttcagtttgtaccaggagcaaggaagctgattaatggcaccttgttgaagtagcgatcaaccttatgtgtacaaaagcatagccatgtgacattatccatttagaacaagccaaagtgccgttctggaaagcactgagtgtcgccgccctgcccaacacaatccacttgtccacctctttccgttttttctcctcctctgcagggacctgggaattttctcgaggcttacctatgcatgaagagaactaagagcctgccttcactctgtgaatttctgtggactgaagtccttctccaagttgagctgtgcagttcataccatgacagattttccatttcttcctcccagaagcctattggcagaaccagtctgcatactacactgttgtggtaggcggcagacagatgtgactcagagcatgtttgatttcccagaacatatttccaagggggtaatggctaatgagttcacctttgagtctgccaacaaaagaggcccacagagacacccaggtcagctgaaatctaccagacacagagaagacagattccagacaccagcagggtctacgaatgcctgctagacagccatataaaaagaaagctacctaattctgaaaaaccagcttcactgcattggtccatctaatcatgaggtgatcccacaggtacactttcagtgggagtaacaagaaaaagaaaaggctataaggtctatgttaatgaagtcataatctgcattagggtctgtcttagggctctacttttattttttcattaaatatttgttgaatttctaccatgggtcagtccctattctaggtgcgggggatatatcagacaaaaatccccgcccaccccacccctagaactcatatgcttatatgagacttaaaaacagcatccaaattttcacaggtttacactattttaccaacctgagcccctttgcctcttggtcccccagtctcccaaggagttattcagtgagactttccctcatttctgccaagtgcctagtactgtgctagctgctcacgtgttgattttgatacagttcacagttcataaaaacaccaaaattgttatgttacccaggatggtaaaatacactttctgaatgtgtaagtgatcattgtgatcgtatgttatactttccaactcacttatcattagtgaatagctcttaaagggattaaatgaatgattacccaataatgatgaataaagagagtaagagtggtattaacctccatcagaaccacagtaccatcataataccttgcctgttaatagaatttcataattttcaaagtgttttttcagtttttggttgcttagagtgttgatcgatctattgaaaccaaccagaaatccagattagtttaaaaatacatgtcttggatgcccattatgtgtgaaacacttagctaggcatgggaaatttaccaatgaacaaacggaaatgagactcctgtcctcagggacatgaagataaagacacagaatgctgagggagtgaagagccccagtcttggaaggctaagggaagtttcctggggaagctgaatttatacttggccctgaagtaggacttccatgcgtggaagacgtggggagaagatttccagcttctgctgtaaatgttagtttcacattggccttatgacaggctgcacatctgttccattgtctctggggatggttagagaccttggaaagagcaggtaattctgcatattaaattataacccattaggcggccggttagatgaaagggcctggcttcataatctctttctttccatgaagtaaccatatggtcacctttcagctgaaacattgtcctaggactgaactgcctggaagccggtgactttttttgttttataagattaaaattacttttcttttttgattataaatacaatcaatgataattatttttataagttggggaaggcagaaaagtatatagaagaacaaaggaataaaaaatgctacaatgcaaattcataatttgcattttgcaatatttctattgagcatttttcactgatacagtcattcattcacatttataactgggcttcttatggataaataggcctgcattggtgtgagaggaagaagaaggtcacacaaaggtagattcaagtgcttagcaagacacagtggcatctaatgaataggttttaaaattaatagggatttttggttggttttgactttttagaaatatttcattctatgaaaaattgagatatgggtgggatatgaaaatctgagatatgcatgaatatgttattatttcttaccataaattttaaggtacgtgtgttttttaattcttgctttataaaggaatgcatttaataacagagattcaacaagttagtaggaaagggatgctatgcccaagtatgtctaggcaacattttgtcaagggttctgcctatccagtctcaccaattctggatctcaggatggtaaccaggttcagatagcactgcttaataatgtggttcgattaaacagaagtggtttaattaaaactgactgagactttaaaaggagagtggatgctattgactatgtgatctctgttctattggccaccgtgatgtgcacaactgtttggtcatggactatgttgagaaacattttctctgattaataagagaagaaccaagtaggcttggagctagctgggggaccagctagagagatggaaatccttgatttcccggtgaacaagaacatttataaagacagaaatatgcagaatctgttgttgttgttgtttttgagtttgtggggactaaatcccagatctgtttaagcatttgtgagcactaatgcttttgtgagaatgaatttttctgaaggaacttacaaaagtgttgagtttcatgtttgggttaaagcaatcaagcatgaagacatatatatggatgaagggccaggatggagagagaacttctccaggccatctgagttccagatagatagaataagttactactaacatgaccaaattgtggaatgccttatggtactgatgtgagaaaccaatctctctttagagcaatatgactgtatgttggacctcccaggcccccttggtaaggccagtatttcctggagaacctttctcaaatgcataccttattttttgccttccataatatcatttccattgccttaaattctaccatcccctttcctatcctgacctctcaccgccttctattgaaatgccgcctgcccttgacttatcaaactgtactgtcacggtttgtttgcttgactaactcctttagtttataattctccagaatgcaggaactgtgcctagtaaaatggttggtatataataaacacttgataatttattgattcagttactgagcaaatgtaagtgggacttaagtttgcttgataaatgtttcctattattgacgtttactaaaatccggcttacctaaggaattttatttccaatatatactgacactgttttccttctctgactacatttattgggtacttattatatgcaagacactatgtgatctcatttaattcttacagtaaccctgtgttgtaagtactatatttctacaggtaaggaaatagagtctcaggaaaggtaggtgacgtggccaaggtcataaagctgggaagtgacaggaccatgatttgtgtccaggaagtctgacgccagagcttacagtcttttctactcacctcagaagtcctacttgtccttcagggccaagcatagactcggcttcctcaggaaactttcttgcagttattgtcatcatctatcttctcatctcaccattaggctgaaggccttgtgaggcaggaatcatgtatctcctctttctattatctcattgtatgtggccagcatcttgtaaagttgtttagaaaggaattcctacctgtactgggcagatgaggggaagggggcttggggatttctctaatcttacacagccaccctctgtcagagccagcggtaggccctaggttatcatctttagttccaggctcctttcctggaagaaaatgccttagaaaatccctttataaacaattcaggaggtgatagagttcagagattcttagaattgcgagaaaccacaatggttacctagataaatgtcctcattttaaacagtaggcctagaaaggagaggtgacttatccaagactgtggagcaagttagtagaaagtttggagtaatgaaaaaacagagaacaaaacttgcagttaccagatctgggatttagtattcactctgacacttagttcttattgaaagacctataacataaagtataattattcagattcaaaccaagttgacaatgtcttttctgtcattgtccttggcctatctacgtgcaaataatagttttcttcttagtagaaactccttttattccacttggcacaggcactatttattgaattgctttaaagaagttttttttcttgacttatgtcctcttgcagtctcctggctactcccagctgcagcctctcctcccccagccatgctccctgcaccctcccagctccccatcctctcaccagccatttgctttcttcatggatgccaagtcagccaatcagcattgcttgtctcctttcctgctgtgctccacatacccaactaaggctatttcctggtttccatcctgaaccaggctgaaattgctaaaatattaatggctccctttgtgaaaaataacaccgaagcatcttattataaattaaaattgccagagagtcagaaacaatgacatggaggaaataaagcaaagctctaatatgaaaaagtgttttaggagttaaggcaggagaagatatccttagccctgccttccccatcacaatgctgggatcttgccgtgggaaataccatcaccactggctgagagtcaccttcttgaccacctagagggggtgtatggcaaggtacgcgatccctgtggttttgcctggctggctcttcttctgggtccactgggagagaggatgagggaagagcagcatggatcagaaaaaaaaaaaaaaggcaatctgctgtggataaagaaaagagggacttcctgtggttaaaaattcatgtgacatcttgggatgaggaaggttgaaggatgctgagaaaagattaggctgaactcaaaggccaagaaatgtgattccttcctttgtttaatcttaagtaaagcatttagcactttatgtcttaaatatctgattcccccaccacactctgtcattgtcatcattttattcctggggtctgcatggtgcttggcacaaaccacaatgctaaccaggattttcagaatgaatggataaataatcagcaagggaaagagtagagagcaaaaactgaccctgaatattttcagcatagtgaacgttaatatttttatttcttttgtaatgaagagtacaaatggttgggagcaggacatcacaggaggaggaaagatagcgccatctctgcagaagaactcctgagccacacacagaaggaaagttgatccccagggcagcctttcccaccaaaaaaatcaggcccaatccaggagagtttgccagtagctccccagggttccagggtgtctgccagccttcctaggaatcgtgggcaggcttctaggtgccagtgactcaaactcctttttccacttcccagttcaacctggtcactctcatccccacaagttcccaatctgaatcccattctctgaccattctctgcttccttgtttttaatctcatttgagagtgatcctcacgggttcccctggcccctgcactcattttccttactgggtatgctaacgtttgtcttctaattcaggaaatccttccaaccctgttttcagctctgcctccaaacccttccatttccccatttcacctcccagtctcctcactcctggagcaaagagctctgcacttggattgctaagcatgcatggctcatgtggagcaggggagtgggaagatgtccctcagggcagaaagcctgcttttggtggggaacctacgtatcattcaaacaggcttagctgtagagaaccttcactgcacctctcctccagttctgcctctcccctccactatgctgaacttgcagttcattctgcagtaaaaagcagtagccaggctgcagctggtgctccagaagcccggctgtaagcatgcgcactgtatatgtggtgtgcaaggaagccatcatcagtcatataaagcagttgctatgaaacatgtgaaaagtgagaaacatggtttaattgtggattttattagaagtgtgatactagtcagaaaggcccaggaagttggcattgcagttaccagctcagggagaaggaaagagagcagcagaaacttctataggagatccaactgatgttaacatatgtggacaccctcctgtccccggcccctttcctttcacccagatttggtatgtggcaaatctaaacatttgcaaattcacagtcgtattcagtcatccggcacattatgaacttccactggcgatccctgtgggagggagagtcagaaaatgaatgtcagtgagaaaggacatggcaggaagaatcgctgctggggaaacagcagcagagaacatttggaggatctgggaactgaagggacacttaatctcactttgctcttagaagacatctttatgcagtttcccaagaaccgacaaatctgtgagttcaggtcacccttgaaggtgactaattaggtcactggctgtgtggaggcctctgttcatcactggtggtcagctcacccctgctgcctccagaaagtacctcaaggacctgtgggttaacagcttggaataaaagcatttatttaacatcatctccatttcattgtaaagaatcttgttttaggctgggcttggtagctaacacctgcaatcctagcattttgggaggctgaggcaggtggattgcttgaggctaggagtttgagaccagtctggccaatatgtggaaaccctgactccacaaaaaaatacaaaaaattagctgggtgtggtggtgcatgcctgtagtcccagctacttgggaggctgaggtgggaggattgctggagtccgggaggttgaagctgcagtgaaccgagatggtgccactgcactccagcctgggtgacagagtgaaaccctgtctcaaaaaaaagaaaaaaatcttgttttaaaaagtccgtccattttcccactgactctttctgagcacttaacatatgctgagtgctcaccatgcactgggctctgtgctatacatgtgtttcccttcagaaaacactgctacagaggaatgaaaaagtcccttaaattaaaaaagaaaatggctgccattctggcatcacaagaattgttatgaattgcctatgtgtttaagtggttggggatgggaagagtgtacatagcattactaaattttgaaaaatgtggtgtggatacatttcaaggaatgttctttgctcagggtgaatttatgttctttattcatccatttaagagaaatgttttgagtgcctacattgcatgacactcctgtggtctaatactgttgaacagtgataatgataattgtagcctctaatatatctggcattgcaccagatgctttacgtgttttctcttttaatcctcacaacgattcattgtttaggtgaaaaaccaggctcagagaaataattaacttgctttaaggtaatacaagtaataggtgacaatttcagattcgcagtttattgtactcaaatcttggtctttctcttaaaccacacagtctgcctaactaggtaatcttaagcccagaagaacacgtggctgccatgccctttgcacagtcctgataaagggcaaaaacgaagagtttttccatatttaattatgcaaatcattccaaagcttggtggggtcctttacaaactcagaattatctatctcccttttcaatctgcaagccctcttttcaacaatttatcctaaacactatgactaacaaggcctccatccagcttctaaactgaaaagtggggctgattgctcttagtcctaggaagcagggctcactctgctcaaacagcctaaggcaggctttctaattctgagtctgttgctccgggtcgtttgtttagaacaattgggtatagagtccctcaacacaaatctgggtgatcaacttgagggtctgggtgataccagggcctgggtgatattttgattcctgcaattgtcaaaagaggtcatagattgttttagaaggaaattagaaaattggtggcctgtgggtttaccaaatgtctgtaattactgcagccaggtcttatttatctgtgtagcaacaaacacagataaacaagatcttatgatcaggcattcaaactactcttttagaaggctattaattgatgctgagcaaaacttagacttggtcttatgaagaccaaatgattccaccaggttcagtctctgatttcacaccaggacagtgggggcaaatttgctccccaagggaatacttggcaatgtctgcaacttcttttggttagggtggggtgctaatggcatctagtgggtagactaaacatctagaatgcaaaggacagaccctgaaacaaagaaatatctggccctagatgtcaatagcgcatagatggaacaacagcattctaagaggaaaccactatgatttgcatgtggagggaaagctcttgcacaaggagtcctgccctgacaatagttctccaagctggggacctcagcatctttcagcagaggagaagaaacccaagttgtggatcattaagctacttatttttgatgacagtagcaaagttgcatgagtatatttattttattttattttggggggaggatactcattttaaattaatgcaatgacataatatttcagtttttcatgattctgggtaatccacataaccgaaaaatttactaaaaagtgaatttactgaaaactgaattgagcattttaactactcagatatatttatttcatactaatcttggatggcactcttcctttactgtattaattcctgctttcttaaacagggaacatagaactaattttcttgttgagctgaagtcatcatttggagcattgagcacccctgttatttcgttttgcactttggggagcatggccctgctaaatgacaacccatgttctttgagttcttgagcctttcattttctttatttttcttaagcatatttgttatcatgtcatccagctatttattctcattggtggaatgagtttcattctaagtagtatatactcgtttccctttctaatttgctgcttctagaaaattggtaactaagctagtttaaagtgtatctaaagtaaaaataagtaatgtgtgcaaactgagtggtttgcctatgggtaaacataaaggtttttgctgatcagcctgcaacatatattgtgcctttccagagctacttaatgtctttttttttttttaaaaaaaaaaagaaattctaggtcatattaaataagttcactttatttaagatgtaattctgtttgaaaacacagacacacaccaaagatgtgtcacactcaaattcatcatagcatactatctaatgagttaatgtaagtgttatttggtttgcaaaatatttattggtaacttttcaggaattcatttctgtgtaaagtgattatcggctgactaaaagtaggccaaaccaatcattaacacctgaatttacccacacatttctctatattaatagggagtacaattcttgttttcttcttaccgttttgatgtatttgagataggattaaggagttgattgtgagagaaaggtgatgaaaaaagtgttagtgctgtttttatctttaggccatttaaattctcttctttcattaatttttgcaggtttactgagggattgttaactcctttcatttctaaatatggttggtagatgctatggtctgaatgttggtgtccccttaaaatttatatattggaacctaatactcaatgtgatagtattaggaggaggagcctttaggggggtgattaagccatgagggctctgctctcatgaatgggattagtgcccatataaaataagttgaagggagctggcttgccctttccaccatgcgtgaggacacagtaataaagcaacatctctgaagcagcgagcaacccctcaccagacactgaacctgctggcaccttgatcttggactttccagcttccagaactgtgaaaataaatttctattgttcgtaagttacccagtctaaggtaatgtggtatagcagcccagactaagacagtaggttctgtgtgtttcttatctccaatcccttttctttctcttctctcttctttcctaaaacccaaagtggggatgatatagaggcacggggtggaagggggtccattttgacaatgggcactcctctaagcatatttgccttctcctcttggtgtttcatgaggaaaagtgctctttgaaattgagtgaggggaaaagcttagaccatcaagggataccgagtttaggactctctgctcttgagcaggctggaatccaccctcacttgcaaggtgagcagctccatgaggtgagctcatgagaacagctcacttcccactgcctcccattttccagccaaaactgcagttaatccttgaccaggtaggaaactaagataagtaaaacctcaggtcaaagttcctgcagaaatatatgtgcatgtaagaaattttcacttgtattctacgtgtgtgtgtgtgtgtgggtgtgtgtgtgtgtgtgtgtttataaattcctgcaggtaaaatccttgcagggagttagtcccaactcctttaaccctagcccattgggaaggggctgtctttctcacctttccactgcagagaaagtggttgttgctcctcggatatagtaatcataattgtaggaaatcatgtccatttcctcaccatagtgacctggatattctgttgttagcctatgcaggaagaacaaaggttagaggaaaatgaaacacattattattgctgggagcaaacagaagacacactatgaagaagagatggagtttgagcatcctggcaaatccagactgaagttaaatgacatccaccaaacaactccaggctgtgaagaaacagacagctctcctcccacttctcatcttccttttctaggccattaaactgtgcactgaaaaagatgaagatacctccccaggctttggaattatcaaaataactttggaattcttgatattgattaatatcaatactattcctattctattcaagtcaactaagacaatgttttcaaattttagattatgattcattagttgataacaaaatcaatttaattggctttaaaagagacataaaatagaaaagaaaatataaaagcatgcatcacatgcagtaaggacgagtctatgtatgtaaacattttgtttcaaatatatatgtgtgtttgtttataagatgtacatattgcgatagtttaatgtttcttattgtgagttatagtcaacaaagtgttcaaaaattatttaattaaaatgtaagctccccaaaggtagagtttttgccttgtccaccattgttcatccagcacctaaaacacatacataataaatattagctgaataaatatatggcctggggaaagtcaatgaatctgttttctgatctgtagaagaataaagtctaccttataggtttgtcattggaactaataaaaatgagtgatgagtgtgctatactagtacatggtaggtgttgaatcactaagaactattttgtttcttcttcctcttcctcctttcctttccttctcttccaatattgagtaaatcctgagccttcatatgagtaggtccatggtagtccatcctggaataaagtctagaatcccccagttctcataagggctttgccactggaaccttcaggaccaaaacagtccttttaccatgaaatagctcctccaaagtctttatccacaccccagggacgcttggaaaacaactagtttgtgagtgtcaataatttcatctgatttgggtttaccagatcactgtttattaatgctagaaagatcttctcctctgcagactgatggtgatctttctccaagattgtcattaaatcatgaaaagattgatttataaactgtaagggctcctaggaggatctcagtgcacagatggagaaagatcaatggttagctcattctcttggttcataatcattccttttacccattattcactaacccttgttctctgatttgacttttcctaagacgtaattatgctctatcaggatgccaagtccaacccaaagtgaggtacctgtgtttttgcttaacgagttcatgaagggaaataaggtcctgcaaatccagaaacttattttgtgcttctaaagagatccagaagcaggactttacctttcaggtaaatgtctttttttttttttttttgagaccaagtctcactctgtcacccaggctgttgcacactggtgcaatctcggctcactgcaacttccgcctcctgggttcaagtgattctcctgcctcagtgtcccaggtagctgggattacaggtgtgtgccaccacacccagctaatttttgtatttttaatagggacggggtttcaccatgttggccaggctggtctggaactcctgaccttaagtgatccacccgcctcagcctcccaaagtgccgggattacatgtatgagccactgcgcccagcatggtaaatgtcttataagtagaactaatagggccttacttggatcccactgatttatgatccatgagaattctaacaaggactgtattaaagttaacccaaggaaagagaggtttgttgagaacatcaataatgcaaattagaataagaggttgcatgggggtgggagggggtgtgtgttttccttacttcagggaacaaaaaatattttctaaaacttttgaagcatctctggatacaatgtgtaaaaattaattaccaagttgtgtgttttttcttttttttgctaaggcagaatctacatacagcaacactgcattaagctaaatccaattgccaaaagtatttggaaattatgaagctagatttttattttttaagtttttactgaccactctgatctgtcttcagatacttggataaatatcacggaataaagtgggaaagaaaagcttacctttaaaaacatcaagaagttttaagcttcaaagaaggaaaatgttatttcatgctttctttaattaggattctctgttgcttcatttttggtagtgaccagacataagccccctgtctaactggacagtttgtccgagaagcctctccatgaggtactgatgtccagtgaatttctagaatgtcctagagaaggtgaggtgcatgaccattggtactttttcttcttggtcccagacaggttttgttttgtgtgacttttggttgttgttattttgtcttgtttttgttataacaccatgggattgagtttagactgtcctagagaaacctgggtaaaggaggagagggaaggaggttggatatcgatggaaatctctcctactttatgaaataaaaataccaagggagaaatgacccaaatcactggtagaaagtgaacctcccaaacaccatccataggaagaactattgagtcaatgtggcccaggatgctgtgttctgtattttcaaaccagatatatgtggctgcatttagcgcttgatgacactgcatgtgcacgcgcacacacacacacgcgcacaaagtgtcctaataagtgaaagcccagtaatagctccttagagagaaaaaagaatttaaacgttcagaactagacactgagacagggcatagggacttttcaggaaattaaaagaggctacaaggaagcagaatgatcagggtttcctaagctgtgacactgggctttgcgagtgtaggtcggggaagagttcggtgtggttgcagcttccttgtgaattccttgtgaattactaggtcactttaagcagttttttggaaaaacacacttcatactgagcattgccatacattcctagaccaattaaaacaatcaaacaaaccttcagcttggcaagatgaagaagagcgcaggtcaggaagatgcctttattgaaatgagtctacttttcaaacatttctatgggaagccttattttctcctttcccctaaagtaaagtgtttgaatagatttattcaattttagctattacttaatttttaataaaaactactgctgtgcaggagaatggcgtgaacccgggaggcggagcttgcagtgagctgagatcgcgccactgcactccagcccgggcgacagagcgagactccgtctcaaacaacaacaacaacaaaaaaagcaaaactactggtgtgtgtgtggggtgtgtgtgtgtgtgtgcatgcgcactttcagatgaatgactcttgtggtacagtttctcacttcacagcactttttctgctgtcaagatgaaagacagagagttgttccaaagctaagaaaaaacttgataacataaagccacttgcacaactcttgtgtcagctgaagctgatggtaaaaaaattaataatattttacttatgagctgagggaaatcagttcgaactgaagacaattttaagattgatataggatttttctcatctaagattcttgaagctctaaaattattaacagatccaactggactcaatgaatgtttgctatgatacaatatcatagactgagctgctgctgatagatgtctcggctccgttgccacaagaacagacatattgcagagctgagtccaggtatacgctctcacatccattttagaaagggaaatagagatacaatctagttatatacagtggccaattttattcattgtcagaggttgggttgagaacttattaggtttttaatagttaaagtaaagattttcaatctattccttgacataaagtgactcagcgtaaggttttgtgaaaacccacctctacgagaccttattcggagctagacacttttcttctatgaaagtcaaacttcatagcactgagatgtgtttgttacagctgtttcacttggggaaattagggcaactggattagtcggtgtcacctggaagctcctctttcaggactttccctccaattgatgtgcacatgaacagatacagcttcatctcatggtcaggaaacatcatatccccaaccttggcccactttgtggggacaccagaaaagcacacaccacagactccctaccataaaaactggaaaaaaaccccagcatttacatatgaacagatcagaacgggtacctgaggaagccatacttcagctttttaaaaaataagaataaaattagaatgtcttccaaatgatcttttatagcccagcttatgctcaaacaacattttagagaagcttctgttggtcattcaatattgaattctgtttttcttctatttctctaccactcaattagcacattactttaaatatcccattcaaatgtcctgtgacatgtcagctgatacagtttggctgtgtctcacccaaatctcattttgaattctcagatgttgtgagagggatccagtgggaggtaattgaacctttgggcaggtctttcctgtgttgttctcatactagtgaataagtcacatgagagctgatggttttaaaaatgagagtttccctgcacaagctctctttctgcctgctgccatccacataagatgtggcttgctcctccttgccttccaccatgattgtgaggcttcctcagccatggaactgtgagttctccattaaacctctttcttttgtaaattgcccagtctcgggtatgtctttatcagcaacatgaaaatggactaatacatcagcactatatatttagcaagataatagaatactgtataacatcatgatggccaatatagtgagctctttgagggatcactggtgcatggaatcaaatatgcttttatgatctggttcagaggtgggtttggaggagaaactcaacatttgcggatttggtgtgttgaggttggcttacgttttatatattcagctaaaaagatgtccctttctgacagtcaaatcattgagaagtttgttaaataaagccagtctgttcatgatcaatcctcttgcataatgcttttccaagtaagctataaggaatgaacatatttcagattaatttagtttgtctttattaggagctacatcagaccccctttgaattagttttgtaaagacagaaaaaataaaccccaaatggagttatgtgtaaaggaaaacagccacagagaacaatccccaggcttcttcccacaagagctggggattggccaagcgggacctctggtagtcacccaagtgcccttctctgcacagaaaatctgaacccaggggctctgaggtgtgtgaaataaaaacaaatgtccatgtctgtccttttatggcattttgggactttacatttcaaacatttcagacatgtatcacaacacgagggaataacagttccagggatatctgtagcttaaatgagtagaggaaagtccctgaacactttccaaattgctctcttggaactgagtttctaactcactgtccaagcccagggctagtcagtaagcacattcactttgactcgtgttgattttcattagccacattatgtggtggtcaccctgggcctgcatgtcagtgggggctacttgaccttcaacagctcccctccaattaaaatagttttattctctgttttctaccagatgcctactgtgctattatgtaatatttcacctgtagaagtcttattcctcatctagagacagctcagtactatgcaaagagcatgggatttggaggcagatagactggttgagtcaagtttggaactttgaagggagccacaacttctatagctcagttccctcatctgtatgatagtatcataatttttgtgtgtgaggattaaatgcagtaacacaggaacacgtggtaagtgtcaataaataaatattattattatcatcattatcattagtagggtctcacccaaagcctatgaattgttattatttcatatccattcacattcattgactgcttaagtgaattaataaatagaagtaagaatgattgcctctagaatctattatagtagagggaagcagactagatagaataaagcatcagatttggtttgtaactgagaggtttactttgttctaagtagctggccttgggttaaccaatacttagccagacacatctatgatatttctgcttttgaagtttgaacataaggagagaggtatcacctataatgcaggcaccaaatacagtcgatatggtttggctctgtgtccccaaccaaatgtcaccttgaattgtggtttccataatccccacatgtcatggaagagacccagtgggaagtaatttaatcaagaggacggtcactctcatgctgttctcatgatcgtgagtgagttctcacgagatctgatggttttataaggggcttttcccccttttgcttggcattttttcctgccatcatgtgaaggacatgtttgcttctccttctgccatggttgtaagtttcctgaggcctccccagccctgtggaactgtgagtcaattaaactgtttcctttgttaagttacccagtctcgggtatgtctttattagcagtgtgagaatggactaatacaacagtcatcagtggcatctgcaggggattgattccaggacccccatggataccaaaattttcagaaactcaagtccttgatctaaaatggtgtagcatttgcacataacctatgaatatcctcctgtttactttaaatcacctctagattacgtataatacctaagataatgcaaatgctatgtgagtagttattatactatatggttttgtatttgtatcattttttattgttgtattgttatttttatttttattgtttttttctgaatatttttgattcaaagttggttgaattcttggatagggaaccccagatatggagtgccaattgtacatgtctacattttaaatatggcacaataattatggaaaccattccagcagatgaaagggatgatagattttgctcaagttcagagaggctgctgtctgcacaatgagtgctatgtacatcatgcaatggaaggcaatggttttagtagggcgcagagcatctaaacccaatataagttcctttaaattgagacatctagtccaatttcctcaaaacttaagtatgtccatctctatagtaatagcttccagcttgcgcagaggaccagtatggaagctgctcttcatttttatttttttattttactttaagttctagggtacatgtgcacaatgtgcagtttgttacatatgtatacatgcgccaggttggtgtgctgcacctgttaactaacattaggagatatacctaatggaagctgctcttcttaccaggcctctgggagctgaattgcaggaggctgtctgggcacaggtggcatatgacaggcacagcaatgcagaggcctgtgagattgttcatgtccctaaaacagcattacaggagtgaacatgcaaacactccctatcttgtattaacatctgaacaaagaggctaagaattaaagattagctttgactgggtgctttggggtgggagagataagaatgttctaatcaactgatgttaactagagctatacaggaatttaaaaaaagcactctctggcttatgacttgcacacagagagtggggaagtaggcagtggagaatgcaaagtctgagagacagaatatcagggttgaagagaaaagtaaaggttacctaaatggatgcattattttacagtcaaaagatattatccaatgaacctaatgaaaggccatgggtctggagaagagccatttggaaaagaaaatgattcacaaccatcagatcctgggacacagagtctccgcctggacagtagacagtctggtgtgcagcctgcagctgctgagctgtttggagaagagagattatgacaaacaatgtctaaagggttgtggcaacttcagtgacatgtgtttgtggtttgcagaccactagactaagaattagaattttcatatctaaataaatatctataaaattcactattcatccaatccagtggagaccatttcctaatggcatgtccacatctctcaggaatttgctttcttgccagagtccagtgaggctgtaatatccaaagagaaaccgcacaagctgaaacgagagcagcaccttggttcccaccaaacaaataaatctcatactcatttgggagttggttggatgatttgttttttccagcccagagtgatgatatttctgaatccctaagtgctcacaaacgcaggcgctagatattcacttagctagttcatacggtgtcaggctgcgtgctgaagaatgcctttcaaagagggaaggggaaaaatgtcgttcccacccacatgggtccagttccctgggaggtaattcaagctaattaaagtcatgtaagggaaggtttcagataagagggttatcagcatttcactgtgggaaggtgcaggaaaaagagttctcacttcactctgtaaggctgttaaaaggatcaaataaaataatgtacatgaaagaagtctttgtcaactataaaacatcatcacatcaatgtcaggtttcaccattgttactgttcctaggggcttgcaacattcagttattcatctgacacatttattaagagtctattttgtgctgggtaatatcctggagatgttgaaaaaataagacctaatttatgccctggaggcatttagaaagacatataatacaacatcatgactcaggcaatttaaagatgccactaaaatgtctagacacaccagcgggatagtgagtcatacactgtgtaccatggtgcacacttgaatcttgttctgctgcttctccaatgttttctttgaaaaaataccattttatttggtgaccgtgatagctctcagctctaacaccatgccttcagaaatagaaccagcaggtggaaccacaccttagtgggacttgtttcaaagttgacttgtcatgccttttggattaattctctgtactttccccaccttttggctccacagaccaacagcaacatgtctggatggtaggatggggtaaggaagggtaaagggtatgggggttggggtgggttcagagtggcaaagtcattgcagatcaaggctttgggtaaactttgtgagcagagacatgaatatctctggcaactcaaaattgctcatctttatctatcaatctttaacattgagactttgttcctacatatatgtctatatgatcattacatttttagcatcttagctggtgaattgcatctaagggagcttgagaagcctttctaaagtatgtgagaggaacgatacctagcattcttggggaagcagaagtatcctggaaccagtctccaggtgaccactggaaatctggggcatcattaaaacaacggtggaactggaaacacaaagacctgtctttttcaggtctcagcattcaaataaacagacaggataagcttcaagaagcaatgctcagagtgttaacacagatcccacagatccacggaatatgggaattccaggaaaatttagatgtttatccctttctctcacacttaccttcatccaccccctatttcttctgtttgacaactttgcttttttttttcttcttcttctttttttttgagtcagagtcttgctctgtcgcccaggctggagtgcagtggcgtgatctcggctcactgcgagctccacctcctgggttcatgccattctcctgcctcagcctcctgagtagcagggactacaggtgcctgccaccaagcctggctaatttttttttttttttgtatttttagtagagaacggggtttcatcatgttagccagcatggtctcgatctcctgaccttgtgatctgcccacttcggcctcccaaagtgctgggattacaagtgtgagccaccatgcccggccttgacaaattttctaaaaccagtgagccttagctccttgcctgcctggtcacccaaagccttgaggcccaagcccactatctgttgttgttctgtttgggcaggggccagccaaccatgatggcatggccacagacacagcaggctctcccactcatctctgcagagacctcgagccttgctgtgatgaggaatgttgctgcctcagcttactcctctctgcctggggaagaatgagttagtacatctaacaacagactgtccaactggtcacatgtcttgttcctctgcataaccaaccccgctctcaagttctgcttcctgcaatgacctgacacctgctaggttgttcctgggcagagtttgcctttgaatgtcctgttagttggtgaggaggctgggtctctcctgcatctgggagggtgaaggggactctgtttcaagacaggtcagctctgtgtgatcatagacagtggcaaggccagaaatatattatcttatttaatgctcataacaaaaagtagcctgaagtcattccttcatccaaacaaatgttatgtgcctgtcattatttatagggcttggcatatgtcagcacaaagatctctgcttgtgtagagcttatattctgggcagaagtggagggatgggggagagaacaaaaaattttatgtaagagaattatattttctgggccacttcacattatatacaccctccacaattattaatgtggatatttgttcaacagttgttaagaagacactatgttccaagcactatactgggcattgaaaatacaaagatcagtgagtggccccatatcctccagacactggaagtccaggtagagaggagcaactgtacacaggtggtaaaatgcataaagtgctgtgacagaggcatctacgaagggcagagagacagagccaccaacatccaggcctccagctgcccctaggctgtccatgttccccttcctccccactgcagcccgtgcagggctacctcctcacctcctcactctttcccctgctcctgaacccactcctcctggccacccagcataccccagccctgatgtgttcctttggagtctgattcagggaaagttatactaatgtagtaaataaattcactgactgagtattaggttttgcttgctctttcaggtaatttacatacattttaactggcttttaatgctttgcaacaaagggaggctggtttccttgtgggaagtgccattctgttaatagaccaggaatgagagatttgtggaggccaagctcctacctactctcccctttcattagggcgcactcgtctttggaacttccttcatcctctcaaaacagttctggcatctggatcatcttttccaaaagtgtctttggaattaagacatttttagggttcaacacaacctgaaagatcttctagtccttggaatttcaacttatgatccaggggttcttggcagtgtgttcatgaatggccttcagggagtttaaggactcccgaaattctctgcaaactattgtattaacatgctaagtgcattttcccccctgaagacaaggtctatagttttcatcagagtcttaaagatcttggagactcaaaaaaggtggtcatcattttaggtgatgtgcttgagcctgcagagttatgagagggaggggagaaggggaaaggggaaagaagggagggaagtgaggaaaggccaacacagagactgaaactcaagtttctttttgcccaaactggtgctccttctacctcctccactgcaagagatctttaggtctttggttcaggacctatcccagtggcatcgtaatcctttgccaggcctgttcacccactgtagaggagtaaaagctgctttatggaagcgattttgaagaactagaggaggtttctgctccatcatacagtgacaggtgactttgagctctgaatttactatcggtccttactttaaaaagaaaaacgttaagcttttggggctttgtatccctagagatactgtgtgccactgggcatctgtggagtaagctgtctgattgcagagaataagcatgacctgtgaagctgtccttgcaagcatcaaactgtagagagatcaatcacttgagggagccaaccttcacatgttgacacttctggatccccttgcccaaggcagaaatgcctggctcattttcagattaaaaaaacctgggccggttgtgttatcaacacccagtgtaagtcatcagggcaaatgacaatatacacattctcctagtcaattggaaggctaggtcaggagatattcggcatgagcccagggatagggaaagaaacaaaacatcagaggctggaattccaaatggatccagaaaacagcacaatctttttttttaattttttaattttttaatattttattttttctgtctataactatgtactagactctgacccatgagaggattggtttctcccagagaaagactacaggaaactaggttcccaaataggccctgcagccttggatatgatgagaagttaccagaagttggggagaaggagaacagcactgggatgggagtcattaggcctaagcttaagacttggcattcccacagagtaggtgggtgactttgggccagtcagtgccggctctatggttctgtttccttttctgccaaaagaaggatgtggggggttggataacctgaaagatccctcttggcgggaacatcctcctaagtcattcattcattcttgtctatatgccagcgctgccttccaggcttgtgtgtgaccctcaagcttacctgaagctagagcacttcctaggtgcctctcccaccccaggagtcatgagggtttggtcggctgccagactcaccagcaggaatatgggcacctcttgctgtagcgacaacagtaaaactgccactcccgatccagcactgactcgaagtagcggctctggaatcctgccaccagcccattgttggagcacgtctggtacctgaagagaagacaaccccaggaacctaagaacagtgacacatacacagaccccttcccaagaccccactgccacagttacacactctttctctgacctagattcttaacaatttattccattttatgcaaataatagtctttattatatttgtagaaataacatagcccctccattaaaatttaagtgactcagaattttctaactgaacaaaatttagggaacactgcccctgtcatacctctttcaatatatattgttagatggaagcctgcataaatgggtggatctagaattttacatctagaattttacaaattcgagattgtattattcatgccatttaaaataaaaggtattataattcattttactggaatttaaaataaaaagaagacaaagagaagcacaacgtattgatgaatttcaaataaacatttcttctgcctaagagaagagccctggaaattgagcacaaggatgatcattcgttctgcccctgcacagcatgcaaagcccagatgggcatggtgaatgtgcccagggcagcccagtaggaaagctgggaccacaacccagattcttcctacttatccaggaatctttctaccacccacaagaccataagctctacacagccatggcatgtttttctcagaattctattcctggtggccaccaagaatcctggctgtggaggcagtccttacagagttgcaacaggccaactgaatgcctcaaaccccctctaaagatccctttcctgtcctagctgcttagtcctaattcttcaaatatataaccgctccactccagtccacagacaagaaataatttttgctctttcattctacctgtgctgctgctggtcttcacagcaccttttgaactaaacattgacttagaatagtacaatcatttcttcctttgttccatctctagtatgattttctcccattcccgggcccaattcctatggcgtcttcaggcttcccactttttgctgtgatgataacactattttctacctgaccacagtggatttccactgttcttgctacttatccaggaatctttccaccacccacaagaccataagctctacacagtcagggcatttccactgttcttgctacttatccaggatctagaattttacatctagaattttacaaattcaagattgtattatgcatgtcatttaaaataaaagatattataattcattttactggaatttaaaataaaaagaagacaaagagaagcacaatgtattgacgaatttcaaataaacatttcttctgcttaacagcagagccctggaaattgagcacaaggatgatcatttgttctgcccccacacagcatgcaaagcccagatgggtatggtgagccatggccctttgatgaaatccagtggatttccaccttatagcatgagctctttcacaaacccttccaaaatagttcttcagttacctctccttctttgcatttcccaccatcccagccattggtctatcccctcttatgagtgggcagagccagagcaggcagttgtctatgtgcatggccagacagctgctggaatgcaaccttgtatttcatgggaagataagttttcagaaaatataatgcataaagtaagtaccgtgtgctgactggtgagagaggccttgttgacacacaaattgtaacattatcaacaagtggatttcatttattcttttccattgctgaaaatgaacttgcagatctaacaaaattagatattaaatatattacttgtctgtcatcagaaatcatccgtccttttaaatttattatttattacttgttattcatttattcacctaatgtatataattcaaatatgcatttatttatttatttatttattcattcatttattaaacatctcatactctactactgttctgtatcaatcactttgctattatgttgtgagaagaattgagagatgggctcggtattcggtcaaccatgtaaattagcttgaattccctgttcccaggacttgtaagaagttctggcagactagaaaactcagctataggggctcagtaatgcaggttaaggtgtaaattgagacctatggctctttgatgatctagctttttttttttggtatgtgcaactgtgtagtttattatacatgtatctaggttttacaattttcttttattttactttaagttccgggatacaagtacagaatgtacaggtttattacataggtatatgtgtgccattgtggtttgctgcacctatcaacctgtcatctaggttttaaggcccgcatgcattagctatttgtcctaatgctctccctctcctcacactctacccccgactggtcccagtgtgtgttgttcccctccctgtgtcaatgtgttctcattgttcaacttccacttatgagtgagagcattcactgtttggttttctgttcctgtgttagtttgctgaggatgatggcttctagcttcatccatgtccctgcaaaggacatgatctcattcatttttatggctacatagtattccatggtgtatatgtaccacatttgctttatccagtctatcacggatgggcatttgggttggttccatgtctttgttattgcaaatagtgctgcagtaaacatacctgtgcatgtgtctttacagtagaataatttatagtcctttgggtatatacccattaatgggattgttgggtcaaatggtatttcttgttctagatccttgaggaatcaccacattgccttctacaatggttgaactaatttacattccgaccaacagtgtaaaagaattcctatttcttcacagcctcgccagcatctgttggttcttggctttttaataaacaccattttgactggcatgagatggtatcttattgtggttttgatttgcatttctctaatgatcagtgaggttgagctttttttcatatgtttgttggccacataaatgtcttcttttgagaagtgtctggtcatatactttgtccactttttgatgggattgtttcttcttttcttgtaaatttgtttaatttccttgtagattctggatgttagacctttgtcagatgggtagtttgcaaaaatattctcccattcagtaggttgcctgttcactctgatgatagttccttttggtatgcacatgctctttagttcaattagatcccatttgtcaattttagcttttgttgcaattgcttttggtgttttttattatgaagtctttgtccatgcctgtgtcctgaatggtgttgtctaggttttcttctggggtttttatggttttgggtttttacctttaagtctttaattaatcttgagttaatttttgtataaggtgtaaggaaggggtccagtttcagttttctgcatatgactgatgtagccttcttcattctaccattgctcgcatctcatcaggagtatactaatcactttgtaaatgcctggcatacttcagcaagctatatgagtggaatggactaggctcatgatatggtggaaaggtagctttaggggctgatctaccagggtgttctattctatcctaattcttagtaaagtaggtgagaggtaatttcaatatgaagctctaagaatcataagcaaaactcatatgtgtccaaaaagagaaggttgccataagctagtgctctctgtgacctgttctcctaccatcactaaaatgctgccttcctctaaaacaaagccctttcagaactgagctgggctgtggtttccacggagttgttgttccattgttttggcttgtcttctgtactcagacccctataggggacagagctcccatgggggtaagttcccctaagtaaaaataaatgtaggaagataagccgaactgtttcatggagtaccagttctgaaggcaatccaagttccacaaattccccgccagctgttggccaggctgctggccccagtgcctgtacgggaagtgtgtgtcactttctcacacaccacctcagataactctgccctgtgaagattatttggaccctacagactcagagcctaagaacatatagtgaaagttagataaccaaacataaccctcctcctccggctttggtttgattgccttcacattttggtagagtcagcctgttcaggagtttggtatgtgaaagcattccttccagagccggatctttgtgggggtaccttttcacactgtggggagcagatagtagagtggccaagagcattggctatgctgctggatggctccactgttcttagctgtatcatctgggcgggtttcgtgccctctaatagcctcagtttcctcatctgtaaaatgggcataataatagcacatatgtattaaagttatcgtgaagaccaaataagacaacgcatgtaaaattcctgggattaataaattgcttattagtgtcattatacttatgtttagtctacacagtaattatgagtctactttgtaaaagctgtcccttggctcccctgtctctaatcagtaaaacactggtggattcataggccctccctgagctgctgtttccctaaaacaaagctcaatgaggttggatgtcttagccacccactttggagcacaggtactttagtatgccttaccactctcaggaagtagtattccatgcagtgtctgacattgttgtccagcaaatgtttaatagaagaatgagggaccgaatgagtgacccgactatgtcccattattggaggcagaattgacttttaagagctcatcactcaattccattaagggccctgaaactccctccaagtagtttacatggatcttgggtgagcaatcccttttcttgcttccgttctctccctgcagctccatgatgagggggcaaaataaatatagctttgggcattcctctcctccattcctctcattttcacttttaacaaagctccttatttaacaagactcacctaaacactggccatagctgcaggattacaaacacagagctaggtgagaagagaggcaacttctaaatggaacaggactgggggaactgtcagggattgcattgctaaagttactcaaactcaatttcaaaagagatgggtagcggtcaaatgactaatgctctgactcacttcacagcacctggttgttgctcctgaatggcctggagaacagggcagtggctcaatgctctattccgcttggagggaaactacttggagggagtttcaggccccttcatggatgtgagtgaggagttcctaacagtcaccaatacgatggctaatatcctggtgaattgtataacatgaccgcagctctaaggaaataagactatttccttagagcaggagggcactggtaccttacttacaagactctccttcccatctgagaagacatactttttttttttcttaccacctctttgaaggctgaggttcaatttcagtttcagaaactggagtattgttagccctgctccatctgaaactggaagctttctagaaggaaagtcacaaggtaattactcctcctctgaaaacacatttgtgaacctattctgagaaagtggactttctgaaaatgatttatctcagggtcatcaccctgaaagctaaaacggaagactttctcctgtatctgcaatagtaaaacataacagcagtggggtgcaggggaaagagcccttgttgaggaatcagcagacatgagttctagtcctagccctgacctttacatgctttgtggagcctcacctaaggcactgtgtggagtcagtgataatgcctacaaaactctcggccaagagagtaactggaagagccaggacccaactcagattcatctgaggtcaaagctcatgttcatgagctctcaagaaatataataaatctcttcgagatggtcccacagctctgattggtatgctggacaggacttcttcttgttgtctgcattctttaccaagtccaaagctattggacaggcagaattacagagcatttgcaaggtgtgtgagtgtctggttttgttggtgaacccctctatacaattttagaagttggacttgctaagaagtttggactttaggtggtgtggtgtggggttgagtcaagtgatgaacaaggtaaaaggaagcagcaccatcttggtcaagaactctcaaaatttcattaaatagataatagatgggctggttgtgctggtcttttttttcccagcttcacagacacacaggtgtttcaagggctgttagccagtttccaaccccactgcagagatggactatgagaagttttgcccatgatctagacaagtggctcactccatgtggcacagcatccttaacactcccaaatttctttcccgccccaaaggtggatgaggtcttaaatagtaccaaaagagtttctttcttttagagtaaagctttgatttttgttaattctattttccccagaataattctttgagttgctatcaggcatttataaaaaggcccacagaattttagaatgttcattaagtcttttgacaaatattcactagaacttactctatacctgatgctgcacttggtctggaatctcttcagaagactggtactgataagtaaacactatgacattggacaggcagaattaccagacactgtaactgataagcagacactatgataatacagatactggaaataagtagactggtaccaaagacagaggagcagagaaataggagagtggttggggacagtggagcagtgaagtggcaagggacagagacaaacacagttgggggcaagtttgcccagtaaaagaagccttcaaagttctggatttctctgctaattccaaacagaattgttccatgacccatctctccccttctgctgatatttatacctacttctgtaaaactaggatgacagttcttaacctgacagtattacacaaaaactaaagagatgctatatatcaagtgtagcatagaacctggcacaacgtatataattgaaaggcaggggaagtcatagttattactaccatgatgataaaagtacctgtaatctgatagaaagacaggctacatcctagtcacgaaacatcactttcagtaaatattggagcctacattagaaattgtcaggattgaacttctccaattagacactgagaggagcctcagaaagcacatatcagagcacaaaaggcaataccaagcctctcctccttcaaagatccttcctttcttgacaattccaaatcatactaactttccttccttgtgacatgttgatatcaccattacacatttcacctaacacatactgtcactgagtagcctcatggggctacaatgcaaagtttttgaacactgcaccgtttactgctcatcctcctgccaccatggtggggatatgaacagtctctttaaatagtgttaagttgcacacattctgctctcttcctgcctgcatctgggtaagaattctgctgtcttctccatgtccaggttttaagtctgctagtctgtctacaaggttttaacagtgaagcagaaatgacctgcagaacagcatctctggatagaaagacctagcacaggacagagcgagaatgcctccaaaaatacaaattcctcaggtttttttggaaaaatacaggcaggagaggcttcccctaaggcctctgagaagatctagattatcttgtgagatgcatttatgtcctgagagcaattccaggtcacacaggaattgcatgagctacattagcatcacagtaaatttgacgtgagtttatgaatatcaattataatatttttaaacaagagatctaatgctatctccgtgtctattaaaatgtaataaatattcaagacacttataatgtacacataatatttatagactgtgattaaattatatgttccaaaagcaaaatgatatatttcagaggctctgtaatctagcaatttggttttcaactccagctttgtaatttaccaactgtgtgatacttgtctccatgagtctcagtttacacagagtagtcatgataaagtaataataaataacctttatcaaggacttgcaatgtgcaggcattgtgcttagcactatgcgtgcattaattattttaattatcaaaacaatcctataaaatgggttcaaataatgagcttctcaccacgatcaccattttacgtataaggaaacttaggtttagagaaggtaagtaattcccctaaggacacaagttaatgtacatatattatcttatttaattctcacaacaacagttctagggaggtgtgttttagttgtgaaagctgagtatttcggagttgagacgacttgagtaaaggtagtagtggggtcagtggggctgcattttgagaattgttctgactctaaacttcattaacttttcaatacttcaagatccctcaaagaaacacacacacacacacacacacacacacacacacgatatcttaactctgcagaaatctcttattgattgagaagattgtgtcctgcaggttcccagacagaagcaaatcccctcctgggaggagggagcttttgccatccttacaagagcagccaacaaccatttttgcagagctcaagttcccccagacaattgattcctagcacttaggagagtgacctagatggaaagttggcaagaatcctagatctgtcataaccctattctcccacactcagccttcttgccctcagaagtcatccttaggtggatttgatatcttttttaggtcagcactcactatggctttatccaggaacaaaaataacatcagcatttcatatcacccacagcactgtggaatcaggctggctggctcaggtcctccgtctgccatctgctagccatgcaagggcaacctcctcatgtgtgaaacacctggattccaatactgttgtgaagatcaaacaatattagcttttgaataactcatgggcatagactgtatgttattcatctccatcttcctggggcctgggaaagtttgtgctaataagcatttggtagtgaatgaataaacaaatgaacatataaatgaggaatactctataaatcataaatcaccacgtagatcagggttagggccatagaacctatacttatgtaaagttatggatttctctcctaattccaaacagaattgctccatgacccatctctccccttctactgatatttatatctacttttgtaaaaagaggatgacagttcctaacctgacagcaatgtttttattcagtttttaattgcttcagtctcatggcctttattcctattctgtgaggtaaggaggttgctctagattgtgcccaagaccccctccagtgctggaattccacgattctgttgtactatatttgtgctgcatccttatatttatttttttaaattttattttgaagtaatttcagatttacagaatgcttgtaaagacagcacacaaaattcatgtatactcttcacccaggttcctctaatgttaattttcataactctagagtgtctaggaatgctaagaaatgctaagaaattaaccttggtataacaccaaactgatttcatcagttcttccacaaatgtcaaaccaggataggttactgtgcagcatttagcccttatggcttttgaaataaagagtttactttcaatttttgaaattgatcgagaccttaagattattgagagaatgaaaacctgataaaaacttcattctgcggcggcaaagtgtgtcagccatcctctgtgcatgttttagcgatccttaagaaatcttgaaagaccatcctgcatgttggtaaatgcaataaatcaaaatgagatgtgaacaatacagttggaacccctactatagacactggaatattgggaatcaaagacataagcaaaatggttcccctgtgggaaaacctgcaggcctccttgcggagggccgtggggacactggctggggtttggactgctgatttggtctttcactgcatatgtattgagggcctgttatgtaccagcacttgtctaggcactggggatacagtggtgaatgagacaaagcccctgtgttcatgaagcttatattttagtgagggagacaaaacaagaaacaaatgccaatcaggtagtgacaagggcattgtaggaaacaaagcaggctgagggagtggagacagcgagatgtgtggggagaggaggtggtcttggaaagcatccccgaggaagtgggccctgtgagtactcaatactcagaaccatgactcaggacgactgccctgaactacactgaggcttggtcttgcttagattagggaaatagtccgaccatggaaaacggagttcccacccaacctctccaccttcaaatgcacctcgatgctgccatagccctgttgcatagattctttctcctcttctccagtctgtggcttgtcattgaattcataaactcagctctaacacaaactgccactccaaaacttctccttgagattctttgaagcccggggtaaaaagtagataccaataaatggaccacttttcctctgaactcagactccgtggaaagctggcttgcccaacatcagccacatcaatttcagattcactaaacttttactacctgcccatgatgtgctaggcatttgttttagacttcaatttgctttagagttttcttatactttatcctacaagtatcacagtaacacaagtagcagcttgtgaggtgggagtcacaccttcctttttcttcctttgcttttctttcctttccattcctttcctttcctttcctttcctttcctttcctttctctttcccttcctttcttccttccttctttccttccttccttcaatccttccttcctccctccctcccttccttctctctctctctttctttctttcttctctttcttttttgccagaatgagataccgaatgtcacagatacaagcaggagctgtgaatccaggtttcctgcatccaagcccagggctccttccgctacacagtagctcaatctcactagaaaatttcaccttcatcttattccacacaggacccagtgccctacagcctgtgctgacccaagttagagcagattccctgagaacaacctaggcatgccctgggatggtgaaataccactcatggggacccaggtaaggcctcctggtagttgttagtgccagagaccatcatccaaacttcagaagccggcacttgaagaggtgattttcaacagagaaactgtgatcaatggcagcaccacagaccactcagctatgatggcaacaccttttaaagatggcactttgattagaaagattttctttttagcagatcctatgtgctattgtcaagcctatattcgagactcctcccctcttttaaaataaacctgaaagctaatttggttatacaaggcagcccaactgcacaaaaccatcaacaactgttccctgagaacagactaagcctgtagccaacgtcagatgtaatagctccccagcccataagcaatttctttccttacagatttttcactgagactggaggctgaactcaaaggcataatcatttttaaaagtgcttccagggtaattcgtgtcagtcctggggcagctggatcttattgtaaagaagttgttttgcatgtttgtgagttttcaaccctgtgattagtagacggggagaaggaggcaacagagggtggaaggaggaaaggaaaccaaaattactagacactgcacacccaaaaatgccgagtaagaggaggtggaagaggtatctcgcctatcagcttttcccttgactcccatgggccaaataaaatcatgttatttcaccttcttcctcttttgcttttcttcaaatagtttgggagttcatgacaaaccagtcacagttggcaagtttaaaactaaacatcatttggcttctctctctagcagggatgaacacaaagatcaacagaatgcaagaaaaagccaagagtgttttcaggggtgagccacagctctgtggagccttcagagatcatgcagcctgactgctcactttccaaatgaggcgggagactggagggctgagcgtctgggccaaggtcacaccacaagtcattagaaccaggatccagacccaggcctcctgattcagagcctagggctcttcctctatggcttggggaaccatggctgagtgctgcttgactgtggcacaaaaaacggctgttagaaaggagtcgcacccatgcgatagtgctcctgagaggtgaggactggagggacagttgtaattaggtcattgccatgctccacattaggcagtgggcctggctgtgaggagtcatggagacaacaatcaaggtgagcctggtctctgaatcagcatctgtcagaaggggttttgaataactaaatctgctcaccagaggccatgggggtggatgagaatggcccacaaaggctgtccaagcagcctccacagccccggcaccctcacctgctgctgcctgtgtgagtcctctccccaccccttctacagtccggctgagcccctccacagtcctggtaaccaagtagggatcatccctctggggctgggcttctgctgtggtcttgcaggtccccaccctctccaggaggaagaactgccctgaatctggtcctgtggcactggctctgctgacagagtcagctgtcgggtgggagcccactctgggtggaggcagcagcctctcaggagcccgtcactgtggcaaagtacaaactctttgaagcaaagactctgtggatccaaaccccagctttctagccgaggaaatactggatctctagactgcagtttgtctacctataaatgggatatacccttgttttgagcattacacgagatgatccacataaagcacttagcatggagcctgctcagggtaagcactcaataaatggtagctgttgtcattacttaaaggcccgctctctttcctggctcccccacccatcggtgtttcttcctcttggatttcccatcatcacctctctactggttgtgtcccccagggttctatgctttttcttttttctattttcttttttttttttttttgaggcagagtcttgctctgccacccaggagggaatacagtggtgcgagcatggctcactgcagcctcgactccctgggctcaagtgatcctcctaccttagcctcctgagtagctgggaccacaggctgcatgcaactacaccgggctaatttttttttttctgtagagatagggtctggctgtgttccctaggctggtctcgaactcttgatctcaagtgatcctccctccccagcctcccaaagtgtttgggattacaggcgtgagccaccacacctggccagattttgtgcttgacccctccaatccccactacactaagtacttgttgccacacatctgggttgctctacagatagcacatgcagcagccctccaggtgggcttcctcctccctggactgcctcctccgttctctcctccaagcctcctagagtgctggctccatctaggctgttgtaaataatcagcctagcagtcagtgcctactaggatgagctcctgaccaagcacctgggctgagacccagctgagacaatcacaccccacaaaaaagtacaagctcgaaaaaattccatgccactgcttaaggcagaatgcagtcaggggaagacagcacctctctccaaaaccctttagtaaactattttccagcaataaaacccactttaaattcaggcagagagaaggacctcagtactcataattgagagagcacatttaatcaaggcagtagacagctatttaattccactttcttttgcctaaatgtccttgtcccctcttttccattcacttgctctaaatcaatagttctcaaaccctccgtgctgagagatcaattgtttatttttcttgttcccaaactactgtgggccagtacttttgtaaaatggtaaaaataaatttctaaaaaagaaaaatgccattccgatggcacagaaagttttaatttctataaagtttattactttcagtttctgtacatatcttttggtagtctggtaagcaagcttctcgccgacctacaccagcccctggcccaaactgagagtaggtagaacagcttctggaaggaacagagccacagaggagtctgtctcccacagacactccccatcccaggtttttgtcctgtcatgtagtccgctcagcagcagccctgctccacccagagcatgcagtggtgaggtttggggtgggatttgcccaggctttggttactgatattccttgagagtctagcagcccccaggaggagggatatgcagagatgttcccagccccagtgcagtgcagggactggcccttaccattccatgccagccctgttgatctcctcccaccagcactccgtgggttccccgaggctctgtggcgtgggcatgcaggcgtagttccattgtctgtcagaaccttccttcttgctgaagatgctcctcacggccactatcacctgcccctggggacactggtagctgaagccttgccggttcaaattcacccacccatcatcgctgtagtcatgatactgctggtatgggtatccataatcgccatactggccccaggccatggtgactaggggcagaagtacccagagaagactgaggtccatgctgcctgggattttggcaaacaatgtcactctaagattgctggtctgaccgttttatatagctgccgctgacatgtggcttccagatgtgggtgagaaggatccaactgcagtgtgtcattgcttaagcaaaacttttccatgctgagatgtcagccataaggacattcagcttgttttaaggtggaattctaggaatataccagcagcatgtaagtctaagaagctccctggagaaagaacaactttgtatctagattataaaagccaactgctgctctaccctgtagaaatattcacttgaaaaacactgattagtagcatatttgtccctcacctttcagcacctcacccctttctgtcctaccctacccgctactagcaaacccctgtatttgttctccaaactagccttccgggccacacaaatacccagacagtgatttcaaaataccgaaatcatagactgaagtaacagagccatctaggatttctgtaaggctgaatgcctgtttttttttttaagttgtcaatccaacactttttaacccttgagtataagcgcgggtataccagtttgcagggctactctgagaactcataagttgcataaggaagtactatgggcccatggggagataagttggatatgatttctacacttaagcattctaccatgctgctgaaattggacccagtcaagtctagaaagtgtgctctgctctcaaaatgtaatgggtttaatctaaataaaccccctatttatccttcagtatttttgccctcacattgaattttcttttcattgagttataatttacatataattaattcaccttttaaaatacataatgtacagtaacatagccagcaccctaatcaagacttagaacagttccatcaatccaaaacatccccttatatccctttgcagtcaaatcttcccaaacacccagccattggtaaccactgatttactttctgtctctatggttttgccttttccagaatgtcaagtaaatggaatcataccacacgtagcctttcatgtccatctttcacttagcataatgcttttaaggttcatccattttaaaattcaacatctcattgtatgtgttagtattttgtttcttgttattgttgagtaatattccatagcatggatgtaccacagattgtttatacatttactagttgaaagacatttgggttgtttccagtttttgaaaattcattactttttatgtaatgaattttatattcattatattttatataatgaattacataaatgtaattataaagttgatataaacatctatgtataggtttttgtgtgaacaaatttttatttcatttgggtcaatacctaggagtgagattgctggttcacaaggtaatgtatgtttaactttaaaagaaactactgaggccgggtgtggtggctcatgcttgtaatcccagcactttaggaggccgaggcgggcggatcacgaggtcaggagatcgagaccatcctggctaacatggtgaaaccccgcctctactaaaaatacaaaaaattagccaggcttagtggcgggcgcctgtagtcccagctactcgggaggctgagacaggagaatggcgtgaacccgagaagcggagcttgcagtgagccgagattgtgccactgcactccagcctgggctacagagcgagactccgtctcaaaaaaacaaaaaaaagaaagcaagaaactacctagctgatttccaaagtggtgataccattgcccaccactaccagaaaattgccattaaaaaattttagctattcaaataggtttgtagtgatatttcagtgtggttgtgattttcatttctctaatgatccatgattttgagcatcttttcatgtgctcattacccattccatgcatccgttgatgatttggcttttcaaattttttgaaacctttgggcatctcttaagcacatagtatttcccatttctcatcagtattgttcttaaagtttcttagaattgtgatcatagaccaattctatctacagcctctgtgaagtttgttaaaatgtagacagtggctcttctccaggcctgctaaatcataacctcacaaggggtgctcaggtatttatattttaaaaaattttccaggtgattcttattcacatcaattgctaagagtcaccttcctaaaggaatgtggagccagagaaaaatcacactattaatcccaccatctgcctagcctgtggcacatttaccagacggtattcagtctagatcaaacaccaagatagtcttgaaagggaaagacagtcatacatgagaataaagcaacaagtaactcgtgtgtgtgtgtgtgtgtgtgtgtgtttgtgtgtgtgttgggcatgcagttttctttgatgatcatggttactgaagcgagggggagaggatctgggctgaacagctatgtgaggcttagttttgtttttagcaccatcttctcccaccacttccatccgtaagtaactgcccagtgctggcatcggaattcttcctagcttagaaggatctctctgattcatgatatgctgaagcaatcattctccaccttatcagcatttaaggattacctggaaagcttttggaaacctccagagtctaagcaatttctggaccaatcagatcagaagcttctgagcagggtcctgacaatgacgtcctttgaaaccttccctataggcttctcaccggaagccagggttgagaacctctatgctagagggtttttttttttttttaattttttcagtttatcatcctgatgctcatgagttgtatcttgcattctggacatgatatgagctattttaaaccttaaagagctctaagagacaaagcagattatcataaacactcatctttattatacatttgttttccaacaatttccagggcctctgcctgatctccactctccgcagatttctttcaactacagctagaactacctcagctggattccctttaatgtgcaaaaataaatatcttcatgctatggtccagttttaatatagatttctgttacttaaagctgaaagcaacctaactcatccagtgtctcaggagattccagaaactgctgatgcctttgagagagattctggtggccgcatagagaatgatttccatacgcagacattgagaacataagattaatgcatttacagttgaccatgtgttttcaactaggttactatgttatcttcctcataactttatatgttagtgaggcattattggaattagtttctcacagatggggaaactgtggtgagagaacattttgggccaaatttctagaactggaaggatatgaccccatgtcttctgattcccattctgcaatgccttccatcatttcatcaaagttacagttactaattataacatttatgaataattgtcaaataatgcacttataaagtatgtatattaacatacacatataactaatttgcgctacgcatttctgctgttatttgaaaagtctactcaatagaccctggggactttaaagaactaaatgttcaataagtagtttttggggtgttgctctaaaaccaacagcatcagcgtcacctgggaacttgttagaaatgcaaatcctccggcccctctcagacctactgaatcagacactgtaggagtagagcccggcaatgtgtgtttgaacaagccctttaggtaacttgatactcactaaagtgagaattaccgtatagcagataatgcagaacactctacccaaattccaggtgtcacttctcgagaagttatgtagtgatactgaagcctagataactcagttcactaattttgattctggcgcccacacaattcaccactgggctatcttacctcctagtagataatggacttgagatattttggagattctgacaaagagcattcaaaagtctccatgattcttctttttcttctacctcttattcttcttttctctctccttatcctcctccttcttcggctgtattgagatataattaacataccatacaattcaccacttaaggtatataattcaatatatcccttaaattagtatgttcacagagtttatgcaaccaccaccgcaagcaattttagaatattttaaccacccaagaaaccctgaacacatcagtagtcgctctccatttcccttcatcctttagccctaggcaacaatcaatctactttgtgtctctatggatttgtctgttctggatatttcgtatgaatagaatcattcaatatgtggtctttcatgaataggttctttcatttagcataggttttatgttagcggttcataaggttcatccattttgcagcatgtatcactagttcatttctttataatgccagataatactctacagtatacatctaccatatattatttatccatttacaagttgatggacatttgagttgtttccactttttggctattatgaacagtgttgctacaaacatgtatgtagaagtatatgtgtggacatatgttttcatttctctcaggtatatactcaggagtggaattgctgggttatacggtaattttgtgtttaatcttttaatgacctgccaaactgttttccaaagcaatcgtgccattttacattcttaccagcagcgtatgagagctccaatttcttctccacatcctcaccaacgcttattaagtctgggttcttctgaaaggtgtaggaactcatagccactctggtgacactttttgcgacctggatccactcctgtctggcagctttctcaaacatataatccctttttgagagattctgaatataatactttgcccgattttaattgagagcacctagaatggccctagaatcaactcattcctaagttacttttacactttctggattggggtagctgctattgtatattgggagggaatgatgtagacttacagaggtcaccctggagcagacctgatccactggagaattccagatgtgacgtgctggccccgaggagggctgctcagacaggagaaggcaaggctcatgctagtgcctgggtgaagctggtagccccagatgaatggatgcttaacccaaaatattgactgtgagttattggaggattccattttgcctgctgtcttttttcccttttaactcctgtgtataatcaggacttggctgcagctctaggtggccagagtactatcacaaacttcccagcaagtgtatgctgagccatccgtggctttcctccaaaatgagtctgtgccagtttcacggtttagctgagagaggcattcaatagcctcagtacacccaggctgtcctcaccttcagcaaacttgccacccttgcatgacccattgctttttaagatcatttgtggaacccactgtcatatcatttggggttagccccgagggccaccaataaggttaaaaatgctcatactggaagcagcaggagaaagagtgacaatccaagttgaggaaatagagaagattgggaggagtagaataaggtgcacctactgtgtgctaaatactgtactatgtgctttacatatgatagaccaattgaccttccagcagttctaagaaaattaggttcagagatcactggtagctcaccccaattttcacagctagtacagaaaggtgacttgaatttgttagtaactatactaccccaagtgccaaatggtcacagcagggcctcagagcagtggcagatggttgtgagaagagcagagactcctaaaatccaaatatctaagttaaagttctggttctgcaagtaatcaaaatgaccttttgatttgggtcagatagttttttgttgtggaggctggctgccctgtgtattataggatgttggacagcatccctggcctctatccactagatgccagtagcatcttctcttccaccactgtgacaatcaaaaatgttccagacattgctaaatgtctcctggagggaaaaatcatctctggttgagaaccactgaatcagacaaaacccataacctttgttttatcatctgtaaaatggaggataatcacaacaccagccacttaccacgagattattgtgacagtcatatcaaatagtggtcttgcaaagactttgtcaagtgtaaagcttgaaacaaatgtacgttgttagtctgacctcagggtaacactagaagctggagttgagggaacaatcatgcatattagtgtaatgaacagccccaggactccgcagggcagaagagtgttcttgtgcagatgatgactggaggggtttgggaatgagtaaagctgggggaatatggctccaccactctctggagttccattaatatgtggatgaatgtcaatcgcagaggttcctgagagtgagtttgcagggagaggtgtcaggataacagggctgagcactaaaggcagagtgagggtagagaattcaggaggcttgggaacagtaggcagatggaggagctatcgtggtggagaagaagcttgggaacttgcgagcttgggaaccaggactgtgtcttggggtgagagtagggatggggatggggatggggtgctgctaagccaagttagctctgagacactcacagaaggaagcttcagggcccaagtgcctaattagtgttctggggtctgtgaggatgaatgaagcacagagatgtatgtgtaggtgctggaaatattgctttagtaaatgtattatatgctcataagtggaggaacagagttcaggatactggttacaacctctgagctcatgactcgctagagaccatggttaaaaaaaagcgcgggaggaggttcattggagagatttggttacaaacgggggaaaagaaagaaaacaatttaatcagaaagtgcttaagtgatgtcattttaagccaaattttctaatttgaaattgggtttttaagtgggtaaacctaaagtttataaaataaataacagcccctttcatttgtgtagcatttggcacgatgtatataaaccacacaatccagcactcaataaatatttattcttttccatgtgcagggatttaacagatctcagttcatctttgcattggtgatggtagtaaagttggctttcttatttccattttatcagtttggaaatagaggctttgagaggtacagtgatgtccaaagttacagaaatattgggtgacagggcttgggcataagccaaagttccctagtttgagccctgccagttctcttggaggacacggcattgagggatttggtgacacatcctttagggaagcaaggtggccaattctagagcactttgccagttcacacagtttgtccaagcctttccctcctacaatcctgaaggcaggtggtgggggcagggctttagcaggaggagcagcctccctgaaaataacatcctcccatacaggacatctctgctggtgccgtcctccagtgcgttttctgtgtgctgcttcctctgatcaagctcggcttgctctttaaccaagattcacgcattcttgctcccattcctgaagctacagattggcacctcttttcggcattgttcaatcacggtacatcaacttcagataatggacttggtcacctaagaagcatactgtctctcccagctctaaaaacacacacccaccccaaagtattgatacatgtgaggtccacagaccacctgcatcacagccatggaggcatgttagaggaagattcctgagtttttgacagccttgcttcagtggaatcctggaggtggggtcccggaagctgccatttttttttagacggagtcttgctctgtcaccaggctggagtgcagtggcgtgatctcggctcactgcaacctccgcctcccagttcaggcaattctcctgcctcagcctcccgagtagctgggactacaggcgcgccaccatgcccagctaattcttgcatttttagtagagatgaggtttcaccatgttggccaggatggtcttcatctcttgacctcatgatctgcctgccttggcctcccaaagtgctgggattacaggcatgagccactgcgcccaggcggaatctgcctttttaacgagctttcccacatgacttttatgcatcccgaagtgtaaaaccacaggctaaggtgcataaggatgtttatgattttgtaagcttcccaagtatgaggcagaaccaggcagggctcctctgccaactaccctgtcgttggttacagtagaaatactcccctggctctgtggcctgtgggctctgctaagggctttgcaccctaatcctgctctcagggagcccaccacttgcctcctgtcacacaccacccacacaggcagtgacagagcagaactgagaactgcaggaaaggcagcagctcagccttcttctcatgcctgtcaacagcctggagctgagcacgctgcacactaatgagtactattttctaccccagctttttaaaatgctgcaatattaacaactaccaaaataattcaactctctacagcagtgggttggcttagccgaaaaagacaccaacggggctatggcatctttgctgtgttgctaaagccctgcagagtatatgcacgtgcacatgcactcaaatagaaatgcacatactttaatttatcaggaaaactaaatgagacaatacatgtaaatgtaccgtgcttggaacagagcctggtactgctggtacaaaaaacaatcagatgtcattttgcaaggggatgtactgaatattccctatttacttttcagatctttctctttcctgcactgtgttctaggaggctttatgtgctaccttaaggtgctctcttgccctctggttcctgcttgggcttggccaatgagaggcaccagcagaatatggaaggatcaggagaggggtcaaaatatgaattcccctggctccctgccaccaaggcctggttggcagtggccaggtttctctccatgcagccttagcttttgctggctggccccctttccaagggaaatgcttctgctaggttccagcaacctcactccctcaccctgcagctttaagactataggggtgatcttaccgtggtttatagctgtagctggccctgggatgttcacaattaaccctgctcacatctctgtacatagttatttcattaattctctccagtcactactgttgaatatggacctgtttcctgccaggacctgactgatataaggaacaactgtctggatttgatccaaggaagatcctgaaacaatatgactgtctccagcactgggcatctgtctccagtttcttgtggtccttaggtgctcatggggagaagaaagtcctccccagctgtgtgatgttgggaagcatccatgtgcttccctcttcaatgcaaagccagcaccacttccaccatttttctacccttaactctaatatcattccatccaaacacctctgtaaccatttcccttcaggaagtcaaaggtaacccttctcctgaaaatcaactgggaatccctctgatttgtccttatgtgtgtgtcaggcttcccactaggccatgttgtccctgggcctggagatcctcctgagcaaaggaaagtgagatcttgccaacctgcatgcttacatcagtaggtctaactgtggtacaaacttttatatccactatattgaatgtcatctccatactctttgaaagacacatcctctcgattttacaagtgagggcgatgatgcttagagagaaaattgcccagggttatccagctggtagagaagatctgttttgaagcctgttataaaacaaagcttgtgctctcaaaatgaagaacctctcagggttgtatcagatcagaaaattccccacactctcacaggactgcataaaccccctcagagcccttattccaatcacaattttctatgtatttgtataattatttgataacatctgattccccatactagactataagttccaagagggccagtcctgtgcctgattttacatactgttgtttcttcagggtattagtactgtgtctgctgcattgcagacattcaataaatatttttcatatgtctgttcactgaaatcaggagactggaccaaatgacctgtgaggtcacatgcagtcttttgacctcataaggatctaccttaaggatcaagaggtgaattctgtttatccgatgcctcccaagatatgaaatttagatcaggaagtagctcagaaagtacagtttttggccaggcatggtggcttatgtttgtagtcccagcactttgggagactgaggcaggagtatctcttgaggtcaggagttcaagaggagactggataacagagcaagaacctgtctctacaaaatttttattaaaaattagctgggcggccgagcgtggtggctcacacctgtaatcccagcactttgggaggccaaggcgggcagatcatgaggtcaggagatcgagaccatcctggctaacacagtgaaaccccgtctctactaaaaatacaaaaaattagccaggcatggtggcagatggctgtagtcccagctactcaggaggctgaggcaggagaatggcatgaacctgggaggtggagcttgcagtgagccaagattgggccgctgtactccagcctgggtgacagagcaagactcggtctccaaaaaaaaaaaaaaaaaattagctgggcatggtgcatggcttttgtcctagctacttgggaggctgatggaggaggatctcttgggcccaagagtgcaagagtgcaaggctgcagtgagctatgattgcaccactgcattccaatctaggtgacagagcaagacccagtctctaaaaacaaaaacaacaaaaaagaaagtacagtttttctgacttttcattgattgacagatgaccccagtatatctgagcagctgctgtttggtaagccagacaacaagccatctgaaagcaggaaagacgcctttgcattcaccactgtgtccccagagcccaactcggcctggtgtattgattacggatattgaatcagtgttgtcttgcacggatgacttgaaatagacccacatcaatgaagtaaaggcactctccgctcctcttttctcaatttgtaccctttatcctaaaaaatgctttcaggagtcactgaagcaagacttgaaataatgtgaccttctgggtagtaatattacagaaaaaataataatgaaaagcacatcacgtggcaatatccaaaatgagatggctttagagaaaaaaatataattcaaaaaacgaagaggaaaaactgcaaaaatgtcatgttttgtataccaaaataacctatagcttcaactaaaagaaaagtctccaaatgcacaaaatgcaaagaaatttgtttttttcagatatatgaacataatagtatcataagtagtgtcgtgtaaaacttattctccctttttctctctatttacctatgtgtgtgtgtgtgtgtgtgtgtatagatgtgtccattcctacttagatggcttctgcatcaaggtaactattttttgtaacagtatggctagatcagacagctcatctcatttgaccatcccaaagaaaatgcattataacccacaatccttagtagctatcaagtaactttatcaatgatcagtacttcctgagatattctgattttaagaattttgacctgatgccttacaaaggcactaaatggtccttgttctctctcaggtaagggcgtactggctcagtctatcttaccacagccaacagcacataatctaagacctggtgtagtgggttacatagtgtcctcccaaaatgtctgcctatcccaaaactgagaatgtgactttgtttggagcaaagatctttgcagatgtaattagttaaaaactcaagatgaagtcatactgcagttagagggaggctatgggccaatgactggcgtccttataagatgagaggacatagagggacacagaggaagggatgataccaagatggaggcagagattggagagatgcatctacaagccaaggggctcaagggattgctgggagccaccaggagctaggatgagtcaaggaaggatacttgcttagagcctttggaaggaatgtggtcttgatgacatcttgagttttgacttctggcctccagaatggtgagagtaaatttctcttattttaaaccatcagattggtggtatttgtgatggtatctctaggaaattaaatcatctgggctcaagggggttccatcattggggtgtacagtcatccttctagttacacctgagtgaataccacgcaatcgtggcaggccttctcagcttctctaaaccaccttccttttctctctgacagacgccacttgcaccaggttgtccctccacattttaacttggatggaacatcagtgtctgcttcctgagcagctgctaagctgagggactgcatgacaaactctggcagtgaggggcagggagctcttggggaggagaggagggaatctcaagcgaaggggaatgagagacggagggaaatgtgtgaagaaacatctctccttcctttcttccttccacagtctgctctgaggcacactttctccttgcaaacattctagagaagtccaggtgcccaggggccacatctgctgaatatcacctcacacatcccctctttcctcacctcatcttcactgggatttgcagatcccaaataaagcttccttcacatttagtactcaccacagactccaacatttagtagaccccggcaagacaaggtggcataacctcagcaaattaattagtgtttctgtgcctctgtttttccctctgaaaaattagcagtttctgcctcatacaattgtgagaaattaaataaatcaacatatgtaaaacacttgaaaggtgtcaggcacctaataaatggtaaatgatatgcactgttatctggcttatggaggttttcattctgataccaaatgttaatgagaattcttcatcaaaccctaatcctctagaaacaatctgataatcatataatatcttcttttaatgaggtcagcagaagaaaaagaaatgcaaaagcaacatattaggggaaggattattaggtggaaaagggcctgagagagtaaatatttttttttccaggtctcagtttataagttaaaaaaaaatcctgagaaaacagaggaaaaaaaattcattcctttttacaaaggcaaagaagtacctggcttaactcagtaagcaagtgcagcagcagcaaccactctatgacataagagccaccatctgcacgggatgtgctgacaccatgctaagctctttatattcagtatcacaattaatcccacaactatcttttgagacaggattatacacatttagacatgagaaaactgtttgataagaaaaggttaattaattgccaaggtcacactgccaaatagtggagcacctgggatttgtacccaagaattctgactttaaaattcaccatctcatctttccctatagtgtgaggcagtctgagtctagctctaaagctagacccttattacaatgctggatgagtcctaaaagagtagagtataaaatgctaattttcccatcgaagcaatccttgtctctaactacttggacaccctacaagtgatattgcatagttctgaatggaggtgtcccagactctacaatttttgtctccttactgtcttgttagtaagagctaaacacacacatgtgtaaacacacacacacaaccattagcaactgaaatagactcatgaaacatcaaaaggtggcttataggcagctcgtgatttcaaatcatgatacttaaagtactctgcagcacgccagagacagcagcctggtgggtgaggctcctggaacacgcagcactgccatagcaccgatcgtcccagagtcaagagcctcctgaaacactgccatctgagcaacatgctaggtccctgacaaagtccctcccatgtttagctttcagcctcccctctgacataggcacttccctccgctggcctaagaatgatgatttagaaggtgtgtagtgccctaaattggaaagggcagtaattttcctgaacaacaagaactgacattttcccatggctgatcagagaggaaccaacactgtaatgctagtcaatcccttcttagagctccctggataaaagatattataggagcattaagtatcattgaagttggaaggaagaagaaaaacataggaagtgttttcacgggctggaatggaaggctctgagtcagggatagctgacagttgcctttgcaggtttcctttcattgtggtgtcaaagacttacctttacgttagcttgctggccaccggtcagactgatgaacagtattaaggacaagaatatttcctcagaaagtgtgttcttaaaatgtactcatactcatgagaagtgagttataacctatgaaagtaccttgtgtatgtggggaaatggctgatctctcttccattctactttctgtttagaatgcactgtgaaatagacagttaccctgaatgacttgaaaacttaagtgtcactgattcctggaatgattgggtgaattgtttataaataatccttgtgccactgtaattagagttatgtgaatcctatacctggatctaaaaaagcactcttttgacaatacacattcttcccatccaggaatgtaatacgtctatgcactgattcaagcaaaagcatttattaaaacttgctggggaccttggataagtcatcaaacctctctgagcttcagtctccacatttgttaaacgaagggattgggttaggtaagaggccttttccaactctaacattcacggattctatatttaaaatatattcttgaaaggatgaatacttttttttagcattgataatacttctgtctctgaaacctcaacatcactattaaattattagttatgggacagaatcggttactgagaaagatgaggagctgtcctctcacagtctgcccctgcttcttcccaggaacggtatgattcagtcacatgaattacatctaggtacctgaaaacaccatgatcattcttacttcctggcctttgtctggtcttcacatggcatggaacactctgtgtcctcttctccattcaccagactcaccccaattcaccctgcagacttcagcttcagtgcacctcccctgggaagcctcgcaaggccctaattcaccctgcagacttcagcttcagtgcacctcccctgggaagcctcgtgaggccctcccagctgcacagtgcccctcctggcattcctgtttcgagtgttataccacttcccaaactttactgtgcttaactgtttgctttctagaagctttttctttttttttttctttaagttttagggtacatgtgcacaacgtgcaggttagttacatatgtatacaggtgccatgtcggtgtgctgaaaccagtaactcgtcatttaacattaggtatatcgccaaatgctatacctcccccctccccccaccccacaacaggccccagtgtgtgatgttcccctttctgcgtccatgtgttctcattgttcaattctcacctatgagtgagaacatgcggtgtttggttttttgttattgcgatagtttgctgagaatgatggtttccagcttcatccatgtccctacaaaggacatgaactcatcattttttatggctgcatagtattccatggtgtatatgtgccacattttcttaatccagtctatcattgttggacatttgggttggttccgagtctttgctattgtgaatagtgccccaataaacatacgtgtgcatgtgtctttatagcagcatgatttataatcctttgggtatatacccagtaatgggatggctgggccatcatcgccacactgacttccacaatggttgaactagtttacagtcccaccaacagtgtaaaagtgttcctatttctccacatcctttccagcacctgttgtttcctgactttttaatgatcgccattctgactggtgtgaaatggtatctcattgtggttttgatttgcatttctctgatggccagtgatgataagcattttttcatgtgccttttggctgcatagatgtcttcttttgagaagtgtctgttcatatccttcacccactttttgatggggttttttgttttttttcttgtaaatttgtttgagttcattgtagattctggatattagccctttgtcagatgagtagattgcaaaaattttctcccgttttgtaggttgcctgttcacgctgatggtagtttcttttgctgtgcagaagttctttagtttaattagatcccatttgtcaattttggcttttgttgccattgcttttggtgttttagacatgaagtccttgcccatgcctgtgtcctgaatggtattgcctaggttttcttctagggtttttatggttttatgtctaacatttaagtctttaatccatcttgaattaatttttgtataaggtgtaaggaagggatccagtttcagctttctacatatggctagccagttttgccagcaccatttattaaatagggaatcctttcctcattgcttgtttttctcaggtttgtcaaagatcagatagttgtagatatgcagcattatttctgagggctctgttctgttcgattggtctagatctctgttttggtaccagtaccatgctgttttggttactgtagccttgtagcatagtttgaagtcaggtagtgtgatgcctccagttttgttcttttggcttaggattgacttggcaatgcgggctcttttttggttccatatgaactttaaagtagttttttccaattctgtgaagaaagtcattggtagcttgatggggatggcattgaatctataaatttctttgggcagtatggccattttcacgatattgattcttcctacccatgagcatggaatgttcttccatttgtttgtatcctcttttatttcattgagcagtggtttgtagttctccttgaagaagtccttcacgtcccttgtaagttggattcctaggtattttattctctttgaagcaattgtgaatgggagttcactcatgatttggctctctgtttgtctgctattggtgtgtaagaatgcttgtgatttttgcccactgattttgtgtcctgagactttgctgaagttgcctatcagcttaaggagattttgggctgagacgatggggttttctggatatacaatcatgtcatctgcaaacagggacaatttgacttcctcttttcctaattgaataccctttatttccttctcctgcctgattgccttggccagaacttccaacactatgttgaataggagtggtgagagagggcatccctgtcttgtgccagttttcaaagggaatgcttccagtttttgcccattcagtatgatattggctgtgggtttgttacagatagctcttattattttgagatacgtcccatcaatacctaatttattgagagtttttagcatgaagcgttgttgaattttgtcaaagaccttttctgcatctattgagataatcatatggtttttgtctttggttctgtttatatgctttatagcactaaatgcccacaagagaaagcaggaaagatctaaaattgacaccctaacatcacaattaaaagaactagagaagcaagagcaaacaaattcaaaagctagcagaaggcaagaaataactaagatcagagcagaactgaaggaaatagagacacaaaaaacccttcaaaaatttaatgaatccaggagctggttttttgaaaagatcaacaaaattgatagactgatagcaggactaacaaagaagaaaagagagaagaatcaaatagacacaagaaaaaatgataaaggggatatcaccaccgatcccacagaaatacaaactaccatcagagaatactataaacacctctacgcaaataaactagaaaatctagaagaaatggataaattcctcgacacatacaccctcccaagactaaagcaggaagaagttgaatccctgaatagaccaataataggctctgaaattgaggcaataatcaatagcctaccaatcaaaaaaagtccaggaccagatggattcacagccgaattctaccagaggtacaaggaggagctgataccattccttctgaaactattccagtcagtagaaaaagagggaatccttcctaactcattttatgaggccagcatcatcctgataccaaagcctggcagagacacaacaacaaaaaaagagaattttagaccaatatccctgatgaacatcgatgcaaaaatcctcaataaaatactggcaaactgaattcagcagcacatcaaaaagcttatccaccatgatcaagtgggcttcatccctgggatgcaaggctgattcaacatatgcaaatccagaagctttttctattaggttggtgaaaaagtcattgcggtttttgccgttgaaagtaatgacaaaaaccacaattacttttgcaccaacttaatagattttaagatccctggtggtggaaacgttatattattcaccgttaaatcccatttctagcagagtatctagcccattatagatgctcaataaatattcactgttgctattacagaattttaaaccatgagcagtgttaggacatccacatagtttagtgacagcacttcacctctaagcagtactttgacatgcatgactgtcagttggttcttctgagtgcatctgagtgttatggagtgcttctccatcaattactagcgcaattaagcgcccaacagatatttgggcatttatcctatggccagcggagaaacactctatttcacttttccgggatggagaaggaagtacatctcacaatttccccagggccctggaatctaccacatccttggtagagataatgcagatctgtgaaagtagcctctgatggggttgctccaaggatatttcatgaaagaatggcaaaggagtatttgttgccatttatggcaagcccaatacaaagctccaaaaacttcataaggaatagaaaaccccaaattgaaactgtaaggaaggagactcatctacaaattttgactggaactctagaaaaatagctctggaaaatagttttttgggtaaatatatgaatatagtgtgtcttatatattggtaagctccataaatattatccaatgatatattaatcacttctgcctctaaattactatctgatttttagctaaggttattcactttctttgtatgagctcctttgtttgcacaatgtggaaatgtagaaaggactactcatcttgaagggtcatggtgagaattagtctactcccatttcttccttattgccagtttaccctccagctgctaatattccagctgacaataggaaagcaatttgatggcagggatctagaaatcttttattgttattattattatttgttttgttttggccagtgtacagatttttattttatttatttatttattatttttatagtttttggaaaagaggtggtgtttggttacatggatgttttttaagtggtgatttctgagattttggtgcacacaacacccatcacccaatcagtgtacactgtactcagtgtgtagtcttttatccctcacctccctcccacccttccctcgactccccaaagctccaaagtttttgtttgtttgtttttgttttttgtttgtttgtttgttttgttttttgtttttgagatggagtctttctctgttgccgaggttggagtgcagtggcatgatcttggttcactgtaacctctgcctcccaggttcaagcgattctcctgcctcagcctcctgagcagcttggacaacaggctcgtgccaccacacctggctaatttttgcatttttagtagagacggggtttcactatgttggccaggctggccgttgtatcattcttatgcctttgcttcctcatagcttagctttcacttataaatgagaaaatatgatgtttggttttccattcctgagttacttcacttagaataatggtctccaactccatctagattgcggcaaatgtcattatttcattcctttttatgtctgagaggtattccatggtgtgtgtgtgtgtgtgtgtgtatatatgtgtgtgtgtatatatatgtgtatgtatatatgtgtgtatatatgtgtgtatatatatgtgtgtatatatatgtgtatgtgtgtgtgtgtgtgtatgtatatatatatatatatatatatatatatatatatatatatatatatcacattttctttatccactcattgactgatgggcatttgggctggttccatactttttgcaaatgcaaattgtgctgctgtaactacatgtgtgcaagtgtctttttcatgtaatgaattattttcctctgggtgatacccagtagtgggattgctggatcaaatggtagctctatttttagttctttaaggaatcttcacactgttttccatagtggttgtactagtttacatgcccaccagcagtgtaaaagtgttcctttgtcaccatactcatgccaacagctattttttttaaatttttttttattatgtccattcttgcaggagtaaggtggtattgcattgtggttttcacttgcatttccctgatcattagtgatgttgagcatgtttttcatgtttcttggccatttatatatcctcttttgaggattatctattcatgtccttaggggacatggattagtatttttttcttgctgatttgtttgagttctttttagattctggatattagtcctctgtcagatgcatagattgcaaaatttttctcccattctgtgggttgtctgtgtactctcctgattatttcttttgctgcacagaagctttttctttaatttccttaattaggtcccatttatttatttttgtttttgttgcatttgcttttgggttcttagtcatgaagtttttgcctaagtcactgtctagaaggtttttccactgttatcttctagaatttttatggtttcaggtcttagatgtaagtctttgatccaccttgagttgatatttttataagatgagacatgagactccagtttcattcctctacatatggcttgccaattatcccagcaccagttgttgaatagggtgtcctttccccactttacgtttttgtttgctttgtcaaatactagttgggtgtaagtatttggctttattgctggttctctattttgttccattattctgtgtgcctgtttttataccagtaccatgctgttttggtgactatagtctttgctagtatagtttgaagttgggtaatgtgatgcctctagatttgctctttttggttagtgttgcttcagctatgaaggtacttttttggttctatatgaattttaggattgttttttcaagttctgtgaagaatgatggtattttggtattttgatgggaaatgcattgaatttttaatttgctttctggtcctgggcttaagaaagaaaggaagtgaaggtatagtaataattaaagacaggaagttcttgatcagggttgtgaaagctcctttccctgtaatggattagagaggtcctaaagatcctagccagactacagatcaaatccctgctcttcaatattctttgatgtctcaagcaagtacagttaaactctgagtctccacaattgtaaaaattgagataataatatccagttctcaagattattataaggattaaatgataatcatgtctgtgaagtactcaggcactgcttggcacatagtaacctcttggtagttgagaatcattccaaggctatttttctagcctgccacaatcctgccaccagactccacattccctcctcattcagtaaacatagaagtgcagcctggaatgctttccatcttctgtctgtttaaaaaatctactcaaatgagtaggtgtgtggtggagtggcgaggggagagactgcggagtcagcaagaaatcctttggcagttaaagttatttgaactcaaagcctgtgttcgcccaactgtaaagtagggataataacattgtctgcctcacaggattcttgtataacataagaaaatgcatgtgaaagactgagcacaatgcttggtagcaagcagtcaataaaggatgcctattaactctgctaggcaataagagctcaactcagtagcatcctcctgtctgaaggtttttctgtaattgctccctgtgctgccataacacactgtctgtagtgcatttcttttcaacatgaaattgtcatattgccatgtgtaaaaattagtagcatatataaaacatctatacaagctcatgtgctccttaaggacaaagactgtttcagtgatgaggtcctcacaatcagtgggggttacatagtaaaggctcagaagacattgttgaactgaactgaaatgacaaattaaaacagaaagcttttctactaagatgataactaggaagacagttatcatgtcccctaaacaacagtaaaactagcaagaagtaaaccatgtttaacagtcactctaacatggatggtcaggaaattgattgcaagtgagaaaaagagatggaaataattgagaaaaatatttatgtgtcagaaagaaaagtgtgaatcaattactagagttatgaatattaagcaagttgcttgagaagcattgatgtacggatgaattgggcaatttttcccaagttttccacaaaaaggaatcaagatcactcagctgctgacagatgatttttacctttcagattcaacattatttactgtcacccagctaaagacaaaggagtttacacgttgtgtatgtaaatattaactgggtgatgactcacatttttatgggagctctataattcatagttatacgtgcagacaagcatcccactgagagactgggtgtggggagaagggcatggaaattaaaccactgcaagtttccacgcacaccacttcctccttatctgtgaaattttatcttctctgttattgtccaagacgctgttgtgcaaacccctcacatctgaaagtcctgggaagagaactgtggtatgagttttcaggaatcggggctagatatgggagtacttttccatgaaacaaaagcggataacaccccccgccctcaactccagggcttaatcaaaggagaccaaacccttgctataggcatcaagtttgtatgcaggatgaagtatggcagacaacgagggagggagtgtttattcaaacacatatgcagcccctgtcctaaatcagtgccaaattgggtgatggcaaacctaagaaatacagtgtctcactgatacaatcccagctcctcctcaatgttaaagggtaatttataagttaaagtgaaaagatttttttttccaagagtcttgctctcacacaggctggagtgcagtgacgctatctcggctcactgcaaactctgcctctcgggttcaagcaattctctgcctcaatctcccgagtagctgggattataggtgcccaccaccacacctggctaatttttgtgtttttagtagagatggggtttcaccatcttgaccaggctggtcttgaacccctgacttcatgatccacctgccttggtctcccaaagtgctgggattacaggcgtgaactaccatgccgagccaagaatattttcaaaaactaaatttagtatctattgtttgcctgaaaggtccaggggatattggtgttggtgggaatggttctaattcttatgttcctggaagtccacagatttctgttcatgcccaggatctgctgcgctcatggaggatgtcaggcaagttgcttagccatataagtttgggagcaggtgggcagtttcccaattggtacaatgagatgactggttagctcatctccaagacaattgggcttaacattttggagatcatagataacttggagaatctgatgaaaactgtgaaccttctttccagaagaaagtacatacatttgactttcaacatttcttttcagaaactttatggacaccttgaatttatccacggactgcaggtccgtgttctaaaggattgttgcatagtgttttggatagtttgaatactaagaatgaataccaagaggatgtaaaacacaagggcactgcttttccttcaaatataacaatttaaaattcaatattccagagatatcaagttaaaaatgaaagatctgatatcttccgacttttaatccatatagtgctataaagttttttttttttttttttttgagacggagtctcgctctgtcgcccaggccggactgcggactgcagtggcgcaatctcggctcactgcaagctccgcttcccgggttcacgccattctcctgcctcagcctcccgagtagctgggactacaggtgcccgccaccgcgcccggctaattttttgtatttttagtagacacggggtttcaccttgttagccaggatggtctctatctcctgacctcatgatccacccgcctcggcctcccaaagtgctggggttacaggcgtgagccaccgcgcccggcctagtgctacaaagttttaatcgaatgactaaattataagccttgggttccttttgtatatttttaaataaaactgaattttcctaatgaattaaactttctacttgcactatgatttcaaagatatttccccaggaaaaaatatttggctccaactgtgaatatacacaaaattatcacattttggtaagaactaatatctactaatgaaacctcattggcttaatttggcttaagaaacaccccctccaccacctccatgtgaccactgtttcagaatgttagaaaaacaaactaaagtattgatgacttaacagaagcactgtgttgatacagtcatagattcccttttaaaaatctgcttaatgaactggagcattttaaaaattgctccaacaggtcaaacaggagacatgtcaggtgggaagtgaaaggcggcaaacataggcaatttcgacatacgcagataatggcaagatcatgtcacaatcataacatggctaaaatctccatttggactgaaaagtattgggtatcttagtgctctccaaattgcctacttcttttttaacttaaaaatttacttagactgtcttatttatttatgtagttcccaagtccagttcagtatctggcacgctgttctcactgcacgatcttttacttcttcccatttttttggaaaatgtcagagtaggaggaagcagaaagatctgtatgcctctcatcttcctgttgtagagactgaaatcctattagattcagttccttgagccaaggtgttgagtccccagctacctccctttctggtgtaaatatttctggaatgtgtaacacttgaatgagatggtaactcatgaatgtaatataaaatatggtctcccagttcaatttcacacatatacctgaatctgggacattgaggaaaccaaagacatgatgggcaaggaaagataggatttgattgcatcgagaagaggggagagcctagaaaacaactaaggacatgagctgagatgggatgtggtgggaggtggcaggaggctggaggcacctggggcaggagaatgctagaagagcaagcagaaaatacaaaggctaaattggccttcttcagttttactccgaataattccaatccagttgacaagaaattatatgtaccacactactctgaatgtgtcagttattttattttgaaaacttttgcacatggtaggcagtaaaaatatttgtggaatgaatgaaattatcaccaacacccctatgccatatgataactaagttaagaatccttctcattaaaatgcagttctaaagctgaggcccccttagagcagactgacttttatcagaaacagtatggccatctgtcctgaataaatgcctttaaggtcatttttcaaaattcttcatcccatatttcttctatgtcatggaatctgtgcatttcattctactatatttcctttgcttttccttgtggccaggttgatcatacaactcttactaccaaaggactgactgcttgacagaaccactgcgttgtattagtgacattaattgaacattgaacaggtgtaaggaattagaatagcacctcacagtgccttagctcatttgcatctggtgtggattaacgttattcccattttaccgattgaaattctaggagttaaaggtcatacaattagtaagcagtggagcagatttctattcctcatcatgtgaactgaagtcagagctctcaagccctgtgctatgcagcttgtgctctgcagagagagggcacctagtcaaggttgctgacaagtgaaaaacagttcaccatattaattgaaaattaaagtagagctaaaggataccaaagaataataaatgccgaggccccagtgccaggtatgctccatttgttccagaatatgaagttcccactcttctaaatctctgcccacgagagcctgctgctcatcaggcaaaatacaaggaggtgatctcagagggtggtgctgccttcacactctgctcaaaggtgtgggtgacatacagcctgcaagtgaccttgagaagtaggctgtttctctcccaccccttcccaggacctatgggactctacaaaaccctcctgcttgttacagctttctgagaggcgtagggctccccagggaaatggcactggggaggtaatctcgcttctagcagttcctgtactcactgcctcattcttctaagctatcctggtggaaactgccggtccccagccagtgaaccagaaccatgtccctgttcctttctgtagagcaataaaggaaaagtctggcttgtgtcagctgtggctgccctgggtcacaactcacccccagggaagcagactggttttctgaacattttctgagttccagcctctttacagcaagaagaccaaaagtgggagctcataccttgctaagaggtagagctactaattacccagtgcctgctctgctattggcgttttaacatacattcttatttaattgtcaccatattgctgtgaagatgatcagaatatccctggtttacatactgggaagctgtgtctcagcgaggtgaagtgatgtacccaaggcaaaccctacagaatgtcaagactgagctttataaccagtctgactagctgtgaagttaatgctttcccctattctatactactttacagcccctccctcatgatctcctctgcggtatgctcaaacacgagatatcagtgcccacttcccatgagaggctcttctttccagctgagggctggatccttgcagcattcattc

SEQ ID NO: 1043 - DNA, 180 bp, Homo Sapiens
actggggtggtgcttagccggcgccagaccgaccctcgacttcggagaggcagcgcggttcctctgggtgcttccgcctccccttctcctgcttctccagcctcttcggcctcctcgcccgccgcgggaacccgagaccccagtgtatgccccacccctgaccccgctcgcgacatgtcc

SEQ ID NO: 1044 - DNA, 366 bp, Homo Sapiens
  misc_feature (174)..(174): n is a, c, g, or t
  misc_feature (275)..(275): n is a, c, g, or t
  misc_feature (287)..(287): n is a, c, g, or t
  misc_feature (303)..(303): n is a, c, g, or t
  misc_feature (348)..(348): n is a, c, g, or t
gaacgggacacctttagagaagcttgatcttggaggcctcaccgtgagaccttacaaagccggattcccagacgtagcaggaaatcagcatcatggttgggttcaaggccacagatgtgccccctactgccactgtgaagtttcttggggctggcacagctggcctgcatcgcngatcttcatcacctttcctctggatactgctaaagtccggttacagatccaaggagaaagtcagggggccagtgcgcgctacagccagcggcccagtaccncgggtgttgatngggcaccatttttganccatgggtgccgtacttaaggggcccccgaaggccttttacaatnggggttggtttgcccggc

SEQ ID NO: 1045 - DNA, 955 bp, Homo Sapiens
ccaagagctaaaagagagtaagggggaaacaacagcagctccaaccagggcagccttcctgagaagatgcaaccaatcctgcttctgctggccttcctcctgctgcccagggcagatgcaggggagatcatcgggggacatgaggccaagccccactcccgcccctacatggcttatcttatgatctgggatcagaagtctctgaagaggtgcggtggcttcctgatacaagacgacttcgtgctgacagctgctcactgttggggaagctccataaatgtcaccttgggggcccacaatatcaaagaacaggagccgacccagcagtttatccctgtgaaaagacccatcccccatccagcctataatcctaagaacttctccaacgacatcatgctactgcagctggagagaaaggccaagcggaccagagctgtgcagcccctcaggctacctagcaacaaggcccaggtgaagccagggcagacatgcagtgtggccggctgggggcagacggcccccctgggaaaacactcacacacactacaagaggtgaagatgacagtgcaggaagatcgaaagtgcgaatctgacttacgccattattacgacagtaccattgagttgtgcgtgggggacccagagattaaaaagacttcctttaagggggactctggaggccctcttgtgtgtaacaaggtggcccagggcattgtctcctatggacgaaacaatggcatgcctccacgagcctgcaccaaagtctcaagctttgtacactggataaagaaaaccatgaaacgctactaactacaggaagcaaactaagcccccgctgtaatgaaacaccttctctggagccaagtccagatttacactgggagaggtgccagcaactgaataaatacctcttagctgagtggaaaaaaaaaaaaaaaaaaaaaaaaaaaaaaaa

SEQ ID NO: 1046 - DNA, 454 bp, Homo Sapiens
gacccctgggcttggcctgccttgccctgccgggaagtgatccccaaggcagggtgagagttccccatctgaggcgtttgttttttctacctgcacttctagattcatcttcttgtgagccctgggcttaggagtcaccatggcaactgaagagttcatcatccgcatccccccataccactatatccatgtgctggaccagaacagcaacgtgtcccgtgtggaggtcgggccaaagacctacatccggcaggacaatgagagggtactgtttgcccccatgcgcatggtgaccgtccccccacgtcactactgcacagtggccaaccctgtgtctcgggatgcccagggcttggtgctgtttgatgtcacagggcaagttcggcttcgccacgctgacctcgagatccggctggcccaggaccccttccccctgtacccaggggaggtgctg

SEQ ID NO: 1047 - DNA, 461 bp, Homo Sapiens
  misc_feature (91)..(91): n is a, c, g, or t
  misc_feature (171)..(171): n is a, c, g, or t
  misc_feature (355)..(355): n is a, c, g, or t
  misc_feature (371)..(371): n is a, c, g, or t
  misc_feature (423)..(423): n is a, c, g, or t
  misc_feature (432)..(432): n is a, c, g, or t
  misc_feature (446)..(446): n is a, c, g, or t
  misc_feature (453)..(453): n is a, c, g, or t
cgcccttgtaggcggtccacctcaaacgggccggacaggatatataagagagaatgcaccgtgcactacacacgcgactcccacaaggttncagccggagccgcccagctcaccgagagcctagttccggccagggtcgccccggcaaccacgagcccagccaatcagcgncccggactgcaccagagccatggtcggcagaagagcactgatcgtactggctcactcagagaggacgtccttcaactatgccatgaaggaggctgctgcagcggctttgaagaagaaaggatgggaggtggtggagtcggacctctatgccatgaacttcaatcccatcatttccagaaagganatcacaggtaaactgnaaggaccctgcgaactttcagtatcctggccggagtctgttcttggcttttnaaagaaggncatctgagcccagntgttgtngctgatca

SEQ ID NO: 1048 - DNA, 428 bp, Homo Sapiens
ttttttcgagttgtcatgctttatcttttatttaacaaatacacatgcatatctatatatgcaaattagatgtctaaatctatattcgttttctgtggcaaccataacaaatgaccaccagctggatggcctccaacagcagaaacattttcttgcccagttctggaggccagaagtccgaaaggtgatgaagggccagttccttctggagactctgacggagggtgtgttccaggttcttcccactcccagggttgccagcatccttggcattccccggcttgtaaaggcatttctccaatgtctgcctccaccatcacttggccttctgtttgtgcctccctccgtgccctttctctgtgcccatctctaccattttctaaattattttctttgcccatctttgtctaagctggataaaaagccag

SEQ ID NO: 1049 - DNA, 2898 bp, Homo Sapiens
gggccgccgcagaggcccggccgcagcgcagggaagcctgggggccagaggtcgccgctgccgccatgccgctgctcttcctcgagcgcttcccctggcccagcctccgcacctacacgggcctcagcggcctggccctgctgggcaccatcatcagcgcctaccgcgcgctcagccagcccgaggccggccccggcgagccggaccagctaacggcctcgctgcagcctgagccgccggcgcccgcccggccgagcgccgggggaccccgggcccgcgatgtggcccagtacctgctctcagacagcctcttcgtgtgggttctagtaaataccgcttgctgtgttttgatgttggtggctaagctcatccagtgtattgtgtttggccctcttcgagtgagtgagagacagcatctcaaagacaaattttggaattttattttctacaagttcattttcatctttggtgtgctgaatgtccagacagtggaagaggtggtcatgtggtgcctctggtttgccggacttgtctttctgcacctgatggttcagctctgcaaggatcgatttgaatatctttccttctcgcccaccacgccgatgagcagccacggtcgagtcctgtccctgttggttgccatgctgctttcctgctgtggactggcggccgtctgctccatcaccggctacacccacggaatgcacaccttggctttcatggctgcagagtctcttcttgtgacagtgaggactgctcatgtgattttacgatacgtaattcacctctgggacctcaaccacgaagggacgtgggaaggaaaggggacgtatgtctattacacagactttgtcatggagctcactctcctgtccctggacctcatgcaccatattcacatgttgttatttggcaacatctggttatccatggccagcctggtcatctttatgcagctgcgttacctgtttcatgaggtgcaacgtcgaattcgtcggcacaagaactatctacgtgtggttggaaacatggaggccaggtttgcagttgcaactccagaggagctggctgtcaacaatgacgactgtgccatctgttgggactccatgcaggctgcgcggaaactgccctgtggacatcttttccacaactcctgtcttcgttcctggctagaacaagacacctcctgtccaacatgcagaatgtctcttaatattgccgacaataatcgtgtcagggaagaacatcaaggagagaacttggatgagaatttggttcctgtagcagcagccgaagggagacctcgcttaaaccaacacaatcacttcttccatttcgatgggtctcggattgcgagctggctgccgagtttttcggttgaagtgatgcacaccaccaacattcttggcattacgcaggccagcaactcccagctcaatgcaatggctcatcagattcaagagatgtttccccaggttccataccatctggtactgcaggacctccagctgacacgctcagttgaaataacaacagacaatattttagaaggacggattcaagtaccttttcctacacagcggtcagatagcatcagacctgcattgaacagtcctgtggaaaggccaagcagtgaccaggaagagggagaaacttctgctcagaccgagcgtgtgccactggacctcagtcctcgcctggaggagacgctggacttcggcgaggtggaagtggagcccagtgaggtggaagacttcgaggctcgtgggagccgcttctccaagtctgctgatgagagacagcgcatgctggtgcagcgtaaggacgaactcctccagcaagctcgcaaacgtttcttgaacaaaagttctgaagatgatgcggcctcagagagcttcctccccttggaaggtgcgtcctctgaccccgtgaccctgcgtcgaaggatgctggctgccgccgcggaacggaggcttcagaagcagcagacctcctagcgctcccttgccttcctcagctgcctcctgcgccctgtgcccgactgactggaggaggcctgtcccaattctgcccgctccatggaaaagcgggcttgactgcattgccgctgtataaagcatgtggtcttatagtgtttggacagctgataaatttaatccttctttgtaatactttctatgtgacatttctcttccccttagaaacactgcaaattttaactgtaggtatgatctcttctggtgttgactggactgcttggggtggggggcgatcaggaggaagtgagcagtcgcctgcctgcagcaggcagctttctactcctgcctcatgcatacgtcccacaaatgcaggtgtcctgagcaccacacccagtgggaagagtgtgggggaggcgcacagtgtgagcccgcccccacgtcgtggggtaacatctgttatcaaactgctgtcgttgttgtggaagcatgtagactgtgccagaggccagacccacgggctcatgcacccctgagccagcagggcatcttggaaaaggaactcttggttcgatacctggagcagaggaggggaaagtccagggctatagggtgtgatgaagtcacccctttctgtcccactacatctgggactgactttccgagcctccagtccaaagccggcttgatttccgtgaactctggtgctcctgcatctcatgagtgtgccccatgggtcccctcccctctcagcatttccttgtcccgtctggacctgggggagtggttaggcagcaagctttggtttatggttttcattcattggtgaagtaaattaggcagtgctaaagcctgtgggtttggtccttgaacaagatgtgggccttgcaagatgggagagtaaaccttgaagggctttatt

SEQ ID NO: 1050 - DNA, 629 bp, Homo Sapiens
  misc_feature (569)..(569): n is a, c, g, or t
  misc_feature (626)..(626): n is a, c, g, or t
ttctttaaaatacatacgaagtgtaaagagaaaatggccaaaacctcaaaactaccattgttgaaaacaatattaaaaggacacaatctaaaatcatgctacaaaaatagtgttatcttgtttaactaaatgtacatctttttttccaattccatgattgacaagagtgcttatgcgacgcatggaaggcaccagaggtgaagtgattatttgccttaaaatatacaaagaattgcctactttgaaaaaaaaatagtcatacttgtaaataaatagtttagtgtttctgccatgggttcctgaacccctacaaatttcaacatatacaaatagtttcaattcctaccattctcttagagggaaccacgtcaaacaaaatcaagttaggaaaagcactgattttatccaagtaggtcaatttgaggcaagattcaaaaactcttttaaaatgggttacgagtgaaagagttgggaacaggcagcccccttgggcctgggtcagcctacgagtccatcccggtgtcctgccctcacatctgccagccctcaggccggccaggtctccttcnaaccctgagtattgccttcctcacttctgcgaagaggggacagaatctgaagctgcnaat

SEQ ID NO: 1051 - DNA, 288 bp, Homo Sapiens
  misc_feature (10)..(10): n is a, c, g, or t
  misc_feature (13)..(13): n is a, c, g, or t
  misc_feature (18)..(18): n is a, c, g, or t
cctcgtcacnttngtctnaaactcttgacttcaggtaatccacccaccttggcctcccaaagtgctgggattacaggcatgagccaccatcttcagccagatgatttttttattgagagagtgaaatgctattttgttccccaaatggcgctagtgaatcactaggagggtcccactgataggccatgtttagcactggttgccagggattctctttttgagagagggaaagcaaaatgaatggaagtacccagctggaggtttcagggcttctggaggatgctctcg

SEQ ID NO: 1052 - DNA, 449 bp, Homo Sapiens
tttttttttttttttttttttttcaccactcagctaatttttgtattttcagtagagatgaggtttcaccatcaggtgatccacccgcctcggcctcccagtgttaggattacaggcgtgacgactgcacccggcccaccttaactttacataagacaagagtcccaaacatacaaactgatcacgaagttaacatatacacctcagacaggaaactggtagccaacagcctgcaagtcatctactagatgtttagatgtttccaaacaagcaaggtgtcatcgtgtatcaagtgtggctgtgagtgcagcagcagaggtagcagcatcacctatttccacgccagtaacagctccctgggtgcctcaataccggcacccggcagaggcatgtagacaaaacagaatctgactcggtccctgaagctgcttctctggggttgtcatggc

SEQ ID NO: 1053 - DNA, 2298 bp, Homo Sapiens
tcggccgagcccagagacagccagttcctctcccgccgcgccgggccgcgtgccgctcgctccccggccgtggcgcctccgggccagacgcgctgcagcctccagcccgcggcaagcgggcggggcggccgcgccacccccggccccgcgccagcagcccctcgccgcgcgtccagcgttcccggccagcagcctccccatacgcagtcctgctggaccgccccgtcgcgccccccactctgaactcaagtcaccgtggagctccgccgccccgaaactttcacgcgagcgggaaatatgggatgtataaaatcaaaagggaaagacagcttgagtgacgatggagtagatttgaagactcaaccagtacgtaatactgaaagaactatttatgtgagagatccaacgtccaataaacagcaaaggccagttccagaatctcagcttttacctggacagaggtttcaaactaaagatccagaggaacaaggagacattgtggtagccttgtacccctatgatggcatccacccggacgacttgtctttcaagaaaggagagaagatgaaagtcctggaggagcatggagaatggtggaaagcaaagtcccttttaacaaaaaaagaaggcttcatccccagcaactatgtggccaaactcaacaccttagaaacagaagagtggtttttcaaggatataaccaggaaggacgcagaaaggcagcttttggcaccaggaaatagcgctggagctttccttattagagaaagtgaaacattaaaaggaagcttctctctgtctgtcagagactttgaccctgtgcatggtgatgttattaagcactacaaaattagaagtctggataatgggggctattacatctctccacgaatcacttttccctgtatcagcgacatgattaaacattaccaaaagcaggcagatggcttgtgcagaagattggagaaggcttgtattagtcccaagccacagaagccatgggataaagatgcctgggagatcccccgggagtccatcaagttggtgaaaaggcttggcgctgggcagtttggggaagtctggatgggttactataacaacagtaccaaggtggctgtgaaaaccctgaagccaggaactatgtctgtgcaagccttcctggaagaagccaacctcatgaagaccctgcagcatgacaagctcgtgaggctctacgctgtggtcaccagggaggagcccatttacatcatcaccgagtacatggccaagggcagtttgctggatttcctgaagagcgatgaaggtggcaaagtgctgcttccaaagctcattgacttttctgctcagattgcagagggaatggcatacatcgagcggaagaactacattcaccgggacctgcgagcagctaatgttctggtctccgagtcactaatgtgcaaaattgcagattttggccttgctagagtaattgaagataatgagtacacagcaagggaaggtgctaagttccctattaagtggacggctccagaagcaatcaactttggatgtttcactattaagtctgatgtgtggtcctttggaatcctcctatacgaaattgtcacctatgggaaaattccctacccagggagaactaatgccgacgtgatgaccgccctgtcccagggctacaggatgccccgtgtggagaactgcccagatgagctctatgacattatgaaaatgtgctggaaagaaaaggcagaagagagaccaacgtttgactacttacagagcgtcctggatgatttctacacagccacggaagggcaataccagcagcagccttagagcacagggagacccgtccatttggcaggggtggctgcctcatttagagaggaaaagtaaccatcactggttgcacttatgatttcatgtgcggggatcatctgccgtgcctggatcctgaaatagaggctaaattactcaggaagaacaccctctaaatgggaaagtattctgtactcttagatggattctccactcagttgcaacttggacttgtcctcagcagctggtaatcttgctctgcttgacaacatctgagtgcagccgtttgagaagaaaacatctattctctccaaaaatgcacccaactagctctatgtttacaaatggacataggactcaaagtttcagagaccattgcaatgaatccccaataattgcagaactaaactcatttataaagctaaaataaccggatatatacatagcatgacatttctttgtgctttggcttacttgttt

SEQ ID NO: 1054 - DNA, 577 bp, Homo Sapiens
  misc_feature (289)..(289): n is a, c, g, or t
  misc_feature (357)..(357): n is a, c, g, or t
  misc_feature (409)..(409): n is a, c, g, or t
  misc_feature (446)..(446): n is a, c, g, or t
  misc_feature (470)..(470): n is a, c, g, or t
  misc_feature (503)..(503): n is a, c, g, or t
  misc_feature (527)..(527): n is a, c, g, or t
  misc_feature (566)..(566): n is a, c, g, or t
cttcagatgataccacagccagctaataagttgagatcaagactgactcgcaagccctgagaataatttagtgctcttctaacacaagacagtgggaaagactgtccaaactgtgtactaaagcttgtactaaagaaaacttttaaaggtagttgtgggcagaggaggggaggacattttcaggttttagtttaccctagggggcaggatgggagggaaaagcagaggaaggcgattcattgaacccatgttttccccaagtatattctgcagaaaacgtatctagtgnatgctctagggagctggagtttagaattgagttaggggttgtgctaagggctaaaaagggcacatcanctaaacagtttattaagtggctacttcttccaccctcacccactttagttcnccatggaaattgggcatatttaaggctttccaagttnccccaaccaaggaaaatgttttcnccaacttgggtatgggattccccctaccttttnggcggctttaaacttaggccgttnggaatgggtggggattccctattcccaatggcttggganccgctctggcg

SEQ ID NO: 1055 - DNA, 370 bp, Homo Sapiens
  misc_feature (268)..(268): n is a, c, g, or t
  misc_feature (298)..(298): n is a, c, g, or t
  misc_feature (314)..(314): n is a, c, g, or t
  misc_feature (335)..(335): n is a, c, g, or t
ggaagctgcctttccttctccctgtgcttaaccagaggtgcccatgggttggacaatgaggctggtcacacagcactgttactgggtctcatgatggtggtcactggagacgaggatgagaacagcccgtgtgcccatgaggccctcttggacgaggacaccctcttttgccagggccttgaagttttctacccagagttggggaacattggctgcaaggttgttcctgattgtaacaactacagacagaagatcacctcctgggatngagccgatagtcaagttcccgggggccgtnggacggcgcaaacctnattattcctgggttgatggtngattccagattgcccactttgaaggaaaggggagg

SEQ ID NO: 1056 - DNA, 662 bp, Homo Sapiens
ccagaggttttacaaaagtgcactcttctacatctacctatcactagaagacctggctggcttcaaagagctcttccagacaccaggtccctctgaggaatcaatgactgatgagaaaactaccaaaatagcctgcaaatctccaccaccagaatcagtggacactccaacaagcactaagcaatggcctaagagaagtctcaggaaagcagatgtagaggaagaattcttagcactcaggaaactaacaccatcagcagggaaagccatgcttacgcccaaaccagcaggaggtgatgagaaagacattaaagcatttatgggaactccagtgcagaaactggacctggcaggaactttacctggcagcaaaagacagatacaaactcctaaggaaaaggcccaggctctagaagacctggctggctttaaagagctcttccagactcctggtcacaccgaggaattagtggctgctggtaaaaccactaaaataccctgcgactctccacagtcagacccagtggacaccccaaaaagcacaaagcaacgacccaagagaagtatcaggaaagcagatgtagagggagaactcttagcgtgcagggaatctaatgccatcagcaggcaaagccatgcacacgcctataacatcagtagat

SEQ ID NO: 1057 - DNA, 431 bp, Homo Sapiens
  misc_feature (417)..(417): n is a, c, g, or t
aacagtccccggtgctttgcaagggttcagattgcagaacagtcacatatgggtatttgtagttataaatacttgaccgttctctaggggtggggtttccaactctttaaacaaccctgttgcctgttatcaagctgactttttgctccaagtgccagaattgattgtggttaggacatcttacgctgagaaataaataaaatggaacataatgggtctgcttcaaatgctgataaaatccaccagaatcgcctgtcgagtgttacagaagatgaagaccaagaccgctgctcttaccattgtgactgtgctggacaaagtagcctccatcgtggacagtgtgcaggcaagccagaagagaatagaagagagacacaggggaaatggaaaaatgccataaaatccgtccagattgancctgttgaagcctt

SEQ ID NO: 1058 - DNA, 891 bp, Homo Sapiens
tttgaacatccagatttgtttttattttagattccgagagatgaacctggatcctacgttccttggaatgtacccatctgaatcaaatgcaaacttctggagaaaacagagtgcctcttcccagatggcaatctgtcctatctctgtgctggaagatgctagatctgaaagacagagtttccacagttcagaaatcatcccacagtgttgcttttctctggagctgatttaaagtattccatttagatttgatagatatgcttaagcaatctataaatcattttcaatgttataaacactaattggtttcctctagggtgatattcgtcattactctgtctcttcaatccatccagctaaatggaataggtgatgacttggatgtgactcctacttggcttctatcaccaacagaaattataccatatagtgaaaggcaattttctaaataatttcattactaatatgaactgtgaagttgtcattttttcatttgtccttttctgctatcaccttcctcttgtcagaatgaatatagacacatgtatctaagtgggaccaaagaaaaaatagcgaactttcaccaaagttttcatgaaaacccaaaagctttaaaagttactatcaagaaattgaaaggaaacccacagaataggataaaatatttgtaaatcatatttgataaaagtcttgtaaccagatacataaagagctcttacaactcaataaaaggcaagtaatttaaaaataggcaaaagaattgctggatggtatggtagttctatttttagtttttaccctaactactctgacttgatcatttaacattctgtgtatgtaacaaaatatcacatgcataaatattatgtgtcaataaaattttttaatggg

SEQ ID NO: 1059 - DNA, 696 bp, Homo Sapiens
  misc_feature (10)..(10): n is a, c, g, or t
  misc_feature (19)..(19): n is a, c, g, or t
  misc_feature (533)..(533): n is a, c, g, or t
  misc_feature (586)..(586): n is a, c, g, or t
  misc_feature (595)..(595): n is a, c, g, or t
  misc_feature (635)..(635): n is a, c, g, or t
  misc_feature (660)..(660): n is a, c, g, or t
  misc_feature (672)..(672): n is a, c, g, or t
  misc_feature (675)..(675): n is a, c, g, or t
  misc_feature (693)..(693): n is a, c, g, or t
tggactaccnctactactntgctgcgagaagacgacagaagggggagtcatggcaggaagctggggagggcgggagatcacaccagacaattataaaagaagagctggtcctgaagctcacaaccgtaacagccaccagacaagcttcagtggccggcccttcacatccagacttgcctgagaggacccacctctgagtgtccagtggtcagttgccccaggatggggaccacagccagagctgccttggtcttgacctatttggctgttgcttctgctgcctctgagggaggcttcacggctacaggacagaggcagctgaggccagagcactttcaagaagttggctacgcagctcccccctccccacccctatcccgaagcctccccatggatcaccctgactcctctcagcatggccctccctttgagggacagagtcaagtgcagccccctccctctcaggaggccacccctttccaacaggaaaagctgctacctgcccaactccctgctgaaaagggaagtgggtncccctttccctcaaggaagctgttccccttcaaaaagagctgccctttttcangcaccccantgaacagaaggaaggaacgccagctccatttggggaccanagccattcagaacctgagtcctggnatgcagtcccancanctgtcaacaggaccggtnccc

SEQ ID NO: 1060 - DNA, 3213 bp, Homo Sapiens
ctgcgggcggcgggcggcgggcgcaccatgccctccttcgacgaggcgctgcagcgggtgggcgagttcgggcgcttccagaggcgcgtgtttttgctgctgtgcctgacgggcgtcaccttcgccttcctcttcgtcggcgtggtcttcctgggcacgcagcccgaccactactggtgccgcgggccaagtgccgcggcgctggccgagcgctgcggctggagcccggaggaggagtggaaccgcacggcgcccgcctcccgcggcccagagccccccgagcgccgcggccgctgccagcgctacctcctggaggcggccaacgacagcgcctccgccactagcgctctcagctgcgcggacccactcgccgccttccccaaccgttcggctccccttgtgccgtgccgcggcggctggcgctacgcccaggcccactccaccatcgtcagcgagtttgaccttgtctgtgtcaatgcgtggatgctggacctcacccaagccatcctgaacctcggcttcctgactggagcattcaccttaggctatgcagcagacaggtatggcaggatcgtcatttacttgctatcctgccttggtgttggcgtcactggggttgtggtggcctttgcaccaaacttccctgtgtttgtgatcttccgcttcctgcaaggtgtatttggaaaggggacgtggatgacttgctacgtgattgtgacagaaatagtaggttcgaaacaaaggaggattgtgggaatcgtgattcaaatgttctttacccttggaatcataattctccctggaattgcctacttcatccccaactggcaaggaatccagttagccatcacgctgcccagctttctcttcctcctttattactgggtggtccctgagtctccccgttggctgattactcggaagaaaggagataaagcattacagatcctgagacgcattgctaagtgcaatgggaaatacctctcatcaaattactcagagatcactgttacagatgaggaagttagtaatccatcctttttagatctggtgagaactccccaaatgaggaaatgcacacttattcttatgtttgcttggttcacaagcgcagtggtgtatcaaggacttgtcatgcgcctgggaattatagggggcaacctctatatagactttttcatctcgggcgtggtggaactgccaggagctctcttgatcttactaaccattgagcgccttggacgacgcctcccctttgcggcaagcaatatagtggcaggggtggcatgccttgtcactgcgttcttaccagaaggaatagcatggttgaggaccacagtggctacattgggaagactagggataaccatggcctttgaaattgtttatttggtaaattcagaattgtacccaacaacattacgaaatttcggagtttcgctctgttcaggtctgtgtgattttgggggaatcatagccccatttctgctctttcggctagcagccgtgtggctagaactacctctgatcatctttggtatcctggcatccatctgtggtggccttgtgatgcttttgcctgaaaccaagggtattgccttgccagagacagtggatgatgtagaaaaacttggcagtccacattcctgtaaatgtggcaggaataagaaaaccccagtttcccgctctcacctttgaggcccccgacaaagacagaaagaaggagctatccaggagctgatcctccttgcaaagctgtgccttgcagagatgcacgtgtgcatttcagctacatcatgccgcgctgttgtaatactgtataaagacctcaatctatccagagtatttttatataatgttggatgagttaggatttgtaatgctgttgaagtttctgggaacacataatatgtagccagtttaacaaagaagctgtcaggtgcacagcccttcctgggtttttttcttgtgttccctgtggtctctgacccattaggctaaagagagacaagagaagcccccaacctgattctcatgacagctccatcaagaatgtgggatgtgccgaccaaggatttgagaaagttgtacagaaatgtgttcatcaaatctggtcaagggactaagctcctagctgaccattcattctgaagattgcatggaggatgaacatctgggaatcctgttaatgagaaggctgaatcacaggcacctgggccaaagggtgtgagcattcatgttctctgctcaccttggtttccgcacaccttcgcaatgtgaacaggtcaggagtccctcccgtccacctcctctgtaacagctggggttccaggcatggtttaggccctgttccagcaataagaaccaatctgctgtacaatctgaggacttggctgtgttatttacaaaatgatgctgtggttctgagattatttgggacatttttggctctcctttagtggacacctagagccacagattcccttctttactaaacaaatcccatggattctgatttctgggtcttaggattttaaaagtgaagggatatttttcttatatttgtgagttcagttccgatggtgcccgtggtcaaaagcgaaaaacatggacaattcctattcattcttagcactttgacatgtcttggggaaaagctttacattttaatttaaaagaaagatcaattatatccatgcttaacaggatcagcaggagctttataaatgactttacagagactaataagggattgatctttctttttttgttatcgaggcttttgaaatgtggaacttgtgtgttctgctttatatgttatattcaatatcttttcagatgcagtctatattttatgctgagttttaaaaatgaaatactttatgcaaacaggcaaaattggtaccaaagggaaacattaaccatgaggaagagcatttttctaaggagaacaggtgacaatatacacatgtcgcgtaatcgtaaaatgagcatcttagtctttaaaacacatcagaattgaatacgaataatctatttgtcgatgaaataaacacaactctttgaggatttgagactacattcaccctttattcacagtcacttgcagttttgcttttctctccatttctctgctgtaagatgactgttgcattgttgaattgtattttgagtggatatttttgtttggtaacaattaaaattttaaatcgt

SEQ ID NO: 1061 - DNA, 489 bp, Homo Sapiens
  misc_feature (353)..(353): n is a, c, g, or t
  misc_feature (445)..(445): n is a, c, g, or t
  misc_feature (477)..(477): n is a, c, g, or t
tcatttggtgcctgcaactaaaaacaagaagagattaaagtctcaagggaagaactgcaaaaaactagccaagaatctccttaaggagccagaaaactgcaacaacttttgcctgtggaagcagtatgcacatctggagtggttgcttggcaacacggaggatgccagaaaagtttttgacacagcacttggcatggcaggaagcagagaactgaaagactctgacctctgtgagctcagtctgctctatgctgagctggaggtggagctgtcgccagaagtgagaagggctgccacagcttcgagctgtttcacatattaaccaagctgacttgaggagcagcccctatggncccttacactgggacaggtgttgggctgtttcacatttttgaaaggcggcggaaaggcttattgaggcacggcacttgcagggattgttttngggttgacagctgttgttcttccattcccagnttccccaccgtt

SEQ ID NO: 1062 - DNA, 405 bp, Homo Sapiens
  misc_feature (344)..(344): n is a, c, g, or t
ggaaggaaagccatcccacacccctacaacatatgttctggcatttataaactgcttgattgtgtgcctcaaggggagaaaaagtcaagcaatgcttcaaaggccaggctttctaagcaaatgagtggttcaaagcagtgtttggctcaagggcagtctggttttatggatagggccgacccaagacatctgctcatgaagaaatgtggcatctgttgccatttcctaaactataaggtttagatagattgtcttgaattttgatagcaaatttttttaaatttatatttctgcctcctcgtacatccttatatatggaaaaaaaagtaagagttcctcagatncagagctcagtagctgtgtccaattttgaagtttcattcagtgttagttgtccgggggtga

SEQ ID NO: 1063 - DNA, 344 bp, Homo Sapiens
gtataagcttttttttttttttttttttttttttttgtgatcaaagatgtttatttaaatgcagattttacaacctcaacttgtccctttacaacaggtcttcccagagcttttaatgtgcagacaggcatgtgaacctctgataaagagagggaaaatggagaggcatcttcctctgacttaatacaaccctttttacttttggtagaaaatcataaggcatgagtgtttaaggagcacactttgggaaatgtggttctactagccttactaggcaaatatgcttctaatatgtataactaacacatgttaagcactaattatattaataatgccatgagtcc

SEQ ID NO: 1064 - DNA, 648 bp, Homo Sapiens
  misc_feature (381)..(381): n is a, c, g, or t
  misc_feature (529)..(529): n is a, c, g, or t
  misc_feature (579)..(579): n is a, c, g, or t
  misc_feature (592)..(592): n is a, c, g, or t
  misc_feature (600)..(600): n is a, c, g, or t
  misc_feature (632)..(632): n is a, c, g, or t
  misc_feature (642)..(642): n is a, c, g, or t
ccttgtttgacttttaatggaataatgtcattgccaggcatggactcaaacaaagtaggcacttggttaatatgtattgaatgaaagaaatgagcaggtaggcttttaggaagtggatcttttgactgactcccaaatgctggtcattgcatttctagaacaaaggccacattttagaaacaactggggagtctttttcatggacacatgcccagccccattagagcatcctggcagggtgtccagccgtgtatgttttgaagctcctgtggttcagacacaacctgttacacaactaccaccttgttatctctgtggtcctggcctgtgctgatgctgtgatattttcaccctgaaatgaagagtcatcccaacatcaanggtcagtaaaaccaattcctgtccttaaaaatggattcattattatttgaatttcaaacaacagaccaaccatagctcaatgtttctcaagagtatcctgtggagcacagtgcggtgaacgcccagaagaaaagcagtctgtggtcangtggggttctgtgccatttgctgccaactttcctggcaaacagtggattncagcaaaattgtnctgggtcngttctgagtgataaaaccattaaccaggggtnccaaaggacnggcctt

SEQ ID NO: 1065 - DNA, 556 bp, Homo Sapiens
  misc_feature (367)..(367): n is a, c, g, or t
  misc_feature (377)..(379): n is a, c, g, or t
  misc_feature (383)..(384): n is a, c, g, or t
  misc_feature (386)..(386): n is a, c, g, or t
  misc_feature (406)..(406): n is a, c, g, or t
tacttcacctacgacatcacgctggccaacaagcacctggccatcggcctggtgcacaacggccagtaccgcatccggacctttgatgccaacaccggcaaccacgatgtggcctcaggctccaccatcctggctctcaagcagggtgacgaagtttggctgcagatcttctactcagagcagaacgggctcttctatgacccttactggacagacagcctctttacgggcttcctaatctatgccgaccaggatgaccccaacgaggtatagacatgccacggcggtcctccaggcagggaacaagcttctggacttgggcttacagagcaagaccccacaactgttggctgggggtggggggtcnagtgagcggnnntagnntnaggcttaccttcttcggctntttttttgcgcttcattaaaaaccaaccctttttattctacaaaaaattattatatattaatctatatcaattaactatgtatcttttatacataatttatttttagactcgtttatccgcttctagtatataattgactcgggggggga

SEQ ID NO: 1066 - DNA, 435 bp, Homo Sapiens
  misc_feature (17)..(17): n is a, c, g, or t
  misc_feature (276)..(276): n is a, c, g, or t
  misc_feature (332)..(332): n is a, c, g, or t
  misc_feature (365)..(365): n is a, c, g, or t
caaaatactaaaatgangagttaaggttcgttctcattacaaatcaagagttcagcgtgtgtgtgtgtgtgtgtgtgtgtgtgtgtgtgtgtgtgtaatctttagtggctttaaagaataatattgccatttgtctactttgcaaataaagataacagaacacctttaaaatatatgtatgtgtacatatgtgtgtgtagatatagagagagagagatacggagagacagacagacagagagagagacagagagagagatgctttcccaagagganatgcatatgtaccttgatttaagcaaaactgataacagaaaattgaacttaatganagaaaaaagtctgggatatggttactcactttnacatagggtaaggttttttaaaactaattttggcttagtagttaatttttaccaaaaatggaggggacac

SEQ ID NO: 1067 - DNA, 720 bp, Homo Sapiens
gtttgcaatacaaaggcggccacgcgcggcgccgctcggtgcagaccatgaattacgtggtggcagttagccggccaggtgtttgtcaccgtgaaggagctctacaaggggctgaatcccgccacactctcagggtgcattgacatcattgtcatccgccagcccaatggaaacctccaatgctcccctttccacgtccgctttgggaagatgggggtcctgcgctcccgagagaaagtggttgacatagaaatcaatggggaatctgtggatttgcatatgaaattgggagataatggagaagcattttttgttcaagaaacagataatgatcagtgaatgttatccctatgcacctggccactcccccatcctgtcagaaggagcttcgagaatggaatgccagctgaaaaggggctctgtggacaaggatgagaggcctggaccccagcatgccagcccaagtgatcgctcccagcgagacgccgtcaagcagctctgtagtaaagaagagacagacacactggacggagaaagtcaacagctggacagcctgagagagatgacaacatgaacacatctgaggatgaggacatgttccccatcgagatgagctcggatgaggcatggagctgctggagagcagcagaactcttcctaattgatatacctccattccaagatgatatcctgaggaaactctcctggctggattaacct

SEQ ID NO: 1068 - DNA, 1223 bp, Homo Sapiens
gaagtgacgcgaggcgtagcggaagttactgcagcggcggtgttgtgctgtggggaagggagaaggatttgtaaaccccggagcgaggttctgcttacccgaggccgctgctgtgcggagacccccgggtgaagccaccgtcatcatgtctgaccaggaggcaaaaccttcaactgaggacttgggggataagaaggaaggtgaatatattaaactcaaagtcattggacaggatagcagtgagattcacttcaaagtgaaaatgacaacacatctcaagaaactcaaagaatcatactgtcaaagacagggtgttccaatgaattcactcaggtttctctttgagggtcagagaattgctgataatcatactccaaaagaactgggaatggaggaagaagatgtgattgaagtttatcaggaacaaacggggggtcattcaacagtttagatattctttttattttttttcttttccctcaatccttttttatttttaaaaatagttcttttgtaatgtggtgttcaaaacggaattgaaaactggcaccccatctctttgaaacatctggtaatttgaattctagtgctcattattcattattgtttgttttcattgtgctgatttttggtgatcaagcctcagtccccttcatattaccctctcctttttaaaaattacgtgtgcacagagaggtcacctttttcaggacattgcattttcaggcttgtggtgataaataagatcgaccaatgcaagtgttcataatgactttccaattggccctgatgttctagcatgtgattacttcactcctgggactgtgactttcagtgggagatggaagtttttcagagaactgaactgtggaaaaatgacctttccttaacttgaagctacttttaaaatttgagggtctggaccaaaagaagaggaatatcaggttgaagtcaagatgacagataaggtgagagtaatgactaactccaaagatggcttcactgaagaaaaggcattttaagattttttaaaaatcttgtcagaagatcccagaaaagttctaattttcattagcaattaataaagctatacatgcagaaatgaatacaacagaacactgctctttttgattttatttgtactttttggcctgggatatgggttttaaatggacattgtctgtaccagcttcattaaaataaacaatatttgtaaaaatcat

SEQ ID NO: 1069 - DNA, 397 bp, Homo Sapiens
  misc_feature (224)..(224): n is a, c, g, or t
  misc_feature (312)..(312): n is a, c, g, or t
  misc_feature (342)..(342): n is a, c, g, or t
  misc_feature (381)..(381): n is a, c, g, or t
ttttttttttttttttttggagtatgttatttattgtaagacatcatttttattaaatacactgtagtacaagagactttccatgtcaggttgagagaagctggtcacatgatttacaaacaaaacttttttttttttaaacactgtattcaggtgtcactttgaaatcagccaagatgcagtgggtcttagtaaagcaatggacctcaaaacagattgcaaancaagaactggtaagtattagcacagagacatcacattaaaaggaagataagccaaatgaaaaggagagttccaaataccaggtcacgnttgaaggggaaatatatctgtagagagatntggaaatgtgtgtgtattacggcctgggatatattacanacatctcttccagata

SEQ ID NO: 1070 - DNA, 1213 bp, Homo Sapiens
cggaatggaggaggtgcctcacgactgtccaggggccgacagcgcccaggcgggcagaggggcttcatgtcagggatgccccaaccagcggctgtgcgcttctggagcgggggccactccggacacggctatagaggaaatcaaagagaaaatgaagactgtaaaacacaaaatcttggtattgtctgggaaaggcggtgttgggaaaagcacattcagcgcccaccttgcccatggcctagcagaggatgaaaacacacagattgctcttctagacatcgatatatgtgggccatcgattcccaagataatgggattggaaggagagcaggttcaccagagtggctcaggctggtctccagtgtacgtggaagacaacctgggggtgatgtcagtgggcttcctgctcagcagtcctgatgatgctgttatctggaggggacccaagaaaaacggcatgatcaagcagttcctccgagatgtggactggggagaggtcgactacctcattgtggacaccccacctgggacgtcggatgaacacctctcggtcgtccggtacctggccacagcacacatcgatggagcagtgatcatcaccactccccaggagctgtcactccaggatgtccggaaagaaatcaacttctgccgcaaggtgaagctgcccatcatcggggtggtggagaacatgagtccgttcatctgtcctaagtgcaagaaagaatctcagatattccctcccacaaccgggggcgcggagctcatgtgccaggacttggaggtccctctcctcggcagagtgcccctggatccgctcataggtaagaattgtgacaaaggccagtcttttttcattgacgccccagattccccagccacgttagcctacagaagtataattcagagaatccaagagttttgtaatctccatcagtcaaaagaagagaacctcatcagttcctgaaacgagagaatgttcaggaccaagcagttaccgagcgaggcactcactgggcagcacatccagccagacccgaccagctccgggatggggtgggtcacagcaaaaggaccagatgctggtgtggtccgaagccactttctcagagacactttaatcattgagtatttgtacacttttctttagaacatatataaagggcattctctacaaatgtgccgttttaagaataaaaccccctcaaatctc

SEQ ID NO: 1071 - DNA, 331 bp, Homo Sapiens
  misc_feature (55)..(55): n is a, c, g, or t
gcttttcaatcaggctgctttattctgttgtggcaggagttcccgggcccctggnaccacctctgcccactcccatcctctccccaagctcccatttctccagggcttgtccctgcggtgtgggcagaagcagcttcttgcccgtctgcaaaagctgcaaaagaccctttgcccggggcgtttcctttcccgttggggcttccactgaccctgctcaccggagcgtcctagatgtagtagagcggcacctcgccacacagggtgctcacggccatgcccaggaaggccgggtcccctccggaagggtgctgagcctgcatctctcccctct

SEQ ID NO: 1072 - DNA, 446 bp, Homo Sapiens
  misc_feature (297)..(297): n is a, c, g, or t
  misc_feature (305)..(305): n is a, c, g, or t
  misc_feature (312)..(312): n is a, c, g, or t
  misc_feature (317)..(317): n is a, c, g, or t
  misc_feature (325)..(325): n is a, c, g, or t
  misc_feature (337)..(337): n is a, c, g, or t
  misc_feature (343)..(343): n is a, c, g, or t
  misc_feature (382)..(382): n is a, c, g, or t
  misc_feature (388)..(388): n is a, c, g, or t
  misc_feature (410)..(410): n is a, c, g, or t
ggaaagcagagcagccttgtgtttgctccaaatcccagcttctcatccatgatgtcgttaaccccagaatccacatgtacccccagtgctctttcctctcagcaggctccggctatggacgtgtgtctgagctccgcgcacgcagaaagacagcaccgggggagtcctagaagaatccaacaagatagaaccatctcttcatagcctccagaaatttgttcctacagattacgccagctacactcaggagcattatgggtttgcaggaaaggagattgtcatccaggaatccatagngagttcgnagcggtngtgtngccagggntatggtttgtgncaatanttggaggaacatgccgaggaattgaatttccaagatgcnaaaatnttgaaattggtgccggaccaancttgtttcattgtggcagtaatttaggagctaagtt

SEQ ID NO: 1073 - DNA, 207 bp, Homo Sapiens
  misc_feature (8)..(8): n is a, c, g, or t
  misc_feature (51)..(51): n is a, c, g, or t
  misc_feature (110)..(110): n is a, c, g, or t
  misc_feature (204)..(204): n is a, c, g, or t
cctcgctntacatcggcccagcagggcactatgaggggtcaggcctgcagnactcacacttggcacctgctccaaaaccctttcaggtctttgaggatctgagccctggnctgggtctcccgccggctcggaaaagctggcctgccgggcagacgagagaaccacacgattcagaaaagcagtgcccttcagcagcctctccancgt

SEQ ID NO: 1074 - DNA, 401 bp, Homo Sapiens
ttttttttatcggcagaatcaatttttttaataatgtaatacataatccaaatatgcaactcacaaaatactcactgtagacccaaagacacaaatttgttgaaactgaaaagatggaaagagacaatccatgcaaatagtaaccaaaagagagccagggtggctatactaataataccacacaaaatagattttaagccaaaaactgttacagaaaaacattttatgttcgtaagagagtcgaatcacaagaagatgtaacaattataaacacgtatgaaccaaaaaaaaaaagggctccaaaatgcacaaagcagactaataaaatgcaagggaggaacaattttacaataatggagacctcaatgcagtggctctatcacagctcaccgcaatctctg

SEQ ID NO: 1075 - DNA, 541 bp, Homo Sapiens
tccaaatatttctacctaaagatagagtgaaggggttcctctgctgtgtaccaccagaaatatgacttaccatctaaactggctggtctccatgactggttctggtgcttataagttttaatatcgtgtggggaaaaaaacgaggtttaacatccacaggacagtgacgacaatggagattctttaacaatatgccatcccatcgacccggacacagcttccagcctaaaccagctagagaaaagcccgtttctccactaaacatgaccttcagaaaatgtggtcaaagacttactgtaccaaccatggagactgagatctcagtctgtaaacttcgccatgtcccctgaaaccctatgctgaaatttaaattagttttcacactcaagggcaataatcctattcctgagtatcataaaccttccctttcactagtttatgagtagttaagttagggagaaaagttttggggggtattctttcaatgtttattctaaaggcactaaaaattaattgttttacctcttgaacggagaaattg

SEQ ID NO: 1076 - DNA, 523 bp, Homo Sapiens
tttaaattcgtgaagtcattcatccagcagtagtttatagttttcattcctaaacatcatggaccagattctttgttactttagggccccaattcactaaaattatttattaatttcaccgtccttcaaaaattactctgcctatgtgagacaattgatgtgggagactgagtcctaaatttttaatccagataacatgaaatatgccaaccttagggaatttggtgaatacatttaatgagttcttgagggagaagaaattgcttttgaacataagtatatccaagacaaaggaataatgctcctaactgatagactatagctcctcagctgatacagttcaccatcccccaaaatgctggcactcaggacaataccctctgctggcgaaaatctatacaggatacacaggtcaggctcttattagacaaaactttccaatatagtatgaaattggccactgaaatttaagctcaaaaagagtatgaatatttagatatgttttcagtgcgatttcttcaga

SEQ ID NO: 1077 - DNA, 467 bp, Homo Sapiens
gtttgtattttaaatttaatatcataaacaatttttaaaggtaatataatatagaagttctcagaatgaaacaaaaggaaggctaaacttcattttagactcatggtaacaccaaagcaattttaagaatgtgaataggaagctaaacactgcaaagagaattcctaaaaatcagattagttaagaaattttgaagagaactaaactcttcacagcaaacttgaaaagaatattgattaatcaaaagcctgtgaatcctgggacatacgtttactgatatctatggtgaaataaagtccagaagcagttgcataataagtacatgtaaggcctaagtttaagaattgcaattaggagtattttacatttaatttataatcttagtagaggaaaagttctgatgtgattttaaaaacagaatcccttctcgccttacttacttggtactttaaccattacaaatttat

SEQ ID NO: 1078 - DNA, 472 bp, Homo Sapiens
  misc_feature (463)..(463): n is a, c, g, or t
cacagtgttcatctctcatgagctggttcacggcttgggaggggccgcaggtggcagatccgggctctaaagggaagaaccagaccggcagctccagacccaggctcctcggagttttggccaggtgggagagcaagggccttctccagaggcactgactgttctgctggccttgacctggggcgggggtcagagtcatctagactcagtacagctgtccctgggcgccttccaggctgaattcggaaagcaaattcttctcagcagctctaacagtctgtgaagttctgttgaaaaagacttgcaggatggctctcaacacccaggcgcaggtgtgcgggctgcctctgtgttgccagcgtataatactgtcatactggtggccaccccaggggctagttggctgtttggtcaggcccagaagaggaccctgcaaatgccttctttgagatggaaacacagnccctccctt

SEQ ID NO: 1079 - DNA, 465 bp, Homo Sapiens
  misc_feature (443)..(443): n is a, c, g, or t
taaatttacattctagaataccagggtaaacaaggagacgttattcaaagatgaatgagaaagttctattctttttcatcatttgtgtgatcaggttgcaaaggacatgcttttctctttgcttttcctaagccactgcttcctgcctcttcaggaatctgattctctttttcagaatctttaggggacaacctaaagaattctccaattcctttttgccacttgggagttgggcgcacgcaaacggggttccctcctgcatatttattttcagctttcctcgatgaaactgatgtcgaattagtgggcagaggtgggaaggaaccaaggcacctttctgggggctcgaggcaggccaccacttttctgtaaggtgccggggaacactgtctggtttagtccgcacctgtttcaaacaggagagaggagaggggagaacgaantgacctcgtggccgattttttt

SEQ ID NO: 1080 - DNA, 308 bp, Homo Sapiens
  misc_feature (18)..(18): n is a, c, g, or t
tttttttttttttttttnaacagtcacatgaaaaataaacatctttatttttttgcctactttatttcattttttcaaataaaatttaaatctgtacaaagtatactgttacagtatatattttgtaagaatcaatgcctaaaataatcacaatacttcaataagcagtacagcagacctcgctagttttcagctttgatattgaacaaactcaagccggctgatgcacaacacgtttgcttgggttccacatggtgatttcccagcactgagatgggagaacatgacagcaaatatgggtatattac

SEQ ID NO: 1081 - DNA, 574 bp, Homo Sapiens
agggaatttaattcctattttgtccatgttggtgatgtactgtacttcccttccttttctctgcatcccccatcacctcatagaagactctttgttgatcattgtatgttaataatgtataaaatggctatcttgtaagcgtgctgtcctggtactagtgtagcgactttttttctcctctttcttctagtacatattgataggtataacataattaaggtttaaaaaaaattagacatagttattcagatttaggaccagtaaggatagaactttctcttatttatgaaaaaaaatgctaataattttggggcagttttttcctttaattatttttttcaatttcaagtttaattttattttagctgatctgatgtggtttcaactaacccaaggtctcaccatgttaaaatgccggcggactctacggcgttttgtagatcccccccccccacccactgtgaaggggtgccatactaccttaaatgctaatgctagatatgcaaaactggattttttaatttattttttaaaagagggaggcatggtatattaaaatgattttactaagaga

SEQ ID NO: 1082 - DNA, 541 bp, Homo Sapiens
cttgtctgtcctttacctcatggtgtggggtgtgcagatagcaggttgtggcttggtgagtgctcttcacttcaggtcaaggtgaggcacagttaacatgctaactactttcctcagttctctctgagttgtgtaaagctcccgatgccagacttcctcttaattttgcacattattaaagtccaaagagttaagatttggtgatgtggggcaaagggccagctgtcacagaaatcaatgaaatgatacacagaaatgggtatcatgaaaaggccactggacttgggaaaactgggtgcctgtccttgccctgccatgtacttacctgtgtgactggaggtgagatgttttacctatgggcctcagtttctcattacaaaatgacagagaagactagatacctaagttcctaagtttgtgacatttgtgaatttttcttggccctctgtgagtagagtgctaaatttagaggcttcctgtggttgaactgatgtccaattctcagggaacccagacttctcagttcagaacccagttccag

SEQ ID NO: 1083 - DNA, 334 bp, Homo Sapiens
  misc_feature (13)..(13): n is a, c, g, or t
  misc_feature (48)..(48): n is a, c, g, or t
  misc_feature (93)..(93): n is a, c, g, or t
  misc_feature (115)..(115): n is a, c, g, or t
  misc_feature (164)..(164): n is a, c, g, or t
  misc_feature (194)..(194): n is a, c, g, or t
  misc_feature (216)..(216): n is a, c, g, or t
  misc_feature (241)..(241): n is a, c, g, or t
  misc_feature (262)..(262): n is a, c, g, or t
  misc_feature (271)..(271): n is a, c, g, or t
  misc_feature (315)..(315): n is a, c, g, or t
agcaatctgcaangaagagttgaagatgaacaggcacttggcattcanttgcagaagaaaattaaagaattgcaagcccgcattgaggagctngaggaggaaatcgaggcagacnggcctcccgggcaaaacgcagagaagcagcgctctgacctctccctggnagctggaggagatcagcgagaggctggaanaagccggtggggccacttcagncccagattgagatgaacaataagcngggaggctgagtttccagaanaatgcgcangggacctggaggagggccacccctacaggcattgaagccaacangcgggcccacccttgaagg

SEQ ID NO: 1084 - DNA, 218 bp, Homo Sapiens
  misc_feature (218)..(218): n is a, c, g, or t
aggggtagatgaaatatgcagatctgaggtacctgggtgggggccacgcaaaagggaggctgaggagccacagctaactggcactgacgtggaagctgatgcagcagtggctaaaggagactgtacaggcaatgtcaggggagtggaagttgagttagccacgggagacggcaggcctgggaacagggccaaccctggagtggaagtcctcatgcagn

SEQ ID NO: 1085 - DNA, 2972 bp, Homo Sapiens
ttttgtacagtcatgcttatgctgctggtgccagtcatttgaagaaaaacagtccttggaggaaaagcagtcgtgcttaaagttcaaagctaatgatcacggatatgacaacttccgttccagtaataaatacagctcatcttgaaagaagaactattcactgtatttcattttctttatattggaccgaagtcattaaaacaaaatgaaacatttgccaaaacaaaacaaaaaactatgtatttgcacagcacactattaaaatattaagtgtaattattttaacactcacagctacatatgacattttatgagctgtttacggcatggaaagaaaatcagtgggaattaagaaagcctcgtcgtgaaagcacttaattttttacagttagcacttcaacatagctcttaacaacttccaggatattcacacaacacttaggcttaaaaatgagctcactcagaatttctattctttctaaaaagagatttatttttaaatcaatgggactctgatataaaggaagaataagtcactgtaaaacagaacttttaaatgaagcttaaattactcaatttaaaattttaaaatcctttaaaacaacttttcaattaatattatcacactattatcagattgtaattagatgcaaatgagagagcagtttagttgttgcatttttcggacactggaaacatttaaatgatcaggagggagtaacagaaagagcaaggctgtttttgaaaatcattacactttcactagaagcccaaacctcagcattctgcaatatgtaaccaacatgtcacaaacaagcagcatgtaacagactggcacatgtgccagctgaatttaaaatataatacttttaaaaagaaaattattacatcctttacattcagttaagatcaaacctcacaaagagaaatagaatgtttgaaaggctatcccaaaagacttttttgaatctgtcattcacataccctgtgaagacaatactatctacaattttttcaggattattaaaatcttcttttttcactatcgtagcttaaactctgtttggttttgtcatctgtaaatacttacctacatacactgcatgtagatgattaaatgagggcaggccctgtgctcatagctttacgatggagagatgccagtgacctcataataaagactgtgaactgcctggtgcagtgtccacatgacaaaggggcaggtagcaccctctctcacccatgctgtggttaaaatggtttctagcatatgtataatgctatagttaaaatactatttttcaaaatcatacagattagtacatttaacagctacctgtaaagcttattactaatttttgtattatttttgtaaatagccaatagaaaagtttgcttgacatggtgcttttctttcatctagaggcaaaactgctttttgagaccgtaagaacctcttagctttgtgcgttcctgcctaatttttatatcttctaagcaaagtgccttaggatagcttgggatgagatgtgtgtgaaagtatgtacaagagaaaacggaagagagaggaaatgaggtggggttggaggaaacccatggggacagattcccattcttagcctaacgttcgtcattgcctcgtcacatcaatgcaaaaggtcctgattttgttccagcaaaacacagtgcaatgttctcagagtgactttcgaaataaattgggcccaagagctttaactcggtcttaaaatatgcccaaatttttactttgtttttcttttaataggctgggccacatgttggaaataagctagtaatgttgttttctgtcaatattgaatgtgatggtacagtaaaccaaaacccaacaatgtggccagaaagaaagagcaataataattaattcacacaccatatggattctatttataaatcacccacaaacttgttctttaatttcatcccaatcactttttcagaggcctgttatcatagaagtcattttagactctcaattttaaattaattttgaatcactaatattttcacagtttattaatatatttaatttctatttaaattttagattatttttattaccatgtactgaatttttacatcctgataccctttccttctccatgtcagtatcatgttctctaattatcttgccaaattttgaaactacacacaaaaagcatacttgcattatttataataaaattgcattcagtggctttttaaaaaaaatgtttgattcaaaactttaacatactgataagtaagaaacaattataatttctttacatactcaaaaccaagatagaaaaaggtgctatcgttcaacttcaaaacatgtttcctagtattaaggactttaatatagcaacagacaaaattattgttaacatggatgttacagctcaaaagatttataaaagattttaacctattttctcccttattatccactgctaatgtggatgtatgttcaaacaccttttagtattgatagcttacatatggccaaaggaatacagtttatagcaaaacatgggtatgctgtagctaactttataaaagtgtaatataacaatgtaaaaaattatatatctgggaggattttttggttgcctaaagtggctatagttactgattttttattatgtaagcaaaaccaataaaaatttaagtttttttaacaactaccttatttttcactgtacagacactaattcattaaatactaattgattgtttaaaagaaatataaatgtgacaagtggacattatttatgttaaatatacaattatcaagcaagtatgaagttattcaattaaaatgccacatttctggtctctgggctggactgtgtgtttcattgttgtgaagaaacagatatacagacatgcaacttcccaaggttgattttccgggtaatagtttccaatggcctctttggtcttccttt

SEQ ID NO: 1086 - DNA, 5759 bp, Homo Sapiens
ataccctgtggtgctagtgtaaaatcaaatataatctacctctttagcttttctgttatgtaattggaatgaaaaaatagtgcttttttttttttttcatttttgagattgagttaccatggagggaaagaacatgtgttttaccagtggaacgcattctttgtgttatctcttcgatttttaacattttatgtttccagtttataaactttgcctccagtttgatgaagaaaatttagctattagaaagtatttaaaatctcaaaagtatgacattttaaaatgttagcaggtttaaagataacttagtttttcaactcttaacccaaaattatacttgtatactataatttgtgttgaattacttggtattatttatcatcctagtaagatctattttatataatttgattcactttttatattgaattatgttaattgtttttgtaatacacctttcatatttcttcaaagaaaactagtgttgggttattgctaattttgcttcgtggtttggttatttacatataaaaattatattgttttaaaaattgcaaagtgatcatttattgacacatcagcaagaattaatgttgaaatgcaagttttttcccctatccttaactaagtgtgtagatatctttgttttgtttctttaatagatagcaaacaataaagatgcattgaggaagacatggaaccctaagtttacattgagaagtcactttgatggcatccgagcccttgctttccatcccattgagcctgttttgataacagcatcagaggatcacacattaaaaatgtggaatttacagaaaacagccccagccaaaaagtgagaatattctactttaacattatttgaatattttaagtaacattttcagcagaaaactacatattttatgatttctgttaaatttcccaaacatttcttctagttctttcttccatgtcatgtaatttattgtgtttttccatttatacaacctaatgctaggttagaaaactgatgcttaggaagatatggtattatcttttggtttcaccagggtttgtgaatactgattacagtctttatacataacagtatttttaaatggctgctatatttggggagccccttgtctatactgaaggtttggactgttcttgtaaacaggtatatgcatctttaaaataatcaaatgtccacctccaccttgccccattgtttactagatttagacttatgagatggagcagagaaaagcctcactgggatgggtggagggtcttggtcttgtcttttggccttgagactttaggtactttccatacccaccaatatgtctagactcagaggctaacatgactgctagtgctcaccttggccctttagttcctgtctaagcatggatagacatgagttagtataaaccctttaaaagtcacaaagctaaatctggttctacttgcttgggtccttatcggagctccactcctttgggtcacatgtcaaaaaaaaaaaaaaaaaggcgccgtccgctgcgctgggggctcggtctatgacgagcagcggggtctgccatgggtcgggggctgctcaggggcctgtggccgctgcacatcgtcctgtggacgcgtatcgccagcacgatcccaccgcacgttcagaagtcggttaataacgacatgatagtcactgacaacaacggtgcagtcaagtttccacaactgtgtaaattttgtgatgtgagattttccacctgtgacaaccagaaatcctgcatgagcaactgcagcatcacctccatctgtgagaagccacaggaagtctgtgtggctgtatggagaaagaatgacgagaacataacactagagacagtttgccatgaccccaagctcccctaccatgactttattctggaagatgctgcttctccaaagtgcattatgaaggaaaaaaaaaagcctggtgagactttcttcatgtgttcctgtagctctgatgagtgcaatgacaacatcatcttctcagaagaatataacaccagcaatcctgacttgttgctagtcatatttcaagtgacaggcatcagcctcctgccaccactgggagttgccatatctgtcatcatcatcttctactgctaccgcgttaaccggcagcagaagctgagttcaacctgggaaaccggcaagacgcggaagctcatggagttcagcgagcactgtgccatcatcctggaagatgaccgctctgacatcagctccacgtgtgccaacaacatcaaccacaacacagagctgctgcccattgagctggacaccctggtggggaaaggtcgctttgctgaggtctataaggccaagctgaagcagaacacttcagagcagtttgagacagtggcagtcaagatctttccctatgaggagtatgcctcttggaagacagagaaggacatcttctcagacatcaatctgaagcatgagaacatactccagttcctgacggctgaggagcggaagacggagttggggaaacaatactggctgatcaccgccttccacgccaagggcaacctacaggagtacctgacgcggcatgtcatcagctgggaggacctgcgcaagctgggcagctccctcgcccgggggattgctcacctccacagtgatcacactccatgtgggaggcccaagatgcccatcgtgcacagggacctcaacagctccaatatcctcgtgaagaacgacctaacctgctgcctgtgtgactttgggctttccctgcgtctggaccctactctgtctgtggatgacctggctaacagtgggcaggtgggaactgcaagatacatggctccagaagtcctagaatccaggatgaatttggagaatgctgagtccttcaagcagaccgatgtctactccatggctctggtgctctgggaaatgacatctcgctgtaatgcagtgggagaagtaaaagattatgagcctccatttggttccaaggtgcgggagcacccctgtgtcgaaagcatgaaggacaacgtgttgagagatcgagggcgaccagaaattcccagcttctggctcaaccaccagggcatccagatggtgtgtgagacgttgactgagtgctgggaccacgacccagaggcccgtctcacagcccagtgtgtggcagaacgcttcagtgagctggagcatctggacaggctctcggggaggagctgctcggaggagaagattcctgaagacggctccctaaacactaccaaatagctcttctggggcaggctgggccatgtccaaagaggctgcccctctcaccaaagaacagaggcagcaggaagctgcccctgaactgatgcttcctggaaaaccaagggggtcactcccctccctgtaagctgtggggataagcagaaacaacagcagcagggagtgggtgacatagagcattctatgccttttacattgtcataggataagctgtgttagcacttcctcaggaaatgagattgattttacaatagccaataacatttgcactttattaatgcctgtatataaatatgaatagctatgttttatatatatatatatatatctatatatgtctatagctctatatatatagccataccttgaaaagagacaaggaaaaacatcaaatattcccaggaaattggttttattggagaactccagaaccaagcagagaaggaagggacccatgacagcattagcatttgacaatcacacatgcagtggttctctgactgtaaaacagtgaactttgcatgaggaaagaggctccatgtctcacagccagctatgaccacattgcacttgcttttgcaaaataatcattccctgcctagcacttctcttctggccatggaactaagtacagtggcactgtttgaggaccagtgttcccggggttcctgtgtgcccttatttctcctggacttttcatttaagctccaagccccaaatctggggggctagtttagaaactctccctcaacctagtttagaaactctaccccatctttaataccttgaatgttttgaaccccactttttaccttcatgggttgcagaaaaatcagaacagatgtccccatccatgcgattgccccaccatctactaatgaaaaattgttctttttttcatctttcccctgcacttatgttactattctctgctcccagccttcatccttttctaaaaaggagcaaattctcactctaggctttatcgtgtttactttttcattacacttgacttgattttctagttttctatacaaacaccaatgggttccatctttctgggctcctgattgctcaagcacagtttggcctgatgaagaggatttcaactacacaatactatcattgtcaggactatgacctcaggcactctaaacatatgttttgtttggtcagcacagcgtttcaaaaagtgaagccactttataaatatttggagattttgcaggaaaatctggatccccaggtaaggatagcagatggttttcagttatctccagtccacgttcacaaaatgtgaaggtgtggagacacttacaaagctgcctcacttctcactgtaaacattagctctttccactgcctacctggaccccagtctaggaattaaatctgcacctaaccaaggtcccttgtaagaaatgtccattcaagcagtcattctctgggtatataatatgattttgactaccttatctggtgttaagatttgaagttggccttttattggactaaaggggaactcctttaagggtctcagttagcccaagtttcttttgcttatatgttaatagttttaccctctgcattggagagaggagtgctttactccaagaagctttcctcatggttaccgttctctccatcatgccagccttctcaacctttgcagaaattactagagaggatttgaatgtgggacacaaaggtcccatttgcagttagaaaatttgtgtccacaaggacaagaacaaagtatgagctttaaaactccataggaaacttgttaatcaacaaagaagtgttaatgctgcaagtaatctcttttttaaaactttttgaagctacttattttcagccaaataggaatattagagagggactggtagtgagaatatcagctctgtttggatggtggaaggtctcattttattgagatttttaagatacatgcaaaggtttggaaatagaacctctaggcaccctcctcagtgtgggtgggctgagagttaaagacagtgtggctgcagtagcatagaggcgcctagaaattccacttgcaccgtagggcatgctgataccatcccaatagctgttgcccattgacctctagtggtgagtttctagaatactggtccattcatgagatattcaagattcaagagtattctcacttctgggttatcagcataaactggaatgtagtgtcagaggatactgtggcttgttttgtttatgtttttttttcttattcaagaaaaaagaccaaggaataacattctgtagttcctaaaaatactgacttttttcactactatacataaagggaaagttttattcttttatggaacacttcagctgtactcatgtattaaaataggaatgtgaatgctatatactctttttatatcaaaagtctcaagcacttatttttattctatgcattgtttgtcttttacataaataaaatgtttattagattg

SEQ ID NO: 1087 - DNA, 345 bp, Homo Sapiens
actacatacttccgactacatactccggactacatactttcgagtcctaagggaccatacagagtattcctaggtgcacaccaggaccagccactgttgcagcatgagttcccagcagcggaagcagccctgcatcccaccccttaagtttaagcagcggcaggtgaaacagccttgccagcctccacctaaggaaccatgcatccccaaaaccaaggagccctgccacccaagggtgcctgagccctgccacccaaaagggccggagccctgccagcccaaggttccagagccatgccaccccaaggggcctgagccctgcccttcaatagtcactccagcacc

SEQ ID NO: 1088 - DNA, 180 bp, Homo Sapiens
cggaagtagtcggggagggccgcgmagtcggaccggctgctgagacgaacgcttcactggggcartctctgcatatcatggggagatagacgctgctgcctttacttggccttggtcctcacagctccaaaaagatacaggatctcgataagctctatgagctgaagtccaaagctcggc

SEQ ID NO: 1089 - DNA, 4238 bp, Homo Sapiens
cattcatcttctcctgcccttggacatcacagctccaggaactcagatcttcagactcagggtgaaggacaccaccagctttccaggttccccagcttgcagacggcatacgctaggtcttgactccactaacggggacttctcatacggctttgaacttggaccttggtgcataagcaaatgtaactcagcgaattgtaatggaaagcatatggacaggtctacgccacatcacttaggtgctaagagatgccgtttgcaggcctcatctctgcttgagaatcgggggctccaggcactagaagagccggctgatcctgggctcctagcttgaataagccttcacttccagctgctctccccaacggctgtgtaaactactcgtttctcttaatgatgggtattggtaagaataccacatccaaatcaatggaggctggaagttcaacagaaggcaaatacgaagacgaggcaaagcacccagctttcttcactcttccggtggtgataaatggaggcgccacctccagcggtgagcaggacaatgaggacactgagctcatggcgatctacactacggaaaacggcattgcagaaaagagctctctcgctgagaccctggatagcactggcagtctggacccccagcgatcagacatgatttataccatagaagatgttcctccctggtacctgtgtatatttctggggctacagcactacctgacatgcttcagcggcacgatcgcagtgcccttcctgttggctgatgccatgtgtgtggggtacgaccagtgggccaccagccagctcattgggaccattttcttctgtgtgggaatcactactttgctacagacaacgtttggatgcaggttacccctgtttcaggccagtgcttttgcatttttggcccctgctcgagccatcctgtctttagataaatggaaatgtaacaccacagatgtttcagttgccaatggaacagcagagctgttgcacacagaacacatctggtatccccggatccgagagatccagggggccatcatcatgtcctcactgatagaagtagtcatcggcctcctcggcctgcctggggctctactgaagtacatcggtcccttgaccattacacccacggtggccctaattggcctctctggtttccaggcagcgggggagagagccgggaagcactggggcattgccatgctgacaatattcctagtattactgttttctcaatacgccagaaatgttaaatttcctctcccgatttataaatccaagaaaggatggactgcgtacaagttacagctgttcaaaatgttccctatcatcctggccatcctggtatcctggctgctctgcttcatcttcacggtgacagatgtcttccctcccgacagcacaaagtatggcttctatgctcgcacagatgccaggcaaggcgtgcttctggtagccccgtggtttaaggttccatacccatttcagtggggactgcccaccgtgtctgcggccggtgtcatcggcatgctcagtgccgtggtcgccagcatcatcgagtctattggtgactactacgcctgtgcacggctgtcctgtgccccacccccccccatccacgcaataaacaggggaattttcgtggaaggcctctcctgtgttcttgatggcatatttggtactgggaatggctctacttcatccagtcccaacattggagttttgggaattacaaaggtcggcagccgccgcgtgatacagtgcggagcagccctcatgctcgctctgggcatgatcgggaagttcagcgccctctttgcgtcccttccggatcctgtgctgggagccctgttctgcacgctctttggaatgatcacagctgttggcctctctaacctgcagttcattgatttaaattcttcccggaacctctttgtgcttggattttcgatcttctttgggctcgtccttccaagttacctcagacagaaccctctggtcacagggataacaggaatcgatcaagtgttgaacgtccttctcacaactgctatgtttgtagggggctgtgtggcttttatcctggataacaccatcccaggcactccagaggaaagaggaatccggaaatggaagaagggtgtgggcaaagggaacaaatcactcgacggcatggagtcgtacaatttgccatttggcatgaacattataaaaaaatacagatgcttcagctacttacccatcagcccaacctttgtgggctacacatggaaaggcctcaggaagagcgacaacagccggagttcagatgaagactcccaggccacgggatagcctttgctgtgccctgtggcctggccgcagtgaggcatgtatctgtagttccttgctgagtaacaagaagtaaaatacatgtttgtatatctacatttacattctgcgccccagagctaagacagactgcgaatcacttttctgctgtgagggtgatggtgcctgatgcggtgtctcgcctatctccttatttaagcccttaactccttgccctttgagagtgtccattgctggccatggtcactaaatttgaagttccagtcctccctttggagtggacatttaaaatctgcagccattccttgcttcagttcccttccaccacccagggctggctttcctataagccacctccagggtccaggggctttctctctctctccgaagcccctggacctgtttccttgtcatttgaccctcgtctgtgcccgcggagacctcctctgaccaaggggcagtagtatgccttgcgctatcatgactgactggcccagtatgattctgttgtcgctgatctcccggaggaggaggctgttgacctgaaaacagtggcgtggctcccctgtgcccagatctggccatgggtgaggcctgcacagatgttgaatgaacatctgtttggggcattggagggaaaaggaaaggaccctgaagccaatatctgattctcggctgcaccttctcttggccaccctggccctgaccgggccagcacgtgcacactggcctcttttcatttcactagtggccgagacaccctctctggcatttatcactgttggccggtgtgatgagtatagagtgccacccaaggcaccagtcacacaagctgatgggcgtcttggctctgccgtcatgtggatgttattgtcgcgcgcgtctataattacaaggttttattcctatttaatgttattgactatagcagattttggaaatcagtgttttccatgtgaccctctttccttgcatccctattccttgtcccccacccactcttccccccatcaagaaaagaaccagcatttgtaaagctgtggacaccatcagggaagcttgttgtaacggcttttgaaggccagtaaccattgttgtggttgtgttttgtattgcttgataccatgaaagtgtaaatactgtaatgcctaatctatttatcaaaactgactactggaccggagcccagaaaccatgggtcaagttacacgtgaatttgttttgtgaagaagggaagctggggcaggtaacacgcagagccgccacgtggaacggtctgtccgccggtctgtcccgcttgccgggcttctgttgcaagtcttggcttaaggagacttcctgtgggttgccatgtcgcacgtccgttagatcttgattttacaggtgagggtggttgccaaaggtgataagaaagcagccaacaggctccctttcacttaagagagttgtaattaataacactaaattcttcctgagaaatgactcctcttggtttggtttgaagtttttcagtgaaggaaaaggcctgagataggaagcagtgccctcgcttcatgaggtggcacatcttcggtggccgttggcctggtcgagctttggtcagctgcgtgggtgcctgtctcctgtctccagcggcagggcatggttcttggcagcctggtgtccacacggtgcattcctgtccccctcggccccaggctggctcagctctccagtgctgcggcgctgtctttgcagcattgccatgtcaccgtagcccccttcactcttggaagtttggggcttcaaggtttattctggcaagaacacctcggagccactgcattgttttgccaaaaacttactgcagattaagtaaagaacttagatgctaaattacaaaaaaaaaaaaaaaa

SEQ ID NO: 1090 - DNA, 295 bp, Homo Sapiens
  misc_feature (208)..(208): n is a, c, g, or t
  misc_feature (233)..(233): n is a, c, g, or t
gggggttcaaggactcttccggtccctaaagcaagaaggaagaccgagaaaaggaagcggaggagaatcccggggcatacgcttgacacacacgcatacaaaaagagctttagactcgaaagaggaattaccgaagtgtcgagagaggaattttaagaagtttacaactccgtcttcgccctaaacgcacgctgacccggaaagtaanctcctgaagctgggtcaaaggcggnggttctacggatgccggaaggagggtgcgcgcccatccttttagcaccgcgagaggcgccgg

SEQ ID NO: 1091 - DNA, 680 bp, Homo Sapiens
gcgaccgggtcccagactccccccagcacagcagagcgcttccctgcccacccgcggaaaccgccccaggatgcagcaccgaggcttcctcctcctcaccctcctcgccctgctggcgctcacctccgcggtcgccaaaaagaaagataaggtgaagaagggcggcccggggagcgagtgcgctgagtgggcctgggggccctgcacccccagcagcaaggattgcggcgtgggtttccgcgagggcacctgcggggcccagacccagcgcatccggtgcagggtgccctgcaactggaagaaggagtttggagccgactgcaagtacaagtttgagaactggggtgcgtgtgatgggggcacaggcaccaaagtccgccaaggcaccctgaagaaggcgcgctacaatgctcagtgccaggagaccatccgcgtcaccaagccctgcacccccaagaccaaagcaaaggccaaagccaagaaagggaagggaaaggactagacgccaagccttggatgccaatggagccccctggtgtcacatggggcctggcccacgccctccctctcccaggcccgagatgtgacccaccagtgccttctgtctgctcgttagctttaatcatcatgcctgcttgtcctcctcactccccagcccaccctaagtgccaaagtgggga

SEQ ID NO: 1092 - DNA, 469 bp, Homo Sapiens
gtgcagtgggaagatctcagctcactgcaacctccacctcctggattcatgtgattctcctgcctcagcctcccgagtagctgggattaaaggcgtgcaccaccacgtctggctaatttttgtatttttggtagagatggggtttcaccatgttggccaagctggtcttgaactcctgacctcaggtgatctgcccgcctcggcctcccaaagtgctaggattataggcatgagccactgtgcctggtcaagatgcaattttaaagaaggaaaaatagaactaagaatatcatggccaaccagtgacattcttggactgggagctgctgccaggattctgtgaacccctccaaaagctgtgactctatggggtcctggcagagagaaagagggaaccccgatttctacaaaagttcttcatcctcatccccatatctcaacccccacgtcagccctggagggtgagcca

SEQ ID NO: 1093 - DNA, 3377 bp, Homo Sapiens
gggagccgcgcgggagcagcgcagctacggcggcggcagcggcggcgcggttgcgattccgagccgttgagacgcctctgcggcagctggtggcgcaggtggcttgcgtggacgcgggtagaggcgaccggccagcaaccgcagcgtcggcgcccgcggccccggcagcaggcgcgtcgggacgccccgaggcatcctcccccgcccgcgggcccggtagctgggcccgcgtccgccgcccgcatccccgcgccgccgcatctcctcgccgcctcccgggcttcggacccccggtctcgcccccggaaacatgactcgcgatttcaaacctggagacctcatcttcgccaagatgaaaggttatccccattggccagctcgagtagacgaagttcctgatggagctgtaaagccacccacaaacaaactacccattttcttttttggaactcatgagactgcttttttaggaccaaaggatatatttccttactcagaaaataaggaaaagtatggcaaaccaaataaaagaaaaggttttaatgaaggtttatgggagatagataacaatccaaaagtgaaattttcaagtcaacaggcagcaactaaacaatcaaatgcatcatctgatgttgaagttgaagaaaaggaaactagtgtttcaaaggaagataccgaccatgaagaaaaagccagcaatgaggatgtgactaaagcagttgacataactactccaaaagctgccagaagggggagaaagagaaaggcagaaaaacaagtagaaactgaggaggcaggagtagtgacaacagcaacagcatctgttaatctaaaagtgagtcctaaaagaggacgacctgcagctacagaagtcaagattccaaaaccaagaggcagacccaaaatggtaaaacagccctgtccttcagagagtgacatcattactgaagaggacaaaagtaagaaaaaggggcaagaggaaaaacaacctaaaaagcagcctaagaaggatgaagagggccagaaggaagaagataagccaagaaaagagccggataaaaaagaggggaagaaagaagttgaatcaaaaaggaaaaatttagctaaaacaggggttacttcaacctccgattctgaagaagaaggagatgatcaagaaggtgaaaagaagagaaaaggtgggaggaactttcagactgctcacagaaggaatatgctgaaaggccaacatgagaaagaagcagcagatcgaaaacgcaagcaagaggaacaaatggaaactgagcagcagaataaagatgaaggaaagaagccagaagttaagaaagtggagaagaagcgagaaacatcaatggattctcgacttcaaaggatacatgctgagattaaaaattcactcaaaattgataatcttgatgtgaacagatgcattgaggccttggatgaacttgcttcacttcaggtcacaatgcaacaagctcagaaacacacagagatgattactacactgaaaaaaatacggcgattcaaagttagtcaggtaatcatggaaaagtctacaatgttgtataacaagtttaagaacatgttcttggttggtgaaggagattccgtgatcacccaagtgctgaataaatctcttgctgaacaaagacagcatgaggaagcgaataaaaccaaagatcaagggaagaaagggccaaacaaaaagctagagaaggaacaaacagggtcaaagactctaaatggaggatctgatgctcaagatggtaatcagccacaacataacggggagagcaatgaagacagcaaagacaaccatgaagccagcacgaagaaaaagccatccagtgaagagagagagactgaaatatctctgaaggattctacactagataactaggttgacatacctggaatatagagaacacttgagaagtttgtaatggttttcatttgaaatagactgctggaagtttaaatttttataagcataggtttgatgttgaaaacttgttttgagggagaaaatccctttgttttaaagtaaagtaaacattatcgctaagtgtaacttgtgcagtattaacagctacattatacagtaaatgtgggataaaatccatttagaaaatgttaaactgcttttccagacatggttgtagcatattttcaattagtgtgtgtatgttaatgtgtaattgatagtagaacaaagttacatttttaaaactgctacttgtataaaccttgcctcttttcccaaatactgtgggttttgtgcatagtttttacaaaccttggatttaccagactgtcttttcactgtttgtgggttttgtagaagttacacatttttatggtagataaaatgttacttctatacaagtactcactccctttttatcaaaagttaattttaatctcacagtctacattgtgctacattatccagcttctttggaacaatgtgtgctctgtatggttttttttggtatgacaactaattaagcaactgacattgaactgagaattctacaaactataaaacattaatttttgaaggtaatttagttttgtggctgggcattcagtgaagtcttaggacttctttgcagacaactgactgggtatatataggaatgaatctggctttagggttaaatcatttaaggtccttttataggcaggcactagtaactaaaactgaaaactaagtaagtttatttttgaggaatgttgttaaaaatgtctttaggaagtcactaaaacttaattggaagaaaaaatcatgatgcttatacaataaatatgaataaatgttatataaggaaactcacctatttgaaatcatggctatattgtttttattttctagattccaaaaatacaaacactagttgttccagcattgtactttgataagtctgtacattgacgtgtatggactaaatccagggtaaaatcaatgttacaaaatttaagggtatgttaactaaaggatagcatttctaagatattttgaatattagggtcatttggcacttctcagcaagtaggatacttctcatgtttttgaaattatatgaatatggaaaaaaatggcttaagaccagcgtctctgtatgacattgtgtggttgaccctctgagataactgttttcatctacagaattgcatttttgcttttaaagaggtcttataatggaactaggaatcaccgttttgagagaacctgcatatataccagtcattatctgtttggtccttatacagttttaacttacttagatttattctagttaagccataagttcaacgtgtaaacttgttttcattaaagaatttttctatcaaaaaaaaaaaaaaaaaaaaaa

SEQ ID NO: 1094 - DNA, 697 bp, Homo Sapiens
cgcggagccgggaagtcgtcgctactctggtggaactcagagttggttctggaggctgtgcggacgcggaggtccctcagaggatccagcgaggggcgccaacaagaggcgaagaggtggcaccagggcggcggcaggaagaggagctgggatgcaggagcgcggatgcggagcgtcccgacccgcctgtgcgtactttcttggagtggaaggggcgggggaatcggcccctgagggaagcgcccggtggcgagggggttagccaagttccggctgcggcgccactccctcggttccacgagaggaaagttttttattttccagacgcttccgcctggctcgcgccctccgggcccagcctcccgagccttcggagcgggcgccgtcccagcccagctccggggaaacgcgagccgcgatgcctggggggtgctcccggggccccgcctgcctgggggacgggcgtctgcggctggcgcgactagcgctggtactcctgggctgggtctcctcgtcttctcccacctcctcggcatcctccttctcctcctcggacgccgtccttggcttccgccggtgtccgcccagcccccgctgcggaccagtgccccgcgctgtgcgagtgctccgaggcagcgcgcacagtcaagtgcgttacccggattgaccaggtgcccagggcctgccgctagtggca

SEQ ID NO: 1095 - DNA, 5320 bp, Homo Sapiens
acctcgcactctcagtttcaccgctcgatcttgggacccaccgctgccctcagctccgagtccagggcgagtgcagagcagagcgggcggaggaccccgggcgcgggcgcggacggcacgcgggcatgaacctggagggcggcggccgaggcggagagttcggcatgagcgcggtgagctgcggcaacgggaagctccgccagtggctgatcgaccagatcgacagcggcaagtaccccgggctggtgtgggagaacgaggagaagagcatcttccgcatcccctggaagcacgcgggcaagcaggactacaaccgcgaggaggacgccgcgctcttcaaggcttgggcactgtttaaaggaaagttccgagaaggcatcgacaagccggaccctcccacctggaagacgcgcctgcggtgcgctttgaacaagagcaatgactttgaggaactggttgagcggagccagctggacatctcagacccgtacaaagtgtacaggattgttcctgagggagccaaaaaaggagccaagcagctcaccctggaggacccgcagatgtccatgagccacccctacaccatgacaacgccttacccttcgctcccagcccaggttcacaactacatgatgccacccctcgaccgaagctggagggactacgtcccggatcagccacacccggaaatcccgtaccaatgtcccatgacgtttggaccccgcggccaccactggcaaggcccagcttgtgaaaatggttgccaggtgacaggaaccttttatgcttgtgccccacctgagtcccaggctcccggagtccccacagagccaagcataaggtctgccgaagccttggcgttctcagactgccggctgcacatctgcctgtactaccgggaaatcctcgtgaaggagctgaccacgtccagccccgagggctgccggatctcccatggacatacgtatgacgccagcaacctggaccaggtcctgttcccctacccagaggacaatggccagaggaaaaacattgagaagctgctgagccacctggagaggggcgtggtcctctggatggcccccgacgggctctatgcgaaaagactgtgccagagcaggatctactgggacgggcccctggcgctgtgcaacgaccggcccaacaaactggagagagaccagacctgcaagctctttgacacacagcagttcttgtcagagctgcaagcgtttgctcaccacggccgctccctgccaagattccaggtgactctatgctttggagaggagtttccagaccctcagaggcaaagaaagctcatcacagctcacgtagaacctctgctagccagacaactatattattttgctcaacaaaacagtggacatttcctgaggggctacgatttaccagaacacatcagcaatccagaagattaccacagatctatccgccattcctctattcaagaatgaaaaatgtcaagatgagtggttttctttttccttttttttttttttttttgatacggggatacggggtcttgctctgtctcccaggctggagtgcagtgacacaatctcagctcactgtgacctccgcctcctgggttcaagagactctcctgcctcagcctccctggtagctgggattacaggtgtgagccactgcacccacccaagacaagtgattttcattgtaaatatttgactttagtgaaagcgtccaattgactgccctcttactgttttgaggaactcagaagtggagatttcagttcagcggttgaggagaattgcggcgagacaagcatggaaaatcagtgacatctgattggcagatgagcttatttcaaaaggaagggtggctttgcatttcttgtgttctatagactgccatcattgatgatcactgtgaaaattgaccaagtgatgtgtttacatttactgaaatgtgctctttaatttgttgtagattaggtcttgctggaagacagagaaaacttgcctttcagtattgacactgactagagtgatgactgcttgtaggtatgtctgtgccatttctcagggaagtaagatgtaaattgaagaagcctcacacgtaaaagaaatgtattaatgtatgtaggagctgcagttcttgtggaagacacttgctgagtgaaggaaatgaatctttgactgaagccgtgcctgtagccttggggaggcccatcccccacctgccagcggtttcctggtgtgggtccctctgccccaccctccttcccattggctttctctccttggcctttcctggaagccagttagtaaacttcctattttcttgagtcaaaaaacatgagcgctactcttggatgggacatttttgtctgtcctacaatctagtaatgtctaagtaatggttaagttttcttgtttctgcatctttttgaccctcattctttagagatgctaaaattcttcgcataaagaagaagaaattaaggaacataaatcttaatacttgaactgttgcccttctgtccaagtacttaactatctgttcccttcctctgtgccacgctcctctgtttgcttggctgtccagcgatcagccatggcgacactaaaggaggaggagccggggactcccaggctggagagcactgccaggacccaccactggaagcaggatggagctgactacggaactgcacactcagtgggctgtttctgcttatttcatctgttctatgcttcctcgtgccaattatagtttgacagggccttaaaattacttggctttttccaaatgcttctatttatagaatcccaaagacctccacttgcttaagtatacctatcacttacatttttgtggttttgagaaagtacagcagtagactggggcgtcacctccaggccgtttctcatactacaggatatttactattactcccaggatcagcagaagattgcgtagctctcaaatgtgtgttcctgcttttctaatggatattttaaattcattcaacaagcacctagtaagtgcctgctgtatccctacattacacagttcagcctttatcaagcttagtgagcagtgagcactgaaacattattttttaatgtttaaaaagtttctaatattaaagtcagaatattaatacaattaatattaatattaactacagaaaagacaaacagtagagaacagcaaaaaaataaaaaggatctccttttttcccagcccaaattctcctctctaaaagtgtccacaagaaggggtgtttattcttccaacacatttcacttttctgtaaatatacataaacttaaaaagaaaacctcatggagtcatcttgcacacactttcatgcagtgctctttgtagctaacagtgaagatttacctcgttctgctcagaggccttgctgtggagctccactgccatgtacccagtagggtttgacatttcattagccatgcaacatggatatgtattgggcagcagactgtgtttcgtgaactgcagtgatgtatacatcttatagatgcaaagtattttggggtatattatcctaagggaagataaagatgatattaagaactgctgtttcacggggcccttacctgtgaccctctttgctgaagaatatttaaccccacacagcacttcaaagaagctgtcttggaagtctgtctcaggagcaccctgtcttcttaattctccaagcggatgctccatttcaattgctttgtgacttcttcttctttgtttttttaaatattatgctgctttaacagtggagctgaattttctggaaaatgcttcttggctggggccactacctcctttcctatctttacatctatgtgtatgttgactttttaaaattctgagtgatccagggtatgacctagggaatgaactagctatgaaatactcagggttaggaatcctagcacttgtctcaggactctgaaaaggaacggcttcctcattccttgtcttgataaagtggaattggcaaactagaatttagtttgtactcagtggacagtgctgttgaagatttgaggacttgttaaagagcactgggtcatatggaaaaaatgtatgtgtctcccaggtgcatttcttggtttatgtcttgttcttgagattttgtatatttaggaaaacctcaagcagtaattaatatctcctggaacactatagagaaccaagtgaccgactcatttacaactgaaacctaggaagcccctgagtcctgagcgaaaacaggagagttagtcgccctacaggaaacccagctagactattgggtatgaactaaaaagagactgtgccatggtgagaaaaatgtaaaatcctacagtggaatgagcagcccttacagtgttgttaccaccaagggcaggtaggtattagtgtttgaaaaagctggtctttgagcgagggcataaatacagctagccccaggggtggaacaactgtgggagtcttgggtactcgcacctcttggctttgttgatgctccgccaggaaggccacttgtgtgtgcgtgtcagttacttttttagtaacaattcagatccagtgtaaacttccgttcattgctctccagtcacatgcccccacttccccacaggtgaaagtttttctgaaagtgttgggattggttaaggtctttatttgtattacgtatctccccaagtcctctgtggccagctgcatctgtctgaatggtgcgtgaaggctctcagaccttacacaccattttgtaagttatgttttacatgccccgtttttgagactgatctcgatgcaggtggatctccttgagatcctgatagcctgttacaggaatgaagtaaaggtcagttttttttgtattgattttcacagctttgaggaacatgcataagaaatgtagctgaagtagaggggacgtgagagaagggccaggccggcaggccaaccctcctccaatggaaattcccgtgttgcttcaaactgagacagatgggacttaacaggcaatggggtccacttccccctcttcagcatcccccgtaccccactttttgctgaaagaactgccagcaggtaggaccccagaggcccccaaatgaaagcttgaatttcccctactggctctgcgttttgctgagatctgtaggaaaggatgcttcacaaactgaggtagataatgctatgctgtcgttggtatacatcatgaatttttatgtaaattgctctgcaaagcaaattgatatgtttgataaatttatgtttttaggtaaataaaaacttttaaaaagttgtt

SEQ ID NO: 1096 - DNA, 617 bp, Homo Sapiens
  misc_feature (196)..(196): n is a, c, g, or t
  misc_feature (320)..(320): n is a, c, g, or t
tttttttttttttctatgtccaaaacatttatttcaggaaatatttgtgcctgcacaacaggggaactttgtggggtgtctgtggcttgctacagtgacatctggcaggactaactgggtcatcaaagccacagaataaggactgggaaggtggccacaactgcaaggactggggccatgtggggggaggactttnaaactgaccacttggctggtaacttggctgtccagtgtatgggaatctcagtgagttcctggcctgaagtcagactctgtctctgacgcaaacgtgagaggtcggagtggcaggaactgctcanctgctcatccgggaacttgtcctccaaggggctttgccatttgttttcttcctgtaccttttccacttgtctgaagacccgcagcaggtttccacgaaggacaccctgaagctcttcctcactccagccacgactcagcaactcctctatcaggaccgggtatgtggacacgtcttccagcccctgagggaatttgccgggcccatcataatctccaccaatcccgatgaacttggatccaatgacagccttgatgtggtcgaagtgatctgccacagtggacacattgggctgatg

SEQ ID NO: 1097 - DNA, 2504 bp, Homo Sapiens
gcgatctagacctagttagccaagtctctaacgtgacatagggaaagcttgcaatggcaactggccgcccgtctgcgcctgtctctcgccacgcctattgctgcaggatgacgcgcacctctatgaacccgccgtgaggtgtgagtgtgacgcagggaagagtcgcacggacgcactcgcgctgcggccagctgcgggcccgggcggcggctgtgttgcgcagtcttcatgggttcccgacgaggaggtctctgtggctgcggcggctgctaactgcgccacctgctgcagcctgtccccgccgctctgaagcggccgcgtcgaagccgaaatgccgccaccccggaccggccgaggccttctctggctgggtctggttctgagctccgtctgcgtcgccctcggatccgaaacgcaggccaactcgaccacagatgctctgaacgttcttctcatcatcgtggatgacctgcgcccctccctgggctgttatggggataagctggtgaggtccccaaatattgaccaactggcatcccacagcctcctcttccagaatgcctttgcgcagcaagcagtgtgcgccccgagccgcgtttctttcctcactggcaggagacctgacaccacccgcctgtacgacttcaactcctactggagggtgcacgctggaaacttctccaccatcccccagtacttcaaggagaatggctatgtgaccatgtcggtgggaaaagtctttcaccctgggatatcttctaaccataccgatgattctccgtatagctggtcttttccaccttatcatccttcctctgagaagtatgaaaacactaagacatgtcgagggccagatggagaactccatgccaacctgctttgccctgtggatgtgctggatgttcccgagggcaccttgcctgacaaacagagcactgagcaagccatacagttgttggaaaagatgaaaacgtcagccagtcctttcttcctggccgttgggtatcataagccacacatccccttcagataccccaaggaatttcagaagttgtatcccttggagaacatcaccctggcccccgatcccgaggtccctgatggcctaccccctgtggcctacaacccctggatggacatcaggcaacgggaagacgtccaagccttaaacatcagtgtgccgtatggtccaattcctgtggactttcagcggaaaatccgccagagctactttgcctctgtgtcatatttggatacacaggtcggccgcctcttgagtgctttggacgatcttcagctggccaacagcaccatcattgcatttacctcggatcatgggtgggctctaggtgaacatggagaatgggccaaatacagcaattttgatgttgctacccatgttcccctgatattctatgttcctggaaggacggcttcacttccggaggcaggcgagaagcttttcccttacctcgacccttttgattccgcctcacagttgatggagccaggcaggcaatccatggaccttgtggaacttgtgtctctttttcccacgctggctggacttgcaggactgcaggttccacctcgctgccccgttccttcatttcacgttgagctgtgcagagaaggcaagaaccttctgaagcattttcgattccgtgacttggaagaggatccgtacctccctggtaatccccgtgaactgattgcctatagccagtatccccggccttcagacatccctcagtggaattctgacaagccgagtttaaaagatataaagatcatgggctattccatacgcaccatagactataggtatactgtgtgggttggcttcaatcctgatgaatttctagctaacttttctgacatccatgcaggggaactgtattttgtggattctgacccattgcaggatcacaatatgtataatgattcccaaggtggagatcttttccagttgttgatgccttgagttttgccaaccatggatggcaaatgtgatgtgctcccttccagctggtgagaggaggagttagagctggtcgttttgtgattacccataatattggaagcagcctgagggctagttaatccaaacatgcatcaacaatttggcctgagaatatgtaacagccaaaccttttcgtttagtctttattaaaatttataattggtaattggaccagttttttttttaatttccctctttttaaaacagttacggcttatttactgaataaatacaaagcaaacaaactcaagttatgtcatacctttggatacgaagaccatacataataaccaaacataacattatacacaaagaatactttcattatttgtggaatttagtgcatttcaaaaagtaatcatatatcaaactaggcaccacactaagttcctgattattttgtttataatttaataatatatcttatgagccctatatattcaaaatattatgttaacatgtaatccatgtttctttttcc

SEQ ID NO: 1098 - DNA, 121600 bp, Homo Sapiens
gatctcaagttgtgtgctggcagaaccactactctcttcaaagctgtcagacagggacatttaggtctgcagaggtttctgctgccttttgtttggctatgccctgcccccagaggtggagtctacagaggcaggcaggcctccttgagctgcggtgggctccacccagttcgagcttcccagccactttgtttacctactcaagcctgggcaatggcaggtgcccctcccccagcctcactgccgccttgcagtttaatctcagactgctgtgctagcaatgagtgagggtccatgggcataggacccaccaaaccaggtgtgggatataatctcctcatgtgccatttgctaagattgtcagaaaagcacactattagggtgggagtgacccgattttccaggtgccatctgtcacccctttccttagctaggaaagagaattccctgaccccttgcacttcctgggtgaggtgatacctcgccctgcttcggctcaggctcagtgcactgcacccactgtcctgcacccactgtctgacaatccctagtgagatgcacccagtacctcagttggaaatgcagaagtcattcatcttctgcgtcgctcacactgggagctgtagactggagctgttcctatttggctgtcttggctccaccccttatgtacctttttctatttctcctactttaaactggattaattttaatttatttctatgtagccaattaatgtgtaagtatcctaaaatgaattagtcaactactggtacagccaagtaagcttctatcagattcaaccctcttgaaaataacagagtaaggtttggcaaaccatggaccacaggccaaatttgcttgtcacttgtctttgtaaataaggctttattggaatacagccacacccattcatttatatatgcatttctgctctcatgttatagtggcagaattgggtagttatgacagactgtatggtccacaaagcttaaaaatatttattatctggccctttatagaaaaagtttgccatcaactgctctgaagaaaatacaataaataatgacacaaaggactgctgagtgagcaaaaaccatggacatgaaaaaaaagaagtgagggagagagtttcccatgttttactccttttagcctgagggtaggccaatgtttggattgtgggaatcgattaacactctgacagatagccagtagtctttctgaactgaagaaccagaagacagagctctggacaaccacagccactggaaagtgagaggataattccagaaaagacagactcagagatggggccatcaaattcctctcaagtccattacttacccctgaaccatgtatatgtgggacagatgcaaagcagccgggctaaataattagaattggcagcttcagtccaatcatgttaatttactgctaaaacaaaaatatcaatattctttaagagaatgcatgagaatctcagagcctctaaaacctagcattcataatgtccaagctgtaatacaaaattgcttgacgtatgaagaaccaggaaaatatgatcgtgtttcaagaaaaaaagacaaccattgaaaccagccaagagatatcatgatgttggaattagtggatgctctagactgaatgtttgtgtctcttccaaattgacagcaggttgaaacttgatccccaatgtgttggtatgtggaagtggggcttttggcaggtaataaggtcatgatatgagggtagagcccttgtcaataggattagttctcctatgaaagagacctcagagagcttgttcattccttccaccatttgaggacacagctaaaagatgctttctatgaatcagaaaacaggccttcaccagacactgaatctgctggcaacttccccttggactatctagccttcagacttgtgagaaataaatttctgttgtgtataagctacccagttttggtattttgttatagcagccgagttgggctaagacagttgacaaggaatataaagcagcaattacaactgtgctcaattaagtgacaaaaatatgcttgtaaccaatgaaataatagcatatatcagcagggaaataaacatttttttgaagagagcaaaatggaaatttaaaactgaaaaacactacataagaaatacaaattcactgcataagcttaatagcagaaagcaaatgacagaggaaagaactagtaaacttgaagattgtgtaataaaaattatccagtgtgatgcaaagagagaaataagatgggaaaaaacctatagtcttagggacccataggacactaccttaaggcctaacacaaatgtaactggagtcccaggagagaatagaatgagtggaaaaaatacgtttgaagatataatggccaaaaatacaacaaatttggtgaaggattccagaaactcagtgaacctgaagtaggataaatagaaagaaaatcatgcatagatacatcatagtcatatttctaaaaaccaaagataatatcttgaagagaatagaaaataataccagaataaacttgaattttcaaggatgaaggaagaacaagagaaatggtacctatgtgggtaaatataactattattcttctctttagttttaaaaatctcttataatgtttgaaaacaaaaattataacactgtcggatggggtttttgatgtatgtaaatgtaatacagacatatctcagaaatattgtaggttcagttccacaccacttcaatgaagcaaatatcacaaattgttttgtttcccagcatatataaaagttacttttctattatactgtagtctattaagtgtgcaatataattatgcctaaaacataccttcatttaaaaatactttattgttaaaaaatgctaacaatcacctgagccctcaccaagtcatttgctttttgctgatggagggtcttccctcaatgctgatggctgctaactgatcagggtggtggttgattaaggctggggtgactatggccatgacaacaatgaaatttgctgcatcaatggactctttcacaaaagatttctttgtgagtgtaatgctgttttgtagcattttacccacagtagaacttcttccaaaattggagtcaattctctcaagccctgctgctgctttatcaattaagtttatataatattctaaatccacattccagcaatattcacagcatcttcaccaggagtagactccgtctcaagaaaccacactctgctcatccataagaagcaactcgtcattcattcagttttatgagattatagcaattcaaacatatcttcaggctccatttctaattcaggttctcttgctattttcaccacatctgtggtgacttcctccactgaagccttgaacccctcaaagtcatccatgagggttggaatcaacttcttccaaactgctattaatgtttatattttgacctcctcccatgaatcacaaatgttcttaatggcatctagaatggagatttatttccagaaggttttagatgtactttgctcagatccatcagagtaatcactatcaatggaagctagaggctcacaaaatgtattccttaaataataatacttgaaagtagaaatgactccatgatccatgggctgaagaatagatattgcattagcaggcatgaaaacaacattaatctcctcataaatcttcatcagaactcttgaatggtcaggtgtattgccaatgagcagtaacattttgaaaggaatccttttctctcagcagtaggtctcagaagtgggcttaaaatattcaataaaccacattgtaaacagacgtgctgtcattcaggctttgcccttccattggtagagtatgggcagagtatatttagcataattcttaaatatactctgcctgtactacaatttttggaatggttaaataagcactggctttaacttaaagtaacaagttgcattagcccctaacaagagaatcttcctgtcctttgaagcattgaaaccaggcattcattgactttttctttccagctatgaaagtcctagatggcatcttcttctgatataagtctgtactgtctatattgaaaatttgttgtgtgtaactatcctaatcaataatcttagtcaggtcttttattttaaaatttgctttagattcagaagcacatgtgcatgtttgttacatgggcacattacatagtatcttacatagtggtggggatttggcttctagtggacccataaaccaaatattgaacattgtacccaataggtaattttttaaccctcattcctctcccaccctaccctgttttggagtcccctgtgtctactatttccatctttatgcccatgtgttcccattgtctagctcccacttataagtaagaatatgtgatatttgattttctttttctgagttagttcacttaggataatggcctccagctccatccatgttgctgcaaaggacatgatttcattccttcttatggctgcataatattccatggggtatatatactaaattttctttatccaatcaaccattgatggacacttaggctggttccatgactttgctattgtgtatagtgtggcaataaaagtacaagtgcagataaatttttactgtaatgatttattttcctttgggaaaggaaaagaacccagtagtcgaattgttggcttgaatagtcctatttttagttctttgagatatatctaccctgttttccatagaagttgaactaatttacattccctccaagtctctaacctttcccttttctcgcatctataccaccatccattgttttttgactttttaataatagacaatatgatgatgtaagataatatctaagtgtggttttaatgtgaatttttctgatgattagtgatgttgaacattttttatgtgtttttggctgcttgtatttcttcttttaagaaatgtctattcatgtaatgtgcccattttgtaatggggttgtttttttcttgttgagttgtttgagttccttgtatattctggatattagtcctttgccagaggtataatttgcaaatattttcttccattatgtaggttgtctgttcactcggtaaattgtttcttttgttgtacagaaacattttagtttaattaaatcccatttgtctatttttgttttgtcgtatttgcttttcgggtcttcatcataatttctttgcctaggcctatgcgcagtagagtttttctttagctattaatagatattgtggatagcttgctacagcttctgcattagcacttgctgcttcatcttacatttttacgttgtagagttggcttctttccttaaaccccatgaaccaacctctgctaacttcaaacttttcttctgcagcttcttcacctctctcagccttcatagaattgaagagagttagggccttactctggaataggatttggtttaagagaatgtcttagctgggtctgatcttttatccagacaagtgaaactttctctgtatcagcaataaggctattttaatttcttatcatttatatgctcactgaagtagcacttttaatttccttcgagaactttttctttgcatacaacttggctaattgttttgctcaagaggcccaacttatgacctatctcagcttttggcataccttcctcactaagcttaatcttttctagcttttgacttaaagtgagagatatgtgactcttccttttacttgaacacttagagaccattgtgggtttattaattggcctaatttcaatattgctgtgcctcaggaaataggaaggcctgaggagagagggagagagatgggaggaaagttggtaagtgtagcagtcagaacacacacagcatttctcgattaagttttccatcttatatgggcatggtttgtggtgccccaaaacaattacaatagtaacatcaaatatcagtgatcactgatcaccataatagatgtaagaaagaaaaggtttgaaatattgtgagaattataaaaatgtggcacacaaagtgagcacatgttgttggaaaaatgggcatcgatatacttgttaatacagggtttccacagatcttcaatttgtaaaaaacacattatctgtgaactgcaataatgtgaagcacaataaaacaaagttcgtctgtatatatatgtaatgactacaacatacagagagagtgtaaggggatccatacagtggaaagatttctatagtacacttgaaatgataaaatattaattttacaattaaaattttggaaagttaactgtgtatattttaatatctacaggaattactaaaaatatacaaatatatttattaaaagtccaatggacaaattaaaatggaatactgaaaaatattcaaatgattacaaaagaaagcaagagagtagaaacagaggaacaaccacagaaaataataaaatcatggacttaaattcttccatattactaattgcatttaatgtaagtggtgcaaaacacacttatcaaaagacagagaaccaagaaagtgaaatatctgtaccctggaaactataaaaaattgatgaaagaaactgaagaagacaaatagatggaaaaatatttgtgttcatgaattggaagaattaatattgttaaaatgtccatattactgaaagtgacttacagattcaaaataatctctatcaaaataccaaaggcattttccacagaaatagaaaaaacaatcctaaagtttgtgtggaaccacaaaagagccaaaatatccaagcaatcttgagcaaagagaacaaagctggaggcatcacactacttgttctcaaaatctacttcaaagctatagtaatcaaaacagcatggtactgacataaaaacagacatacagaccaatgaaatagaatagagagcacagaaattagtccatacattttacatccaactgatttttgacaaaggtaccaataatatgcaatgagaaaagaatagtaccttcaacaattggtgttggaaaaactaaatatccacatgcaaaaaaaaaaaaaaaagaaagaaagaaagaaaaagaaattggacttttatctaagaccacacacaaaaatcaactcaaaatggattaaagatttagacataagacctgatgctgtaaaactactagaagaaaatacaggtgaaaagtttcttgacattaatttgggcaatgatttcttggctatcacaccaaaagcacaggcaaaaaaagcaaaaatatacaaatggcactgcatcaaactaaaatgcttctgcatagccaaggagacagtcaagagagcaaagagacagccaacagaatgggagaaaatatttgcatatattggataagaggttaatatccaaaatatataaaaaaactcaaacaacttagcagcaagaaaaatcacccgattaaagaatgataattgagtagacatttctcaaaagaagacatacaaatggccaacaggtgtataaaaaatgctcagcatcactaatcatcaggaaatacaaatgaaaaccacaatgagatatcacctcacacctgcttttatcaaaatgacaaaagataacaattgctggtgaggaagtggagaaaagggaacccttacacactgttggtgggaatgtaaattagcatattcactatggagaacattacagagattcctaaaaaataaatctaccatatgatccagcaatctcacttttgggcatatatccaaaagaaaggaaatcagtatgtcgaggagatatctgtactcccatgttcattgcagaattgtttaccatagtcaaaatttggaagcaatctaagtgtccattggcagatgaataggtaaagaaaatgtaatacacacacgtatatacacacggtggaaaactattcagcctttaaaaaaagaaagaaagcctatcatttgtgaatacatggatgaacctggaaaatattaggctaagtaaaataaagtaggcacagaaagacaaatactgtatgatctcatttatatgtggaatctaaatcaaagagtacagtgtttcaattagacagggtgaataagttctggagatccattgtacagagtggtaactccagtgaataatgtattgtacacttgaaaattgttaagagagtagatcttaaatatcctcaccacaaaaaaagataagtatgtgagctgaatatctaaattagcttgatttaaccatttcatagtgtatacacacacataccaaaacaatcacattgtgcaccataaatatatacaatttctatttgtcaaaaaaggagattttcagaatgcaaagaaacacaagagtcaactatgtgctgtctatatgaaacccagtttaatataaaaacacaggttaaaaagtaaaaggatggaagatcatatacatgtaaacactaaacaaaataaatctggaagtttcaaagaggacctggtaccatttcttctgaaactattccaaacaattaaaaagaagggactcccccctaactcattttatgaggccagcatcatcctgataccaaaacctggcagagatacaacaaaaaaagaaaactttaggtcaatatgcctgatgaacattgatgcaaaaattctcaataaaatactggcaaactgaatccagaaacacaacaaaaagcttatccaccacaatcaagttggcttcatccctgagatgcaagtctggttcaacatatgcaaatcaataaacataatccatcacataaacagaaccaatgacaaaaaacatatggttatctcaatatatgcagaaaaggcctttgataaagttcaacatcccttcatgttaaaaactctcaataaactaggtattgaaggaagatacctgaaaataataagagccatatatgacaaacccacagctaatatgctgaatgtgcaaaagctggaagcattccccttgaagacctgcacaagacaaggatgtcctctcttactacacttattcaacatagtattggaagttctggccagggcaatcaggcaagggaaagaaataaagcatattcaaataggaagtgagggagtcaaattgtctttgtttgcagatgacatgatcctatatctagaaaaccccattgcttcagcccaaaagcttcttaagctgataaacaactgcagtaaagtctcagggtacaaaatcaatgtgcagaaacaacaagcattcctatacactaacaatagacaagcagagagccaaattatgaatgaactctcattcacaattgctacaaagataatacaatacctaggaatacagctaatgagggatgtgaagaacctcttcaagaagaactacaaaccacacctcaaggaaatcagataggacacaaacaaatggaaaaacatttcatgcacattgataggaagaatcaatatcgtgaaaatggccatacagtccaaagtaatttatagattcaatgctattcccatgaaactaccattgacattttgcacataattagaaaaaaactattttaaaattcatatggaactaaaaaagagctcgtatagccaagacaatcctaagcaaaaagaacagacctgaaggcatcacactacctgacttcaaactatactacagggctacagtaaccaaaacagcatggtactggtacaaaaacagagacatagaccaatggaatagaatggagaactcagaaataagactgcacatctacaaacatctgatctttgacaaacctgacaaaaacaagcaatggggaagagattccctatttaataaatggtgctgggagaactggttagccttatgcagaaaattgaaactagacccttccttacaccatacacaaaaattaactcaagatggaataaagacttaaatgtcaaactcaaaactataaaaaacctagaagaaaatctaggcaataccattgaggacgtatgtatgggcaaatatttcatgacaaaatcgccaaaagcaattgcaacaaaagcaaaaatcgacaaatgggatttaattaaactaaagagcacagcaaaagaaactatcatcagagtgaacagacaacctacgtagtgggttgtgcaatctatccatctggcatctgtgcatagtggatagtgcaatctatccatctggcaaaggtctaatacccagaatctacaaggaacttaagcaaatttacaagaaaaaaaacaaccccattaaaaagtagacatgaacagacacttctcaaaataagacacttatgcagccaaaaaaaatatgaaaaaaagctcaacatcattcatcattaaagaaacgcaaatcaaaaccacaatgagataccatctcacaccagtcagaatggcgattattaaaaggtcaagaaacaacagatgctggtgagattgcagagaaatagggacacttttacattattggcgagagtgtaaattagtttaaccattgtagcagacagttggtgattcctcaaagatttagaacaagaagtaccatttgactcagcaatctcattactgggtatatacccagaggaatttaaatcattctattttaaagatagatgcatgcatatgctcattgtaacactattcacaacagcaaagacatggattcaacccaaatgcccatcagtgatagactggataaagaaaatgtggtacatatacaccatggaatactatgaatactatgcagccatagaaaggaacatgatcatgagttttgcagggacttggatggagctggaagccattatcctcagcaaactaacgcaggaacagaaaaacaaacactgcatgttatcatttataagtgggagctgaacaatgagaacacatggacacaggagaggaacaacacacactggggcctgttagggggacagggggaggtggagcatcaggaaaagtagctaatggatgctgggcttaatatctaggtaattggatgatctgtgcagcaaaacaccatggcacatgtttacctgtgtaacaaacaggcacatcctgtacatcctgcacatgtatcccagaacttaaaatttaaaaaaaatctggaatattgataccagataaagtagacttcagatcaaggaatattattagagatactgagagacattctgtaattataaaggggtcaattctccctgaagatataacaatttaaaatatgtatgcatctaacacagaagtttaaatacttgagcaaaaattgatagaaataaagataaatagacaattatttttggaaacttcaatattcctctctcagtaactgatagaacaagtatactgaatgtcattaaagatacagaagactggagggcatttccaagatggccgaataggaacagttccagtctgcagttcccagcgagactgatgccgaagacgggtgattcctgcatttccaactgaggtacctggtttatctcattgggagtggttggacagtgggtgcagcccacagagggcaagctgaagcagggcagggcgtggtctcacccaggaagtgcaaggggtctggaaatatccctttcccagccaagggaagctgtgatagactgtacctggagaacggtacactcctgaccaattattgtgctttttctgcagtcttagcaactggcagagcaggagatacccttgtgtgcctggctcggcgagtcccacgcccacacgttgctcactgctagcacagcagtctgagatcgatctgcaatgctgcagattagtggggggaggggtgtccaccattgctgaggcttgagtagcttacagtgtaaacaaagagacctggaagcacaaacttggcagagcccaccacagctcagcaaggcctactggctctatagattccacttctgggggcaatgcatagtagaacaaaaggcagcagacagcttctgcagacttaaacgtccctgtctgacagctctgaagagagcagtggttctctcaccactgcatttgagctctgagaatggatagactgcctcctcaagtgggtccctgacccccatgtagcctgactgggaaacacctcccagtaggggctgacagacacctcaaacaagcgggtgcccctctgggatgaagcttccggaggaaggattaggcagcaatatatgctgttctgcagcctctgctggtgttacccaggcaaatagggtctggagtggacctccagcaaactccaacagacctgcagctgaggggtctgactgttagaaggaaaagtaacaaacagaaaggaatagcatcaacatcaacaaaaggacatccacaccaaaatcccatctgtaggtcaacaacatcaaagaccaaaggtagataaaaccacaaagatggggagaaaccagaggagaaaagctgaaaattccaaaaaaccgagcacctcttctcctccaaaggattgcagctcctcgccaccaagggaacacaactggctggagaatgtgtttgacaagttgacagaagtaggcttcagaaggtcggtaataacaaacttcactgagctaaaggagcatgttctaacccatcacaaggaagctaaaatcttgaaaaaagttagacgaatggctaactagaatgaacagtgcagagaagaccttaaatgacctgatggagctgaaaaccacagcacgagaacttcgtgatgcatgcacaagcttcactagctgattcgatcaagtggaagaaaggatatcagtgattgaagatcaaactaatgaaataaagcaagaagacaagattagagaaaaaagagtgaaaggaaatgaacaaagcctccaagaaatatgcgactatgtgaaaagatcaaatatacgtttgattggtgtactggaaagtgatgaggagaatggaaccaagttagaaaacactcttcaagatattatccaagagagcttccctaaactagcaaggcaagccaacattcaaattcaggaaatacagagaacaccacaaagatactcctcgagaagagcaaccccaagacacataattgtcagattcaccaaggttgaaatgaaggaaaaaatgttaagggcagccagaaagaaaggtcaggttacccacaaagggaagcccatcagactaacagcggaactcttggcagaaactctacaagccagaagagaatgggggccaaattcaacattcttaaagaaaagaattttcaacccagaatctcatatccagccaaactaagcttcataagtgaaggggaaataaaatcctttacagataagcaaatgctgagagattttgtcaccaccaggcttgccttacaagagctcctgaaggaagcactaaacatggaaaggaacaacaggtaccagccactgcaaaaacatgccaaatggtacagaacattgaccctataaagaaactgcatcaactaatgggcaaaacagccggcaaacatcataatgacaggatcaaattcaaacataacaatattaaccttaaatgtaaatgggctaaatgccccaattaaaagacacagactggcaaactggataatgagtcaagacccattggtgtgctgtattcaggagacctatctcacatgcaaagatgcacataggctcaaaataaagggatggaggaatattcaccaagcaaatggaaagaaaaaactcaggggttgcaatcctggtctctgataaaacagactttaaaccaacaaagatcaaaagagacaaagaaggccattacataatggtaaagagatcaattaaacaagaagagctaactatcctaaatatatatgcacccaatacaggagcacccagattcataaagcaagtccttagagtcctacaaagagacttagactcccacacaataataatgggagactttaacactccactgtgaatattagacagatcaatgagacagatggttgacaaggatatccaggaattgatctcagctctgcaccaagtagacctaacagacatctacagaactctccacaccaaatcaacagaatatacattcttctcagcaccacattgcacttattctaaaattgaccacgtaatttgtagtaaaacactcctcagcaaatgtaaaagaacagaaattacaacaaactgtctctcagaccacagtacaatcaaattagaactcaggattaagaaacacactcaaaactgcacaactacatggaaactgaacaacctgctcctgaatgactactgggtaaataacaaaatgaaggcagaattaaagatgttctttgaaaccaatgagaacaaagacacaatgcaccagaatctctgggacacatttaaagcagtgtgtagagggaaatttatagcactaaatgcccacaagagaaagcaggaaagatctaaaatcaactccctaacatccaaactaaaagaattagagaagcaagagcaaacaaattcaaaagtgagcagaaggcaagaaataactaagatcagagcagaactgaaggaaataagagacgcaaaaaacccttcaaaaaatcaatgaatccaggagctggttttttgaaaagatcaaaaaaattgatagaccactagctagactaataaagaagaaagcagagaagaatcaaatagacgcaataaaaaatgataaaggggatctcaccaccaaacccacagaaatgcaaactatcatcagcgaatactatgaacacctctatgcaaataaactagaaaatctagaagaaattgataaatttctggacaaatacaccctcccaagactaaaccaggaagaagttgaatccctgaatagaccaataacaggctctgaaattgaggcaataagtaatagcctaccaacaacaatagtccaggaccagatggattcacagccgaattctaccagaggtacgaagaggagctggtactattccttctgaaaatatttcaatcaatacaaaaagagggaatcctccctaactcattttatgaggctagaaccatcctgataccaaagcctggtagagacacaacaaaaaaagagaattttaggccaatatccttgatgaactttgatgcgaaaatcctcaataaaatactggcaaactgaatccagtagcacatcaaaaagcttatccaacatgatcaagtcagctccatccctgggatgaaaggctggttcaacacacacaaatcagtaaacgtaatccatcacataaacagagccaatgacaaaacccacatgattatctcaatagatgcagaaaaggcctttgacaaaattcaacaggctttcatgctaaaaactctcaataaactaggtattgatggaacgtagctcaaaataataagagctatttatgacaaaccctcagccaatatcatactgaatgggcaaaaactggaagcattctctttgaaaactggcataagacaaggatgccctctctcaccactcctattcaacatagtgttgggagttctggctggggcaatcaggcaggagaaagaaataaagggtattcaattaggaaatgaggaagtcaaactgtctctgtttgcagatgacataattgtatatttagaaaacttcatcatctcagcccaaaatctccttaaactgataagcaacttcagcaaagtctcaggatacaaaatcaatgtgcaaaaatcacaagcattcctatacaccaataccagacaaacagagaacaaaatcatgagtgaactcccattcacaattactacaaagagaataaaatacctaggaatccaactaacaggggatatgaaggacctcttcaaggagaactacaaaccactgctcaaggaaataaaagaggacataaataaatggtagaacattccatgctcttggataggaagaatctatatgttgaaaatggccatactgcccaaggtaaattattgattcaatgctatccccatcaatctacccctgactttcttcacagaattggataaaactgctttaaagttcatatagaaccaaaaaagagcctgcaaagccaagacaatcctaagcaaaaaggacaaagctggaggcatcatgctacctgacttcaacgtatactacaaggctacagtaaccaaaacagaatggtactagtatcaaaacagatatatagaccagtggaatagaacagaggcctcagaaataccaccacacatctacaaccatctgatctttgacaaacctgacaaaaacaggaaatgggaaaatgattccctatttaataaatggtgctgggaaaactggctagccatatgtagaaagctgaaactggatcccttccttacatcatatacaaaaactaactcaagatggattaaagacttaaatgtaagacccaacactataaaaaccctagaagaaaacctaggcaacaccattcaggacataggcatgggcaaagacttcatgactaaaacaccaaaaacaacatcaacaaaagccaaaatagacaaatgagatctaattaaactaaagggcttctgcacagttaaagaaactaccatcagagtgaacaggtaacctacagaacgggagaaaatctttgcaatctacccgtctgacaaagggctaatatccagaatctacaaagaacttaaacaaatttacaagaaaaaaataaacaaccccatcaaaaagtgggtgaaggatatgaacagacacttctcaaaagaagacatttatgcagccaacaaacatatgaaaaaaaccctcatcatcactggtcgtctgagaaatgcaaatcaaaaccacaatgaaataccatctcatgccagttagaatggcaatcattaaaaagtcaggaaacaacagatgctggaaaggatgtggagaaataggaacacttttacactgttggtgggagtgtaaattagttcaaccattgtggaagacagtgtggtgattcctcaaggatctagaactagaaataccatttgacccagcaatcccattactgagtatatacccaaaggattataaatcatgctactataaagacacatgcacacatatgtttattgtggcactattcacaatagcaaagacttggaaccaacccaaatgtccatcaatgatagactggattaagaaaatgtggcacatatacaccatggaatactatgcagccataaaaaggatgagttcatgtcctttgcagggacatggatgaagctggaaactatcattcgaagcaaactatcacaaggacagaaaaccaaacaccacatgttctcactcataggtgggagttgaacaacgagaacacatggacacagggcaggaatcatcacacaccagggcctgtcaggtggtggggggctgggggagggatggcattaggagaaatgcctaatgtaaatgatgagttgatgggtgcagcaaaccaacatggcacatgtatacctatgtaacaaacctgcatgttgtgcacatgtaccctaggacttaaagtataataaaataaataaataaataaaatataaaaataaaaaaaaatacagaaaaccaaaacagcactatcaaccacttgacctaactttcatttgtaaaaaacttcacccaacaacaggagaatatgcattctttccaagtgtatatggaacacatatacccaagagagggcatattgtgggacctgcatatgtacccctgaatctaaaatgaaaactatatagatatagataaagtagcaaaaaagaagacatttaaaggaatagaaatcattcaatgatattcatagaataaattaaaattcaataacaaagatatctagaaaatattcaaatattcagagatgaaagaaaacacttctatataaagcaatgtcaggaggcaggagcaagcaatgtgataaaacacattgatttaaaatatgaagctcacagagatgcattgacatacccaaagtcacacagcaaggacagggaaccaggctgactgatttcagtgttggtgttttaacccctccactctcctttactatctgatgtttttcatcatcatcatctcctctcagaatatacaaaggcagatagacaatatcagtaagagtcaaccttctgcggagctgaggatagcctaaattcacaggccctggatattggaggtacaaggtgctcagatatggggaacttaatattggcaagtgtgttgaactaagtgctcctgatgatactcattttgtttttaaaataacacttttattgagcataattcatatgtcatacaatttaccccttcaaagtgttcaattaagcgggtttttgtatattcacagagttgtgtgggttttctccattagccctgtttggggaaattgattcttttgtatttgtgatggtagccaaactttaatgaatggcctattgtttggcaatctctacttccaaaagttaaaccctgaatgttccaccagcttcattggtctctgtggaagttattcacatgagcacttagggtggctccctgaaacaggaacattactttatttttattttgttagctattaactagccctgcccagacctcctacagaaaatacatctgtgaggtactggggagaggctctatcctaccctcctgacattaaagtatcttcagtatgaagctttaaaagagatttaaagtttctgcttcaatcatttttgttctcgttcagacagtggttcttaatctggggccacaacactctggggagccaaggagttatgtgagaaacctgcaaatcagcttgtgaacgaggcttttattttgattaaatatatcttacacacgtttgctactatttctcaatcatacatgggtactgttgtgattaataaaggaaaaaaatcttctgcatatgtaacttttttattatatagtaacctttttcattatatattttctcaatcagcagacactaggagtgcaactactgtcatgggataatcagatagttttgattgataaaataagttatatggacccaaaatgtttaggaaccactaaattaaacaaagacctttcttcatagggtacaaatgtttcatttagtagggcatcaacgtattagcagtcattaacacattagcctgaattaatcagcttgcttcagggtagggcattgaacactttcatcctaaaagcagagtggggatcagcaatggctccaagcaggtctagtgggttagaattagtcttttgggtgccatgtgtgcttcaggaattcgacagtttttatacttataatagtagtcaaactttgatagatgaattattgcttggttagtaccactccaaagagccaaaccccaaatgttctccaacttctaccaatgttggaaaacactccaagggaaaaaagagggcgctgagcaccagagatgggagctaaaaggtaggaggggacagcaaaatatgtggccaagaccaaatttgtctacttcttagtttgttgggaggacaaggagatagtcatatctaccccaaaactttagcagactacaatcttgaaaagacgtttagaattcctttacttttgaggtcctcccttccttttgctctgtcccagaacctccttcgcctatacttgctgacaaactttcccctctcatccaacacagagtcccattttgtatccaaagccattcaatcagctcgaattgtctgtgtttttctggaggggttccctctccaaacttgccagaatgtctcaatattcttggagcttgtcctcagtttccgaaacttcagggcatcccataggccacagttttgacttcaaatgcaaactgaccttttcctttcacccaaacaccctcctccttacccactgcattgcatcagagcattctcaagcctgttgtcttgctccagacatccccttgtctgtggcttggggttaatatctggtcctttccaatcctaccccatgtgattatgcctttgtttcagatccaggagagtaatcatactcagactaggtctccactaaccaaagcaaaagggacatttgagaaaacaatcagttagtccttgcagaaggggtttttggttgcctgacaaccagatagttgcctaaattctcccctctgcctgacatgagttcagggccataagtggctactttcccctgcacaaacacggcaagtgtacaataatgacttcagctgtttgagaagaggccatatcccaagaggtactccagagagctgattttcttagaattgcagagcaaagggctccggaaaactgggctgaatactactagtgtttgcctttctccaacttctgtgtgactgccatctagtggcatgcagggtggtggtggggggtggtggagagtgctccaacagggttcagtcaataagcaggtgcattgtttatgaataatttaaaaacaatattaaaactgactaaagttggtcagacttttattataaccacatgctggcaattctaaacagtcattgataaaatacttctcactttggtataccactgcccccaccccagcacctaagtgattccctcatctccccttggagagccatatttaagcctgacttttcaggtaatacttcagatttatatcccttccctctatcaaaatgttcctgtcttgtgctctaaccccctaaggctgtgctttttattttccttggtggaatttatttatagggaaatatttataggggttaccagctgtctctaccaggggcacctatgttataacagaagttacctgaagaatcaacgctttagtccaatggtgttctaactcttttaaggcagtgaaacactgttttcaaacaaaatatggtatggaaccccatctcctaactcttctttaagtctcaccttcagtgtcatttcctctggaaggtcttccttgtctctccatgatgaggacaagtccccatgacttagtcacagcaccttggactcgccctttcatactacccatcacacgtgttataacttgtctagtgtctgtattccttagtagactgtaacctccatgtgggcagatactgcatctatcttgttcaccattggaaccccagaagcaagtgttgtgcttggcccactgtatgtggtccgtaaatagctgatgaatgaatgaaagcccttctgttattatagcctatgagtaaatgaacattggaaataaccatgtcacgtgttatattgtgggtttttattgaaattatggtcaaaaacaaccccaagatcattttttttttttggaaaaaaagtgtggttaaccagttttcccaccttgtagtcatgtgagtaaaactaaatgcaacagccacaactcccaatttctagtgtgtagatttttcctcctctctttggcactaaagtcaggttcttcttcttactaagttttggctgaagctctgcagggacagtctcctcttctgttttataccaggaccccccaaaaggcttctcctagttggccatctcaggttggcacttccttcaaagacgtgcttaagttccactgtctgattgaagttaacccagcctgagactgctttcctttttcttttaactactagagatcatgaacaaagtgttcacctagttttttaaatttatttttatttattattatttttttagagacagcgtcttgttccgtccttcaggctggagtgcagtgggcatgatcactgcagccttgaacttctgggctcaagtgatcctcctgcctcagcctccaagtagctgggactacagacatgtgccaccatacacagctaatttatttttaacttttttagagatggggttttgctatgttgcccaggctggtctctaagtgattttcctgccttggcctcccaaattgctgggattacaagcataagctatcacacctggtctaatttttttaaaaggcatttactgtgcatttatacatcagtcactctcatgaacactttattaactcatttaagcctgacaagaaacctatgggatagagattattcttatccttattttacagatgagggaacgaagattaagagatgtaggaaacaagaaatacgaattgtttgcgtgtattaactctgtcttctcctgattccctgattggagtgaacctctcaatagttttgaccccaaagttattttgttattaattttggtgataagttgaacagaggtaaacaggtttattgaaggactgaaaagggccaatgcccttctgcagcgtttccttcccctcccccacttacctcttgaggaagagggctccctatgcggatgcattccagagcttcagaattcctctctgagctgctccctcctatggcaacgcccacgtgaatgccagaggacaatggcacagacagttttcaggaacacgtgtagaccatcagccccttcctcctcaccagggcctctggctgccatgcaagctgctacatctcacaataaacccaaacccctggcattttagagaagtagcaggttcagaagtgaaagaaagagaaagtcggaagagcaggaataacattagcactctttgtaaggggagaaggcctggattacattacagatgcttaggaaggacaggtatggcctatttagttggtgctgcctacttctatcatcacccaaaatctcatccctctcattcccaaaactcccttctattgcttccactgccagaaggttttcactcactttagccctctgcctttatttttgtaattggggaatgcattttgagggtaataaagaataataaagtatttaaaagtgaaaaggtatctgagggttaagcaattatcatttatttcacttaagttgcttccttcctaatgccagacagctgccctggagggatttaggttttgattgttgtgtgaggtggttaatggcggagcctgaggttctttgtggaacaaggcaggtgggatagctggatctgaagggaggaatgagggcactgagaatccagagagtgcatgatgacatggagagaggaagctgtcaagtacaaactttgtcttctttgaggttttgcctaggacctgtgccttgcctccctcccatccatcccatccagaaaagtgagaggaaactccctgctcactcctctcctcaccacctgcccctgcccccaggatggagcttaagcgggtactaattagtactatatataacttggctacattcagggttcaagagacttgtgtggactggcctgggaatctgaggatcaaatagaatgatatttcaataagaaaatgcatactgaattctaaacttttggccaatatgttattcttacattggggactgcttatactgggaggcaatttagaattccttctgtctacattaacttgaagtcaggcattgggtctcttgtgtgggccattttgtgaaggctccatacacaccacgttggagcgtaagtattcatacacacagagagaaagatataaagatatataagtattgttttatatatatatatatttatatatatatttatatatatatatatatatatatatatatatatatatatgaaacaggagcttgctctgtcacccaggttggagtgcagtggcatgatcggcatgatcatagataactgcagccttgaactcctgggttcaagtgatccttctgcttcagtcttctgagtagctgggactataggcatgtgcaccatgctcagctattttttaaatttttggtagagatgggtgtcccactatgtttcccttacaggcataagctaacatgtccagcctgtaatatatattatagctattataaatattatatattatagatagcatatgtagaaatatagatattacttatccacaatattgaagtcttagcaaaaatccttcacagcttagtattactgtgaagcctatgccacacatgcaaggacattttgctttaagcatttagaaaaatcgatgtataaatctaatatttatcatttattttgaaagacatcttatggcaaatcagtttacaaagcaaataagacctttttttcatttgtacttattaacacaggttttattagttttctttggagtagggtacagagaaaatgtcctgaaaatctgcctagcctctgcatatttatgtattccctgaactgcttgctctcccaaatggagaaagaatctcaccagatggactcttcacttggcaaatatttactgaatgtctggacgtgctggacattgggtccctaacttctcagagccttccaatctaatcatggagaccatgactgagcaaacatttcatgtttttacatataatggcatgtaaaaggtgaatgccttcaatgttctcaagtctaaaatagggtcaataatgatacttcccacacagggctatggtgaggattaaatgaaaaaacatgaatgtcaattgattactatagtggttggcacaggaaaaatactttggtgattatttcctggaagcatggggtagggaagaactaactaacctgcctgaaggaggtggacaagttttcagagctgagcaatatgagcttttaacaattagtaggtgtttgttaagtagagacatcagggaataaacattccaggcaaagggagctgtatatgaaggctcagaagtcctgagaatgtggtaagttccaggatcccggagttgcctgccatggttggaagatacagtatataaggagaaagggaacatggtggcaaaccaggaggtgagcaggcaaggttccacaggggcagtgatgtttgaaggatgagtagaagtttgccagtcacagaagaagaaagaacactgtagtggtggaaagagcatatacaaaggcacaaagttgtacacgcatatgaaatatttgggggacagtgttctgtaggtggagctctgcattcaagaagctacctctcccatgtggagctttcaaaggtgtctgggcatgtttgctaggctggtggggtgggccccttgatgtcaaattatgtgaggatttcagaggggaatggaagcagtacatgtacccacaaaagaagaggaatttggaaaacagtaatatgtctgtcttggaggcttgtactcagcacagactctgcatactggcaagcgagccctgataaaagggataaaagtagaatctgaatgacttgtttgcacaaaaaactgtgagactctgggacacaggaagaccctgctttggtgcacacaatacacactcaagaactatttgttaactggtttcatgtaaggtgataaagtgtaacatcacaggttgggaggaaagagggtactctctctacttgtgcacaggatctggtgccatttgggaacgctgaggattccagagcatcaccactgtggtggcatctctagaccagcagaaagagcccctaccaggaatagcacagttggcagcagtggtgatatgtgtagccatacaggcagtcaatggactttttttttttttttctagcagagcccatcatggaagtaggtgttggggaggaaaaacttttcctctactctcttaggttcagtaactaggagcctgtggattaaactaacaaaacacagattaatagaagggaaggcacacaatttttgttaatatttacatgtacagaaattcataaaaaggaagtgaaactcaagtggttacacttggggcctttacatccttttaacaaaggaaaggtttgggattcaagggaggataaaatgtaggaaagtgactagaaaatatacaggggaactaatggagggtaagggctagtttggtaaggttggtgtcttagtctgtgttgctataaaggaatacctaaggttgggtaatttataaagaaaagaggttgatttggttcatggttatgcaggctgtacaaaaaacatggcaccagcaaccgtttctggtgagggcttccagtagcttccactcatggtggaagaagggaagctggcgtgtgcagattacatggtgaaacaggaagcaagagacagaggaggagaggccaggctttttaactaccagttctcgaaggaaccaagagtgagaactcactcattaccacaaggacagcaccaagccatttatgagtcatctgttccatcacccaaacacctcccattaggtcccacttccaacactggggatcaaatttcaacatgagacttggtgaggccaaaccatatccaaaccatagcagtctgtttctgcaaactcttcttgttgttgacttccaatcttcaatgattagagtcactcttctctccctggtatgaatgggggtgtattagtccattcttgcactgccataaagatatacatgaaactaggtaatttatattcaaaaaaagaggtttaattggcatatggttccacaggctgtacagaaagcatgatggcttctggggaggtctcaggaaacttacaatcatggtagaaggcaaaagagaagcaggcatctcttccatgaccacagcaggaggaacagacagaggagggggggggggctacacacttttaaacaaccagatatcatgagaagtcattcactatcacaagaacagcaaggaggaaatctgtccccaagatccaatcatttcccaccaggcccctcctccaacattggggattacaattcgacatgagatttgggtggggacacaaacccaaaccatattaggggagcacctttctcaaagggaaattcatccccctgcttttaggcagataaggggaaggcagagaactgtttctacatctgttggttctcaatttcctgcaggtcaaaataatccttctgccaaagtgtcacattttggggtgtcatattctgatcttcttcaagggtcaaagcaagaaaggaatgaaagggtggtaacatgtggtaacagacaggacttgtcagtgcttcctgggaatcacagtgggggcagataagtggagactatagggaagaaaaacctgtaaacattttctacatctaggagaccaaattgacaggactgggtgaaattctgatgtggctaagcagagaaagagggccaagctctctggtttgagttatttgcagtttcctcaatggaggtggagcaatactgggatctatagcccaaagttccagaagaaagtgtgctgggtgtaaagagggactacgcgtagctcagcatgagtgttggcaaccagaggccaaaattccatccagggtgtgggtcaagaattgttgtgagttccaggggtgcagcatggaggcatggcttcttatgcatctcacatgacaggataatctctttttcctcaatattttcaatcctttctataggaccctgccccccacccaatattcagatatggccaaagagctcccacctttaagacaaaatggctttcctttgacctcatatccttctccagctccttccttcaccatatctctccagactctgcagtagaacttttctaaacagttgtctttagctgctgtctccaattcctcatctccccacacacttcttacagtccactcccatgtggtttctgttccaatcactacaccaacacttttcttctgtgttgctaacaccaatgtatacttttctgtctctatattatttgacatctcagcaggacatgacacgtttgactactctcttgaagcactctcatattttggcttctgtgatagcacaaatttagctagtattgggtgcttgagggaatttggtttggatcaacatatgtgacaaaactcttactctgatccctatacaaatgcctgtaaaaaaataatgtgagcagcagaccaaaattgaggccacattgaaaccttctgtacccaatggccttctgtacccaatctcttaagtatcttgacctaaagggaggtcagaaaacaatagccattttcagtgccacgacatccatgaatgtccatggtcataaatgaatacttactatgcgccagacactattctaatcactttatatgcaatgactaaattaaaactcactgcaagattgcaggcaaagggaaataatatcactgttattccattttatagttggaaagactgacaaatacggctggtaagtacagagctgggcttaaaaatctaaatagtctgactgcaaagttcacactcttaaccaccatgctatagtataagaatgtcaaggttattgtgaaaccaccgcacccatccatgacttgttaccctgtccaaggtcagcactgaccagagagtcaattacttatgcaacaagactacagatgatttttcaaaattaacttttttattaatttaaaaatccagaaatacagtgactacataaataagtaccataattaggtacatgtcctgtgagaacagtgaaagggtaatactgttatgttactcttacttgtttacatgagttaactagaaaatggctacaactgctaaatgatgcttatggtctttgttgttccaagtgtttatgatacaaataaatacacaagaagaaccacatccattcttctctactaactacaggcagcttggcctctttaccctatgtcctattctctacacaacaccaaacactggagggtttctactttgacttaacacagctccccagctcctgcttcccacagcattttgcaaaggtgtgtcccagcacctggaggcaggagtatatctagggaaactctctgcgtgttctcttaaggctaagctttcagagaacacctgggtgggaaggctttgggatgaatcatccagaaggagaaacacctctttgccttaggatctagttactagtctccacattatggaatcactgccacctctgggacggagggagcagccgcataacaccttcccccctttaccacacacacacacacacacacacacacacacacacacacacacacacaaactaatgctttgtgacctctcaaccgggatgtactgcttctctcttccaaggagaacgtgtgtgatgtgctggtgagagtcttgtcccaagaaaccctggccataaggcccttgtgtctctttcataagaattgactcctttatgccaggttgtcataaagactgaacattttacattttcccctattggtatcaaaccctcttaggaaagaattctctcacctatagtcatggaatgagacatatggggtttctgggtccttaaaacatttctacagttcattcctgcccctcagagggaacaaatctagaaggcatgcctgagatccttgctgtgaagaattaggtcttcccacaaagatgatttctaaagccagaccccagaatggatagtttatgctctggtattgggctgcaagtagacattttaggagcagccttctctggaattcttgactaaaatatctgcttgatgaataagacaaggatagtaggaaggtttaggataaagatcttcatcagaatatccacctccctaaatgaacaacaattttcttaactgaagagtcaacatgcagatgctcatgaggaccgagccactttgcaaagtaaaaatcaactcctataattggagaagaaggaaaacttcccttttaaagagcttctagaatttactaatttaatataatttttctgaccagacaactatggtctcaaaaatattagtgagtactgatctattacttggtaaattttattgatgtgaaagcaaaaagatggcctttttgaattctatcaacttctttcttcaacaattattttttcttacatggattcagtttctgatgattttactcaatttaacttctttctggaagtcccataggtacagggggaaaagaaaagtggtatcattagggaaaaattattaccacttctaagtgaatgaatgaggctatgaaagtgtttttattctttaccctgactctattgttggtgacttaaacagccacaaagacctaagggcagagcctcttgttcacagttatttactctcctgggcacaaaaacttccaagctacttgggatccagtcaagggaaaagtaacgtagaatcttggctagctttgcttcaaataaagctttcgtttaatgtgagtgtggacgtgcgtgtgtgtgtgtgtgtgtgtgtgtgtgtgtgtgtctgtgagagagggagggagagagagagagagagagaaggagggagggagggagtgaggagggaggatggggagctaatttttttaaaagaacacatgacattctaaaattcaaaggtataatttcatacaagtaattgttctatactgcagaactcctactaagcaattcccttctctttctttcacttgaataactttctagataaaaaccctggggtcttgtttgtctttaacctgtaaagaaatgtgattctccaagaaactagagcagtgttgtgatgttctatccctcctcctcccacatataatttaagactcttctagtctctttggaggagatgttcaagggctgacacaccactccacacaaaggagcaaattatgctgtgcatggcgtgaataattgactgcatttgagtttggagttttagggcactgttgacttaagcaaaataagcctgcagtccagctgcagcttgagttttcttgctttaccctatccaatactgtctgtcttgcctaacagtggcccttttcagatctctccaggtacaaaaccttgactaaatcttcaagctctgttctgcatacacgacttgaacacatctggctgatctgagcttctccttcggtgaagatcttccactggcctaaaaggcaaacaaacgcaaagtggccgggagtgtgtaagaggaaagcagagcaaattaggaatagaaccaatataccccatgcttacccacttactcatggacctaccagggaatttggaatacaaatatcacttggtttcaaaaaatggccccaaaacacttttctagtagcagatatggaaaatgggaaatgaagttttcatttcaacacatagcatttgtaagaatcccaagaataatatagaactgcccctcctcaagagcaaaacctaagtgttattcttggaatttttacagtatatttagcatttacaaaatgcttcaatatctgcttgttagctatttaggcagcttacttggcaccaggtcaaaaaggcactttggaaaacggcacctactgtattactggggctttgcttacccttagggtccccaaatattggtttgggttacttgattactatttgattatatatcactctttcctctattcctgctatcttttgttaaaaacttctcgacgttgctttctcctacgtccacatgctgtccttatacccccttagcaccctaaatcccttcccatggttcctcatccattctcatataccccatggaatccctttccacgcagagtaaacttggctgtagcccttccatcccctgttgtctctgcccaccctggatactgtgttttgtcttctttttattcctgtgctcatggtactgcaacctggagaactcctagtccaagttaagccaactcctcttaagcccaaacctgtcttgaacctctttttcttttccttagccacaagagaataatgacccaccttccctatgggcctgatttctctgctcctttctcccttggatttctcccttttccccattctctatgactcaatgggaagatagaaggaaaaacaaaaaaacaagaagaggatttgggcaaggaaccagctattactgaagccctataatgtgctgggctctgctaggcacattatataaaagagttgggtttgttcttctttgctcctaggtgaccctgtaggatcataccaacttctttcagctacacacagtttgaggcacataccttctactccattatataccccaaatcctgccatgggcacagagtatatctaaatcatcttttaagtcccctggaacctagaacaaagccttgttcacagtatgaactaaaacatgtaacttcagaagtcccataattgatcctaggatcttacactctgcctcctttcttactcacatgtaaggactcccaacttttccatttgaattctcatactgtcctgttattttctatgagtcctgccaaagacaagcaactgactgccttggctctttttctagctgcctattggaccctaactctgctcagatggctcttaagcatattaatttaaacatgttccaagtgaaactctttttcaccaatacctgcttattcttcacagtttccctgttggtgaatggtattactattcacccagtcgagttattaatatcggacccattccaaactcgtttctctctttgatgctgatcttgttgatttaacctcagaaatgtttctcacagtgacgtctcctcccgtctcattgatttaatatagtataattagttcctaattcagactatcccacttctcttaataagggtccacctttcactccacacagcgaggacctctttctaaaaaaataaaaaaataaataaagcagatctgaatgcaccattcacttgcttaaaaacctccactggcattctctggcctggagatcaagtccaatgtcctagcatgataaattgggcacttcataatctggcttcgtcaaagtgtgtgcttaatgtaatatatgcatctgatagccgaaagacatctttccaaagcaccatgttgatatctctatgctatttgcagcaactacagatgctacttgccttacatttgaacattttactggctttttttcaggccctatgactactttctacctccaaatcttctaatcttttagtgcaccttctgtggcctttgtgatcattcctctcccctacccacatttcctgtttgctcctgtctgagtcttctcttaggctgcactcttttcctggactgatttcctgacccattgcccagtcatacccttctctttcaaaacacacctcctccccgaagccttccccgactaagcccacctggctctcatctcattgttctttgcagattcccctgagcactttgatatttaactcctcagaactatactaattcatactgaagtcattttcatgttctgtctcatccattataattccctgtggatagaaactgtgtgccttttatcccattagaagtgctcaacacccgccccaatgcctagaagtatcttagtccctaggctccatctagtgtggaaagtgggagagctgcaagtgtttttgagtgcctgaatgcttttaaggaaacatgaccacccaggggcagttccccaggagtaaaagtgctttcatataacacaggaattgatatgcctttaatttctctttgcctctcatacccaccaccagaggatacacccttccagatgtgaagtctccataaatataccagacctggaatcttatgagctttctccaaccctcttgagactctgtgcttagcagtttcattaaagacattcaggaagccttgacctgaggtatcctatgctcagactacatctgggtttgtattcaccatgtccaagctcttcagattacattcagacaccccattcactgctaagtcacccagaagagagatggaacatcctttagtgttgatactgagcagtgctaatgttcactgagattgcggagggactttagctgtggctatgctaaattgaaaactgaatgtgtttttcagggagcagtcaagagaagtactacttactcagggttgttctggtcaccagcttgaagtgaggaagctcctcaaacatcctcttggagatcttctcaatatggaagtgctggagaatgcctagggccaagcaaaaagtggagcaaatggtcaggcactcaatctggaaccatcaactcctttttttctgctcaggctcagcatatcatttcattactagggcttaagagtatcgagttgggctgtgtaatgtgcttaaccaggaacttggatggctcaagggttataattgactccatttgtttccttggcttactggcttcccctcggcttctccagtggatggagataagggagatagtgctgctgaccatgggactctctcctagggaaagccacatggaatctagcataagtgcttactggagcttctgcagccataggcagtattagaaattctgcacttgcccccaacctggatagactgtgtccatgccaaaccgctgggctgccctcctggctaagcactgagagcctgcagtgggattgcaggcaggttggttttgtaaatggagaagccacccttgttcttgaactcactgaaaagcatattttcctttgggaaatattcacagatcctttagccttccttattcataaatggggagagttaaaatagagtgctctccacagtctcaaccttgcctgaatagcttttatcacaataacaggtagacaactgacaactgccttatactgaaggagcaacatattaccagcccacttaaatgggcgaagtagattaagcctctttttctgtgtccaccaagcatagaccttgataacccagaactgtgaacaagaggatatttagacgctacattagcaagttgaaattcatctgcacacctctgagaggcgaaagatgtgggatgacgaatagtgggcccactgctggggaaacgcaacaaaccagtgcctagtcctaggtgtcctgttatggatgagctagggagttaaagatggcaaatcaacactccaaggcatagaccaaaaataagcatgagtgaatatatacatgttcaagcatcttttttttagggagaaatgcattctttagataaaggctgttgtctaaagggagagaaaaaaagcctcataaatactgagcagtctttttcaaagcatggtccaagtgccacctgcattagaatcatctggctatttgttaaacactcaaatgtttggactctacccaaggtctactgaattcctatctctgggatggggccaggtatctgcatttaaaaccagctccctgtgtaatggtgatgcatacagaagttcgagtactcttgagccttatgtgagagccaatagcaaaaagatgtgtatattttccagctgaaatctcacttatccacttggattgtgaggaaccttgaccacactaaataagcactagtcttgagcctacaaaaagttagaagagctgtaggatcacaatgaacagaatgtggcttgctgtggtagtcactgtgagtaatcagaaaaggaattgaacattgtgactggggtttctccagtaagactataaccttcttgagggcagggatgatgttttaaatttgttttaccccagaagacacatcgtgatattagggacttagctttgccctgaatgaatgggttttcatggttgttgagctttattctggaaagaatgacagactacagtttgacagtttgtaatcctggctacatattacaatcacctgagaagcattatgaacaaacactgatgcccatgccccactccagaccaactaatcagaatctctgggggtagggcccagatatttggtatttaaaggaaaccaaaactctccctgatgattctgatgggcagccagggttgagaaccgcttctccagcttttggtggtgtgaaataggcagctttggaaacccaagggtcagtacttgatctttagcacaggccatcgttaaatttgaaaggccataatgacaatagtgttagatatgtcagtttctaagcaatcaaaaagaacttttaatccaaatgagggaacaggttgaagcaaaattaaagtgagtcctctcatccttttctgtgcccccttacaaagatgagaaattaatgttgtcttgctcaccctttcgaatagtccaaacgtggacctctacctgaggtggtctctcagtctccagtgctatttttctggttgtctccccatcctccatgaatacagactcatacacaggcatcgtttcttccccgcagaagtagcctttattgtcaaagctttggcctggaagttcttctggaatcaggaagcaagtagaattttgtcatggttttctaaagctagaagtgaacttctgcatttatgtatctcattgttcataacatctcacacttatcaaaagtggacaattaacaagaacattcttcgagagacagaaattccacccatacttcattagcccagcttaggctgccactgcaacaagccacagattaagccacaaatcacaaaggagcacgtaactttgattgaagtccatgtgttgacagaatccatagttcttcggaacactagacccctactactgtcactgagaagtggactttcatgaggaaaaatgtagccaggtacaaatctcctaggcacttaagagaacataggaatttccatacagggtcaggatcatgctctgtccagctcagtgttgccaggagaggcccagggaatgggctgaaaaagggccttggttaacatcccctgacatcattttggtatacttagaaaacattcatgacactcatttatgtgcatatacttgcccaaaggatccatccaaattggcttgacatttctgaatgctctttgatttgtttgtaaggggaacaataataccggatcagcaccagtgccaaaatctagatgtcagattagccatatgtatgctatgccaaatgaatggttgggagacacaaaaaattggtcaagtccctcagcgatggatcatttaatgtgtaaactaaactgttgaatttcagctcgcaggcataaaggcacaagctctacatttcactccaccctccctcctctttcctcagtcccctgttttaaaaagtttcttcttgttggttatcagtgagttaagtttgcttgctggccttgtaatcagtactctcttgaactgcgtacttaaagcatacactcaaatcagaacaacagaagccatctgtaagaatatctgaattgttgaggatgaaaccactgagtgttgagtgctttggatctgtgactctaattagggagactcactgttagccaatcagacacatttggactagaagttgtaatcaaattgctattgtatgtctcttggtaacctgattagctttcccacccccaccaccatttggcattgtaaggacaaaaccatagtcttctcttgattccagactgaattactcaatttgtggattattgtggaatcaagctttttgttttcctccttttgtccttctttttagctatttatttacttggtgggccagtctttttggtgataggtaattaagggccacgtgctagcactttttaaatgggttggagagagggaagaggtcactgagtgtacagagacttctgtgtattcaattatcacctttagaatgacagccaaattcatttctcaaactttgctcaccagcttaatattggctacagctatagctgacatgaaatccatgatggcactggcagtacctgtaatatgctaaaagttcttccagtagcctgaagagtcatcttgcaccactacctccttccctacaagagcttaatttacttgaccgaagggatctacaaacaacaaaactcattattgacttaactctggctggtacttgaaaatgctaagaaaagcaaagtttgtctttagaactacctacttagcaacatccgccgtttttcacactctgcacttcaaggtgctttctgatcactatagttcacctactctcattttcttttggggaagacaatgtgcttgatgtcatttctggccatttccacagcccaagagaatgttcccatcctgagccttccagaattccttgcagaagtggtaatgaaggagaagtattattccagctgggacaacttttaagtcttaatagggacttttaatgccataacctaaaaggagtatgtaattatggaaattcaaggtattgggatggtattgtggttgtatgtacagtaaatgctcatgatagcaataacttaagtgtacccttagaatgaccctgtatggcagacgtatctgaatgtgtgttctgagcttgggaatccaggcgtggccaactgggagattatttccttgtctgtgaggaccatctgaaccccaggctcatccctggggctgcacaggggatagaggccttgagttttgggttagatgaaggttgccaggtcgttaaggggagagtgttcagtgaaaatgctatataaactgcatgatgtttgcaagtggttgcagttttcctgcccaacctgctgccactggactgtttctatatgtaaggtggttctcctgtccagcccacctccactggactctctcccctgtatgtcagcccctaataaaaccccatgtcttgtttgctggctctggatcttttcttcggcctcttaaatctggtgccttccctactgaggttaataggagtttggcacgacagtgtgagaagtgagttggggaatcttcaggaagtggacatcttacccaaccctgtaggtggccattgatatgcaaagcaaggtcagcctctaccagagcaaagggaagagagagatgaaactcacatctttaatattggtcctagtttgttattgtaggaggctgcaatcacttgttacaatgaaacttttggctggattatcagtgaattttatttatctcttttcccttttcaacataactgaatttaccattctttcttccttccatctacttctctcctcactgccttgttccttttcttctgtgtcatgtgtcattttttaagaggccagtaatgtcatgatcatcccatttctcaccccttcacgtcattcaggactctattcaaatatctttagagaagccttccctgactactcctttaaaagtgcttcctgccccattcactctctcttgatcctgtttggtttttcttcacagcactcatcacaatctaaaattaccttattgatttgggttcactgtctttcttttctgctagaatgtaaagagcatgctggcaagtagcctttgtcttgttcacatctctgtcctcagtgcatgtaaccgtgtcttgcacacagtaggtacttaaaacaaatttccagattgaatgcatgagcaagtgcatgcctcctgatgctctgcagttgcagagtacctggagcaggtgcccttggctatgtggctattgactctcaggcaatgtgactaaggagtgattcaacatgcagacacccatgtctggctcactgagaggcagatacacagaatgagacagaaattctcttcttccatgttgctcaatcaatcgtctatctccacaaacttgagcagagtgggaaagtgggaaaagcagctcttccagaaaaatcggtttaatcattcagacttcaatatactgccaactgggatactggagggcagttttttacatgataaattttattatgttttctaaatacaaaagtaacacatatttactatagaaaatttggaaaatacaaataaataaataagaaaataagagttacccataattcagtcacaagaaaatggtcactgttaacattttgccgtatgctcctccagtctttttgtttcttttttttgtcttagcatatataaacactttctttctttctttttttgagacagggtctggctgttgcccaggccagagtgcaatggcgcgatcttggctcactgcaacctccacctcccgggctcaacccatcctcccacctcagcctcccaagtaggagtagttgggactatgggcacatgccaccacacctggctaatttttgtatttttggtagagacatggttttgccatgttgtccaggctggtcttgaactcctgggctcaagcaatctgtccgcctcggactcccaaagtgctgggattacaagcatgggccaccgcacctggtcaacgctttcttttttaacacaaaaagttggatcataatatacatattgttctttagcttgctatttttacttaacaaatacattgcaaacatctttctctgccattcaatcttggtctataatgagttttaatggctatattaatattccacggtacagatacaccataatttgtttaatcattcccatattcgtgaactttcagattatttccaatttttcagtattgtaaacagcattgcagcaaaaattcttatttgtatatctttgtgcatgtctgtggttactttcttaggattcctagaagtggaattttttagccaattttttttttttttttttttttgagatagggtctcgctctgttccaggctggaaagtactggtgtgatcgtggctcgctgcagccattgctcccaggcaatgatcctctcacttcagccctcagcctcccaagtagctgggactacaggaggtacgtgccaccatacctggctaattttcttttatttttgtagagatggaggtctcatcacattgcccaggctggtctcaaactcctgggctcaagagatcttcctgccttggccacccaaaatgctggtattacaggtgtgagtcactgcacccggccaccaaatgttttaataaacattaccaacctgagaggacaattgttttaaaagcaatgactgttgtttgtcttgttctcacagctttttgattatttaattttttaattgaatcatctgcatcaataaaattttaagcacacaatgaaataagacttggtctgaaggcctgagattcaaattggaatattatacaatgagagggtttatgttatcatgggtaatttgtgtaaatattagtttttgtctgaaattatcttgttgcattactttttaaactattaagtgttagacccctgacagaagagaaaattgtgttcatgaaactaccactatgtgatactaaaaggtttgaggatccagtgagaccacagacttggaagtcataataggtcattgttgctgggtggcccggatgtccatatcatccttagaatgtgctctctccattggccggatacagtggctcacgcttgtaatcccagcactttgggaggctgaggcgagtgggtcacttgagctcaggagtttgaatagctgggtgtggtggtgcgtgcctatagtcccagctactcgggaggctgaggcgggagaataacttgaaccgggaggtggaggttgcaaggttgcagtgagccgagatcatgccactgcactccagcctgggcgacagagctagactctgtctcaaaaaaacaaaaaataaaaaaaaaaataaaaagaatgtgttctctctgtattcgtaataaatacattttctcataaatttcaatgccccagttctctacaccttatcaaatagctcctgtccttcctgtccacacgctgccccctgtgtactctggaagatgggggttgttacattgaggaagattttgtgtcataaatcagtgcttctcaagctgtaatgtgcattagaatcacctgaggttcttgttaaaatgcagattatgatgcagtaggtcttgagtgggggcctgagagtcaacatttttaaccagctcctagctgttgccagtccataaaccacactttgagtagcaagaccataaatgaccctgggcctacagcagtagttctcaaacttttctgcacacaatgttcacctggggatcttttaaaaatgccacagcccaggccacacctcaaatcaattaaattatagtctctggggatgggacacaggtatatgtagaagctcgccaaggggttctaatgttcagacaagtttgagtaccactggcctgcaggaaaatgctcaataaatacacattgattcagggcatgtttgcctactagtcatgagggactaagttgaagaagtatataatttagctctctacctactttttaaaatgtttgaattttcatctgtgtttataaaaatgctttgcagaagcataagaaatgataaattcatgtgcctgggattgactaaatcatcgactcttcgaatgttggagctgtaagggccccccaaaaaatctactctaaccctctcattctgcaaagaaggaaactgaagctcagaggggtgaagtgacttgttatagatcacacaggaaacctgtggcaagacagagatagaatgcttgattacccatcctatattctgtcaaccccaatattagggactatatttttatttagctcatgttttaaaaactaccatttaaataattaacttgtcttttttatcagtcaatattttctactggcatagaaaaaacgatgggctggaagtgacttgggttataggccttggttttatgattgattagttgaatgaatctgggcaagtcctttgatttttgtacttcaattttcttatctttaaaaaataaataataatataattataggattatagtgttagaagggagcttagagataatttttctaaactttcaattgtacagataaggctgatgaggctcagaatggatatggcacatttccaagatcactcaacatcttaggcttggatcagaacctggtctccttccactataactcacctgcctctcgtcctgtcttaaaagggcaatggatgtgattgtactttgatgggtttaatagtgatataaatgaaagctgctactattcttccttatcatcatgatagcctaaattctctactatttagaaaagcataggtaagttcaacactcagggatacatgagaggtgtggtagacacaagcatatttctgggtagtaaatttcttccaagcaactgccttttcagtctttcaagagaagagagaatgaaattcattattattagaaatattatcattacaattatatgaaaggttatgtttctgatgcctaaagaaagtttagaaagactaggtgagaatctcagtcaaccaaaagcagggcctccaaccaacgcaccttttgcttttttacctggacacaccttgcagcattttccgtctattttttgaggatacttgcaggggtatcgattggggcagtggattttcttacactcttgcttggtgacattacaagtacatagcacacactccacaatgccaaatgcccggaggtttgggtgccaggactcgccatgagaataggtctttccattggaaacacacactgaaagagaatgcagaattagcaattaaaagctaaggagctaaaatggaaccctatattcagaacccaagccctgaactacttaacatatcaagcatcctttgttcttgtcatagccatggggctatgtttaccgagtagtatctgtgaccaaaaaacagcttgggccatattctactctcaggagcttctccagattcttcagcagcagcttctggatgcttataaatggcctcagacatagtaggcagtccataaatatatatatgtatatatatatatatatatatatatatatatatatatatattttaagaccggatcttgctctgtcacccaggttgcagtggtgtgattgtggctcactgtagccttgacttcccgggctcaggcaatccttctacatcagccacccgagtagctgggactaacatgcaccaccatgccgtgcttttttttttttttttaatttttgtagagatggggtctccctatgttgcccaggctggtctgaaactctaagactcaagagatccacttgcctcagcctcctaaagtgctgagattacaggcatgagccaccgcacccagcctatatatatctatatatctatatatatctatatatctatatatctatatatatctatatatctatatatatctatatatctatatatctatatctctatatatctatatatctatatctctatatatctatctatatatctctatatctctatatatctatatatctatatatatctatatatctatatatctatatatctatatatatctatatatctatatatctatatatctatatatctatatatatctatatatcatctatatatctatatatctatatatctatatatctatatatctatatatctatatatatatctatatatatctatatatctatatatatctatatatctatatatctatatatatctatatatctatatatatctatacatctatatatctatatatatctatatatctatatatctatatatatctatatatctatatatatctatatatctatatatatctatatatctatatatctatatatatctatatatctatatatatctatatatctatatatatctatatatctatatatatctatatatctatatatatctatatatctatatatatctatatatctatatatatctatatatctgtatatctatatatatctatatatatatatattttttttttgagatggagtctcgctctgtcgcccagactggagtgcagtggcgctatctcggctcactgcaagctccgcctcccaagttcacgccattctcctgcctcagcctccagagtagctgggactacaggtgcccgccaccacgcccggctaacttttttttggatttttagtagagacggggtttcactgtgttagccaggatggtctcgatctcctgacctcgtgatccgcctgcctcggcctcccaaagtgcttggattacaggcgcgagccactgcgcccagccacatatatatatattctcatatatatatatgagaataaatgaatgcatgaaagcagagttctatctctagtagaatgtaatgttaatattttcagttctatagaaaatttgtatgcctcaagtggatgtgcttccaggcatgaaaatttccttgggagatttgctttccatggaggctagatgcaaaaattactgctcttcccaaagggacagtttcttccggatcctgaagcaaatccattcagaatgtcaaatgctatgagtctgtctgatccaccaacatatataagtatggagcttaatggtgttcggcactgtttggtgtaggaaggaaagtgataagtcaagattgagagggaaaggaccaagccctcctgggtaacttgtgaagggatagccttttatgcctctaatttcaggcaatttcctcagtctcccacctcatactggctatagatatttggctacagctgatcactgcttgcttcacagatatcctttggcagtctgacatttgttaagtgggaagttaagtcattggccccatgtcttctgaaggaccttaaaagagcaagcatctggctgggtgtggtggctcctgcctgtaatcccaacactttgggaggccgaggcaggaagatcctttgagcccaagagttcaagaccagctggcaaacaaagggagaccccagtctctacaaaaataataatacgaaagtcgccaggtgtggtagtgcatgcctgtagtcctagctacttgggaggctgaggtgggaggatcacttgggcccgggaagtcgaggctgcagtaagccgtgatggcgccattacaccccagcctgggtgacagagtgagaccctgttccctccccagacccacccaaaaaaggagcaagcatctaggatgcaggctgaggggcctataaagggaaggggccacaggagtatctttctatgcaaatcaacaccaaatatatctggctcctactataaggcatggagctaggctccaagataactgcacaaggctgcagatggggaagtccgaggatgagttatctccctttttgagagtgctgagacattgtggagatttcaagtcatgactaggactgggtgtgtttcttattattcccatcacctcatcacacccagggaaacctgttggcatcccaatcaacaacatctctagggtgggttgtatcacttcaggctgggctgttggggagaaatagtcccacttgatgcatttctaggaattggctgatttggctgcaagacaatggcctcagaaggatgaatcactgggctagttctttctcatcaagtccactgagtcacattaagaaataagaataatgttagctgccttttcctgtcctttgcaagagctgctagaatactggacactctaactggtcaacccacgtaaagatttccaataacctaaactggagtggctcacaatgttacaatgagacaaaatggagagctgacacctcaactgtgaggtcagggctgtggacaggatcacacaagacaggccagatgtgctgttcactctcctgcccttacctctttttttttttttctccccaaacagtaacgttcccttctagacaatgtgatcaagtggacacacagtatgcttcaagaaaatttaggctggattcaagttcaaaatggtggattcctatcatttctcttatttgatgctaacaaggagccaagtagatatatcagaggaccacattattagcaagagatgtaaggaaaagaacgatccatgatgagcagggcaggcaggattcccagtgttatatagctaggctccatctcccctgaacatttggactaaaggaatagtctagactggatgagactctgcagtggaatggggtgaagttaattctggacagggaaacatagccctctccttaccccaaaaattatcgagatgattttgaatcatccagcttgggagttgggggtggggacaagtgattcctcagtgagctatattagaaaggtcagaacagaactgttgcatccaaatcagtgggggcaaatgaataaatgtaaaccagctggggtttttgtaggacatggagaaaatcaagggatgagcctctgccctgaaattaaagagaccttgtggaaattatgggatttaggattttcaaaatccatttccctacacttttaaaaggctttgaaatactttcacagcaaatggaatctattggaggcaatttagaattgaaaatcaagctatctttacctttcttcctgatttcataagcttttatcagaaatccttggaacttaaaaataataaaatacaaatcaaacacagatcgatagtaagtatttccaattcttctactacatcaccattttccattaatggttttatttcgaatgtttttttaagcctgcaaatttcaaaagcaatttaatttttttatctgtaatctgaaatatacatctaactagtaacagatgtgatcaactagctttggcttgactagctttgttgagatttatggtaggagttctttgtaacggattgtttttcacccatgttattcaatcatttggtttaataatttattacttttaacccattcagaaaactgcttttgatttgttttccctttaaacgaaacaaaacatgtttgtggtttcataaaaggaaacagctgagcccttgctccaacgagctggttgacaggaggcctaaaaaagtaagaagcagtcaattgtttgattgagtttctcctccctgactcctgctactggtgtgtgtgggggtgggggcagggggcgggtggaggccagaaaatgctgtgtaagaagacattggaagctatggaagtctatgggtgcctgctgtagccagttgatcaactaagtggacagcatgtcagtcttaacctgatcagtcttcctggtgctcagccaggtggttttgggatttctcactggattactctttttcctttttaaaatttttaatttagagatagggtcttactttgtcccccaggatggagtgtaatggcacaatcatagctcactgtaaccctgaactcctgggctcaagtgatcctcctgtcttagcctcccaagtagctaggactacaggcactcactaccatacttggctaatattttttcattaaatttttttttgtagagtcttattatgttgcccagcctggtttgaacccctggcctcgagtgatcctcctgcctcgacctcccaaagtgctgtgaggcatgagccactgcacctggattactcgtttctaaggatagtctcatatgctacacatttaaccagaatctgagtgtggggctaggaatatgtatctttaacgagagccccagggtaatctggggtgcattgaggtgtgagaattgctatttctaaggtatagataagagcttcagtgatgtttggcactgagtacctttgaatgttgggtcccctactaaaacacagacaatcactcattctgttaaagacccaagaaattttcccaaatgacctacaatccccagggataattgagaaaatacaagaggctgtttacaaaagggaccggactatgctcttttggctgcatttaaggaagtccaaagagtctcctggagtcacctgactatacccacagacttgatgctaagtgagccacaagtgaatatgggctattcctgggagaaagggtcctttcccagctccagccctgcaaagaccagggctgctgaagccttgttgtggaagtatacaaaagaaggatgccccttaccttgtccatgcttgtgtttgttattgatgacaatttgcacaatggttcctgatgcttgctgggaatccataagagctccccggtgacttctggccccaggaaagcgggacagacctccagcctgtcggcttggtggaggatcatagtgagagcggtggtaagaatgtctctgtaaaataacaagaacaaatttagtccaaaagccaccaatgagatcacagagattaagttatatactagaagtcattcaataattttgatttatagtggtgagctctgatttcagctgcatgcttacctacaccaatagaaatagggatgtggtcatgtacaagcagctgacatttttttcattaaaatttttttttaatgacaacttgccaaggtttatctctcttcttctaaaagataggactagatttacaggcaaacttctcagggagaaaagagccaaaaaggctaaagcgtccttcctgctgccaagactctcacatttcagtttaagagttaagacagtagtctgcacgcaaggcagaatgtgaatagaggctgcagaagaagtaagcagtcctgtgcaaatcagaaggagaaagagagagcttctagttggggagggcttgtgacctgggccacgaaggatgggtagacttttttacaggcagaagttaagtggaatagtccaggcagaggtttacaagttgagaaggtgaagaagagaacatcgagtccataaaagggaacagttgcagaataacattccaaaagtgggttgaagccagatcatggaagactttaaatgacaggctaaggggtgaagactttatttggtaagcaatagaggtgagggcatagaaggctttgagggatttttttttttaaagttagagaaataatgtaatcagaactgtttcaaagcattgaatcctgatcatgcatagggtgaactggataggaggaaaagatgagattcgagtatagtcttgataagatgtacttagactctaaagacaggtaatggcataagatcatacaatgcagtacaaataccctaggtattttataggtagaagaattgatagtacatgacagtattggcatgtaagctctacgaaatcaaggactttttgttcactgctatatctccagtgcctagattttagtgtcaggcatctagaaggtgttcatcaaatacttgttgagtgaacaaaactctggtacctaagaaaagcttagagtcttgtcatacaagtaatctttcagcaagggttcaacacacgtgatgaccagactattgtgctacccacccctctcccaggagctaaagtaggctgggggtacaagaagatgaaatgaatgaagaatggaaccttaaggcttaaagccaagtaagattaattgtattttataggcaattgttaggggtgaaggagggggaacccattaaaaaactctttcacaggcaattgaaaaggaaggtctttatattcagtgacagaaatagtgaggaaccttgggaagatagttatggggtcccctgaccatatcccataaaacactgtttaaagttatgggccacagacaggcatgttgcaaatttcactttgggaagtattattgccctcttggcaggaaggggccactggtaggggaaagggagagtaaacaggagctgaagtaagaggaccttttttagccttttgaaagacaatgttattctatctaagaagagcctatgttggtgcattgctatcaaaattcacacaaataaaaatttgcatcagtttgttttcatgcacatggataggattctcagttcaaatatttctcattcccacaatggctcatatgtccttttctgccataatcactcacattccacaaaggccattataggttgctctgtcctttttgaagtttggcaaagttttgccaaaggaacacatagaggacagtttggctggttggtgtcccactgatcctaaaaagaagcagttggactgggatagaattagagagggaaggttgttgacccaggataagctgcaagtacgagaagttctctgactcatgatggtgaacacaaaatgaaaagccattctttagcaccaacgtctcagacctgggacatataataatggtaggaaaatgatcatgatgaaaaaacaaaatcctcaagaattttgatcacaggccctattgtagaccagtcagtcccccagaacctaatcttgttgaagtcttttgttttacagacagagaaactgaggccaaggaggagaggcagtttactcatggtgataatgaagattgagtttttggagatggtaggagtgtaggagtagggggaagatgaatagaaggaggaagagaaggagaagaaggagaaagtggaagaaagaatgtccaatcaaactcagtggtctataaccatttgactaaaagctggtgcaaagagaagttctttcagatacaaaagttcattcagctacaatgttcacaaccacatataccacatactccactttggctatacactaaaatcacccggtgagctgtaaaaaatactcatacctgggtcccgctctgaggtatccttatgtaagtggtttgggggaaggcctgggcattaggattttatatactccccaagagactctggtttgaagccaaggttgggaatcactgacataaaggattttctgtttgggggctggagtgggtggtggtggtgtgtgattttgatttaagggtaatggttcttttagagttcctcccctaaacaaatgaaagagacttatgaggggccattctgaccttgtaactcagagcaaaggagaaaaaggttattaacgccctgaagttgtaagtgaaattggagcttatcttaaaaattagctgcaactagcctgcttgagagagcgggtcaaaaccagttagaaatgaccatatagctatgatcttttattttgctcagtattttggtattttttgatttacttacttgaaagactgaaaaatatttcaggctttagaggtggctctaaaacagttcttttccagtgttgaaaaatccccactattgtagaggacccccaagaatttcatgttctaaagtctaaaatataagagttttattggtgtagacaagaaaacatcagggtccagaaagggccctcatgtttgtgatactgtactatagattttcaagatgttaccatttggggaaactgggcaaagggaatatgggatctctctgtattttctgctacaactgcaagtgaatctatagttatctcaaaataaaaaaagtttaatttaaaaagcggcttcagaatatattctaatccatacagccattaaaacattgtatcttaatcactaccaacctaggactatctctggctggaagacacttaggccaatttccttcccaaaccattgttctgacagtacaaatgagacatggatttttatctgtttcatgtcgtttctatcccaaacgctttcactttttttaatggtaaatttcaacgtaatctacagggggcaaaaatcagggcttggctgttgtccaaaacaaaattatgcatgctttcatgttttggctttctagtctgcacctacttcttcctccccacataccacaccactccacacacacacacacacacacacacacacacacacacacacacacacacacacacacacacacacgcagacacactccccaccaatggcacgaggaccaattcatgagaaattacaacttagaaatcaaacaaaaactgtttcaggtttttacaaaggagtcatatttgaaccactggttcctcttcctgtgcacttcataaaacttgctaagccgatggttttcagaccacctggcaaaagaaaccagtcagctgtatttctgttgaacagaggttttgctggttcccggtaaataggaacagtttacgaaaaggacagtctcctggataagaaatctgttgttagggctgccttttcttcttgccctgaggaagttgggcctgcaaaggatattcagaagggattctcctattttctcattttaggctggtcaagagcaaacaacaaatttgaagagtttatctctgatttgagacaaattcctgtgcattaaaattaatgaggaaccccctccccactccaccatcacacacattttacgccacctcccacacccattcattcaatgtttatttattgggtgactactatgtgccaggtatatatttttccattactacagatgctatttattattcaaatcatatcccacaatatctatcccttttagaacaaagggaaatatttatttataataaagtgaaaccatatggccattttggtctaccaggcacaaatgtttgtttctaaagataggtcttgaactcctttgaaaatcaataactatttcaagggcccacattctgtacccgaccttttttgctacaggaagtactggattaagtccaggcctatcactaggcctgtcaatgaagctgaaagataagggctggaattgagggcagtgtaaaatgaagtcaagaagaaaggctaattcatggcattaccagcaagactgctaaggtggccatagtgcttagtgtgggggcctctcagggaataagtcacatagcttaaggtgactaaactctaaatttggtttagaatgacatctggttgacagccactaattcagccactctcaactacctaccacaataaaaaataggggctgagaaaaagaggaacagacaacacagaaaactgagactgacatcatctcctgtcaggctctggaaggaatctcacttactataaagcagatagagttgggtggagaaaatctttcctcagggtttatattaaccagcaaacagggaagcctaccctctcttgcaggatgctgattttttgagatgtccagagtactgttctccaaacccctttccccaattcttctgcaactattcagaaacagcagtgttcagaaaataatactgatagagagtaagacaaatagaaatggttccatctcactgctgaagctttgggttgggtgttggcaagctgggagcatgcaagttagaagtggcccatgtgatgaccaggaagcccagcctcagcagcactgtgatgtttgtatgagtcattctactgcatcccctatcaacatcttcctcacatgctcaatatcctcaggcttgccctgtaattccctggactcctgcctcatattcaatccttgctgagatttttctagggttttagaaaatcaaatatattttattacaaaactaattgatgcttataggaaaacatcaaattatacagaaaatataaagtaaaaagtcaaaatctacctttcctcctgcccacttctactcctttaagattagcacacctgacatgttggtatgtgaccttccagattggtttatatgcatttatatacatgcacatacaatttttacataaagaagtgatagtgtacaatttcattctgcaccttgttttgttacttaacatatcttggagctcaattcactttactacatttagatgtaccgtattcttttaacaactgcacagtgtcccattaattggatgtacacaccaagtccctagtagacatttaggttgtctccatttgttttgtttttatgaaaacaacaacgcagtgaatgtccttgcatactttttttgtacaaggatgtgatgaacacctatttatgtgcaatggtcaccactgtgcattttgtatgatagattctttgaatcggaacatctccttttcagattttaagaaatttgtagtgtaaagcttcttagacatatatttttagagaggaatgctattttataaattccttcaaaatacaaaagaacaaaagatgctattacttacatagacagatgcctacttgtgaggcttattctgagattagtgcagagaacagaagggagacatcaccaggctgaagagaggagaatccagactgctacctttcctcttttccaactgtatgactgagagcctaaggcttgggaaagagtttatgtggacatgtctgaagtacctaccaaatcccaccaaaaagatggttgtatcctacaaccctacagaaggtcctcactgttgaggataggagtgacctagcttccttagagaacacataaagacttggcaagtcatcctgaaagagtaccaacttctgacctagacaaagggctggggctatggtttctttgtgcacatttcctgcctccagttaccaattttacagtgtacttaaatggtttccagttggtgatgacattaaaaactttgagaaaagggaagaaaaatggtgttagaaatcgggccttttttttggatttgctagaatagtagccacgaggagaggaaagcttggcctgatgctgtggagtgttgaattatttgagctattcacacttactgcttctctgttggcaggttgccggaagatatcaccatcagaatgttcccatgacagttctccatctcctgtttattaaaaagaaataaggagaaaatcatacattcataaaagggaaagttatcacccttgtgacccagcaacatttttggtactatgatcccaaagttcttgaagtgtttttgcttttgtggctgtccttcaaaaagcggctgtgaaagatttctctgggtgtgcctcatttttcaaaacaactctgaagaaagttgccactttctaaatagatgtcctagcaacattatgcagaatttggaaaataaaaggaaaataatcactttccacctaatttaaccatcactgtcacttttgctcattttacttcgtgacagttaagtgttttgcaggtcataattcacttctgtttaaactaccattaaaataatgagttttgaggatttgatctgtcataatttcttatgacacacctttctctaggtctacatgacccactctttggacagagaactccttatcattatcttctaaagtaactgcttataggaagaatattctactttcagcctctagagcaacaaacacacaagagctgtggatatacctcaactgattaaaaaacaagaggatcatttccaagaatattgcccttgtgttacctctgaccaagcaagcgaatgggaagagccttgtcttagagatgtttgcatcacttgaaatgagtactatttaaattatatatatggctgaagataaacctaatattcaacatatattttataagataaccagaaacacaaaaaagtgtaagtactaagaattttctattctgattactctctcaagccttcataagagtaacacgccgggtgcagtgggtcatgcctttaatcccagcactctgggaggccgaagtaggcagatcacttgagctcaggagtttgagaccagcctgggcaacacagggagaccctgtctctacagaaaatacgaaaactagctgggcatggtggtgtgcacctgtagtcccagctacttgggaggctgaggtagaagaactgcttgagcttggcaggtggaggttgcagtgagccgagatgatgctactgcattccagcctgggcaacagagccagaccctgtcacacacacacacaaaaagagtaacatgttaccagttcaagcatgtagtagtagtgttaggggaaattaggtagtatcataggcttttaagggcttgaaaacgacctaaaaattagtttgatagcaatattagaatcaggcagtgacttataacagagtatgactgtaaatcttcataattcaaatattatctgatgaaaaataatgaattttgaggatttaactatttgctaggttaatcttcataaaacagtaaaacaccactttgattgtataatcgtgtcattccctgatcaaaaccctcagtgggttcccaaccaagactctctacaatcaccccctactgcctacccaatgatctcagctactcttcaatgggaaccctttgagctacttgctcttcactgaatactggactcccattgttgcttccgtgctgtagctcatgttattcttcttctgaaattaccttccatctcccacaccccatagctcccccatgcctgtgaaaaccatttaagttttctctcctctgcaaagtcttcttcaaacactcttacatatttctgattgcctaaaagactaagcatcctgaagttttagaagtatagaggacgtcaagcataactttgtccaactgctccatttaacagatgaagaaaccatggctgagaggggaagtagccattcagagtctaataatgagtttgtgagaattaacaccaaaactctaggttacctggctcccaaataggtatgtccattccataagaaaagggttcattacctgtgttactatatcaccatcatctataacagtgcctgatacatagtagtcgctcaataaatacttgtcaaatgatggaactgggaggccttctctgaccaccctatctatagttccaacccccatctgatatttatgcctgctctttgctttttctccttagcagttattactatcttatatttcttatattttatttattttgtttattgtctgctttcccatattagaatccccccatgacagcagggatttttgtctattgtgtttactgatgtaactccagcatctggggcagtgctgggcacatagtacttattcaatatttgtcgaatcaataaatactaaaacactgtacaatatttattactgttaaatgttttctgggccttccttgtctccctagagagtctgtaaattccttggaatgagagattatgtcttagaccacctctgtatctcctagaccactgcttctcaaaatgtgcttcctggactagcagtatcagcattacctggaaacttgttagaaatgccaaatttcagatcccaacccatacctactaagtcagaaactcaggatgggggctggtgatcctgggttttgacaagccttccaggggattctgatggatgcaggagtttgtgaataaccaggctggagcacttagcatattgctgcgtacacatcaggtgctcaatatatgtattgaattgaactgcagtaaaacatacagaattaagtgcttggtcaatagtatatatactcttttctgcctgttttattccatgtctgagtaaagattgtagactgcaagctgaactctgtggaaaccctgactgactactgtaaaacaaagatgatttcaactatgtttataactagaaaattatgcccaagagtcagttaacatgctttgaacacttcttgggtgaagagcctgatactacagcagaaagaggagaaaatcaggctgggctcttgccctcaggatatttacacccaggttggaggtgatgggaaatcaatataggaaacagcctaaaaacacacaaaaaaagcaaatacaaatgaaatacacatgcttaggagacactgaatgggatgagtgagcagtcagatgtaatcgtagaaagcttcctgaaagaaccattaagtcacatttttagaagtagatactgcacagcataaaccgacagtgataagggcagagagtacctcaaccaaagggagtgacattggcaaaggaccagagctttgtaaacagcaagtcacatactggagacagcaagcaaggtgtggcttgagtagaaacttcagatatgaaaacaagagaaattacgctggtaattgaacttgtagagagaaagggaggagagggagagcgaaggagggagggagaatgacagtggggtgtgttgttgaggtaaataggggtagtaaataatgtgctactatttgatagcacaatagggtgactatagtcaataataacttacttgtacattttaaaataacttaaagagtgtaattggatcatttgtaacttaaaagataaatgcttgaggggatcgataccctattctccatgatgtgttcatttcatattgcatgcctgtatcaaaacatatcatgtacctcataaatatatatgcctattatgtacccacacaattttaagaaaataattaaattgtaaaaagtaaacagtaaaaattcaaaaaaatataaaattttgtaaaaggctgaagaattcacatttgattatgttgccaatttttctgtaggggttcctatgataaaactgatatttgtggaagcctattctggcaatggggtatagactagttggggagtaactcgaatgcaggaggccatacaggaagctgctatagtaatatgtaataggccatgagcatctgtgcaataacacacaagaaggattgaatgagactcctacagatgaaaagaaactgataagaccctgaaggaagatttgatgatggggaaggaaggcaaaggggaaatcagtatctgacaactcttgggttgcaaatctggagagctggggacagtgattgagcagggatgagcttagatttacttgtcccccttgtttcagtgggcagtagtgggtctgggccaaataaaatatgggactagagagacgaatagaaaccagtaaagatttaccagcaaatggcaaaacaaaatgtaaaagctatataatgtggtttcaagcctaatttaagtagtcaaaagggagaaaacaagttgcaaaagaaaaatgatagactagttctcttcatcaaatgtccttttaaaatgtagatttaatgattggtattgacataaaatgtttacttagctggccttctgaaaagttcagtttatttaatttataccctagagtttttaaaaggattttaattaaagagtgtcattaaatacttatagtccagtcagaatctcaaagcattatagaagcacatagcgcctcttacaaatgagcagagaggtaagatggaaaatcaaggaggcaagtcactatcaggcataggagaagaatactaataccctgtaacacaaatcagatgagtgtgtcgtgatgtgtatttgatgagcatttgcagacaagaatgcatacctaaatttcagcacttcattaaaaagtaatggagactatatatatatatatatatatatacacacacacatatatatatacacacatatatatacacatatatatatatacacacacacatatatatatacacacagacacatatatataccatctgatctttgacaaacctgacaaaaacaagtaatgggggaatactaaacctgtattacatatatatatcatctatatcatactaaaactgtatgatatatatatatatatcatctatatcatactaaaactgtatgttatatatatcatacaggttttagtattcctagtctaaaatgctccagaagtttttgagtgctgatgatgctcaaaggaaattctcactggagcatttttggatttggggtttttggattagagatgctcaactggtaagtacaatgcaaatattccaaaatccaaaaacatcggaaatctgaaatacttccagtcccaagcattttggacaagggatatttaacctgtatataaatacacacatatatgtatatatacactatatttatatataagatatactatgtacattataaattatatacattaaatatataaatactaggaactgttagcatttctggtgcctctgagctttcaaagtcatcaaaattgcattctctaaacttcaatgttctattaagtctattaagtagctgctaaacgttttaacatttgaattattctatttaatttaacccataattaaactggaattatcttcttagatgttgacattttataaggctataagtggttctctagacctgggtacagtctgtctggatagctgaaaataggtatgtccatttgcaaccttagatatcatactttgaaaaaaagtaggcaccaataccctaaaaaacctgtttctttgctctttttgtctgatcactggaaagattatctgaatgagatggaggctttttcattcagccaagtctttttgtaaaaaacaaaacaaaacaaaaaacagagattctaatggattcagatggattctaattaattttgagaagcaacaagatataattttaaccaattttttgaactgaaataaaaacaagtgtagtgtactgtatgtcaaacaatattcatttaaccctaaaagccacatgtattgtttattcaaacctcagtcatactctctctgagtggtaccctatgaagctgtaatgggttggctttctagtagtgggagaaagggagaacaagtatttgaaaaatggccaaaagctaggctgaaattcagactgtttataactcctgtggcttccattaatctctggtggcttgagcaggtcagagaggtaaactgtcctctcaaaaggactaagtgtacaatgagattccgagatacccatgaagataagcctcagagagcaaaactatgccagcatgtggccacttttgaaccatacatcataaatagggtagccatagagcagatttatctcagacaactcagttttattgcctgtttttctggcaggcataattattaagattgcagctcttgctttcaaaatgtgcctcggttgagatagtaaattacatagtcactctaatcataaggcaaagggacatgagacaaatccctgagacaggggaaatgttctctgtattttttgaggcagaagttgaaatgagcagaatcagggcaaagtggaagagagcagggaggaataaacccattgtgaagtctctccttaccatgagctgggttccatgggggagcactttaatgccagtgctccataccgaagctagagatgaagaagtgagtagaagcagatgactttagggagcctctgccaaacatctaattctataaattctgctgggagggagcaagtgtgctgaaatttgagagaagctttaaaaggaaactagtataaggattctccactgataggcatttgagcttccaatgatgatatacaacaatacaagaaatctgcaagttttataaagcacaaaattagaaaaaactactttaaatttcaaatggaaccaaaaaagagcccatatagccaggacaatcctaagcaaaaggaacaaagctggaggcatcacactatctgacttcaaactatactacaaggctacagtaaccaaaacagcatggtactggtaccaaaacagatatatagaccaatggaacagaacagaggcctcagaaataatgccacttatctgtaaccatctgatctttgacaaacctgagaaaaacaagcaatggaggaaaagattccctatttaataaatggtgttgggaaaacctggctagccatatgcagaaaaatgaaactggaccccttccttacacctcatgcaagaattaactcaagatggattaaaggcttaaacgtaagacctaaaaccataaaaaccctagaagaaaacctaggcaacaccattcagggcataggcatgggcaaagactccatgactaaaacaccaaaagcaatggcaacaaaagccaaactagacaaatgggatctaattaaactaacgagcttcttcacagcaaaagaaactatcatcagagtgcacaggcaacctacagaatgggagaaaatttgtgcaatctatctatctgacaaagagctaatatccagaacctacaaagaacttaaacaaatttacaagaaaaaaaaaccaaccccatcaaaaagtgagcaaaggatatgaacagacacttctcaaaagaagacatttatatggcccacaaacatatgaaaaagagctcatcatcactggtcattagagaagtgcaaatcaaaaccacaatgagataccatctcatgccagttagaatggtgatccttaaaaagtcaggaaacaacagatgctggaaaggatgagaaattggaacacttttacactcttggtgggagtgtaaattagttcaaccattgtggaagacagtgcggtgatttctcaaggatctagaaccagaaataccatttgacctagcaatcccattactgagtatatacccaaaggattataaatcatgctactataaagacacatgcaccggtatgtttattgcagcaccattcacaatagcaagacttggaaccaacccaaatgcccatcaatgatagatgggataaagaaaatgtgacacatatacaccatggaatactatacagccataaaaaggatcagacagttattttcttaaaaaatacttctttgtcaaatgaagtactttattgtttgggctgtcaatataagatcttagtatttttaacaaaatagctccttgagaaataccaaaacacacacaacggggggaattcctgccaacagtagcaagccaaatctgaagaagagtacaaaattatttgtccagaaaaatcataaatacttactttttaaaaagtgcattgtgagaatgcatgcgtttccaggaggaaatcagaagagagtgaatacagaaactacgagctggatggtacccaccatccacactctgctctttcaatggagatgtggctaaacagatccaagtttatggtgagaaacagaatctttgcttctcagagcagtcccaatgcatctgctggattgttaccatatctggcccctggaaagatggtcatcacacagtctgttcctcccggtagcctcagaaataagagttcccaaatttgctttgcttccccaagttgagaggcagtataatataatggctaagagaacagattggagccaaacagtttggattcaaattctggctctgctccttcctacttatgtgactttgggcaaatgaattaacttctctgtgcctcagtttccttattgctaaaatggagacaataatgcctaccttatagggttgtgaagattaaatgaattagtatatgcaaagcatttagaattgtgcttggcacactgtgtcagctaaatgttagctgctattcctaatcccctttcttcccattctttgcctccacttctttttcctccttctcctcaagggtagcttacacatgggggaatacccggcttaagggactcccacaagtgtgctgtgtatttaacaaagaaaagggcttggatcaaacaaacaaacaaacaaacaagcaaacaaagcctagcaaagataactgcatgcctgcacattgaaaaggaatcatttcatctctaaatcattggaagacagggtcctggagatatttttaaaaatggctagagagatttcttcggctcacaccttctaaactggcttagaatttctcataattatgctagtcctctatttccaattttttaaaaaagagtttgcatcttaattaaaatctcttttctctcttggctaaaaatgaggcttgacaggaaagatatctgcttcattggtaggagtacaatttacaaagttataaagtgaagtcttaaaaatccaagtgcccactgagcgcggtgactcatgcctgtaatctcagcactttgggaggctgaggcgggtagatcatctgaggtaaggagtttgagaccagcctagacaacatcgggaaaccccgtctctactaaaaatacaaaagttagccagatgtggtgagcgcctgtagtctgagctacttgggaggctgaggcgggaggatcacttgaacccaggaggcagaggttgcagtgagctgaggtcatgccactgcactccagcctgggcaacagagactctgtcttaaaaaaaaaaatccaagtatccaaataaagtagagttctgtgctaccacatccatgaactgaaaataaaaagcaggacagagaggagaaactcaatgacctacccatgctgactgtctggtcaacctgaaaatgaaaagcagtcagttgtatacactgctcttccttctcatgtatcttttacctctgtttgcactgtcagtcaacaaaccaggttgatttctataaattgttggagtctaagctcataaagactattataatgtgagtaatgggcacatccaatggtgtttctgggcagctatggaattccttgaaggagttagaaagaataaggttgaagaaagagtggctttaaccacccatgaagaaataattgctctgaaatgcttcactgggaattccttatttttattatagaaacagattcatatacacacaaaaaagtcctccaatcccagaaacagaatggggtattactgaccctgacaggacaacccagatggccgattaggaatcagtgctattaatttgttaaactcaatgtgaaagtcaacgctgtcccatccactgtctgaatgactttctattcaagaagaaatattctagacgtaagaaacatgccaagaaggaacatgatgaccttagagggacggggtcctgggacagtcagcaagtacgtggggatgaattttgagcacaagagatggagagaaagcaaaaacaatctggaacatttccatggaaggagatccagttgggatttagatgaggagaggtaggtgaggatggcaaatctctaaaatggtcccatacacatgaacataaatgattcacttttgaaaaggtattattaatgacagcgagactcttctatagctatgaaaatatcagagtatatcaatacacagtcgtccctcagtatctatgcggaattggttccacgaccccccacagatgccaaaatccacagatgctcaagtccctgataaaaaatggcatagtgtttgcatataacttacacacatactcccatatactttaaataatctctagattacttataaaacttaatacaatgtaaatgctatgtaaatagtcattttactatattggtttctaaaatttgtaatttttagattgttgtactgttacttttaacgtgtttttaaaaattattttctatctgcagttggttgaatccatggatgtgcaaccagtgaatatagagggcggactgtattttgaagtttaggtgagaatgtataaactcaaaaattactgagttaattttaattttttttattttattgtggtaaggacacttaacgagatttacccttttaacaaacttaagtatacaatactatatggttaactatacacacacaatgttgtactgcagatctttagaacttgttcaccttggagggggaagtggggagctgctaatcaacaggcataaggtttcagttatacaagatgaattttcattttttaaagtagtgtttctcattaacaatgtttctttcctatcatcatgaccaggagatggtggtgtttctgcagaaaatgtgggccaaaacataaacaacttgagactaatttgtgagaatctatatttggatttgctgttattttcttcagttttctttgattttgaaaactttgaaaaactggtcaatttttatgatgtttaaaatcaatgaagtatctcacataccacttccctgaagatcccggattctagctgagatgggatctgaggtgcaattttgctgctctttcggaaagagaaatcaagtgtcttaggtaaaatggcacttatcttgaacactgactaatatacttttaaacaattgcttccagtttcatttaccttgaaggagttagcagaaatatcaaaatttcataaaaagtgacttccattttctccctgggctcatttgagatatgttggatgaacgggcttgggttgagcaaattgtaagttccaccatttctcctgcctccctactgcatctgtacttggaatgctgtcaagagctttttgtgactgtggctctttttgtattaaataaaccagtcagcatgatatatgattaatattatgttatgccaggggaaacaggaagacacaaagcaataacagtgcaagaatatatttctgaatgcttatttttgaaccagattaagtcctgaaggtggtcaaagaagatcaatgagaactagagtgattgggcaaaactattagaagaggtgcaacttcaactggacccttgaaagatgagtaggatgcgaataggtagaagaggagcgggggctattccaagcttgtgaaaaataacagtttaagtgaagcacataacaggagggaaggtaggaagaaacatagcatgtaacagaacaaagagatcagccagccagcctaaaggagatgtgtgtgttggtgtcagagaaatgaggctggaaagtaggttaaggaaggatcagactgtttcacagagggtctttaaaaacaagctgaaaaattcagattggataatatggtaagaaatggtagcatgatcaagtagtttctcaaaaagaaaattcctaggctgggctcatgtctgtaatcccagcactttgggaggccgaggcaggagaatcatttgtgaccaggagtttgagaccaacctgggcaacatagcgagaccatgtctctaaaaaaaaaaaaaaattggttgggcacggtggtgcacgcctgtagtcccagctactcaggaggctgagacagaagggtagcttgtagtttgaggctgcagtgagctataattgtgccagtgcactacagcctggatgacagagtgagaccctgtctctgaaaaacaggaaacagccaaaagaaagaagagtaaaagaaaattcctagattagggtattatgtagcatgtataatgtagaaagaacattatagacccctacagcctggggagggactggattcatggtgggatcagaagttggggatcccaggagtgtatgactgccaccagttatctccctaatttttgagccaatctttcctcaccctggagtgcagagaacaaggagggatgtggtgcgagttgaggctggagagacagtctcagaagtcttccttcacctccctgactaggtcaacccctctcaattattggcttttataacaactttcctttgtggcatgtggcacagttgcaattttataattacttatatcatgacgtggtgtctatcttccctactaaaactccatgaaggcaggttccatgtccatttttgttcaccattgtatctctagcactggtgcagtgccaggctcttagtgattgcttaacaatgtttgctgaatgaaagaaagtagacatttacactcaagacactttaagcctagagtgagagaagggtaagttaaggccttgatgggaaaacatgggcagtgtggtaagatactctcttaggagtatctgcacacaacaatgtgccatgcatgtcccgtcttcccctttactcccctgtactaggagatatccttgtcatactcctatgaatgggtcccaacaggtagtatagaagttaagagcttgaaactctgaagccagactgaccaggttaaaattctagctctgccacttactaccatttgtccttggacaaatcactcaacttttctgccttagcttccgcatctgtagaatggggatataaatagttgctactatttttgccaggatcaaatgagctattccacacataagtgcttagaacattgtctggcacattgtacgtgctacatttagacaccatttactaaatgcatacttggctttcaatacagttaatacctaccccaaatacctttcccttgtctagagtccaagtacatagccttccctgttgttttggcaagatgagcaggggacaggaagtggaaatgatcaatggtggagggaagctgggtgtgggtttgggtttgaagcctgccttcccagaatgtggcagtagtataatctctgaagagatttaaaaaaaaaaaaacttttattttaggtttgaggatacctatgaaagtctgttacataggtaaactcctgtcatgagggtttgttgtacagattctttcctgcttctctccctcctctcaccctccatcctcaagaagaccccagtgtctgttacttccttctttgtgttcgtaagttctcatcatttagctcccacttataagtgagaacatgcagtatttggggaaaaaaaaagacacatgcacgcaaatgttcattgcagcagtattcacaattctgaagacacagaatcaacctaaatgcccatcaatgacagactggataaagaaaatgtggtatatatacaccatggaatactatgcagccataaaaatgaatgagagcatgtcttttgcaggaagatagatggagttggaggctatcatccttagcaaactaacacaggatctgaagagattttttcttctgataaaatttcccttaaggttccagtggctgtttgcactatgcttccagtcctaatgaggtttgctgaagtgctagcaatgacacacattctgccaacgctctccttgactgtcccagcctcaaagacacgtctagccaatgaaggctaggtctgagattcaatccgcgtctaggattgctgtctgacccaggaagaaagacacacattagtgtttggggacagtgcagagaggctatttcaatgccctttatatgaaggtttgcaagttcagcagtcaaaagattatttcttcttcagtatttggcctgcagtcagggtggccagcataggggagaggtttctgggttccctgctgtatgagtaatacgcttatataagatacagtattgtaaaaacgtcatttccatgggaaaaaataactaggtgcttcaaaagttagaacttcaaaggagtttcaaccacattatatacagctgaaagatgcaaagaaactggaggcaatgaaagaacaacaatttttacaaaagtgtaggatttagtctttataaaggaagatgaaagaaaattgtgcatttaggctggatgagaggttgcaaagaaagaacttaatgaattatcaagtatataaagggacaatacatggccagtaataactagcttttatctgttgcttctgaggacataaaaaagaaaagaaatttaaattgtaacgatagaacagtacataaaatagctagttccaggatctgttaccacaagaagaactagaactaaagttctgtctatggagattacattttaaaaaggcaaaactatcaaagatagaggagaaggtgcaatgatacttaactcgggggtaataaatatagtaattactatataaaatatagtaattgttacttataaaccaataactctgtattaggccatctcctagcactctacgccatctcagttaatctacacaacccatttcatacgtagtaagcataatctccatttttacacctgagaaaaccaaggttttgagtggttaaatagtttgtccaagataacagcactcgtaggtggtagccctgcaatgtcaaatctatgaccttctggcttcagagcctctgtcctttgcattataccgtattgcccctaggttgcagtgacatgtcttttcactgttgcctttcctttctattatcaattgttttccagtttagatttcacatatccttttccccaaagggaataatatcagcctaacagctggattatagtgaccaactggttatattagcaaccacatgtacacctctgctcagtatggactttcttttgagccacactgaaattaagttggggccaagacaagaaaggaggtgaggaacaaaatatccatctttcttgactgaaatgtaacagctacactgtagtacagacatatacacacacacattgtgagaaacatgtatggaaagatccagggccttaccaaagcataaatcaaattaggctgtaactaaatccatattgacttatgagggctgatgcaaatagcatattaaaagggatgagcatacactggtagtccaaacaagctcagtccttccaaaaagcaatgttaactgtagtttcctaaagtggtataggggaagaaaacaacttggagatcaggaatgagaccaagtaatttcctattgacgaggaatcaatgtatagtcaacaccatctaccacagtcaatcagtaattcagggggaaaaatgcacaacaaccatattcttttttggtagcacctaattcaaatcctgactaaatttctagtaatcattccaatctagtgtgcattcatttaaagagcacctactctgcctggcacagtgggagaaataaagataaatgaaaaagagtatctgtcttgaagagcttatgcattaatagggatgataatacatgggcacaaataataaaaaacagaagttgacaaggtgataaatgctccagaagaagcacaggttaagtgctgaggagtcctagagtagagacaggtttacttctagtttgcaggatttaaaaacatttcatggaagaagtggcaattaggctggattttgaaggataagcaggatttatgggtggagaaattagggatggaagtgggaaggcagaaaagaaaggccttccaactactacttatcaaaatgcgacctgaggacggcctgcaatagaatctgaggaagctgcatttgtgctaggtcttgaaggactagcaggacttccacaggcagggatggagaaaaagaattttccagaaagaggaaacattttctccatccaacctgtacatgtgcagttgttacttagacagcccttttgtctccttttcatcccagttccttatcatgaaatggccaccactcattcatctcaaattggttgccatatggtcggacttagatgctttaaccaatcaggaactgaaattggttgcttttccactggttcactcaggtttcagaattttaatgtgctcaatttaagtgcactaaactcagattttttaaaacaaatccttggttccaggttatctacatggtctcaggaatggtttctcaaagtgacagtccacagaccaccattctgcatcagaatgaacgatggggtctgcttaaatgcagattcctgggtcccactccaaggccactaaatcagaatctctgcaggtgtgatccaggaatctgaacttcaacaagttctctgagcaattctgaagcacactaaagtgtgagaaacactgacaggaagaggactgagcaaaggtaaaaaggtaagagagcacaggaacaatgcagtgggccctgaggtgcatgaatggaagaatattgacctataaaggtaacttgaggttagaccatgaaaggccttcactatcagagtcgggggttgacatgtatttgagtggcgacagggagtcatccctttcagtggcagaacactgtggttagagcctgaaatatggagccaggctgccaggattcaaatcttagctcctcaactcactagctacctgaccttggataagattcttaaccgctctctgcctcagtttcctcatccataaaacagggagaacaatagtactcctcacatagggttgtcatgagattaagtgagttcatatctgtaaaatgcttagttagaactgggactgacatatagtaagtccaaatacatgttggcataaaaatttttgaacaggggtgtaacacggtgatggattgctttttggaagattaaaatggcagtaatgtatagaagtcacctacacatcccccaccagcaaatcctataatttttttcctctaactcagtggttcacaaccttagctgcatattggaatcacatcctcctccttctgatctggtataaatctaccaaggtaattccaatatgcacccatagttgagaaccacggctccaaatgtatttcaaatttgtccacttttaattattgggtcctcagtatatacaagacactgtgccaggtccttctcttatattatctcattgaaatctcacaaacatcttgaaggtaggagctaacattatcctcactttaaagattggtagaaaggttgaataaggtcattcaactacaaagtagcaaggctgggattagaaccaaggcagtttggctccaaaggctccactctgaaccactactgtgttctcagtccaagcaccctttttctcacactggaaagagtactaccctaaccatcttgctagtctctccacttgcattattgcctccctccagtctagtctggaaataatagccagtgagatcttttaatatgttaattggatcacttcatactctttctcacaaccttccaatagcttcccaatgtattaaaaatggaaatccaaaatccttcccatggccttcagaatcctgcatggtctaattcctagttacctcttcagcctcatcccatgtcagtttcaaccacaatcactacatttcagctacactggtccttaggctctttgaatgctttaagctcttccctgcctggggcctttgaactttcttttctctctacttagaatgttcttctttgggatctttgcatgggtgacttctttttatctttcaggtctcagcttaaatgtcaccttctcagagaggccttcctgacaactcaacctaaataaactacttatttttaatctcagtcctatgtttattttctgcatagtacttgcattatctgtatttccacgtttgcttattatttgtcttttctggtgagttccataagagcaaagaacatatcttggctgctatgtatgctatatatattgttgtgtaggttgtgtgctgcaaaaggatgccacagctacaaaggtgctttccctgggattttctgaaaaatggcaataaagtatcttatgtaagggaatcctttttgtaactcacataaagatgccatatggtctagcaccaccctatatatctactgtatttatcaatataaataccccaattctagcacaatgctgagcatacagtagatggtcaaaaaatatgttgactggatagaaggaaaaaggacaaaataaggatattgccagtgggaaagtgggaaaagggagagatacagataactgctgaaagatttggtaatctgagaagaggtaacaaaggagaaattaaaggggattacacttgatcccaggaacctagcgaaaaaactggtgccattataaaaaaaataaaacctaaagaaaaaaagactaatgtgagaagacaattcaattttgaatataatttgagaaaatgctttctgttttgcttttattgagtttgtcaccatcttattatggggtttaaaaagtatacctaaatttgccctgcacagtcttcaaaatggccacatcaattccttgcaaggtccattcttccttctaaggctatgaatgaaaatagtctgtgttttatgatacaataatttaagggccaagctagaagggattaaggatggagaaataaatatattcactttcacatttgatgactctttcccatcctcccctgaagcacagcactccatcctgtagttttttttttttttttaaaggctgtggcctttaaaatcaatgctttatttatttttccctttgttaattaaaccacctttaaaaactaaggctaccataaaaattacctttccctaggacattagacaggtattttcctcctttctaaattctactacacaggatagcagcacccaggggtcttgggatataacacacctacctctgcatacccggcagcaggaatctggaacagagactgggaaggcacaggttaatttggggcaagtcttgagaccacaatacacgtttccctcctgccaaggagaaacagaattaagattagaagcatctaggataagtgtaaaggcttcacttaatacctgaaatagagcagggactcaaaacacggcatgtccttccccccagctctcccatcgtcagttctcggtacttcctacattttattacgcattattttttttctcctacaattcctccatgccagagactaagccacagaaaagttagcaatcctagtcgagcatcatggtctaaggtggtacaaagtagtctgtcagggatgccatgagcctctgaaccatgaattatagtcttgtttctttcttctctgttcatggtacccttggtcccccagctggattgggggtttaaaggaatgaagatttatttcatagcttccatttgtaatattcactagactctcccttccaaaccaaaggaacaagctctctggggtaatacaaaactatacaagatgatctgatggccacagctcagtctagcacaaggcaagggagaggataaaatttacttgctggttacatctgtctttgcaataatcctgatttcctaaatttctatctttcaaatgttattccttaaaccttgttcttagttcttagaagcacattcttttggggctagaatgattcctggaaggccattaagaaagcaaggccacacgaaaattctcctaaactactgagatactatattcttactaaaagtcctaaagggaagagattctatagcttcccttgacaatccagtgcttaatgccacttgcaggcagaaaagttgttactacatctaacttcattccttcctgcttcagtttaaacactcattttactccattttctagttctattgattatattctccggactgcatattagataagatgtaattagtatacgttgtttgtaaagtaaatgcagttcttctgacaagtaatgtcctggtagtcatcatgaccaagcatttatagagagttttctcattgcagggcactaggaattaactggttagtaaaatacttcagatatgggaactaacagacaactcattttcttgttaattggagtgagtggccctagatagtcaaagtgacttttccacccatagcattcccaaagcttcaaataattgtgagtccttcagatggaggctttggtggtataattattatgaaaaggagcgccgatcaacacaaacagctcacctttgcccatttaagcagtcctacagctttaagactgggatatgattgggcctgagcccttcaacagagttgttcagggtgggtgaagatcagggagtttggattgtcaaggaggcttatgatttaatgcaagtcatgttttattcaaacaccttacagtgcaggcacaaatgaaagtacaagtacagaggaagctcttgtatttgagtagggcctagcaggaatgttaagatgtagggtcttaccgaacagctgcactgggtgcattgattgggttgccgattctgaaagagcccttcagctacgaacagctctccatgttggtaagttgtcccattgtactcgcaagacttgctggtcaccttattgttcactgggggtaaggagtcttctagaacagggtggagaaaaaccacactgagtattggcatcattgacaagaatttcataaatcccaacagcagacggggctgtactacatagagggagttttaagacagtccccgctccagtgaccaatgattttgaataatgttaaaacagccagacaagtacagcagctgacattatgatctatccatccatccatccatccatccgtccatccatccatccatccattcttttatttgttgaccatttactgagcacctactatgtgccaggaattgtaatatgtgttagagagggatcagagaacatggacaaggtccctgcctagatggagctaatattcctagatgaataagatattatctttcctgaaaggaaggagtccatgctatctcatttaatcttttcccccagttgcttcagaaggggacccatctattatactgccctggtaactttattccctcccacatttatttatttagagactgagtctcactctgttgcccaggctggagtgcatggtgcgagctctgctcactgcaacctctgcctcctgggttcaagcaattctcgtgcctcagcctcccaagtagctgggactacaggcgcctgccaccacgcctggctattttttttttttaagtagagatggggtttcaccatgttgaccaggctgctctcaaactcctgacctcaattgatccgcctgccccatcttcccaaagtgctgggattacaggcgtgagccatggcgcccggccaccgcctacattttaaatcacttttgtgcttatctgtttgttccagcctctgtggttttgcttttttttaatccctccaccgagactgcccactccctgactcttttccacccattgaggtcctatctgatcttgaaggttcagcttatgccgcctttcctccacgaagcattctctaaataactccagccacaatctggatctctcaaggcatctaatgtctgaagcacacaatatgacatttgaatattattgaaactcatatttgtgaattatagtaacccagcagaccatttacaaagagatttcacatatattattacaatggagcttcataacaaccctgtgaatcaagtagggtaaattcttaccttcattttcatttgagggaaataggattgctgaggttatgtgaattatttgaagtcacaaagctagtgagtggtgaaaaaaggaattgaaaccaacaaaagatacaaccagagcttggaaagtgcctgccataagacagtggaaggagagaaatcaggggagctgtgtgtttcattagggagaggcttagagagttgaaccatcctttcttttccatcagtcaaaactgtaatgaatatgagtctattttgtggtgggtaagttatacctcaatacaactgtttaaaaaaaaacagaatgggccaggcgcggtggctcatgcctgtaatcccagcactttgggaggccgaggcgggcggatcacgaggtcaggagattgagaccatcctggctaacacagtgaaaccccgtctctactaaaaaatacaaaaaattagccaggcatggtggcgagtgcctgcagtcccagctaatcgggaggctgaggcaggagaatggcgtgaactcgggagacagagcttgcagtgagccgtgatcacgccactgcactccagcctgggcgacagagcgagactccatctcaaaaaacaaacaaacagacaaacaaacaaacaagcaaaaagaatgaaattattctcagtatgtagtgaaaatgataaggctaacaataataacatccataataataataataatacacgaatagataccatttatcaagccctagctatgtgccaggcaggaatgagtgcttttacatacataatctcattggctcttactaataatgttctgatgtagacatgattatgcccattttgcagatgaagaaactaaggcttaagagattgacttgcccaaggtgacacaacttgcaagtggcagcactaagatataacttgatgtctgactgattctagaaccttccctcataaccactatcaaaaaaagtgccaatcacttcaaacctataataaggaagggaccatttaattaaaaaccaaaacccaaaccactagaacatgaaggctatgctgtccctaatgttgtggcctaaaatacccagaaaacagacaatgcacttcttttggcttcagcgatttgggtaactaactcaattctatactttgctatataagtcgatctaacatcaatttctgagtaattcactctcagggtgttaactacttattaatgaccctttagaggatataaagaaagttccttacttttgccttataaagacagccttagctcctagaaagagtttaactcatactaattaactctgtctgggctaagaggccctgcccctgcccacaagcgtatacaatcagacagctgcagctggcagacatgagtgaaacccatcagagaaaggacagaagcaggcccatttgccccctgggctctaattattccaaatctcagcattttgtggtgaaggaaatctacagtgacctacaaaataatatttgtcacggctcttatgggagctggcagatgtttggaataccaaacaaacaacaacaacaaaaaagaagtttggaattattttgcctcaaaagaatgtggcttgatttttgaaccgggccttctaccaaggaatcaatggcaaggcaactgcagggtgagattttccagtggaagaatgatcttgagaatcttccttgcaatagtcttctgagtaacctggcactggagtctattattctactcaacaggagatagggagaaagagaaagagaggaagacacagtagaatcaaagaaaaagaaaccaattatggtcatgcttaaggctagttttatgcaataaaattcttaacatctcattcttatttcattcttgcaacacccttaatggtgtgtatctcgggggtggggggcgaattactgaaaatgaggctactagtactccaaaagatttgtcccatgtcacacagctgtttaacaagagagccaactcagaaatatagctttcctgctttcaaatttgtgctcttcacagaatgggtgttaaagcttcagagcaggatcactgagtcacaatcccaactcaatggtactgactccccacaatcttgtacaaggcactttacctctttaagcttcaatatttctaggaatgcgatatggactcaaatctccccttgcatctttagagggccaacacagcatgcttcctaactgcagaaggaagaaaaaccacctcatattttaccttctcctctcccagattttccaaggtggctgggctagtaaacaaatatccttggaacacattcagtgttcctgactgaaaactagcagaaaatcagttcaaagcaaagctggctacagggcccctcagggaatgctacaataggaatgaccaggctgcgtggcttctaacctcccccatctcttctgtttccagtcaaattcccacctagcactaagaggaggactggagaaaaaaccattgtagggtgagcagacaagcactaagtcatgtgaccacagatgtgttgggaaagaggaggtttcttctccccaagtgagggatgatctcatatgtaagcagaactatgatttccgggatgctcagaaaatacccccttatcccaaatgtctcttaccaccttttctcacactgatgcttaaaatgccactattggaagtccattcctctaggttaaatggctaccttttgcaatcagattttgtaatcccaagaattatatgagagggtacacttacaccttgtcactaactaacacctcagtctgaataactgccacaggcctttttttttttgtccttcagagcaactggcaaattttaccaagaagcctgtggttccacttcacttctttttgtacgccttccctcctctcctggtgttacccttcttcccacactctggaaccaagtcctcatgctgactgctctcttccccactctccccaccctataaaatgatcatttccatagtaggacagttcttggatagtcagaaaagcagcttgtatgtcaggagacaaatctgctcccagtgttataaatacaaacctccccagagctttcagagatcagttgctaatctccttgacgccaagccatcttttcttttgccattgctgccattactttggttcctacttttcttctgatggctgagcctgatgctagcatttctttggttctctgtcattctactgatagagtcctagaacatttgcaggctattgggaggtggctggagaagggacatggaaatgaaggtaaagactagaaagaagaggttatagtccctttaattgcccatgacacacagagagacatacacatccaacaaagtaaaactacatcatctaaagggctttaccccaagtctcagaaatatatgggaagagagaatgacaaaaaggccttgaaagaaacccctagaataggatgctgtttctatgtgcgtatctcacagtgatgcaagagaagataactgagcctggtctctggggtctgcaaacattggtctctggggtcccagctgctatgatctgaatatttgtgtgcctctgaaattcatatgttgaaatcgtaacccccaaggtgatggcttttaggagatggggcctttgggaggtgattaagttataagggcaacatcctcatgaatgagattagtgcttttaatagaagaggcctgtgggagcttgttcgccccttctactatataggctcacagggagaaggtatcatcactgaaccagaagccaagccctcaccagagaacaaatctgatggtaccttgatcttggatttccaccttccagaactgtgagaaataaatttctgttgtttataagctactcagtttgtggtgttttgttataccagttcaaacagactaagacaccagctttggcatgtcttggttctgtgatcttaggaaggcttgagtatgccttctactttacgtggctgtgaggttcagcgataattaattttaaaaagcccaaaggtatctggtacataacattcacaataaatggtagatgatcttgctctagaaagaggtcacagagaggaaagcagtaaagttgaagaatatgaaggaattttcccaatttccatagatgataactaactgaaaggcatttgctttgcactgatgtgtatggtaggtgctatggagacatgagtcaaaacactatttctctcttgttttcttattcattcaacaagcacttgtggaggtctttgactatacctggcactaatagatccttgactatacattgacaatacctggcattatgttaccttaaagctacaaagataaataggacattcccctgacttcaagtaaaatcctgctttcattggaggggaaggcacaaaaaggtgttaaatgataatgtatttaaataacacataaaggttcataatggaagagaggtcaaataatcacaaattgccaatgttaagtggggaggagtatcaactgcatcaataaggattcaggttagatactaaaaaagattccttgctgaaagagttattagaaactggaaccacaggccaactaggcatgtagggaaattattttcaaactaggttctgtgctgctttaggattcttcagaggtacttgagggatgtgaaaaaaaaaatcccttccccatttctacttcaacagaatacctcttactttgttagtgaaatgtgtttttattagcttttttaaatttcatttgaagaaagagtttgctgccataagacactgtaaaacactggaatagaatctcttcacatatttgctgtttggggattaaaatcctatttgtccctaatatataaagagcttctataaattgacaagaaacagattcataacccaatggtaaaaatggaaaaaggatataaatagacagttgacagaaatggaactacaagtggcccttagacatgaaaaaatcaacctcattcattagagaaatataaattaaaactgcaatgaaataccatttttcttagcagatttagaaaaatccaaaagtttgaataaaacactctcttggtaagtctgtgaagacttgattaaaacatgatgaagggcaatttagcaatatctgttcatttaaaaatacatatatatttgacccaacaatcctatttttaagaattcattctacagatatacttgcacatgtgtgaaacatataaaaattattcattgcagcattgtttgtaatggctgaatatggaaacaacttctatgtccattgatagaaatctggttaaataaatgatggctcattattataacaaaatattatgtagttctataaaagaataagttctctgtgcactaatacagaaagatatattattaaatgatgaaaacaaggggtaaaatgatgtgcacaatagactaccttttatgtaaatgaaaaaatatttttaaaatatatatatatattcatatttgcttacattttcataaaaatctggaaagatatataaccactaaaagttatgggggggaactacatgttgtagggagaagataagaattgggtgagtgtgggacggggtgaataagatattctattgcattcttttatatgtatacctagatatataatcatatatacatgtacatatacatatgcattcatattcttgaatgatataaatgtattcctcattaaatttgaagactacgtttgaaaaaacttctacttgaaggccgtagactagactaggtgaacattttgggtccattccaaccatagaaaatcaatcctacaaagctggtcatcagaagcccggctgtattcctactagtgggagagatcctagctatgactttgtgttcccagtcttattccaataatgggttctctccaccgacatcattgagcccgtccatctgggcaaagtggaggttgttacattgctttcttaaacaatgttaaagtaattgtgtaaatctgagctggcttttagtccttggcccaaatggaaggaacatagacaaataaggttgctagtgggaaatcacccatggccttctaccagagcactgctgtaatggagggaggagcagctgggagctagctgcatctcagtcaggcaaagtaagagcatacatccaggatgcaacacatcttgcaggatgaatgtatcaaaaacagtgggctgggcacagtggctcacacctctaatcccagcactttgggaggcgacggcagtggatcacctgaggtcaggagtccaagtccagcctagtcaacatggtgaaaccccgtttctacaaaaaattagccaggcgtggtggcgggagcctgttatcccagctactctggaggctgaggcaggagaatcgcttgaacctgggaggtggaagttgcagtgagctgagcttgcgccactgcactccagcctgggcaacaagagcaaatctctatctcaaaacaaaaacaaaaacaaagaagagtgggtgtctgcagcctccccccacctccaaaaagtaacaatgctcatattctgaggctatgtggattcagacgacattttccttgggatgctccctgagatcagaggtactgcttcaaatgggcccatcagttgaatcaatgatgcctacctttagatttctttttttttttcagcacttcaactgccatcacttctttttcccctgggcctcttgatgtgatgacttaactagatctgctttcctcgggtagagtccaacgatttctagattttccccaaactctcctcccccataagaacttaactctcctgtggcccatcacattgaggtcatgctggcaggccttaatactaatcccgttaagtaattcatactgaaatgaaaatggtagataatgttttaaaacagggtccttttctagataattatattgtaacataggcctttgatgttttattcataatgaggctgtagagcaccgggtaaagagtgtgaaactttctagaacttaagacctgaatgagggaacttgctaaaaatgcagcttccaagacctgtcctagggagaggagaagccttacttcagagtgtcccatttggattcaaattaaagctccattgctaattattgcttattagctgagcaaattcttagcatctctgagtctcagtttctccatctataaaattgggatgataatggtacctaccccataggttgttgggatgatcaaacaaggtaagacataatctgttcagcatagtaccaggaacatattaatgcccaataaatgcaattgttgttcttttactactagctataaatgatagggtttctggagggcagaaagcaggctggtagggaaagagatgtggggctacttaacccttacagtggccatcctcttaccacactggcagaccctgcctctgtataaggcttatgctgaactccaaagtagcagtgacatttacttttcaatcagtattatatactgtaaattttagaaattctcaacacctgtaatgtaatgacaaggtttgtttttacccctgtgcagtctttcacagccctgtagaacttctcaaaaactgtcagatcccaagtggtaactagagattcacttctgagccatcacatccactaagaatccttttatgccccagctcctgggcaaacactatctgccccattttcccatctcagtgggaagaccgtcaggtgtgatttagccaagcagttgctttctagccagagccatttaccaagcacatagactctactttggacttattgagcaccccagacaggtggatttacgctcagaagggtcacaaatgtatttgtgattatgagtagtcctaaagggcatggaatagagagaaaaagtgaactccttggccaacactcccattgtattttattttattattattatttttagagttggggtctcactctgttgcccaggctggagtgcagtggtgtgatcatggctcactgcagcctcaaagtcctgggatcaactgatcttcttgcctcagcctcctgaggtgctaggattacaggcttgaactgccatggctcccaccgtattttaaccatcatttccagtgtcctctcctgcaacatgttttccagaattgctaaacaaaagtaattgttgattggtttgactttcatctttgttttaggtcactactgaaggtgcttttcagaaaggatttaatattttttagtttaggaagcctctccatttcccccttcatacatcctttggcctcccacccttcgttgcccagctcttgtcttgccttttcaagaaaacttcacttgattacttctgcacttgatggtctctttgtgggaagggaaagcaatcaatagagcagattgcttctgcgatggtagagcttccaaaggtggcaagttcaccatgtccctaaactctcttcctctccaccctgccagaatgcctgatatgcccccagattcaatcattagttagagaagggccctatctttcccagaggtttaatatcttcacagtgatgaatacacaagactggaactattccccagtaaagagaaaggcgctattggggggaatcctacaatgagataccatttcacatccactaggatggctataataaaaaagacaataataacaagggttagcaagtaggtggagaaattggaacccttatacagtgctggtgagaatgtaaaaaaaaataataatagtacagctgctttggaagataatctagcagtctctcaaaaagttgagcatagagttaccaatataagccaccaattccactcccaggtatatacacaaaaaaattgaaagaaggaactgaaacagatatgtgtatatgaaagtttatagcagcattattcataatagttaaaagatggaaacaatgcaaatgtccatcagtagatgaatggatgaacaaaatatggtatatccataaaatgtaatattattgctataatggatgaaacttgaaaaattctgctaagtgaaaaaaaaggccagtgacaaaacaccacatactgtataattccatttacattaaatgtccaaaataggcaaatccatagagagagaaagaagaacactggatgccaggagctgggggaaggggagaatgggagtgactactagtaggtatgggattcttttagagatgacgaaaatattctggagttagatagtggtgatggatgcaacatcttgtaaatatactaaaaccaactttacaacataaaagggtgaattttacagtatgtaaacctcagtatgaggtatgtatacctcaataaagcgttaccaaaaaaaaaaaataacctccaaacgttatacaatacaaacacaaagactgggtatcagagcggagcgggcctgaaaaaaatgaaggtgttttgtaggtgataggcagttgaagaagagaaaggtaaattaaaaagaaagggagaatcacaaatgggtagagggagtcaatctcaagtcataattttgcctagtgtccccagccgtggtgtatccactttgggagatggagtgggtcagccagacagctcagctaaaggagggggtgatggggggaagattttcctgcttgaaagcttccaggagactctgtgggaccacaccttcaacaagactagtggcctccctacttctacccttggcccaacccccagtgaggtcccaggccaggaaattcttgtagcagattcaacagatcactctgcagctaaacagacagacacaacactctgtcccaaccaagaaggtgccgagtgagaggaaacagtcatctgctgctccagctggcgagaagagagtggaagagggcgctgaaagctcacatcctagtctaatcccagctctccccctcctcatccggaccccatctgcaggctgtttttcatcccacttccgtcagtgtttcagctgctgtcagtcagtagctgaccctgcctgaatatgccgtcttgtcagacagatggctaggaaggatggcttgaggagagagtgtgcaagaaagggccatgtctctgtgaagcaaagagtgcttgcaaatggcatagatttgggggttttttggggggcagggggagggcccatgtattcttagctaagttgtactatttgtttgctgtgtgatggaactgctatcactttgcatctctaggcttcagtttctaaagaactttctgtgtggatatgtgtatgtgtgtgtcagaggtaatcatttcacctgcttctctttcacagggatatattataaagaacaaaaatgattatgtttttcaaaaagattcagggagtaaagaagcaacatacaacaaagtcaactgattatgattatctccctgcttaccaaatgcattctacctgaaggcaaaaagagatgtataattttgtctgctttgatggtccagtgtccagagttactacatcccatagaagttagaaaagtcccttcagcttgtgatgtgctgccttataggtagcaactctagtcttgcagtgtcagtcaactgcttgtgagtaagcacaccccaaagactggagttccatgtacggacccacaccacagcatggcccagccagggtcatgaagttcatgtcaaagatgtatcccctgaggatgtgccacttggctaaagaatgctctacctctgattggccaattctgccctgactcatgctagccccaactgcccccacagactactctttgcttactcatatccagcccccagggcccatcaaacacactctgattttctgcagcaactctcatggtctgcctgtttgcatcctaccatctagcacctaatataaagtgtgccgctttttaagtgatcaataagtgcaaaggagacagggtctatgccttctacttctctatctcctgctggctctagcattagaacacagcatgctggctgggcgcagtggctcatgactgtaatcccagcactttgggaggctgaggtgggtggatcacctgaggtcaggagttcgagaccagcctggccaacatggtgaaaccctgtctctactaaaaatataaaaattagcctggtgtagtggcaggtgcctgtaatcccagctagtcaggaggctaaggcaggatcattggttgagcccaggaggcggaggttgcattgagccgagattgcactgctgcagtgcacagcctgtgctgtagatcgcacagcctgggcaacaagagcaaaactctgtctcaaaaaaaaaaaaaaaaaaaaaaaaaaggaacagagcatggcaagaaggaacaaatattcaaatagtgatacatgctaattttaagagtctggtattaatttcattaacatataaatatgcatatctagaggcaaggtgattcttcatttaagggcagatagctggagagaaataagtatgattttcaaaagtgattcagaagtgagttacagaatcgatttcttctgggaaaagggtctgtgggttcaatcagattctcaggatttcatgacccaaaagaagtaccctctctattgccatacaaagcaggggggctgaggatttcacttcagcagtatgagatctctgcaaacaactctgtccagattctgtggctctaaggttatgcacacttgttttcagctttctgtgtgctgagagtacttacttgtggaagtttctcataatccagtcttcagaggcaacctctatgttctttcctgtcaaaatttcttcttccactttactgaacagctttatcatcagctccattattcagctcatggaccattccaatctcattacataagcctcctagggttctatctccaagaggaaactggaaatggccttctcttttgacaggtggaaatgaggcccagagatgccaaggggacactgctatttagtgccaaagcaaagattcaaatttaggtctcttcattttacctagagcagcaaaacgtgagggctagagaagcccactaaaatccagtctaataattgcggaagataaaacacaaatccctctgttttcagaggctaattcctcaacctcaaatcttcatgtgaacttggattatgtagcccaacaaaaagaatcccttccatggtgaatctgatagatttgtattattcctttgctactgtactatgggttttaaaaacctctaattaccaggaggtgtaatgttaaatcaatgattcttcacgatgcctcattgttaataacaggttatgtggtaatgttgtcactcactgccttcctcttctccctgaataaattaagaatgagttctactattacttggttagttctaatcctttgagaactagatttttttttgaaggtcaatgaccctttgaaatggacaaattagtcattaccctcaagcagcatttacagaaacaatgtgaggcatctggatgagacagtggggagttcagtcaagcattcctttgtattgcctacaccagcatttcccaagtctgctctgcagagcactactagtccacaagatgctctgtgaaaacaaaattctgtgcttaaataaagttgggaaaagatccacattcaacattcagtgtccctttcaatatgttaaaaggatctcacaagtcccatagtaaagaaacctgtttaatgataactcagcattttctctgactttacttatccaccagactctttttttcacctaggtaacaactatgaatgccccagaaacactccttggaaagcactgccctgcaccacatcaaaacctagatattttgaggatctggatattcgccatctcatggacactattatctgctgaatccagaaccgcactcccaacttcagtcacactcaaccttcagctaagacctaacacgttactcctagatggctgatagcatctccagtatcttttctttcattagcaagccctataaatcaagagaaaatgctcccctgtgaaatactgtatagtgctaataaccagaaccacttgcaacaacagcccaatgacatcaggcacctggagacacaaagaagtcaagtccagggggtggtatttttcctgtatatgatgagaagccagggaagttatttaagtagtgaaatgatttgatgagatttacatttttgaaaaactattctgagatgactggaaaagagataatgagctcggggacaggatatgtcaggaggtgactgaaagagcccattgctatcacattaggcataaaggaagaaaagaggcatttggtacttgaagattaattgagaaaagttatcccccaatgcacatattattttgtttggaaaactgttagcagctggcttcagaaagtggtccctggaggccactggcagagggtgcaaggaaagtggtggcacacaaggctccaggctgctggagcagtgggaacgctgttaggaaaatccagtctacctcttcctgacgaccaaggaggcagctcatctgccatgtcatggaactactagaggaaaagacaaagtatcattttgcttctcctaggaaattctttaagaacccagaccaaaattcctgatgtggggagagttatttagttaagactacacaatacacagaaaggaaagggaaggtgttaggaaatctggattctaaagaactccaccattgattgccatgggatggtgacaattccttaggaaagaaaggtgtgaaaagtaaaaatatgtcaaatattaataaaaatttccagtttgaaactgggcttcttttggcagccagatgctcatattaaagtgattagagtgaaaagtgatgataggggtcagagatcaaacaaataaataaggtatattatcatctttggacttaccaaggctggaaaaacaatatgagattcagtcattgcttagaccaataaccctcaaaagaggaacaaggagaccatggtgtctggtgggagtggtttcaaactccacataccacctcatccctgattgagaatcactgcacatgatgaaagatgtcactgataggagtacaatatatgcaaacaatttagaggcaaaaagagtctgaggatcccagttccaataatgacaataaccacaccaataagattaggaactaatatttactggctcatgcttacactgagctggttctgtgctcagggcttcaggttgatattcattagttcttttctccctatgtccaccctctaaggtgattattgctattatctacaattatagatgaggaaacaaaggctaggaagtggccaaccagaagtgatcccagaagtggagctatactacattgttctagagatggattttccattatctgaaactccagctaggataaaatagccacctatttctgacactgtaatggcttttccgaagttatccccactatttcctctggaaaggaaactactctctctcttacacacggacacacagaaggtccaaaaaatataaggtagctaatcaaaaggaagtacttgactagcttacctcatattagccttaaatggctgcagagaatgaaagagagagcagggagactatcactgtgggttgtaccttcttgagaggagaaggagggaatgtttaagaactgcagattacttcactacttactgggccaatggaataatcttggaaagaacaattccttctgcagaacctaaaaatagtgtctagttagccagctcctcttctccagagaccaccaaccctctactcaaagtgtggtatgggaaccagcagcattaataccacctgagagctagttagaaatgcagaatctcacacccacactccagacctactgaaacatcatctgcacttcaggaagattcccagtgattcagattctaagagttcatcttattcagaaccttcaataatgctgtagaaacaagtcagcttctcaaaggttaatgagtattgagaagcctttttactgcccgtactggacaaacatatgtcatatttgttccatatggcctgagtccacaccccagggaggtataaatgcaggcaatcttagaactgagctccctgacatccataacctttgtttccaactcccatctctgcaagaaatgtcaaatacagaacaggattctgggaaagtgagggtatctacccccaattaaaaaaaaatttacaactacagtagttctcaactggggccaacttttccccaggggacatttggcaatgtctggagacatttttggttgtcacgagttgagaagggtactctggcatctagtgggtagaggtcagagaagctgctaaacatcccacaatgcacaggatagacgatatgacaaagaattatctggccccaaagtgtttgcgaagctctggactagaaaaaataatagatacaaatcatctaatccctaaatgtttgaaatatagctagggagaaaaggaacataaaagtgctttctccattctggtgaacagctttagattagacagcaaagatctagctgtccttgaagaggtgatgcactcctttggctcacatcaaacttagagttgagcctttctttcagctgaagttcatctccaaaactacaccatataaaaccaactgctcaggaagtcacgatagacacagaaaaatctttttcacaaatgccagtcttcaaaccgagcctaaataaaacaagaagaagccatgccttatttttttctcctgttctcaacaaacaacatatatcatgaagtaattgaaaatagaaaacacctgaaccgagaagtagctataagaaataccacacctgtaatcccagcactttgggaggctgaggcgggtggatcacaaggtcaagagatcgagaccatcctggctaacacggtgaaaccccatctctcctaaaaatacaaaaaattagctcggcgtggtggcgggcgcctgtagtcccagctacgtgggaggctgaggcaggagaatggcgtgaacccgggaggtggagcttgtagtgagccgacactgcgccactacactccagcctgggtgacagagtgagactccttcaaaaaaaaaaaaaaacaatgaataggattaacataattattctatgtattctatgtgagtgtgttaaaggactctgaatgccctggtagccaggccaaaaatggaacaaagattagttatgtagttccaattttaatggtttccttttactttttaagaatggtttacgcccagtttaggattcagaatgaatttcctaggatcattgctcacgataccattgaatgtcatctatttcacgttcctgccccaggatacatatcccaaacctgtaccaatgagaatgcaagtgctcttacatatctgtccagaggccatgtgaattatgaagtaaaatgtaaggactggcaaaattgcatttatctaaggcctctgcagtcaggactagtcttctgttcaaccaaggccgacagtgctctgtaaggggaaaacatttcaatattgagagtatgttgatgaagacttcagttaagactcagtcagactgaacccttcctacaaaaaatcacccttgctcaagacaagtatgcagcggaatacacaatgttgtgtgctcattaaacccatctccatcctccactcctggcacccagctacactacattccatagtctcgcctgcagttaggtggagccatgtgaatgagttccagtcaattgaatgtgggaagaaatgataaacatgccttagaagactgacctataaaacgtcctgcaaaactctccttgctttcttttccctaaactaaggaccacataccagaggctccagtgatgaactgtgagactctagaggaaagaaagaccactagagtgaaaggggcctgggtccctgaatgactgcatggagcaaaagccctccctctccataggcccctccactcccacattcattgtctttagtcactaagatttggggattgttagagcaatgggcttatcccaactaattattttgtctttgcagatatattccttcttctaaaatcatgggccatatgtttcactttagcccataatactgcattaatatcacctatactttctacctttcacattccatattcctcttccctcttgataactgctctccatagcactaagggaaggcactgcctaaagtcaatatgcttagaacttcctctctgattcaaattctcattaaaagtaaactaaagtgaaatcaaaaccagagttatgggaggtccaatttttctcaggcttgctgcccaatggcaatcaacccttggatccaacggcatgtaagacctggctctgaggcctgacttcatgttcatgctggtctacacagcattttagggaataattactgtcccaatgctttagtccctaagttgtccctcccccatgtatcaatgtcaatgaccagcatgtctgaggaaggccaggtagggttggacaaaagatacaactaggccagataacctaaaggtaggcaaggaatgacatgaagaagaaactgaaaaggagttcttagagtgtgtgattgtcattagggctttccatcaatattcaaattctcctccttccaggcacatggtagtattgcatttccctgtcctgtagaagtcaagtcatggtagtgtgacttgctctggccaatgccagatgagcagaagtaatctgtatcactcctggccaaaagtcttaaacagccagaccacagtgtgttatattcccttcccatagtgctggaactaaattcccgatggtgcggcactgtcagccagagtctgttggtgataatgacaggcaccaacctaagacaaagaggtagtatgagtaagaaataaatctttgttgttttaagtcctgaactttgtaggttgctactgcatcatactttagccaattctgattactatggagtatgtaatatttgatgaggaatgggctttgatattcaaaatgggaaagatgaaaatattcctgcaatttctacctctcttccccaaaagaatggaggataagagtgattttttccccaatgtgatatgcttaagcactctagcagctgaaactaagtctcagctactaatttgacttagcctattgtgtctagaacaggggttataggccagatatgacctgcaacttgtttttgtaaataaagttttattggaacatattcatgcccatttatttacatactgcctatgactgctttcacattacaatgcaagagttgctacagcagagacttcaaggcctgctaatgctagcatatatactatttggccctttacagaaaaaaagaaatgctggcccctagtctagaagaagccaaaggaaaacagatccatggagggtctggaaaagaaatccaatgtgcactgccactccaggtaaagagtacatactcttgatagctatgtaaccaaaagcatacacaaatcaaaagttggtaccagcaggatttctcttagtgcttcaggccctgttagagtcagtagggcaaagggaaccctaatacaaatgacttctaatgagcacatccttaaagttctgttgtttataacccctctcctccaatatcaggatgggtataggatctgaacaaagggtatacacagtatatatcaggattagcaaacctgacagtcctcagaatgactcagtggaaagttgcttaagtgcttgctcaaaatgattcactgcctggagagtccatggcaagtcagattcttaggctaaagtgggaggtacagtttgtccacctccctgaactcagcacagtgcaagcaggcaggccctaagtaaggaagtaggctcttggagggtctgatgagggtctcagcctgctgggtaaggcctctgctgtggccactggctgccctctgggggtgggggtgtatatggtgtggccggaattctaggaatcctgtgctgtcctagcaggcactccaattggcttggtgttctacatgctccaaagactttctccagtgtccttggcatctgatgactacacttgggcttaagatttttagggctgggagggtccctggaagccttctatcttagtaccagatcactccttcatttggtggcaccagcaaaccatctggccattctactgcagataggccacaggctatttacccccttgcctctgcctggcttttgaagggctgcctggaggagctatctgcttggccgaaactcagcctttggtgactgttaacaggttttgcttcaattcagctattgctgtgttaccataggttggctctgggttgagggcaaaggcctggggtggaaaacagagaaaggagaagagagatgaaaggatactttacttggacctacaagttgaattattctttcttttagcaggtgattctgaggttagtttctactgggtattttctcttactttctaaagtaaccagtaagatatggccctagactcctccctgaagcatctttagttctaggttactatgaaaatgtggtgaagggagggcgctatgtctgatggcatccttgtctaccatcaagtctagagaatttagaagacagaggggcccaggtcccaaactgctacagcttttttatcagcctgccaggctgttgcacaggcttctctaatgtatacctgagcacctgcacaggccagggccacatctacagaggccccatctccctgggctgaaacagcataagtaatggttgtctcaaacacactgaggcagaaaaagattttctttaaaaatatagaagataacagacaacagaaagacctcagagaattttcaccccacagacatttgtccagagcctattttgtgccttggcagatgaggagataaatgtagacttgagatccaaattatttccaagtatcaggggctgaatctcagatataaacagtgaagaaagtggagaggaagaaaactcttcctctttcgaaaacttgtctgcaagggagatgtggtagaagcacagtccgggaggcaaggagacctgggttccaggctcaggtaatgttactaatgagtgctgtcacttcaagaaagttacagagtctttcgcagtctccctatttgtcaaatatggggagaggcagctgaaaaaaaatatcttttcaaggtataactttctgtagttgtacaatatatgattcctgccctcaaaaagtttatgatgtagttgcaagacactgaacagagaggaggtacaaaattaaattcactgccgcacagaagtatccagcgaatgggataaagctgtgccatacaccacagtaaccactagtcacatatgtctattcatatttaaaccgattaacattaaatccaatttaaaatgcagcttctcagtctcacaccagtcacatttcaaatgttcaacagccacctatactaatggctgccacattggaaagtgcagatatagaatgtttccatcattgcaaaaagttctattggacagtgctggtatagacaacatgtatcacagatgtccagagaacacagaacttcccttccatgcctcctaggcttgtgctcatgatggctgttcagcctgaccaatgctgactttgggtgggggcttagtgtttggtcagattattgccttgctctgggagctgagcagttccacactttccacattgtctctgctcctttgatttttccccagggcctttgggaaagccatagctatccagtcctgccttaaaaaatttccttttaagcagactcatgaataatctagataatcccagaattcaggcatcttttagagctccctgagctatttgcccatgaggtattgtatgcaaagtctgacaaagatcagtttgattgatcaatgagagtcagcattgtatttggggaagcaagcatggccaggactgaggaggaagtccttacatgctccctgcacagcactattaataacatgaaaaaattatccaatgtaatcccaaagactgatttcaaatcaaaacaaagcaaatacaggaaagcaaaacaaaagaacagcaagacaagcacaagggctccctagggttcctctagcttgtgggatgggtgtgggtgtgagcctgtgagagtgtatgtgaaagtgtgtgtgttccagatgtacatgagagtcacgtgtgtgtgtttgtggggatggtggtgaggcgggtaggcagacttggaggttttcagggttagggctgggcaaacgtgcctctgactcagaggaggaatctcagtttcttttggtggggagaggagaattaaacttttgtcaaacaacctcatgcctgattcctctaaagtggggtaggaaggacagtgtcataacacagagagtgttaatggctgctattttaacaatctaaactcactgccccagggcgccagtagaaactaaacagtcttactgcaaagggtgcatttttaaaaaatcaaataaatagctgcaggcgcactcacattgaacttgtgcccaattcagtgtcaatcaacaagtttccattgaattctggacaagccaactcctcttccaaagagaacacagaaaacattgtaagttcagtttgggggcagctggatgatcttatgtatcctgtccttttagtgatttttttccccctttttgcttcttccttccttctctggctagtacttttgttccctaattcagatcctcccaagttaattcctttctaatgcatctccctggctctggccctagtgctgtggttcttctattttatgttgctatacatgaggacagatcagctgatctgggcctcaagacaggtccacgtcatttgtaaaacaacagctttctacctgccatgtgttccatgagtagagatggagaaagtacccaaatatatacagtgtaatgctatggctccacttgggaacatgtacattctgataagccaacatgctgaaaaattatattatcccagtgatagaatgtgtcctaggcacatatttgaaactagccagacgtagccactaagccttagtgtaaaatcttcatctccatcttggtagtaagcatgttcccccttctccagactgaattctggccctgcattctaaaataataccaacaataccttgcatttattgagggtatactatgggcagggcactatgctaactcctttagataccttaattcagttaatcctcacaacagtcctttgagataggaactatcattgtcccatttctccctctctctcattcacacacacacacacacacacacacacacacacatacataccacacaatgtcacccactccaacatacatgctcacccacacgcttacatacacttacacttacatcaagtgtgtgtaaactgaacaaagctcctctgccctatctccatagtgctcagttcttccaggttctctgcccaaagactctccctttgacatccagaaatctatccttagtgaattcttacagttaagctaagcattgacctttctgctggaaggagtctcatcagctgcctttgtaagtggctgggagagagatgaggatatgagggactgcaagagaggaaaggggatgcaaaaagacatccaagaacactaaagacaaactgcacctcctccctacttttgcagtgggctggctctgcaaaataatgtctacccacaggatgtacaaggtcctttgagactgggcctccatcaatctgacatttccagcctcctccctcctacacagaccatactcaactgcagtcacggatcccacacatgcctctgcacgtgccctccccacctccctcttctacatctggcaaagtgccattcatctgtcagaacccagctcaaatgtccactcccctctgggactgtgcctgattcctggctcttggagagtgcctatcttctcccctctctgcctgcacagcccttgtccacacttctaccagagtactcatcacattacattttaataatcttgttatgcgtgtctcctccactagattgtgaactcgtcgaggcaggaactctgaaacctcagcaccatacatgggctatgtctcaaagcttatactctgtaaatgtttgtgaaattaatatgagtgagtgagtgaattaatgaatgtgtggactcataccaccaacttctggttaggaagagacgcccttcactaggcttctctgactaaggctgctgtccagtatttctcaatagagccaccactggaattttgtgtgggacacttcttccatgcgttgtgttcctacttattgtggaacattttgcatctcttgttgctgcccactaaatgccaatgacatcctcccattactgtgacgaacaaaacagttcccagacatttctaaagccctggagaagttggtgggggcagaaagggtgtgtgtgtgtgctgatcctccctggtttggaagtaacactacagcaatggctcatttccctgatcccagtggtctgagaggccccctgcagtacggacacactgtgctcctgcaagaggcgccagatgacagcctctagcaagaccacggattagcagaaggtaggaaccaaacaggagtaaggcagcctaatcaacacataatggtgaatcttgctctctctttttatgatttaggagggaggaggtatcagttctagccctcccccagaaaaatccccttcaatttctcaaggcagtctagagatttttaccttgtctctgagtgcattctcagcactaccttatgtttctgttaagagctcactcagctttgagaacatcagcattattgtgcggcatactcacacaggcacctctgaaaatctaatcagaaggaaatagaaaggcaaggcagaggtgatgccattaatttaatgccttttgcctgacagtcattaaacctgtcacttgtttcctttagactcccctcatcttttccctgaggctggagacacatggtcaatgcctggttatgaggctgctatcattgggatctagaggaacacgtaccaaaatgctatggtttcaggctttgcccatattgagatatgcccagatgaaatctggggacccaggatttaaataccttcttttcattgctgatcactgccttgattatatatacctccttatacttttcaaagcaatttcccatatcaactttcttgttcactgtcaatgcaaactttaagagaaggcaggaattatcatctcattttacaagctgagaaaataggtacaaagaggttaatcagctctgtgaatgtcccacagtgaactggaaggacagcagagcgaggccccatctctttattggccccccctgccttcctccccccatgataacacaataaaacctcactttgagggaaggcaggcatactccacaggtccaaagcccttcttccttcccaaaggggttcctgaccagcctgacttcctggaagccaaacatgccctctggccctctggtcagtgataaaatcctggagccagatggcttcatccagatgccaatacactgtgcactctacagcttagaaatcaatgcctcaaatgcctacttactaattccaagagcccacttagaggacaaggagcacacctttctctaggttttggtactgctattctttgtgacaaaaagacccaaaaaccaaaaaccaaaaaaaaaaaaatcaaaacaaaacacacacacacacacacacacacacaaaaccaaacatcaagaagaccaaaacaatgcaaacaagtagacaaatataacagtcccccaaattgccatatgcacatacagaatcctatgcttggttgtaatcttgcaaggtcttctggtacttttgcctccaatcagaaccatcaagaacaaatgaaaatgtaatcccactttatattatactgggaaatataacttacatacgtacaacataaatgtagagttgtactgatgctttcaaagcaaacacccatgtgactaccacgtggatcaagaaagagtgcattgccaacaccccagaagcaccaccccccaatggaggtcaactcaccaccatgctgactattgtgataatcatttcttcactttccattgtagttttatcacatttatgcacatccataatcaatatagtttacttttccctattttgaacttgatattaatggaatcatattgtatgcgtttgtgcatttatgtgtgtcttgtgtttactcagcattgagcctgagctattaatataatatattgactgtaaaatgacttcagcttcccttatctatgcctggaactacttttttgtgcctaagttttttatactgaagctcacttctactctttctccccctttggaagtggaaggagaaagctgatcagcctcctctaagacccatttatgtttctgaaacttggtgaaggcccctgtctttctttcaccagtttcagtaattacagttttccttcaacatcacctcataggtttcatactctaatcctttaataatctttctaataaagctatgttgaatggctccagacacaatttccctcagaaagcaatcgcagaagaggcccttttggaaaagtacttctccagataaagagaaacaggggtactgttctattcctatggatttctccaaaagcagatgacaaaacttgccagtaatcagctcctaatagatgacactctctgaagttccctggggaacattaataaggaacacgtctttcaaaacctagcatttcacacaggcagtaatactagttactgcttgtcaggcctgtcattttcaaagacagtgtggtctctggagtcttccagaaaaaatgtgttctgaaaagcaacatttgctagattcctctaagactctttggttgtctcctgacttcacttcctcatttctaccaccagcctcttctcaaatttcttctctctcttccccatttgaaaaagagacacactacatcctggatgaaccttaaagacattatgctaagcaaaaaaagcccatcacaaaaggataaatacggcataatgccattcatatgaggtactgagagtagtcaaattcatagagacaggaagtagaaagtgaggagttagtgtttaatgggtatagagattcagtttggggagatgaaaatgttctggagatggatggtggagatggttgtgcaacagtgtgaatgcacttaatgttactgaactgtacacataaaaatggttaaaatggtaaattttatgttatggatttttagcacaagaaaataatcacaaattaaacaaaaaagagaatgaaaataaaaaggaaggaatgagggaaggaaagaagggaaacaaagaaagaaaacaaggaagaaagcatgccacatttccttgtcctctccttctcaatatccatttctctattaaaataataaaagaatatattatataaaaggtatgatagtgagtgtggactctgatttggccttagatccctgagggcacaatcttgtgaatgtgaagaaatcaaaacaggatgaatttattgaagaaaagaaaaagagcttgtggggacacttacattatcttcatgttccaaaaaataacctcaactcccaagtttgacgtatttctctgtcttctcaattaaactaaaatccaagcagccctcttcctccccctcctgcagacagctttgatttagccctttactgagagatacagtacatatatttcttagcctatctccaattctgggagcataactctagaaaacactttgtaagtagccatacatatatttgctgaaccacttcccagtctctgtgtcttagagtatatgtggcaaagacaaaagacaacacatcaagacatttataaaatagactactttgatggccaaaaatggagtcctgtgaggaggcggattttggaacagatttcaataactgacaccctaagtctgccagttcctaaaatcacttttagggaatagctgatggtataaaattctaaacacaaaaatcagacaaaaatcattctaataaagacaattgcttatcttagtggctgcaaataatctggcaaaccttttgggttacagtcattttaagtccaaaaccctgaagtaaaactctttggctctaggcaacagatagcaaggatatctggttactttgagaacatattggttttaaattaacaacactaaagtgaaaaacttgagagctggcaactcattctagaaaccactgtgtcctctgctacaaataaagaacttatcctaaatactactggtgttctgcaggactttggggtaggtaaagcttgactccttaggcccttccttcaacaggcccctctccctttgtaactcttcaggtgcccagctgagcttagtggcctcgggatcttccccccgcaacacctgtctcctctttctacaatcaaaatctgctttctaaatcctgtgttcagacgaaagtaaaaatgattaataagagttaatttactaccttcaaagattggtgaatttatcaggacaaggcctaaatttaaaagattaagctgtaatgacaatttcaggtgtcaggcaacttggcagggaagtgggggtgggcttgggcaaagctgatccgatggctggacaggtctcagaatcacaggtcacaggaaatcaaggtaataattgcctcttctgcttactcaagaagaaaacaggccctggttcaagggtcagtctggcaactcagatgaaaagcccactacaggacattttgctaatcctttccttaaaataccctagatgtgactcttatttcaaactaagttaaaaacagactaagctgaaaacactgattttatttcaaactatgttgattgcttttccctttgagagtttcatttgtttatcagcagaaattcctgggctaattccgagaaatgccattcatttctcgccaacaacaagtcatgaacaatgggcggggtagagggggaagctccccacggagggtcttgctttctggacatgacagccaaggactctgaatgtggaagatggcagaagaggcagcctttgggtgggagctctgggaaagcagaggggcaggccagatggcacattgtgcacatgttactgcagggttagtcctggggaaatgtcacacaaggaaaatgtgtttccagagtgtctatgtgctccattatcagcgaaacaatgttgtcatgttgcccacagccctctggagatcccactgctgcaagatcttacccagaacggctttctgtgggcagttctcttgacctcctttctcaaaatctcccctgggccctattactgtagtgcagtcctcaatccgactgcatcagaattaactgggatgcttgtgtgaaatgcatgacacccactgcagcctaaatgattcaggatttttggtgtagggtctgggagtctgcattttatcaaatctcccaaggtgatccttaagcatgttaaaatttgagtagtactagtttagggtcttgtgctaaaattgcctactaccctaacaaacttctccaaactaagatactgtatataccaatagcttattgctataacatacattgctcctagaaattgaatggcaaaatacaacacttcttgaagcacataacaaagaaccctaattctgcaaagtgcctccaaaaaatgggtattatggctgaataaatttagacaatgttacatcccatatacctctctggtagattcataatgggtactaatgtatcaaggctctgtcatataaatagacaacaagtatataaaaatgctcaacatcactaatcatcagaaaaatacaaatcaaagccacaatgaggtatcatctcagcccagttagaatggttatgttcaaaaagacaaaatgtaatagattctagtgaggatgtggagaaaagggaactcatatgctgttggtgggaatgtaaatcagtacagctactatggaaaacagtatggaggcttcttaaaaaagctacaaataaaactactatatgatccagcaatcctactactgggtatatatccaaaaaaagggaaatcagtgtattaaagggatagctacatccctatgtttatcgcaggaccacacacaacagcaagatatggaatcaacgtaagtttccatcaacggaagaatggataaagaaaatgtggtatatatacacaatggagtattattcagccataaaaaataaagaaatcctgtcattcacagcaacatgaatgagacttgaaaatactaagttaagcaaaataagtcaggaacagtaagataaacaccgtgtgttctcactcatatgtggaagctaaaaaagttgatctcatagaaacagaaagtagaatagtggttactagaggctgggaagggtaggcacgatcttgtctcactgcaacctccacctcctgggttcaagcgatcctcctgcctcagccttctgagtagctgggactacaggcatgcaccaccacacccagctaatttttttgtattttaaatagagacagagtttcaccatgttgaccaggatggtctcaatctcttgacttcgtgatctgcctgcctcggcctcccaaagtgctgggattacaggcgtgagccagtgcacccagcaaatgctactttcttgaagaaggttttaaccccttgtactgtgtcaagtgtccaaggaccaacagtatgagaaaaatagtggaaataaggcatggaagatggttaaaggggtctaagagaacagtcagtatggacatggagggtctagtgatcaaaagtgaacatctcctttggcagcccctctgtaacctaaaatagtaataataataataaagcaaaatatctgctattcagacaccaacatttcagaatcctcaggcttttggataactctggacccatatatatatatatgtaattattatgtgtaatatatataccaatcttttgcaggcaaaggagtggctcctggttgatcatcttgcacactacagctattgtagtcaccttactagggaaaacaatatgctaattggctgttactgttaaaaaggaattgatctgttttgataaaatccaagagacaaacgaatatagaattcagaagagaatagaagagagaagagagcaatggagatcagatatggatggtggcaaaagcagcaaatcagcagcaaccatgaggatggctggcagtaggtactcaaagaaatgaactaaaagaagatggggcaaccttaaaatttaagagagattcctcaataaattaaaaataaaattaccataagacccagaatttccactcctaggtatatacaaaataattgaaaacatatgccacacaaaaacttgtatataaatgtccgtagcagcgttattcacaatggccaaaaggtggaaacaacccaaatgactaccaacagatgaatggataacgaaagtggtctatgcataataatggaagattattcagccctaaaaagaaatgtcatactgatacatgctacaacatgggtgaaccttgaaaacactatgctaagtgaatgaaactagatgcaaaaggccacaaattgtatgattccacttatgtgaaatgtccagaataggcaaatccatagagaagtagattcatggttaccaggggctaggggaaaaggggaatggagagtgactgtgtaataggtttccttttggggtggtgaaaaatttcagaaactagattagtggtaaatgttcttaccacttgtacaatattgtaaatgttcttaatgccactgaattatacactaaaatgatacattttatgttatgcatcttttaccacaataataaataaataaatctctcttttgaaccttccctagaaaaaaactggaggaaacacaaaaggcctgtctacttgattactgtaactgtggaagtcacagatatagacagacatagtcatagacctagactctagactcctttttaatataaatacatgggatgggagaaaaggggaacacaagggcagataggtcagtgattaaagacaaaaaaaagcagattcagagtaaacaagtgattttcaactcttactctaaacttgtctacagtcaaatgccatgtacccacctcatcttacacagtctgtgctatagtgtggatttgtgtaacacaagtggttcatatgtgagtgctaaataagggaatgaagttggtataaaatagaaattgcattagttcatacatgattacccagcaaattaatattttgcactaccaagtgacagcagctaaaagccaagtacactaactcaactgaaatcaggaagccatttgccctacattcttcctcttgcctcagttgggccacatgctctgtcttgtaagtgcttattacatgattctccgtgatctttgtgcaatttactgttgtctctataacttagcagcttcaatccttccttaaacactgttccttcaagctaatgttaccattttaaaaggtgaagtctagaagtctatatttactgtaatattttattagaaatgtaagatgcctttttaaactgtgttagtatttcattagtatagttgctttgttaatattctggttacaaagttgcctaagttttgagtggttttctctaatgctactttttccttaagccctgtgatttttcagtgtacaattttgtagaatgtgaggattttcagatatgtgcatattgtattgtggcagaaatgcctgtgtttgctagctcactcacaacccaactattgttgaaagagaaatgacacagggcttcccacattctccttatgggaacacatactatagtgcaacactggtaaggtcttttccctaacctaccttgaatatctaagactggggtgtctctcttggcaaaccacactgtcactattcctattaaaaccattcatagtgccaaactttttcacacctagccaaaaggaaacactgtggattaggtctctgttaaccagatcaaatcagttattttggcaattttataagagctctttaataacccaggaatgctggaatacctccaggaaaacccaaatttattaattctgaatagcaaattctcagtggaatgaccattttaaaaagccctcttagataatatcatgatttagactcctgatcactataaaattcttctttttgtgataaaattctctctctgtgcatatatataaaataaaatatatatattatgaaatatatacatacacatattatgaaaataagtcatgttgttttactttcccttccagcattaccacttcattcccccaaaagagaagatagggaatttaattccttcaaatcactaaaatctcttaattatcagggactccacagagtcttgcttagagaccaggatgaatttaatgacgttcatgagtcctatgcagtcttgacttttccattaagaatgttccagcctccatgtagcctctttgggcccagtagagcactgtggtatgtgactaagacttgacctctgccaagacttggacaagtgctgatgaaaaaaaatttatttgctctttgtgggaatcagtatagatttctctctggtatttctggaagagctgcctgcatactctgatttccacggtttagcaggagctgtaggagacaatttcaaatacaggtgggctccttggaaattttaggggtaacgagtttagaaagcaagagccatgggaaatacataaacaaatgaaatgagatggctcctctgtctccttcaatggaaactaagctctaagcatgataggtaggacacttccactgagtctgttaccacctaggcaaaagcttctctaaatcaatactgctataggacagtatgtaaagccagtatctggggtatacagtttgcttatttgtcgtctttttatacggagcttattcatcatcttggctttaaatattttcttcttaaatgaggacattttcatcacagtgccttccattgggttaagatggaaaaccagagcccttttctttgaccaaacatttctgtggccctgaaggcatgagtttcctcatgcctaataatcactggggtggaaggaacacagaggagtcatcacatccattgccctgtctcaaagcaggactgtgccaactctatctcagatgggtgggtacctttttatttctagaaatattaagtaaagagactaaaattatccttagtcatttattctaggatttaacagccacggtgttcaaagttcttccttttgtcaagctccactcctctctgctatgatttaaagctatttactcttgttttatcttcagtagaaagaaagaatagctggttgcattctggttcaatatggcaaagagaacacatgagaaatctccctgttattttcaaaacaaagagagatgaaatgtggaactagaaaaataaataaataaaacgtgaaaactgcaaaattatattcagaaacacaaaaaaactcttcgtggaataaaatatagaaggaaagtacagcaataaatgggagccaaagccatatggtccatcagcagctgggactgaatatggatagtttggatccaaatggctgaggagaaactacagcttgcaagtggcttcccatgtgaagttggggactagggtcacactactcgcatgtaaacaggggctgacatagctctccccactcagtgttccctaaaaaacactgattgtccaagttaggcagttgtagatgaggcagttgtagatcagtccatgatcattatcagagactagtagtgcacaagaaaacagaggtagaaatagaccattcaggcatgaggcagcccaaaccgagtcattaatatatgacctggtttagagcaaagtgaactataaagcctgcaacaaccatcccacaaagaagggctcatgtaagaaaaaacaaaaacaaaaacaaacaaacaaaacaaacccaaaacacccatggataatgagctttgaaagaaaaagtagaaaaccaaggaaaattcagaactaagaaaagctgtcaagaaacccaacaaaggtgacaattcacatctaaaaatatttagatatttgaacaatctgaaatggacttcaaataaacttttaaatactttaaagaagtaaaaaagagaataagattccccaaaacaataacaggttataaattagcatcatgtagatgtctttttaaataacttgaaaacctgaggggaaacaaggttattgaaaataaacaaagaaacaaacaaaacccaacacatggcctaaatagtatgcatggaaagaattcatgaattggagaacagagttgaagtaatatatcattttagggagaatatcaggagggaaaaataaaggagacattaggagacataaaggataaattaaatgagatgcaataatatacaccaaagacaattttgagaatgagaaaaaataagaaggtgaagagataattttcaaaaaaaaaactgactaaaaattgaagagaaatttgactcctttggctgaaaaaatcatgtgctgagcaggctgaagagaataatcaaacttacacatctcattgtgtgcatcaatgaaaagaagaaagttttaaaagctagaagaaaaaaaaaacgaagaacccgcaaaagaactacaaatagcagaattcttaaccacaaacaaataaacaaacataaagccaacaaaccatttagtaatatcttcaaagtgctgaggggagatgaacatgcacctataatttcatacccagccaaattatcattcaagaatggttgtaaaataaatacacttttttgtatataaggactaaggaattttagaactactacccacagaaagagctgttaaaggttatagttaacaagaagaaaaatgaactcatggagaagtgagctgcaagagcaagaaggaaaagaaaaggaatagtttatttctatcctccataccataaaatgagctttttaagtcttaaccataatggtgtttatttctttcaacgctttcacctctggaatttttgagctcagttcttttaacactttatttttctctcaaaataactgctagcttatactttccctttttctcaatacttgcttcctgttaggcagctggggtaggtgcagccatattctattctatgttgttttgccccatgctctgggtctgggtcatgcctcaaccttcttcccagggaagaacaatctttacacagaagtttagataagttcctatgacattagaccacttttggagacttctgaggaataaaaagcttttataaggctgtctgacaggctacctggcaggttaaccaaaaaacaaaaacaaaaaacaaaaaacaaaaaaacaaaaaaaaaaaaaacaaagaagctctccagagtggcaactttatcagaaacattgttcccatttaccagagcgcccccacccccacccataccacattcttgcaatccagtttaggaagaagaagcaaataaacacatacagaaacagtaagcctggcttagggacttattccaaaaaaaacccaacaacttttaggttggtcatatgccaagtcaatctctgacatctcaaagcatatactatcagcaccaacactcagaatttaaaaacctgtgatatggcatgatattctgccatctggaaatgaatcacctgtgttcattagggtgtatttactgatgcaggaaaatatattttataaaggtagtgacaaaaagagtttgggtgtttcttctccattaaaaaaaaattctccactcttggaacatttcagttgactgggttttcattgaaccccattcccagccttattcctaacatttttgcctggatacatttggtttctctcttataagttctggaagttcctcaccacttaaaaagcaccgtctataccttagctggggtagtggttcttcctgtacacccctttgggactgacaataaagctgcggatgttctctaaaggaatttacaaatatacatagttacaccaaaaactgcaagcaattttaaagggttctctgaccctcaaaagcccatccaggaaccctagttcaagaatttctaccctaaagggaaatggaatcaacttacaggatgataaggcttctacttcacaaagcccaagagtgtcaagtagctttttctaggattgccactgggcccacaggcattctctgaatcactccacacgcttttggggtgggaatcgggccccagtcagacatgaacaaagtgtcattgagggagcccctgcctcagacaaataccgtagctgcaaatcgtgaaagtagatgtcctaacagttgtgtgaaaaattctctgcctggctgccccttagaattacacttaacaatgtgtacataataactgcagtctggaggaggtgactattcagcaggcaggcagctttatactgtcataaacctcactgggtcagctcctttgatttatgaatggccccctcataatttagaagctatgctcggatgcaattccagcactaattgtataagacacatgccgccatgctgcaactctcctggtgcctgctgcccatggcaggaagaggctgcttatagcagaaaatctctgggccacaatttccatctccgattgacacccaccttcaaatgattaaaagcccaataaaaatctgttactgggtacccaataacttattagagcctagaatgtaccccatttgggctataaaaagtatttagaggccagtttggactgcctaaaggttcctattgttatctgtctggaagtttcccttctggggaattatggagatgagttgagttgggtgaagagggaaatggagaaccacagctaggaaagaaagagacaaattgctttacctgggcagcgagggcagcacagatgaggaatatgcacaggagaaaggcaatgaacatttggacatctgactcggctgcaaagcacattcccattctgaaaaagagaaggcaatgagaaaaaataaatgtctttcaaaggtcgctgggatcaagccagtttgggaaacagtcatgcagggactcacccaggcagtgaataatgcattcccaagaagctgaatgcattcaacattttctttccttttctcatcaccagcacctctgctgggttggttgatagtttattggcatatttttctaaggctgagatcaccactcctccaattttcaaagcttcccattaattgtgggaggcttcttctggcctggctccatggcatttctaccattccccagctctagctgcatgtcttttccaagaacctactctgatttcataatcacctgtccaataacatgaaagacacaatgagcaatgggtcccctgagctgctacccagccctgggcaaggaggcatccctagcaggtggatcctggattccatataaatctgccttggcccagtgggccaagtgattcttctcatttcctttttagccaaaattcttctgaggacgagctagagtttggaatttagctgattaggtagtatgcctgggtggggcgactgggtccctgcctgatttacaattacaagacccctcgctctgacagctcacaaccatttctagaacaaagacatagtctggaaataaatttttcatttacattttccatccataaatcatttgcagcaagggctacttgtatttgtcaggctgttgtgggggaagaaagtagtgaagaggatatagaaatagaaaatgccttgtgcttgagctgttggcattgggatcattttaacattttgactgcgttgcagacatcaaagcctcagctcccaatggttagctgtccatctccaacgtgtcgaaatgtgtcgcgtcaagaatccgacaaaatcaggccatcccaggcagttaatcaatccccaaatgatctatttaatacatgccctaaccatttaaagaggcgggcttcttttatccaaattggaattgccttatcccaaccttttccttttcttgtgtactttctagaataattttttttggagtgttgcatttggcaacaccacagaagctcctcaggtatcacactcctcagaggcaggtggtataatcttgaattgagatcactgaagcacatcagaaaccacacctcccagctgaggtctaaagtgaatcctcattaatgctatatactgaattctgttctagagctaatagattaataataataacgatgatgatgataaccacaatgataaggacaacaatgatgacaataacagctgttaacatttcttgaatgtttaccaagactaagtattgttttaaatgatttaaatggatttgtaaatttaatccttatcagaaccatatgaaatggtaatatcattatcccatttataaaaagaggaagatgaatgaatatcacagaggtcaggtaacttgtccagtggctcataagtggcagaggcagggctggaaacttggtctgtctttattctagaacctcatagcctcttaatactgcctgatgttacctgataattatgtttccacatgctcaaaattctgacagcccaaaattatgttcaaatggtaaatggatcaggcttgcaagtgattgttcctgctctagctgggcatgagggaagaggtgcagtccttacaaaaggtctcaggtaagaagctggtcttgaaaattctttgtgtaagttcagaattctcaatgcctagtacaaggcctccctttccaattagcctagtgcaccacttctctaccaggggtgatttttgctccccaggcaacttggccatgtctggagacatttttggttattaggattggggttggtgctcttgttgtctaatgggtagaggccagggatactgcttaacatcccacaatgcgcaggacagcccccaaacaaatatctatagtgcaaacaagaaactctagcctaacatataatggcagaggtttgttgagaaagatggaccacagctgtgctcctgggtcaagaccatgggaagaagatggaacaacctgctttatctattgcaaagatggcatttatgccaaccaaaatcctttctaaatgactggacaagagccaaggctaagccaagggagctctaatccttaagaggtacaggccaacgtttcacaaactcagtcttaattacagttattggctgagacaacatagaatccactctcccaatgaaccagtttataatttgtcctaatattctccctaaaggtcagccttaaaataattttcaaaaactactttgtcttacaatctaaacattctattgagcttttgcctccactcccactatcaggctcttctgccttctctaaccatgccctatatcattaggctaagagatcataaatatctgtccatagtaaatattcagagaacccatgaaaatcaagccaaaaagcaagagaggacagaagacagaaaatgtttatttttcttgcaatcgtcttcttactttcttcttttattttatgagatagggtcttgttctgtcaaccatgctggagtgcagtggtataatctcggttcacttcagcctagaagtccccagctcaagtgatcctcccacctcagcctcccaactagctgagacaacaggcatgtgccaccatgcccagctaatttttgtactttttgtagagatggggttttgccatgttacccatgctggtctagaactcccgggctgaagtgatccacatgcctcagcctcacaaagtgctgggattataggcgtgagacagtgcgatcggtctgcttctttactttctttaaggattttatcatccatggtccctggccatttgggcactgaaagcctctcggcatgctgaggagcaaactgggaaatcacatgtcatgagagattgtacctctgagcagatgcagttcacgcagtaaaccaacccataaggttccaggtaaggatgccatctctcacccactctgtacttcttgtcttgaaacatgcaatatgtctctgaatctgtgaagaaggagatggagaatatgcctgttaggaaacatcaaccaagtcacaaaattcaaaagcaatcacaagttccatccattttattatacatcaagagaagtggcatagcaagtatttatagaattcctattaggggattagtgttatacatactttgctcactggatcctcaccacaatgacccataaggtagatattattattagtctcattttatagataaggaaaatcaagagtcatataaccagtaagaagctgagatggaactcaaacccaggtttgtctgacaatgatgtacaaaatctttttaaatttaattttatttttccataagttattggggtacaggtggtatttggttacatgagtaagttctttagtggtgatttgtgagaccctggtgcatccatcaccctagcagtatacactgcaccatatttgttgtcttttatctcttgtccccctcccactcttccccccaagtgcccaaagtccactgtatcattcttatgcctttacatcctcatagcttagctcccacatatcagtgagatcatacgatgttcggtttccatttctgagttacttcacttagaataatagtctccaatctcatctaggtcattgcaaatgctgttaattcattcctttttgtggctgagtagtattcatatatatacacacacacatatatatatacacacatatatataatcaatagaaacatatatatatatatatatatacacacacatactgactctctgtctctgtctctctatctatctatctatttatctatatgtttctttatccactcattgattgatgggcatttgggttggttctacaattatgcaattgtgcattgtgctgctataaacatgcgtgtgcaagtatctttttcgaataatgacttcttttcctctgcatagatacccaacactgggatttctggatcaaatggtagttctacttttaattatttaaggaatctccacactgttttccatagcggatgtactagtttacattccctgcatccacaccaacatctactgttttttcgttttttgattatggtcattcttgaaggagtatggtggtattgcatttgattatggtcattcttgaaggagtaaggtggtattgcattctggttttgatttgcatttccctgatctttagtgatgttgatcattttttcatatgtttgttgggcatttgtatatcttcttttgagaattgtctattcatgtccttggcccactttttgataggatttttttttcttactgatttgttcattgtaaattctggatattagtcctttgtcagatgtatagattgtgaagattttctcccactctgtgggttgtttgtttactctgttgactgttccttttgccatgcaaaagctctttagtttaattaggtcacagctatttatctttgtttttattgcatttgcttttgggtttttggtcatgaaatccttgtctaagccaatgtctgttgcgggaagtcagggaccccgaacagagggactggctggagccgtggcagaggaacataaattgtgaagatttcatggacattaaccagttcccaaacaatactttcataatttcttacacttgtcttactttgatctcttaatcctgttatcttcgtaagctaaggatgtacatcacctcagtgccactatgataattgtgttaactgtacaaattgactgtaaaacatgtgggtttgaacaatatgaaatcagtgcatcttgaaaaagaacagaataacagcaattttagggaacaagggaagacgaccataatgtctgactgcctgtagggtcaggcaaaaagagccatatttttcttcttgcagagagcctataaatggacatgcaagtagggaagatatctctaaattattttcctagcaaggattactctgggaaaggaatgcattcctggggggaggtctataaatggctgctctgggagtgtctgtcttatgtggttgagataaggactgaaatgcaccctggtctcctgcagtaccctcaggcttactagggtggggaaaaaccccgctctgggaaatttgaggtcacactggttctctgctctcgaaccctgttttctgttgtttaagatgtttatcaagacaataagtgcaccgctgaacatagacccttatcagtaattctgcttttgccctttgagttgtgatctttgttggacccttatcaggagtttctgattttgcccttgtcctgtttcctcagaagcatgtgatctttgttctcttttttgtcctttgaagcatgtgatcttgtgacctactccctgttcttgcaccccctccccttttgaaatccttaataaaacttgctggttttgtggctcaggtgggcatcaccatcctaccgatatgtgatttcacccccagcggcccagctgtaaaattcctctctttgtactctttctctttatttcttagccggttgacatttatggaaaatagaaagaacctacgttgaaatattggtggcatgtttccccagtaaatgtctagaagggtttttccaatgttatcttctagagtttttatagtttcaggtcttaggtttaagtccttaatccatcttgagttgatttttgtataaggtgagagacgaggatccagtttcattctcttacatgtggcttgccagttatcccagcactatttgttgaaaaggacccccacatttatgtttttgtttgctttgctgaagatcagttggctgtaagtatttgggtttatttctgggttctctattctgttccattggtctatatgcctatttttataccagtaccatgatcccaaatttataaaacaattactaacagacctaagaaatgaaatagacagcaacacagtaatagtaggggacttcaatattccactgacagcactagacagatcatcaagacacaaagtcaacaaagaaacaatggatttaaactataccttggaacaaatggacttacaagatatatatagaatatttcatccaacaaccacagaatacacattctattcaacagagcatggaactttctgcaaaatagaccatatgataggtcataaaacaagcctcaataaatttaagaaaatcgaaattgtatcaagcactctctcagaccacagtggaataaaactggaaatcaactccaaaaggaaccttcaaaaccacacaaataaatggaaattaaataacctgctcccgaatgagcattgggtgaaaaacaaaatcaagatagaaatttaaaaattcttcaaactgaatgataataatgacagaaccttatcaaaatctctgggataaggctaaggcagtgctaagaggaaagtgcataaccctaaacacctacatcgaaaagtctgaaagagcacaaatagacaatctaaggtcacacctcaaggaactagagaaacaagaacaaaccaaacccaaacccagcagaagaaaggaaataaccaagatcagagtagaactaaatgaaattgaaacaaaaaaaagacacaaaagataagtgaaacaaaaagctggttctttgaaaagataaataaaatcgatagaccattagcaagattaaccaagaaaagagagaaaattcaaataacctcactgagaaacaaaacaggagtatcttcaaatactgaaatacgaaagatcattcaagactactatgaacacctttacacacataaactaggaaacctagaagagatggataaattcctggaaaaatacaaccctcctagcttaaatcaagaagaattagataccctgaacaaaccaataacaagcagagagattgaaatggtaatttaaaaattaccaacaaaaaaaagtccaggaccaggtggattcacagcagaattctgccagacattcaaagaagaattggtaccaatccttttgacactactccataagacagagcaagaaggaaccctccttaattcattctatgaagccagcatcaccctaacaccaaaaccaggaaaggccacaaccaaaaaaggaaactacagaccaatatctttgatgaacatagatgctaaaatcattaacaaaatactatctaactgaatccaacaacctatcaaaaagacaatccaccacgatcaagtaggtttcataccagggatgcaaggatggtttaacatatgtaagtcaataaatgtggtacaccacataaacagaattaaaaacaaaaatcacatgatc

SEQ ID NO: 1099 - DNA, 3018 bp, Homo Sapiens
ctcctcacaggtgtgtctctagtcctcgtggttgcctgccccactccctgccgagacgcctgccagaaaggtcacctatcctgaaccccagcaagcctgaaacagctcagccaagcaccctgcgatggaagctgcagatgcctccaggagcaacgggtcgagcccagaagccagggatgcccggagcccgtcgggccccagtggcagcctggagaatggcaccaaggctgacggcaaggatgccaagaccaccaacgggcacggcggggaggcagctgagggcaagagcctgggcagcgccctgaagccaggggaaggtaggagcgccctgttcgcgggcaatgagtggcggcgacccatcatccagtttgtcgagtccggggacgacaagaactccaactacttcagcatggactctatggaaggcaagaggtcgccgtacgcagggctccagctgggggctgccaagaagccacccgttacctttgccgaaaagggcgacgtgcgcaagtccattttctcggagtcccggaagcccacggtgtccatcatggagcccggggagacccggcggaacagctacccccgggccgacacgggccttttttcacggtccaagtccggctccgaggaggtgctgtgcgactcctgcatcggcaacaagcagaaggcggtcaagtcctgcctggtgtgccaggcctccttctgcgagctgcatctcaagccccacctggagggcgccgccttccgagaccaccagctgctcgagcccatccgggactttgaggcccgcaagtgtcccgtgcatggcaagacgatggagctcttctgccagaccgaccagacctgcatctgctacctttgcatgttccaggagcacaagaatcatagcaccgtgacagtggaggaggccaaggccgagaaggagacggagctgtcactgcaaaaggagcagctgcagctcaagatcattgagattgaggatgaagctgagaagtggcagaaggagaaggaccgcatcaagagcttcaccaccaatgagaaggccatcctggagcagaacttccgggacctggtgcgggacctggagaagcaaaaggaggaagtgagggctgcgctggagcagcgggagcaggatgctgtggaccaagtgaaggtgatcatggatgctctggatgagagagccaaggtgctgcatgaggacaagcagacccgggagcagctgcatagcatcagcgactctgtgttgtttctgcaggaatttggtgcattgatgagcaattactctctccccccacccctgcccacctatcatgtcctgctggagggggagggcctgggacagtcactaggcaacttcaaggacgacctgctcaatgtatgcatgcgccacgttgagaagatgtgcaaggcggacctgagccgtaacttcattgagaggaaccacatggagaacggtggtgaccatcgctatgtgaacaactacacgaacagcttcgggggtgagtggagtgcaccggacaccatgaagagatactccatgtacctgacacccaaaggtggggtccggacatcataccagccctcgtctcctggccgcttcaccaaggagaccacccagaagaatttcaacaatctctatggcaccaaaggtaactacacctcccgggtctgggagtactcctccagcattcagaactctgacaatgacctgcccgtcgtccaaggcagctcctccttctccctgaaaggctatccctccctcatgcggagccaaagccccaaggcccagccccagacttggaaatctggcaagcagactatgctgtctcactaccggccattctacgtcaacaaaggcaacgggattgggtccaacgaagccccatgagctcctggcggaaggaacgaggcgccacacccctgctcttcctcctgaccctgctgctcttgccttctaagctactgtgcttgtctgggtgggagggagcctggtcctgcacctgccctctgcagccctctgccagcctcttgggggcagttccggcctctccgacttccccactggccacactccattcagactcctttcctgccttgtgacctcagatggtcaccatcattcctgtgctcagaggccaacccatcacaggggtgagataggttggggcctgccctaacccgccagcctcctcctctcgggctggatctgggggctagcagtgagtacccgcatggtatcagcctgcctctcccgcccacgccctgctgtctccaggcctatagacgtttctctccaaggccctatcccccaatgttgtcagcagatgcctggacagcacagccacccatctcccattcacatggcccacctcctgcttcccagaggactggccctacgtgctctctctcgtcctacctatcaatgcccagcatggcagaacctgcagtggccaagggctgcagatggaaacctctcagtgtcttgacatcaccctacccaggcggtgggtctccaccacagccactttgagtctgtggtccctggagggtggcttctcctgactggcaggatgaccttagccaagatattcctctgttccctctgctgagataaagaattcccttaacatgatataatccacccatgcaaatagctactggcccagctaccatttaccatttgcctacagaatttcattcagtctacactttggcattctctctggcgatggagtgtggctgggctgaccgcaaaaggtgccttacacactgcccccaccctcagccgttgccccatcagaggctgcctcctccttctgattaccccccatgttgcatatcagggtgctcaaggattggagaggagacaaaaccaggagcagcacagtggggacatctcccgtctcaacagccccaggcctatgggggctctggaaggatgggccagcttgcaggggttggggagggagacatccagcttgggctttcccctttggaataaaccattggtctgtc

SEQ ID NO: 1100 - DNA, 4666 bp, Homo Sapiens
cgagactcagccagaggagtacggattaaggggccgaagaaagaggagtgaggcaggggagcgaggcggacgctccgagcgcatcggactcacctgggccggcggcgagcggcgagtacgagtggactcttgccctccgcagcatgcgccccgcctgctaagtcgccgccgtctcgccctcacctagcaccgccaatcccgcctggatggagtcccctctagggttcccattggctcctgtgagtgcttgggtgttcgggagcctgtttttggcggaggggaaccaacttttgaagttcgcccagaagactgcgttccagccccagttccccggcagcgggacccggcgaagacgcgaccgcggcgcgagtcaccatgggaagcaaaggtgtctaccagtaccactggcaaagccacaatgtcaagcacagtggtgtggacgacatggtgctactgtccaagatcacagagaactccatcgtggagaatctgaagaagagatacatggatgactacatttttacatatataggatctgtattaatctcagtcaaccctttcaagcagatgccatattttggggaaaaggaaattgaaatgtaccaaggagcggcacagtatgaaaacccaccacatatctatgcccttgcagataatatgtacagaaacatgatcattgacagagagaaccagtgcgtcattatcagtggtgaaagtggtgctggaaaaacagtggctgccaaatatatcatgagctacatctccagagtgtctggaggagggaccaaagtccagcacgtgaaggacattatcctgcagtccaacccgctgctggaggccttcgggaacgccaagaccgtccggaacaacaactccagccgatttggaaaatactttgaaatccagttcagtccaggtggggaaccagatggtggaaagatctccaacttccttctggaaaaatctagggtggtgatgaggaacccaggagagcggagttttcacatattttaccagctcatcgagggcgcctctgcagagcagaaacacagccttggcatcaccagcatggactattattactacctgagcctctcgggctcatacaaggttgatgacattgacgacaggcgggagtttcaggaaactctgcacgccatgaatgtgattgggatctttgcagaagagcaaacgctggtgttgcagatagtggcgggtattctccacctgggaaacatcagcttcaaagaagttggcaactacgcggctgtggagagtgaagagtttttagcttttcctgcatatctgctagggataaaccaggaccggttgaaagaaaagctaacaagccggcagatggatagcaagtggggaggcaaatccgaatccatccacgtgaccctcaacgtagagcaggcctgttacacccgggatgcgctcgccaaggccctgcacgcccgggtctttgatttcttggtagattccatcaataaagccatggagaaagaccatgaagaatacaacattggcgtcctagacatctatggctttgaaatattccagaaaaatggctttgaacagttttgtatcaattttgttaatgaaaaactgcagcagatttttattgaactgacattaaaggcagaacaggaagaatatgttcaagagggaataagatggacacccattgagtactttaataataaaatcgtatgtgacctcatagagaacaaagtgaaccctcctggcatcatgagcatcctggatgacgtgtgcgccacgatgcatgcggtgggtgagggggcagatcagacgctgctccagaaacttcagatgcagattgggagtcatgagcacttcaacagttggaaccaaggcttcatcattcatcattatgctgggaaggtatcctatgacatggatggcttttgtgaaaggaaccgggatgtgctttttatggatctcatcgagcttatgcagagcagcgagctgcctttcataaagtctttatttccggaaaatctgcaggctgacaagaaagggcgcccaactactgccggaagcaaaataaagaaacaagccaatgaccttgtgagcaccctgatgaaatgtacgccccactacattcgctgcatcaagccaaacgaaaccaagaagcccagagactgggaggaaagcagggtaaagcatcaagtcgaatatttgggtctgaaagagaacattcgagtgagaagagctggctatgcctatcggcgcatcttccaaaaattcctacagaggtatgccattctgaccaaagccacctggccttcttggcagggagaggagaagcaaggcgtcctgcacctgctgcagtcggtcaacatggacagcgaccagttccagctggggaggagtaaagtgttcatcaaagcccccgagtctctatttcttttagaagagatgagagagagaaagtatgatgggtatgctcgagtgatacagaaatcatggaggaaattcgtggcccggaagaaatacgttcaaatgagagaagaagcctcagacctcttattgaacaagaaggagagaaggagaaacagtattaacaggaactttataggggattatattgggatggaagagcacccagaactccagcagttcgtgggcaagagggagaagattgatttcgcagacacagtcaccaagtatgacaggaggttcaagggtgtaaagcgagacctgctccttaccccaaagtgcttgtacttaatcggacgagaaaaagtcaaacagggcccagacaagggcctggtgaaagaagtcctgaagcggaaaatcgagatagaacggatcttgtctgtgtccctcagtactatgcaggatgacatttttattctccatgagcaagagtatgacagtttgcttgaatctgtcttcaaaactgaattcctaagcctcttagcaaagcgttacgaggagaagacccagaagcaactacctctgaaattcagcaatacgcttgaactgaagttgaaaaaggaaaactggggccctggagtgcagggtgcgggctcccggcaagtgcagttccaccaagggtttggggacctggctgtcctcaagcccagtaacaaagtgctgcaggtcagcatcggacctggactgcccaagaactcccgtcctaccagaaggaacactacccaaaatacaggttattccagtgggactcaaaatgccaactacccagtgagagctgcccctcctcccccaggataccatcagaacggagtcatcagaaaccagtatgtgccatatccccatgctcctggaagccagaggtccattcagaaaagcctgtacacctccatggcccgcccgcccttgcctcggcagcagtctaccagttcagaccgagtgtcacagacgccagagagcctggatttcctcaaggtcccggaccagggagctgcaggggtcaggagacaaacaaccagtcggcctcccccagctgggggcagacccaagccccagcccaagcccaagcctcaggttccacagtgcaaggctttgtatgcctatgacgctcaggacacagacgaactcagctttaatgccaatgacattattgatattatcaaagaagatccttctggctggtggacgggtcgactacgaggcaagccagggctgttccccaacaactatgtgaccaagatctgaggtgcccgtgactctgacacatggggcagaggagctccaggcacagaccaggtgaggggatatttaggtgctccccttacaatccacaatgagcaattgcttctccaaggcctggagctattctggtaccttccccatggaggacactgaaaaggctgggttggggacagggagtatcactccataagtgatcctaaaaggtagcctcttcataggaaccaggaggacaaaaccaccatgcattaagatttatttattgtatttaaacctggtgagaggacaagtgaggtctgctcagaccttgtaggcttctatcaaaacagcaccctgcttgctcaccaggcctagagaatggctgtaggtggcggctgagaagtgcctttagttgaagagcacatttctttcatctctcttgtctatacctgatagacacattcctctctgccaccttccttcagggaggacccgccctctgcagactgggcttagcgtgagcaggcacttcccatgtacgtgccaagggtaagctggcctgctgagcccagggcgacagaggggcactggtttacactttgccgggaccatcagggccgccaagcaggtcaggggctgggggctggtcctgctggctttgatttctctgggtcttcaattagaatgtggctgggcccatattggtttgtgttaaatgctgtacttactacaagaatcttttttcaagcatgtacatttataaaaacaggatcatatactgtatatataaaaatcttgagatggtagaaacatgtatgaatgtactaagtagtattccactgtactcattcataaggtaggttttcttacaaaactcacaccaggtacttaaagatgtgctctgcttttttccaactacggagtgtcactgctttctaggtcagtccctgcagactcttctcaactctttccctataggaaacttact

SEQ ID NO: 1101 - DNA, 811 bp, Homo Sapiens
catccctctggctccagagctcagagccacccacagccgcagccatgctgtgcctcctgctcaccctgggcgtggccctggtctgtggtgtcccggccatggacatcccccagaccaagcaggacctggagctcccaaagttggcagggacctggcactccatggccatggcgaccaacaacatctccctcatggcgacactgaaggcccctctgagggtccacatcacctcactgttgcccacccccgaggacaacctggagatcgttctgcacagatgggagaacaacagctgtgttgagaagaaggtccttggagagaagactgggaatccaaagaagttcaagatcaactatacggtggcgaacgaggccacgctgctcgatactgactacgacaatttcctgtttctctgcctacaggacaccaccacccccatccagagcatgatgtgccagtacctggccagagtcctggtggaggacgatgagatcatgcagggattcatcagggctttcaggcccctgcccaggcacctatggtacttgctggacttgaaacagatggaagagccgtgccgtttctagctcacctccgcctccaggaagaccagactcccacccttccacacctccagagcagtgggacttcctcctgccctttcaaagaataaccacagctcagaagacgatgacgtggtcatctgtgtcgccatccccttcctgctgcacacctgcaccattgccatggggaggctgctccctgggggcagagtctctggcagaggttattaataaacccttggagcatg

SEQ ID NO: 1102 - DNA, 272 bp, Homo Sapiens
  misc_feature (129)..(129): n is a, c, g, or t
  misc_feature (201)..(201): n is a, c, g, or t
cggtcccggtgggccgacttccggcgagcgggcaagcgggaaccaggtggccacccggtgtcggtttcattttcctttggaatttctgctttacagacagaacaatggcagcccgagtacttataattngcagtggaggaagggaacatacgctggcctggaaacttgcacagtctcatcatgtcaaacaagtgttggttnccccaggaaacgcaggcactcctcttctgaaaagatttcaaataccgccatctcaatcagtgaccacactg

SEQ ID NO: 1103 - DNA, 406 bp, Homo Sapiens
  misc_feature (318)..(318): n is a, c, g, or t
  misc_feature (382)..(382): n is a, c, g, or t
ggcaagtgacttatctgaacttttttcttttttataacactggatgataattaaccctcaggattgtgaggatttaataactaagtcctgactcaaattatgttaccaataaatgctacttaaatgtaaagtccttgatttattttttcccctcagtcctgtttagtgttgaaattcttcaaaggagggtgagtctgggcatttacctgctattcaaggagttttcaggaattcaaccccaggccaaaatttttgggcccacatctcttgtcactggctttgctgtggtacttaaaggctccccaggacacacaggantcttctagtccaggggtcaaactttttctggcaagggggcacttacagtctattggcatattcnttggttttttaggtgttccggaca

SEQ ID NO: 1104 - DNA, 254 bp, Homo Sapiens
ttttttttttttttttttttttttttttggtttttgtttttttaattaaaaaaaaaaaatagagacagggtctcaaattttcattaaatttggaaaccaagttaaaatgttgactttggagccagacgaacagataccagttagctaggcatatgttcttccaggggctttggctagttaacattagtcatttgcttcgggaaaattcaagaaccttttcagagccaagtacctggattaccttcccaatcagg

SEQ ID NO: 1105 - DNA, 4935 bp, Homo Sapiens
atacaatagtgctccgcgccgcctcagccgccgccgccgcccaaccgcctgcccagcgctgaggcctgacgggccgggcggacgagggccgagggcgggagctgaggcgcggggggcggccccggcggggggcgggggcgaggaggggattaaggggcaggtgcgagggagggaagagaagaaagcgagcggttaggggggcggttaccactccgaccggactcacccggcacattgccgggccgcggcgtggagccgggcaggagccgcgagccagctgcgcgaaggatgctccaggatgaaacgccataggcctgtcagcagcagtgacagttcagacgaaagtccttccacttcctttacttctggctcaatgtataggatcaagtcaaaaattccaaatgaacacaagaaacctgctgaggtattccggaaggacctcatcagtgccatgaaacttccagattctcaccacattaatcctgatagctattacctctttgctgatacatggaaggaagaatgggaaaagggagtccaggtaccagccagtccagacaccgttccacagccttctctcaggattatagctgagaaggtaaaggacgttctgtttatccgaccccggaagtatattcactgctccagcccagacaccacagagcctggctacatcaacatcatggagttggcagcatctgtttgccgctatgacctagatgacatggacatcttctggcttcaggaactcaatgaagaccttgcagaaatgggttgtgggccagttgatgagaatcttatggaaaagacagtagaagtcctggaacgccattgccatgaaaatatgaaccatgctattgagacagaggaagggctaggcatagagtatgatgaagatgtgatctgtgatgtgtgccggtctccagacagtgaagaagggaatgatatggtgttctgtgataagtgtaacgtctgtgtgcatcaggcctgctatggcatcctcaaggtcccagaaggcagctggctgtgtcgctcctgtgtcctgggcatttatccgcaatgtgtgttatgtccaaagaaaggtggagccctgaagaccaccaagacagggactaaatgggctcatgtcagctgtgccctgtggatcccagaggtcagcattgcttgtcctgagaggatggaaccgatcacgaagatctcccacatcccacccagtcggtgggccttagtctgcaacttgtgcaagttgaagacgggggcttgtattcagtgctctataaaaagctgcatcactgccttccacgtcacctgtgcctttgagcacggcctagagatgaagaccatcctagatgagggagacgaagtgaagttcaagtcatattgcctcaagcatagccaaaacaggcagaaacttggagaagctgagtacccccaccacagggctaaagagcagagccaggccaaaagtgagaaaaccagcctgcgggcacagaagcttcgggagctggaggaggagttctattccttggtacgagtggaagatgtggccgcagagctgggtatgcccacgctagctgtggactttatctataactactggaaactgaagcggaaaagtaacttcaataagccattatttcctccaaaggaggatgaagaaaatgggctggtgcagccaaaagaggaaagcattcacactcgaatgagaatgtttatgcatctacgccaggacctggagagggtccgaaatctgtgctatatgataagcagacgagagaagctgaagctgtcacacaacaaaatacaggaacagatcttcggtttgcaagtccagcttcttaaccaagaaattgatgcagggcttcctttgacaaatgcacttgaaaactcactgttttacccaccaccaagaattaccttgaagttaaaaatgcccaaatcaaccccagaagaccacagaaacagctccacagaaaccgatcagcagccccactctcctgacagcagctcatctgttcacagtataaggaacatgcaggtgcctcaggagtcactagaaatgagaacaaaatcgtatccgagatacccactagagagcaagaataaccgtttgctggccagtctcagccattctaggagtgaagcaaaggagtccagtcctgcttggagaaccccgtcctcggagtgctatcatgggcagtcactgggaaagcctctggtccttcaggctgccctccatggacagtcttccattgggaatgggaaaagtcagcctaactccaagtttgccaaatccaatggcctggagggcagctggtctgggaatgtcacccaaaaagacagctcgagtgagatgttctgtgaccaggagcctgtgttcagcccccacttggtcagtcagggcagctttagaaaatccactgtagaacactttagtaggtcctttaaagagaccaccaataggtgggtgaagaacacagaggacctccagtgctatgtgaagccaaccaagaatatgagccccaaggagcagttctggggtagacaggttctcaggcggtctgcagggagagctccatatcaggaaaatgatggctattgcccagatttggagctgagtgattcagaggcagaaagtgatgggaataaagaaaaagtcagggtaaggaaagatagctcagacagggaaaatcctccccatgactctagacgggattgccatggtaaaagcaagacacatcccctttcccacagttcaatgcaaaggtgattagaaacttccaaggatgacccaacctttgcctttgccccatatattggggaaaacccatacaccaaaaggattttagcatatgttaagaggaattgcagtgaaaaggataacatttttccatagtaaattgtcttgcagtttttgaaaatgtttcaagtctagtttttacaagcacattacagtaattgcaggttgtccagaggttggtttgtcagaggctattgggaacagctgggcccagggtatttgctcagtaaatattttggggcagctttccggttatataacacattgacaagtatatgtattaagagtccttgcattgttaactgatttgcaagagaccatgattatcagacactaaaactacttatcttttgaagctacagcatgtgactccccagagctcctgtctgtaggaagtttctaattccactggtatctataaacccttttcaggggagagaccaggagaccaccatcttagatactgtcaaactcactactgtcttcctttgttctgcacaaggttgagtttctttcacagtatcttaacttactgagtcaatactcctcatgcttatcagtgtccagtgcctgttcctaaacttgcttgttggggacacactcataactatttcacctgactgacaagcataaaaggctaacttgtggatagtgtttacaaaagtacaaaagtactacttccaaggaaaatgctctgattctctgtttaggcatttgtgaaggattccagagcctttcccaaagtgagaccatttctggggtatttgtaccaggtcagggtttttgtgttgttttcaaataagtttgactaaaataagtttggctgacagtttttgtatacctgctttaatgtttataaaatttttattgaggtataattaaaatatagtaaaatgcacagaggttaagtattcttacctgctttaattttgaaacagatttttattgtcaaacagaatttgaaagcatgtgtttaacacatggatataatttagctttgtgtcacctttgaatctgaggcagtttcccaaacaaaaaggctggagccatttttcagaagttgcttataccctgttcccaaactatcagccttgattaatttctagtaggaagagaataattacatttgcggggggggggggtggataaaaacatgtctgcttctcatttaaataagagagaaatgatgccgttttttaaatgtgaagcagactataattctcagctctcttttcttcttagccttaaattaatattctctttcttctagttttggaaagtgtagtgggaatattcagacaaaagaggccattttccatttttaaagcttcttactggtgaaacagcccagttgtagtaggtgccagtcagtcaaggcaggggccctctctccgtcaatatggaaaactcagcagttttcctctcccccagttgtgttcttgtaacgttgttaatgggttcctttgctttttgctttctccttttctgaaaatgtatgtgttttgcctctcttttggctacatcttcaaaatatttcttttgtgcctatgtacatgtgtaaacatgccatagcatgtgtggtaggtgtcctgtattttgtttgggaaaaaaactatcaaaatgaggaagagaatttcccctatttatgcactaggtttctgtgctttttctttgagttctctggagtagatattaatttgataccttcatggtaatgaaattatgatggagctgtgttataaattccttatgtcagaggccagtgcggtagcctttgtcccttcatgcctttcaattctgagtgggaggaaaagcaaacatcaaaacagtgcttcagccaaattccatatgtaatgccattgggagagtattgactaaaatatcattcgtcagggaaatatagttgtaatatttttacaggatattcctaggtaaatgaaggagccttcagttgtaaatttcaattaccccaaaatgtatttgctacattttgttgtttgaagtattacctcttaaccttctttgttaatttttttcattttgtcttatatagtccagttttccaagataagctcagtcctttttcaaatgtcccctttttaccaatactttttcattaaattatgaaaactgct

SEQ ID NO: 1106 - DNA, 451 bp, Homo Sapiens
tttttcatttttggaaatttatttttaaaaaaggtagaagaaaatacctggaaaactattttaaatatatatatatatatctatattttaaaacaatagttaaggtaggcatccaacagcaaactgaagctattgagaaagatcttgcaattattgttgtgggcattttcccccaaaataaaattaatatttgaaaatgctcaatagagggttttttaaagcatagaaatgatatctttcctgttcatgtgtgaagatttttaaatgatgtatgattttttaaaattaattgtatctcgatatgagataccagtatttcttattataagcgtaaaacataactttttgtatggataatatacatactttttaagtactttgacttaaacttaacaagttcaccattttaaaattaaagtacatttataaaaattccattttaaaaactaaa

SEQ ID NO: 1107 - DNA, 712 bp, Homo Sapiens
ctctcggctttcccgcgcgggccgcctctgctgcgcctccgcctcctcctctgctccgccaccggcttcctcctcctgagcagtcagcccgcgcgccggcggctccgttatggcgacccgcagccctgggtcgtgattagtgatgatgaaccaggttatgaccttgatttatttgcatacctaatcattatgctgaggattggaaagggtgtttattcctcatggactaattatggacaggactgaacgtctgctcgagatgtgatgaaggagatgggaggccatcacattgtagccctctgtgtgctcaaggggggctataaattcttgctgacctgctggattacatcaaagcactgaatagaaatagtgatagatccattcctatgactgtagattttatcagactgaagagctattgtaatgaccagtcaacaggggacataaaagtaattggtggagatgatctctcaactttaactggaaagaatgtcttgattgtggaagatataatgtgacactggcaaaacaatgcagacttgtgtttccttggtcaggcagtataatccaaagatggtcaaggtcgcagcttgctggtgaaaaggacccagaagtgttggatataagccagatttgtggattttgaaattccagacaagttgtgtaggatatgccttgatataatgaatacttcagggatttgatcatgttg

SEQ ID NO: 1108 - DNA, 2957 bp, Homo Sapiens
tggagatttccatcatggcggcgtccatttcgggctacaccttcagtgctgtgtgtttccacagcgccaacagcaacgcggaccacgaaggatttttactgggagaggtaagacaagaggaaacgtttagcatcagtgactcacaaatcagcaacacagaatttctgcaagtaattcaaatctataaccatcagccttgttcaaaactttttagtttttatgactacgcaagcaaagtgaatgaggagagtttggacaggattcttaaagatcggagaaagaaagtcattgggtggtacagattccggcgcaatacgcagcagcagatgtcctacagagagcaggttcttcacaagcagctcacccgcatcctcggcgtgcccgacctcgtctttcttctcttcagcttcatctccactgccaacaattccactcacgctttagaatatgtgctcttcagaccaaatagaaggtataatcagaggatatcactcgctattcccaatctaggaaatactagccagcaagagtacaaagtgtcttcagtgccaaatacttctcagagttatgccaaagtgattaaagaacatggtactgacttttttgacaaggatggagtaatgaaagacatcagggcgatttatcaggtttataatgcacttcaggagaaagttcaggcagtgtgtgcagatgttgaaaagagtgagcgagttgttgaatcttgtcaggcagaagtgaacaaattaagaagacaaatcactcagaggaaaaatgaaaaggaacaagaaagaagattgcagcaggcagtgttaagcagacagatgccgtctgaaagcttggacccagcgttcagtcctcggatgccgtcctctgggtttgcagctgaaggcagaagtacacttggagatgcagaggcctcggatcctcctcccccttactctgattttcacccaaacaatcaagaaagtactttgagccactctcgcatggaaaggagtgtctttatgcctcgacctcaagctgtgggctcttccaattatgcttccaccagtgccggactgaagtatcctggaagtggggctgaccttcctcctccccaaagagcagctggagacagtggtgaggattcagacgacagtgattatgaaaatttgattgaccctacagagccttctaatagtgaatactcacattcaaaggattctcgacccatggcacatcccgacgaggaccccaggaacactcagacctcccagatttaactaaacaaaagaaactctccacctagcactgtttttcttcattgcttactgagagggtttttgagaacttaatctggggggagaactgctttctcagataccttaactcccgagaagagagtccttgtgcacagaacttgtgggagcctccatccgctgctctttacctttggatacagtgtgcaagtttcatgacagaatcattaagataatcaaattgtcctaattctggtgcgattcatggatatactggtaaatttaggcaaagtgaaacttatcagcgtagtttctgttctttaaaataaattggaaattagagactaagcacaattagtctataaatgttctataaatcaaaaacttacctcttgcactatcatgccttgaaatttactttttcaaagggaaacaagtttagcagcagccttcaaagaacttctttctatgatgagccaaattcatctttgccagaaaagaaattttgataattccaagaagcctgattagaacaaatcagatataccttctcttgtctgcatgactttgtgagataaaagagagggcttccaacttttttctactagcttgatatgtattatcacttaaaatggttgcctttaaaaaaaaaaagtagagatactaattaccagtaagtaatcatccaaataaatacgtcataaaataaattaattattttttctttgatggattacagtgactactgtgttgcactggcacatttatggtctctgttctggaatcttggaggacacacagcagtggagaacagaaggagtgagttttataatgaacagattccagacacggtaggtttagctgagttcatacagaggagatataactcatttagatcttctgacaaatcctagtgttagttttatctgtggaggaaagacatttaataataaactgtttgggaatcttggtgaataaagattcattttcaagctgaataaccatacttattttattttaagttgccatttggggaataattgcagtatgtgtagagactctcttgggatgcacttatatttttatttaatgactacttgttttctagttttgcccacaacgtctgaaaccactaagacattcaggagcatgttgagcttctggtttggaaacagcaagacccaccatttatgacaaggacagccatgaggttaatacttggagtttaactgccttccctttgaactagttaaaatctgtaagaataaggaagttgttgaaggcttaaaatctgggttctgaaaaagtagtttcagtttataggatacacatttactcactgagctccagttccaatactaaattagacagtatcatatagacggaaaatgaaatgctagaactgccgttctttggatcgccactctatgggggtctgtcttttaactactctcctggttatgttggccttacaccactgccatttgatttaaaacgctgcagacactttatctgcaaatgtgttccagttgttatcagctacctactacgcagcttcagcgccagtgtgaatttatttttttttaagtgccattaccgtctcctctgttcagattttgacattcaggaaaatatttttattttgatgccatactgaaatctacaatgtatatctgacaaagcagttaaatgtgacaataaaaaacttatttaatcatg

SEQ ID NO: 1109 - DNA, 140 bp, Homo Sapiens
  misc_feature (80)..(80): n is a, c, g, or t
  misc_feature (91)..(91): n is a, c, g, or t
  misc_feature (128)..(128): n is a, c, g, or t
aaataacactttataagcctctccctcctcccatctcctggcctccttccatcctcctctgcccagactccgcccctccnagacggtcctnacttcttttttccctagactgcagccagcggagccgnagccggcccgag

SEQ ID NO: 1110 - DNA, 176 bp, Homo Sapiens
  misc_feature (2)..(2): n is a, c, g, or t
gnaggatcccccgcttgggtcttcaactcaaaattagtcccaaaatttgtggcatatgtttagattttaaagttgatatttcccctattgacagaataaactcattaaaagagcaaaaaaaaaaaaaaaaaaagggggaaaaataaattttagggggtttttgggaaaaagggtaa

SEQ ID NO: 1111 - DNA, 490 bp, Homo Sapiens
ttttttttttttttttttttttagcatttctttgaattttattgaaaattgacatggacattagaaaggtatcaggctaaacagtgctggttctgggatgtttctcctggagaatgaaagccccagaggaaatagactggtcacacctttgagcaaaaagaacaaaggagaagaaaggaaaaacacacacagattctggaaaacatgcaaagaggctctctcaagagacactgaacagcagaatggtggtgatggtggtaggggatatatgagaatgagcacactcacatggtattttgatgcaagttaaaccaatgaattcaaggcagatttaccaacatcaaagctctccctccagatcccaggttgagcagaaacctctctcaaaaccctaactggtctcggaaggtggaatggagtaattttgccctcactaagctaaaccccctcccttctctacctaagtgttagatagtggatacattttccc

SEQ ID NO: 1112 - DNA, 190 bp, Homo Sapiens
tgctggcttgctgaatgttggcggaagcggacccccctgtgccgtggaaactggcggtggccgcggccgccgagtcggtctgttcagcctcctgcgttttctcgcttggatcttggcactgagaggcggtggccggcgggatggagaaaagtaggatgaacctgcccaaggggccggacacgctctgctt

SEQ ID NO: 1113 - DNA, 405 bp, Homo Sapiens
gacagactcaacaagagctccagcaaagactttcactgtagcttgacttgacctgagattaactagggaatcttgagaataaataggagctctgaaaattgtttcgtagcagagaacagctctttgcatccggagagtggacaagaaaatgatgccaccagtccccatttctcaacacgtcatgaagggtccttccaagttcctgtcctgtgtgctgtaatgaatgtggtcttcatcaccattttaatcatagctctcattgccttatcagtgggccaatacaattgtccaggccaatacacattctcaatgccatcagacagccatgtttcttcatgctctgaggactgggttggctaccagaggaaatgctactttatttctactgtgaagaggagctggact

SEQ ID NO: 1114 - DNA, 350 bp, Homo Sapiens
  misc_feature (255)..(255): n is a, c, g, or t
  misc_feature (301)..(301): n is a, c, g, or t
  misc_feature (341)..(341): n is a, c, g, or t
atcctgggaaggggagcccattggtctaccctgatttagcacgggacatttctctgagtctctagtgttgttttaaattggcctaggtaagtggtgttcccagcccttttagccccagagcccctttcacaaattcctgagatttaaggcaggcgtggggaacgattctgttggatctaggggccaggccaaaccccatggcagtctgaggcccctccaggcgcctctgggagcaggtggttcctggggggcttngcagcagagtcccccctttttcagaagtaccagcctaccacatctnggtgctcttccctacttcagccattagccactccagctgntttctaaat

SEQ ID NO: 1115 - DNA, 697 bp, Homo Sapiens
taaatattttctgatgttactagctatgggaaattagaactggcacaaccctgacattactaagtggaaatgttaggatttttcggcatcgcatgttagaatctctaaaatttaaacattcctgttaaatgactaaggtttgcttttatcaatatgaattctgaaggccaatatcataccattaactatgaaagcttttaattcctaaaaatagttttagagatattcaagcaatgctctcctaatatccatacgcaagtgtgtttatgacacaaattcactagtctgtttaaaaatgaattctttatattgactggtgttccacatatttcagtaatttctgttatgagaggacttgaaatagcaaattgccacacagttaactggatagaccacgtacgtggtgatcataaccacttggtactacacccagaaactcaaaattgtctttctcctgatgagatatgggtgtccttttgtacgtctaggcctaggtaaccagtggagtgattatattagcaaatgtgtttgtatccagagtcttcctgtcattgtaataaaaaatttatttaaaaaaaaaaataaaaaaaaacgaaggcggccgcaagcttattccctttagtgagggttaattttaccttggcactggccgtcgtttttaaaacgtcgtgactgggaaaaccctggcgttacccaa

SEQ ID NO: 1116 - DNA, 529 bp, Homo Sapiens
  misc_feature (195)..(195): n is a, c, g, or t
ctcccccagccctggctgcctgcctttgcagtttgaatctcagacctgctgtgctagcaatcagcgagacctccgtgggccgtaggaccctccgagccagctccagtcagcccggtcaagcatgacagcaactcaaactcggcaaacttccaagacgtggaggacatgcctgacagatgtgccttggaagagtcntgagagtccaggtgagccaaggcatcattcatggatagcaaaggtctgcccctgcaaggtgtcttaaatggaatctcatcagtaggagctgaatttggacaaattaagaaatccaaaagatgccatttgtttattactgtataaaagcattgttgttattggtcaagttattaggctgtagtggatttgctaatactttagccaacatgtattaaagtgattttaatacatgctgattacaatgcaatacatactgattgaaaatattcatattcatctaattttagaaaatattgcctagatcattctctattctgttctacttttctgttag

SEQ ID NO: 1117 - DNA, 393 bp, Homo Sapiens
tttttttttttttttttaatgggccattgcatacagtttatttcactagattgcaattttatacacagtatgaaggggtttcctgatagcacatatatagtttactttctgtactgctgaagaaccaattgttttttacattgtatcataataccctatcattaaaacattattcagtgaattttttccaactacatataaacggagatttaccacacacattctttaccatggtgcaagaatgcctttataacatatttgaatcacaaaatgtgagtctaaaatacatcactgtaattaaaacactactttaaagttacaatgccccatgttatagtagccagatttgattaatccctgtataaatcacaaagcaatttggtggataatgtc

SEQ ID NO: 1118 - DNA, 3430 bp, Homo Sapiens
agacgtttcccgccggcgggagctgtggctgtgattgagagaggggttagaggcgggtcccagcgctgccgcaccatggcggaccagctttatctggaaaatatagacgagttcgtcacggaccaaaacaagatcgtgacatacaaatggctgagctatacactaggggttcatgttaaccaggccaaacagatgctgtatgattatgttgaaaggaaacgaaaagaaaattcaggagcccaactgcatgttacctacttggtgtctggcagtctcattcagaatggacattcctgccacaaggttgcagtagtgagagaagataaattggaagcagtgaagtccaagctagctgtgactgccagcatccatgtgtacagcatccagaaagccatgctaaaggacagtgggcctctgttcaatactgactatgacatccttaaaagcaacttgcagaactgcagcaaatttagtgctatacaatgtgcagctgccgtccctagagctcctgctgaatcctcttcgtcttccaaaaagtttgagcagtcacatcttcacatgtcaagtgagacacaagccaacaatgagctgaccaccaatggtcatggcccacctgcatccaagcaggtttcccagcagcccaaaggaattatgggaatgtttgcctccaaagctgctgctaaaacccaagaaaccaacaaggaaacgaaaacagaggctaaagaagtaacaaatgcatctgcagcaggcaacaaggcaccagggaaagggaatatgatgagcaacttttttggaaaagctgctatgaataaatttaaagtcaatttggactcagaacaagcagtgaaagaagaaaaaatagtggagcagcctacagtgtctgtcacggaaccaaagctggcaactcctgcaggcctgaaaaaatccagcaaaaaagcagagcctgttaaggtgctgcagaaggaaaaaaaaagggggaagcgagtagcattatctgatgatgagacaaaggaaactgaaaacatgaggaaaaagaggagaagaatcaaacttcctgaatctgatagcagtgaagatgaagtctttccagactctcctggggcttatgaagctgagtcaccatccccacctcctcctccgtctccacctcttgaaccagtgccaaagactgagcctgaacctccttctgtcaagagctcaagtggagaaaacaaaagaaaacgaaaacgcgtactaaaatctaaaacttacctggatggggaaggctgcatagtgactgaaaaagtctacgagagtgaatcctgcacagatagtgaagaggagcttaacatgaagacatcctcagtacacagaccccctgccatgactgtgaaaaaagaacccagagaggaacgaaagggccccaagaaagggactgctgctctgggcaaagccaacagacaggtgtccattactggcttcttccagaggaaataaactgccatctctggtagatcagagacttggagtggtcaagggagaagaccaagaaatgtactcctcacttactatgtaagttcatctagatctccacctcacctgtatcaaaagactgttctttcatcctgtgaggtttatactatttctggtttttaaccaaaaggaaatcatctggaagcaggaggcaaaaagctgttaccttctaatgacatttaaaaagcacagtctttgacctgtccaggagaaggatttactccaaaattatactggaacagttttcagaattctcactgaagccatttagtggctaacccactgtgctccactcaccctatgccctggtccgcatatggcacaggaattattccttcttgttcctctgtattctaagaattcatgtgggtgtttcttatccttacattctgctggatacgtttacccctcttgtcttcctgcagtaccacacttctgtcccctaacctcctgaggctgttctctgtaagtcttttaagttttggttggactaaaggctgaagtgaaaatctccctgtaatcctcttcctccattatgcagtacacggacacctggctacagaccaggacgtggcttgtgttctgttcctttcacaaaagctctctgggaccttcacttgcaattagtggttagggaaaagcctcaggcagaacacaaatagaaatttaatgatgtgttcaactccaccagaaattacctcgagtcagcattgacgatattggaggagctgccgtgctgctgatacggggtgtgctttatgctgctctttgcggtttgttgatcccctcctcccccactctcaatacctagagagtgaaacccgtacaatgagataaagactaaaaagagaaatcccttcctatatacagtgtgctacatttacaaaaaatttctccttaagaaaacagaatattcaaaaacagcacttttccaggaagttagtgaggaagataaggcacacatttatttataaatggatgttgctcctttgtatttttagcttccctatttgcttaaaagtacaggctccctaagagaggatggagagggagagactgaattgttagtaggtctaaacatcaaagaaaacatttttattagttacttatggaaaatcatctattacaatgataaccttcaagtgacttccattatggctggacaggcggtgagctcagtggattgcagtggtgtgctggtgattttgcacagtgagctctgcggaaggggtcaggctcaactgctgatgtgtctcacacgtagcagacaaggggtgtctgactggcttcttttgcctcaagatggtgtatgtcgtaagtgatgcaatcagctgtctgctttttaaggttgggattgtgctgactttgggattaacatgagcttctttagcaaccaagcatgaacttgattaagaccagaagtttgggagatgagtcctggcattatgtctaggactaaagcagtggctttgtatagcaagctgagtaaaggttgacatattccaaaacccttctttttaaaatgaaaaaggatggagagaaggatggaaagcctggacttaaacctttagaaaaaacttctggagagaaatcccttttaaacagttacttttgtcattgcctctggtcatttgtctaaataggaatggaaaattaaaagaaaagcaacaatccaatcttttttctaaaaattatgctggggtctcgactaaaactgaatttgaattggaaaattctggtgttggttggagttccatcttgcaagggataatacaaatcctatgatctctatgcccaatatgctgcctcaactctgagctgtctgcaaggcttagtaagtattgagtggtgttttttttttctttttatacaataccatgttaaccacatgagttaaataaatttgagaagttgtttt

SEQ ID NO: 1119 - DNA, 655 bp, Homo Sapiens
  misc_feature (575)..(575): n is a, c, g, or t
  misc_feature (595)..(595): n is a, c, g, or t
  misc_feature (628)..(628): n is a, c, g, or t
  misc_feature (641)..(641): n is a, c, g, or t
  misc_feature (653)..(653): n is a, c, g, or t
gggtcgaggtcgacggtatcgataagtttttttttttttttttttttttgctatgggatttaatgggaaaaatatgtaaaaactgtcactagtcagctggctctttttcctgtgaaatctatcagtacctttctccatccgttgttctcaatatgaccacagagcctgagtataccaagaaaaccaatattcgcattacaggttgctcctgtccttccagacacctttcctgcctgtgtgactaacctaattttgctagttccataaatacacgattagtttagtaacagccatcacaatgtaccatgtacattcatggtgagagctaaagatcgacacagacttctaggagctttgttcatactgattacttaatccaattgtatagattgaatatttgagtggaaggaatttacactctgtttaaatgatgggattctatcgagatagcactcatgatcatgacctttttggtagtattcttaaacaaaattctacagaggactaaatgttagcgatgatcctccattttcaattttaaccaattctgtcccctttctcaaaaaccctggaancccgtgcaagctttcccaancctggtgggtggggaccggggtacaaatgactnaacttcccctccntccccgtcagtnta

SEQ ID NO: 1120 - DNA, 285 bp, Homo Sapiens
ttagcgtggtcgcggccgaggtactttttttttttttttttttttttttagccaagaacttccagtttttattttttaaacatcatttaacaagaaaaaacattcaaccaaattaaaaagaactaggttggattaatttacaataaaataatcaacttaaaatatcggcccttccatttagggccaaggaggccaatagttcctgtttaaacagcagaattgcacaattatttttacctatatttgatggcacaaaaaaataaaagtcttacaacttccacggac

SEQ ID NO: 1121 - DNA, 399 bp, Homo Sapiens
gctcgacatccaaaagagggatgtaaagttcaggtggtcttcagcacagagcgctacaacccagagtctttacttcaggaaggtgagggacgtttggggaaatgttctgctcgagtgtttttcaagaatcagaaacccagaccaaccatcaatgtaacttgtacacggctcatcgagaaaaagaaaagacaacaagaggattacctgttttacaagcaaatgaagcaactgaaaaaccccttggaaatagtcagcatacctgataatcatggacatattgatccctctctgagactcatctgggatttggctttccttggaagctcttacgtgatgtgggagatgacaacacaggtgtcacactactacttggcacagctcactagtgtgaggcagtgg

SEQ ID NO: 1122 - DNA, 555 bp, Homo Sapiens
ttctttttgggggttttttttttttaacataaataaataaatttattttgagtctgaaatactgaagaacaagcatacagataaatagtacaaagaacaaaaattagaacatgagtaatgacttaagacacaggcatttttctagctattgcatacagacacatttttacacacaaacatattttttaaagacatctctccaacattctcaaaaggcaagagctgtatttgtgacatttgtaataaatgcaacagcttttgaaacatccagtttctttcctaagtcatttgattaaaattcacacaagtgatgattacctattccattttctgaaaatacgacatacagtcatgtttcgatcaacaattgaccacatatgacagagatcctataagattataatggaactgaaaaattcctatcacctagtgatgccacagccattgttacattgtagcacaatgtattatctgttctatgtttagattacacagataccattgtgttacagttgcctacagtattcaatacagtaccatgctgtacaggtctgt

SEQ ID NO: 1123 - DNA, 340 bp, Homo Sapiens
  misc_feature (268)..(268): n is a, c, g, or t
  misc_feature (296)..(296): n is a, c, g, or t
actggatatataatttggaaatcccttccaaaactagtgtacttaaaaattgacactttattcttaactgaaaagccatataaccatgttctatttctaactttacattcatttaatcaaaattatcaatattatggttacaaattaaaccatagtgttttaaatatataaatttacttagaagccttaaaaataaagcaacattaatcattactatttgcaactccgtattttcaaaactaaactaggtctgtgactagttataggnttctctaattcatacctactctgttttngttttggggttttttttttgttattatttagggacctcctggct

SEQ ID NO: 1124 - DNA, 502 bp, Homo Sapiens
atgctttttttttttttttttttctgataatcaaagaccaagtgcttttatcagttatatagtgacacactgcttggatcaagtggaaaatatctcaaaaatacactcataacgaagtatcaaaagccttaaaattttgcatatttggtaacccagcaattcaaagaatttaagaaaacagtcatggatgtacatgggattcagtgaagtgctgtttataactgtgaaaagatgtaaatagtcaaaatatccaatagaagattaaatgaattatgattgagtcatacagcagaataataaaccaataaaaatgatgcagaagactatgcatgacctggaaaagatgttcccaatatattgttaagtgaaaaaagcaggttacaaaatggtatgcacaatatgagcccatttttataaaaatatacatatttagcaaagtaaaaggacaaatgatatttatcaaaatattaacattggttctttcaacatagtaggatgactg

SEQ ID NO: 1125 - DNA, 421 bp, Homo Sapiens
  misc_feature (205)..(205): n is a, c, g, or t
  misc_feature (399)..(399): n is a, c, g, or t
tgtttccacacctactgagtcaggtgtcccctcagctgaagaagtatttggttccagccagccagagagaatatctcctgaaagtggacttgccaaggccatgttaaccattgctatcactgcgactccttctctgactgttgatgaaaaggaggaactccttacaagcactaactttcagcccattgtagaagagatcacaganaccacaaaaggttttctgaagtatatggataatcaatcatttgcaactgaaagtcaggaaggagttggtttggggacattcaccttcatcctatgtgaatactaaggaaatgctaaccaccaatccaaagactgaggaaattttgaaggcaggacacaggaccacagggacaacttcttttcctgggtgctggngtccacagcagggcgtgagcct

SEQ ID NO: 1126 - DNA, 572 bp, Homo Sapiens
  misc_feature (545)..(545): n is a, c, g, or t
gacttcctggggccgccggccggggccgctggctgcactcagcgccggagccgggagctagcggccgccgccatgtccctcctgaccggcatccaagcaagtgaagatgttaaagagatctttgccagagccagaaatggaaagtacagacttctgaaaatatctattgaaaatgagcaacttgtgattggatcatatagtcagccttcagattcctgggataaggattatgattcctttgttttacccctgttggaggacaaacaaccatgctatatattattcaggttagattctcagaatgcccagggatatgaatggatattcaatgcatggtctccagatcattctcatgttcgtcaaaaaatgttgtatgcagcaacaagagcaactctgaagaaggaatttggaggtggccacattaaagatgaagtatttggaacagtaaaggaagatgtatcattacatggatataaaaaatacttgctgtcacaatcttcccctgccccactgactgcagctgaggaagaactacgacagattanaatcaatgaggtacagactgacgtggg

SEQ ID NO: 1127 - DNA, 332 bp, Homo Sapiens
  misc_feature (89)..(89): n is a, c, g, or t
  misc_feature (113)..(113): n is a, c, g, or t
  misc_feature (199)..(199): n is a, c, g, or t
  misc_feature (208)..(208): n is a, c, g, or t
  misc_feature (215)..(215): n is a, c, g, or t
  misc_feature (229)..(229): n is a, c, g, or t
  misc_feature (242)..(242): n is a, c, g, or t
  misc_feature (256)..(256): n is a, c, g, or t
  misc_feature (274)..(274): n is a, c, g, or t
  misc_feature (282)..(282): n is a, c, g, or t
  misc_feature (292)..(292): n is a, c, g, or t
  misc_feature (299)..(299): n is a, c, g, or t
  misc_feature (310)..(310): n is a, c, g, or t
  misc_feature (318)..(318): n is a, c, g, or t
  misc_feature (324)..(324): n is a, c, g, or t
attcggcacaggcaccagcagaccctgctctgcccggggcttctgagccatggcagtgtcccttcactgcatccctctccattgggggngtgtctaaggaccctttccccttnggcatggccagtccaggggtctctttcaagtccctggtgtcgtcttatgagacccgagtggttgggatggctccggggctgccccnaaaaagggntgtgctnttccccttgctctncccgggtagcatnccccatccgagggncatctggggcccccggcncaccgggnctgtggaggncttgggnaagcaggcttncaaccctnaggggnattgacaa

SEQ ID NO: 1128 - DNA, 473 bp, Homo Sapiens
  misc_feature (2)..(2): n is a, c, g, or t
  misc_feature (12)..(12): n is a, c, g, or t
  misc_feature (43)..(43): n is a, c, g, or t
  misc_feature (53)..(53): n is a, c, g, or t
  misc_feature (65)..(65): n is a, c, g, or t
  misc_feature (387)..(387): n is a, c, g, or t
  misc_feature (435)..(435): n is a, c, g, or t
cntgaatgattncactgttggggagaagaaacaagaaaaagtnaactggttgntcacctatgagnacccttacgtgattgttagttaagtttttattcaaagcagctgtaatttagttaataaaataattatgatctatgttgtttgcccaattgagatccagttttttgttgttatttttaatcaattaggggtcaatagtagaatggtacaatttccaagaatgatgcctttcaggtcctagggcctctggcttctagggtaaccagtttaaattggttcagggtgataactacttaggcactgccctggtgattacccagagatatctatgaaaaccagtggcttccatcaaacctttgccaactcaggttcacagcagctttnggcagttatggcagtatggcattagctgagaggtgtctgccacttctnggtcaatggaataataaattaagtacaggcaggaattt

SEQ ID NO: 1129 - DNA, 302 bp, Homo Sapiens
  misc_feature (6)..(6): n is a, c, g, or t
  misc_feature (34)..(34): n is a, c, g, or t
  misc_feature (262)..(262): n is a, c, g, or t
cggtgnctgttgccaggcgcgggcccagtggcgntaggggcgacattgttgccgttgtctttccccccagtcccggggatggagatgtcgggactcagcttttcagagatggagggctgccgtaacctacttggcctactggacaacgacgagatcatggccctatgcgacactgtcaccaaccgcctggtgcagctcaggaccgccaagatgctgttcatgcaatattagcatacagtcaaagtgcagaagaacttctgangcgtagaaaagtccaccgattcagcatgcaaaagaatact

SEQ ID NO: 1130 - DNA, 798 bp, Homo Sapiens
ttctcccattccctccccactgtcctgccgcgccccgtgtcgcctcgcctggcctcgcctggcctcgcctccctcctccgctgggggtctaagcctgcgcagtattgcgaacgcgggcggcgtttcccgcatgcgcagtcactgcccggcccggctttttcagtaggagccccgcgcggtgcgcgctcacgcacgcgcacggcctcgcctgcgcgctcacgaggcctctcgcggcacggcccccgccccgcgccgccccgccccgccccgcctcttccccctcccgcgcgcccgcccgccgcctgccgccgccgccgccgccgccggagctctgtagtatggcatcgaggagaatggagaccaaacctgtgataacctgtctcaaaaccctcctcatcatctactccttcgtcttctgggtaagtgcccacgccgggccggtggccgagtcgctgtccatcggtccgtatgatgatgctctgagaaaagaagtggggaggaaaacccaaaccaaaaatcaaatctgggacccctctttaaggagacaggcgcggggtgctgggtcggggctgcaggatggcagggtgcgggtcggggctgctggaaccctagacctcgctccgcgcaggctgcaaggggctgcggagtgtcggtgactgcaggttgtcgaccttccaaaaaaaaaatgttaatgcattagtttcttttataatctcccgggatagggtcagctcctggggaaagttgcgggtttattcgtctgttttcctcgctgtacacctttctctcccttcccct

SEQ ID NO: 1131 - DNA, 1833 bp, Homo Sapiens
ctgcactgcgaggccgacgcagctggagagaagttaggcaggtcctagggagggcaggctcgagtgctgggcccgcctccccgcgggactgtaggcccgggggctccgcctcgtcgcagcggcagaagtgatgccaccaaaaagaaatgaaaaatacaaacttcctattccatttccagaaggcaaggttctggatgatatggaaggcaatcagtgggtactgggcaagaagattggctctggaggatttggattgatatatttagctttccccacaaataaaccagagaaagatgcaagacatgtagtaaaagtggaatatcaagaaaatggcccgttattttcagaacttaaattttatcagagagttgcaaaaaaagactgtatcaaaaagtggatagaacgcaaacaacttgattatttaggaattcctctgttttatggatctggtctgactgaattcaagggaagaagttacagatttatggtaatggaaagactaggaatagatttacagaagatctcaggccagaatggtacctttaaaaagtcaactgtcctgcaattaggtatccgaatgttggatgtactggaatatatacatgaaaatgaatatgttcatggtgatgtaaaagcagcaaatctacttttgggttacaaaaatccagaccaggtttatcttgcagattatggactttcctacagatattgtcccaatgggaaccacaaacagtatcaggaaaatcctagaaaaggccataatgggacaatagagtttaccagtttggatgcccacaagggagtagccttgtccagacgaagtgacgttgagatcctcggctactgcatgctgcggtggttgtgtgggaaacttccctgggaacagaacctgaaggaccctgtggctgtgcagactgctaaaacaaatctgttggacgagctcccccagtcagtgcttaaatgggctccttctggaagcagttgctgtgaaatagcccaatttttggtatgtgctcatagtttagcatatgatgaaaagccaaactatcaagccctcaagaaaattttgaaccctcatggaatacctttaggaccactggacttttccacaaaaggacagagtataaatgtccatactccaaacagtcaaaaagttgattcacaaaaggctgcaacaaagcaagtcaacaaggcacacaataggttaatcgaaaaaaaagtccacagtgagagaagcgctgagtcctgtgcaacatggaaagtgcagaaagaggagaaactgattggattgatgaacaatgaagcagctcaggaaagcacaaggagaagacagaaatatcaagagtctcaagaacctttgaatgaagtaaacagtttcccacaaaaaatcagctatacacaattcccaaactcattttatgagcctcatcaagattttaccagtccagatatattcaagaagtcaagatctccatcttggtataaatacacttccacagtcagcacggggatcacagacttagaaagttcaactggactttggcctacaatttcccagtttactcttagtgaagagacaaacgcagatgtttattattatcgcatcatcatacctgtccttttgatgttagtatttcttgctttattttttctctgaagatgataccaaaattccttttgataattttttaagtttccagctcttcaccgaaatgttgtattcttatttcagtgtttccttccagacatttttaaggtaattggctttaaaaagagaacatattttaacaaagtttgtggacactctaaaaaataaaattgctttgtactagt

SEQ ID NO: 1132 - DNA, 377 bp, Homo Sapiens
ggcacgaggttggtggaagcccctcatctgccttcattctgaaggcagggcccggcagaggaaggatcagagggtcgcggccggagggtcccggccggtggggccaactcagagggagaggaaagggctagagacacgaagaacgcaaaccatcaaatttagaagaaaaagccctttgactttttccccctctccctccccaatggctgtgtagcaaacatccctggcgataccttggaaaggacgaagttggtctgcagtcgcaatttcgtgggttgagttcacagttgtgagtgcggggctcggagatggagcccgtggtcctctaggtggaaaacgaaaacggtggcttctgggatttcacccgtaacaaccct

SEQ ID NO: 1133 - DNA, 1896 bp, Homo Sapiens
gtattttatataaacagaagagctaagttcctgaagactaagctagatagctgcagctatatgtaaattgtatatttttatgaacttttgaagcacacactcctgtttccctctgtgtagctttgtggggatttcatgtatatatgctgtctgaaagaatccagaggttggagtgccaatagaaaatgaaaacaaatgccttgtactacaggcagcctctgaaggtgaccagataactgtcttcactgtgaccagtcggagtccctgcttgcttgtgaagaaggggcttttgtaccttgttggagatgccacctcagaagttcacactgtgcaggaaaaaggttttattctctcctggcatacattagaatgtcagatgcctgcatccatgtggaccacgatgggcctctaaaaattggtgggcagggggtttgcttatgagttttctctggaaaccgattttactcctggatgtattgaatgccccttgagctttatgagatacgagtccacatggataaaatgttagagagtggagttctacagaggattccaggaagaggccatgtctgtgcagtcctagttccagacaggtgagaagctccaggaactactggctaccttgacaagctgggtaaatagttatcattctgggtaactggttgaaactctgacttttggacaagtaattcctggggttctgtctttggtagcatcaccagggatatttgggtgggacagacagaagacacacagctgcctgttctctcctgcccatcatgtttggcccactagatgaagctgtactcagcaatttagggaatgtaacccttctcagaactggccattttcaggggaagcttgggagagcaatagtatggtgagccccttagagatgagcgcctactccttcttggcgaatgctgccttcagatgcttaccaagtggtcactgcatctagtaagattatatttccagtacacttccttagggcagaaacaccatcctatcaggtttggtcagtcccttcttcatgaagggagtcatggggaattcctgaaaattttcttccttctgcagacagttggatgagtcccttagagaaggcatccagagacataactaaactgaatatcatcccatattgattttaggaattgactctaaaactctgtgcagaatcttgtgttgggattgtatcttgacattcctgttgtgttatttttcttaactggagtgtgtgctgcctttcaggtacaatttttgtgtaataaaagccagtgcattaagtttatatagactactttctatgcaagactgagatatggaatagataggaagagatatgtactgctgggtacatggacagtaagtgtgttttcagatggagtaccagcaccgaaaatgggttgagggaggatgggttgtatgtatgtttctgcccactaattttgagcagccatattatgaattaaatcgtcacagccaagtaataacccaagaatggtatgagtttcatgtgtaatagctcaaatggaataagcatgaatgctggagtggaccattatcctcaaatattctatgtcacttctcatttaaagactcttgttatgaactattagaaactttaggcaaaatcaaaagtatttgcggcaaaataaaggcctattctactcttatttaaagtgaaacactgtatacttgtttctctccaaagcgaaattaagtatttataatttcaattgcctcgataagtttccaagtcactgaaatctgctgaaggttttactgtattgttgcacaactttaagataatttttgtctcaatgtcaacttttttcactgaataaaaatttaactgggtcaagaaaaaaaaaaaaaaaaaaaaaaaaaaaa

SEQ ID NO: 1134 - DNA, 372 bp, Homo Sapiens
  misc_feature (274)..(274): n is a, c, g, or t
  misc_feature (308)..(308): n is a, c, g, or t
  misc_feature (336)..(336): n is a, c, g, or t
  misc_feature (358)..(358): n is a, c, g, or t
  misc_feature (363)..(363): n is a, c, g, or t
atccacacttcaaaacagagccttcttcctcaaccctgcaggctctctgtcagtgaaggactgaacagaagcaaaataccatcagcgcctgtttctccaaatggtccttggaagactcatcccaggcaccatgaagaacacccccaccctgggtttgaatctgaatctctaactaaagtaccccagggccattctcacgtagaagttttgagagcccagacactaagggaaagctgggtagtgcagggaggccaaacgtgaggaattttaactngggccaatggggactttcaatgggcttgaacttngcaaacagctttatagctccttgggggnttgggggtaggtttgggccccnttttnttgggggcc

SEQ ID NO: 1135 - DNA, 513 bp, Homo Sapiens
ggccggctgggcgtgcgctcgctccccgaagccggggctgggccggagccgggcgagggctgggagctgggccgggtccggggacagcgggcgaggggcagctgccggagccgggcagccaggccgctcagggcaggggacagctggcgccggttctgcggtctccggggcccagatgtgaggcggcggcgcccccggcccgagagcgcacgatgggggccccgctcgccgtagcgctgggcgccctccactacctggcacttttcctgcaactcggcggcgccacgcggcccgccggccacgcgccctgggacaaccacgtctccggccacgccctgttcacagagacaccccatgacatgacagcacggacgggcgaggacgtggagatggcctgctccttccgcggcagcggctccccctcctactcgctggagatccagtggtggtatgtacggagccaccgggactggaccgacaagcaggcgtgggcctccgaaccagctaaaagca

SEQ ID NO: 1136 - DNA, 973 bp, Homo Sapiens
aggctaggacgaggccgggttaaatcggccgagggttaacgccggtcgtaactgctccggagggcacgggctccgtaggcaccaactgcaatgacccctccccctgcgggcgctcgcgatggcacagttcgcgttcgagagtgacctgcactcgctgcttcagtctggatgcacccatccccaatgcaccccctgcgcgctggctgcgcaaagccaaggaagccgcaggcccggcccctcacccatgcgggccgccaaccgatcccaccatgctgccggctagggaactccgtggccgaacgtccgtggccaaagtccagttccaatggtttcagaccacttcctagcaaaccttgtgcggtgaccgcgtatatccccgcatcgcagtgctgcccagatggaggtggccaagcttcctcctgagccaaggagaaccatcctgaaaacagccagatcgcccagccagagaagggaatcatcagaaagcctgggctttgaacctgaacggttttgatgtagaggaagccaagatccttcggctcagtgtgaaaagccatcaaaatgcgccagagggttatcagaacaagactgaaagtactctagcagccaaaaggccactcctggctccagccggaagacctgccgttacattccttccctgccagaccgtatcctggatgcgcctgaaatccgacaatgactattacctgaccctctgtggatgggagttcctgggaatgtactggccggtgggcccttggaccacaaggtgttgtacctgtgggaggttgcaagctcttggtgacacttcctgcaagcttttgcaaatgggagcagcctggggaatatatatctctggtggctggatacaagaggccactacttgggttggggcccccagagtgctgaggtgaacattgggatgtgcacgcaaaacggtttcgaatataccgtcctctcccgatggccccag

SEQ ID NO: 1137 - DNA, 301 bp, Homo Sapiens
tggccctggactgggtggtaggaccttgtgttcggggccgccggatcaccagcgccgggggcttcctgcggtgcttctggtgatccccaatgcgtggggtcgcctcacccgcaacgtgctcggcctttgcttgctcgccctggagcgcggctactacccggtcatcttccatcgccgcggccaccacggttgcccactggtcagcccccggtgcagcctttcggggacccgtccgacctcaaggaggcggtcacatacatccgcttccgacacccggcgggcggccttgtttcgcggtgag

SEQ ID NO: 1138 - DNA, 246 bp, Homo Sapiens
  misc_feature (42)..(42): n is a, c, g, or t
  misc_feature (59)..(59): n is a, c, g, or t
  misc_feature (74)..(74): n is a, c, g, or t
  misc_feature (103)..(103): n is a, c, g, or t
  misc_feature (123)..(123): n is a, c, g, or t
  misc_feature (125)..(125): n is a, c, g, or t
  misc_feature (246)..(246): n is a, c, g, or t
agaggattttgttgaagttgcaaagtcctggagcctccaganggctgtcggcgcagtancagcgagcagcagantccgcacgctccggcgaggggcagaatancgcgagggagcgcggggcancncaagctagagccgagcgcggacccagccaggacccacagccctccccagctgcccaggaagagccccagccatggaacaccagctcctgtgctgcgaagtggaaaccatccgccgcgcgtn

SEQ ID NO: 1139 - DNA, 1536 bp, Homo Sapiens
ggggggggggggaccacttggcctgcctccgtcccgccgcgccacttggcctgcctccgtcccgccgcgccacttcgcctgcctccgtcccccgcccgccgcgccatgcctgtggccggctcggagctgccgcgccggcccttgccccccgccgcacaggagcgggacgccgagccgcgtccgccgcacggggagctgcagtacctggggcagatccaacacatcctccgctgcggcgtcaggaaggacgaccgcacgggcaccggcaccctgtcggtattcggcatgcaggcgcgctacagcctgagagatgaattccctctgctgacaaccaaacgtgtgttctggaagggtgttttggaggagttgctgtggtttatcaagggatccacaaatgctaaagagctgtcttccaagggagtgaaaatctgggatgccaatggatcccgagactttttggacagcctgggattctccaccagagaagaaggggacttgggcccagtttatggcttccagtggaggcattttggggcagaatacagagatatggaatcagattattcaggacagggagttgaccaactgcaaagagtgattgacaccatcaaaaccaaccctgacgacagaagaatcatcatgtgcgcttggaatccaagagatcttcctctgatggcgctgcctccatgccatgccctctgccagttctatgtggtgaacagtgagctgtcctgccagctgtaccagagatcgggagacatgggcctcggtgtgcctttcaacatcgccagctacgccctgctcacgtacatgattgcgcacatcacgggcctgaagccaggtgactttatacacactttgggagatgcacatatttacctgaatcacatcgagccactgaaaattcagcttcagcgagaacccagacctttcccaaagctcaggattcttcgaaaagttgagaaaattgatgacttcaaagctgaagactttcagattgaagggtacaatccgcatccaactattaaaatggaaatggctgtttagggtgctttcaaaggagcttgaaggatattgtcagtctttaggggttgggctggatgccgaggtaaaagttctttttgctctaaaagaaaaaggaactaggtcaaaaatctgtccgtgacctatcagttattaatttttaaggatgttgccactggcaaatgtaactgtgccagttctttccataataaaaggctttgagttaactcactgagggtatctgacaatgctgaggttatgaacaaagtgaggagaatgaaatgtatgtgctcttagcaaaaacatgtatgtgcatttcaatcccacgtacttataaagaaggttggtgaatttcacaagctatttttggaatatttttagaatattttaagaatttcacaagctattccctcaaatctgagggagctgagtaacaccatcgatcatgatgtagagtgtggttatgaactttatagttgttttatatgttgctataataaagaagtgttctgc

SEQ ID NO: 1140 - DNA, 370 bp, Homo Sapiens
  misc_feature (31)..(32): n is a, c, g, or t
  misc_feature (215)..(215): n is a, c, g, or t
  misc_feature (304)..(304): n is a, c, g, or t
  misc_feature (323)..(323): n is a, c, g, or t
  misc_feature (362)..(362): n is a, c, g, or t
agccctcaaaaacactcgttttcatggtggnnttggagggagggccagccagggcatccaggaggactccctctcccaggggctggaatttatgtgatgagaactccccactcatgacaaaggagggagctgggagcccctgagatgtcttatcagcttgtttaggtctgggacaaaagggacaagggtataatagggcttgaaagctgtcagtnggcaaacatcaaaaatgggagtcagagctgggcacagtggttcacacttgtgatcccagcactttgaccccattttttacaaaattttnattatttacccccgggatnattggcacttattttttagtccttaggtactttggggangcttaaat

SEQ ID NO: 1141 - DNA, 444 bp, Homo Sapiens
tcccaaatgtactcatacatttatttgctgctggtccacataaattgcttataattagttacatttctcccaaaacaattgaaaacaattcagtaagctttacttaaatgatttggggcttttcatgggcttttgctttgcaaatagcatacttcatttttacaaatgaagaaatagccttaatatataaaactcctcaaacttaggaggggagataaattgggataaaaagcaaggaaagacacaatattttagtttgtaaaattggtttatttacaaattggtattttaaaattgtatttgaaatttttatttttatatatttccctggcaggcattctatattttcttaaatatggaggcaaaggataggaaacctgagtaaatttaagagatttacctgctgctacagtcagtaaaatttaacttttaatccctgagtat

SEQ ID NO: 1142 - DNA, 380 bp, Homo Sapiens
gagtcccagtggcggaggctacgaaacttgggggagtgcacagaagaacttcgggagcgcacgcgggaccagggaccaggcctccattcggggcgccagtccgggcaggggcagcgggagccgttcttatatgccctgtatccaagcccaatatgggacaccagcaccgagtccgggaccccgtgaccacctggcaagcgaccccctgacccctgagttcatcaagcccaccatggacctggccagccccgaggcagcccccgctgcccccactgccctgcccagcttcagcaccttcatggacggctacacaggagagtttgacaccttcctctaccagctgccaggaacagtccagccatgctcctcagcctcctcct

SEQ ID NO: 1143 - DNA, 381 bp, Homo Sapiens
ttttttttttttttttttttttttttttttacagatgcaaaaataatgtattgtaaatgtttttaaatcattctccattaaaatttttcattattttctacaaaatacaaatacactaaggttcacatttaacatgcaaaaaataaaggggaagaagagaaatccactagtttcactagtttaaggaacaatcactaaaatgagacaatgatctatagtacatgtatcttctagttaaataggaaagcaaattcacattatccagagtcctgggtcataaagaactcaagtcaaatctagtctgaggcagacactctggctcgtgccgcacacagctgcccttcacactgactttaacccagggctcatttaactgagagg

SEQ ID NO: 1144 - DNA, 550 bp, Homo Sapiens
  misc_feature (525)..(525): n is a, c, g, or t
cttttgccccatgtccctaggactggcccacaattcagactggttaccaagtacctagtgtataaaatagtaccctttactctccctgtgagctgccttgcctgatctcggccacatctgaagaatcaacatacatataacctttaggttggcttacatttgccgtcatttaacccccaggtccctcaccccaagcttgtgagctgggtggggtccatactacaagcaaatattatctaaataaacagaacttggccaggctcagtggctcatgcctgtaagtaatcccaacactttgggaggctgaggcaggaggatcacttgaggccaggagttcaaggctagcctgggcaacatagtgagatcctatctctaccccccccaaaaaaaaaaaaaaaatgagcggccgcaagcttattccctttagtgagggttaattttagcttggcactggccgtcgttttacaacgtcgtgactgggaaaaccctggcgttacccaacttaatcgccttgcagcacatccncctttcgccagctggcgtaatagcg

SEQ ID NO: 1145 - DNA, 2827 bp, Homo Sapiens
tggcgatgctactgtttaattgcaggaggtgggggtgtgtgtaccatgtaccagggctattagaagcaagaaggaaggagggagggcagagcgccctgctgagcaacaaaggactcctgcagccttctctgtctgtctcttggcacaggcacatggggaggcctcccgcaggtggggggccaccagtccaggggtgggagcactacagggcacgagttggtttgggagctgccagtctcctgggaggatcgcagtcagcagagcagggctgaggcctgggggtaggagcagagcctgcgcatctggaggcagcatgtccaagaaagggagtggaggtgcagcgaaggacccaggggcagagcccacgctggggatggaccccttcgaggacacactgcggcggctgcgtgaggccttcaactgagggcgcacgcggccggccgagttccgggctgcgcagctccagggcctgggccacttccttcaagaaaacaagcagcttctgcgcgacgtgctggcccaggacctgcataagccagctttcgaggcagacatatctgagctcatcctttgccagaacgaggttgactacgctctcaagaaccttcaggcctggatgaaggatgaaccacggtccacgaacctgttcatgaagctggactcggtcttcatctggaaggaaccctttggcctggtcctcatcatcgcaccctggaactacccattgaacctgaccctggtgctcctggtgggcaccctccccgcagggaattgcgtggtgctgaagccgtcagaaatcagccagggcacagagaaggtcctggctgaggtgctgccccagtacctggaccagagctgctttgccgtggtgctgggcggaccccaggagacagggcagctgctagagcacaagttggactacatcttcttcacagggagccctcgtgtgggcaagattgtcatgactgctgccaccaagcacctgacgcctgtcaccctggagctggggggcaagaacccctgctacgtggacgacaactgcgacccccagaccgtggccaaccgcgtggcctggttctgctacttcaatgccggccagacctgcgtggcccctgactacgtcctgtgcagccccgagatgcaggagaggctgctgcccgccctgcagagcaccatcacccgtttctatggcgacgacccccagagctccccaaacctgggccgcatcatcaaccagaaacagttccagcggctgcgggcattgctgggctgcggccgcgtggccattgggggccagagcaacgagagcgatcgctacatcgcccccacggtgctggtggacgtgcaggagacggagcctgtgatgcaggaggagatcttcgggcccatcctgcccatcgtgaacgtgcagagcgtggacgaggccatcaagttcatcaaccggcaggagaagcccctggccctgtacgccttctccaacagcagacaggttgtgaaccagatgctggagcggaccagcagcggcagctttggaggcaatgagggcttcacctacatatctctgctgtccgtgccattcgggggagtcggccacagtgggatgggccggtaccacggcaagttcaccttcgacaccttctcccaccaccgcacctgcctgctcgccccctccggcctggagaaattaaaggagatccgctacccaccctataccgactggaaccagcagctgttacgctggggcatgggctcccagagctgcaccctcctgtgagcgtcccacccgcctccaacgggtcacacagagaaacctgagtctagccatgaggggcttatgctcccaactcacattgttcctccagaccgcaggctcccccagcctcaggttgctggagctgtcacatgactgcatcctgcctgccagggctgcaaagcaaggtcttgcttctatctgggggacgctgctcgagagaggccgagaggccgcagaacatgccaggtgtcctcactcaccccaccctccccaattccagccctttgccctctcggtcagggttggccaggcccagtcacaggggcagtgtcaccctggaaaatacagtgccctgccttcttaggggcatcagccctgaacggttgagagcgtggagccctccaggcctttgctctcccctctaggcacacgcgcacttccacctctgccccatcccaactgcaccagcactgcctcccccagggatcctctcacatcccacactggtctctgcaccacccctctggttcacaccgcaccctgcactcacccacagcagctccatccactgggaaaactggggtttgcatcactccactgcacagtgttagtgggacctgggggcaagtcccttgacttctctgagcctcagtttccttatgtgaaagttgctggaaccaaaatggagtcacttatgccaaactctaataaaatggagtcgggggggcacatagaagccctcacacacacatgcccgtaacaggatttatcaccaagacacgcctgcatgtaagaccagacacagggcgtatggaaaagcacgtcctcaaagactgtagtattccagatgagctgcagatgcttacctaccacggccgtctccaccagaaaaccatcgccaactcctgcgatcagcttgtgacttacaaaccttgtttaaaagctgcttacatggacttctgtcctttaaaacgttccccttggctgtggccctctgtgtatgcctgggatccttccaagcactcatagcccagataggaatcctctgctcctcccaaataaattcatctgttc

SEQ ID NO: 1146 - DNA, 1970 bp, Homo Sapiens
atattggagcagcaagaggctgggaagccatcacttaccttgcactgagaaagaagacaaaggccagtatgcacagctttcctccactgctgctgctgctgttctggggtgtggtgtctcacagcttcccagcgactctagaaacacaagagcaagatgtggacttagtccagaaatacctggaaaaatactacaacctgaagaatgatgggaggcaagttgaaaagcggagaaatagtggcccagtggttgaaaaattgaagcaaatgcaggaattctttgggctgaaagtgactgggaaaccagatgctgaaaccctgaaggtgatgaagcagcccagatgtggagtgcctgatgtggctcagtttgtcctcactgagggaaaccctcgctgggagcaaacacatctgaggtacaggattgaaaattacacgccagatttgccaagagcagatgtggaccatgccattgagaaagccttccaactctggagtaatgtcacacctctgacattcaccaaggtctctgagggtcaagcagacatcatgatatcttttgtcaggggagatcatcgggacaactctccttttgatggacctggaggaaatcttgctcatgcttttcaaccaggcccaggtattggaggggatgctcattttgatgaagatgaaaggtggaccaacaatttcagagagtacaacttacatcgtgttgcggctcatgaactcggccattctcttggactctcccattctactgatatcggggctttgatgtaccctagctacaccttcagtggtgatgttcagctagctcaggatgacattgatggcatccaagccatatatggacgttcccaaaatcctgtccagcccatcggcccacaaaccccaaaagcgtgtgacagtaagctaacctttgatgctataactacgattcggggagaagtgatgttctttaaagacagattctacatgcgcacaaatcccttctacccggaagttgagctcaatttcatttctgttttctggccacaactgccaaatgggcttgaagctgcttacgaatttgccgacagagatgaagtccggtttttcaaagggaataagtactgggctgttcagggacagaatgtgctacacggataccccaaggacatctacagctcctttggcttccctagaactgtgaagcatatcgatgctgctctttctgaggaaaacactggaaaaacctacttctttgttgctaacaaatactggaggtatgatgaatataaacgatctatggatccaagttatcccaaaatgatagcacatgactttcctggaattggccacaaagttgatgcagttttcatgaaagatggatttttctatttctttcatggaacaagacaatacaaatttgatcctaaaacgaagagaattttgactctccagaaagctaatagctggttcaactgcaggaaaaattgaacattactaatttgaatggaaaacacatggtgtgagtccaaagaaggtgttttcctgaagaactgtctattttctcagtcatttttaacctctagagtcactgatacacagaatataatcttatttatacctcagtttgcatatttttttactatttagaatgtagccctttttgtactgatataatttagttccacaaatggtgggtacaaaaagtcaagtttgtggcttatggattcatataggccagagttgcaaagatcttttccagagtatgcaactctgacgttgatcccagagagcagcttcagtgacaaacatatcctttcaagacagaaagagacaggagacatgagtctttgccggaggaaaagcagctcaagaacacatgtgcagtcactggtgtcaccctagataggcaagggataactcttctaacacaaaataagtgttttatgtttggaataaagtcaaccttgtttctactgtttt

SEQ ID NO: 1147 - DNA, 2353 bp, Homo Sapiens
actaactctacctttctggcttcagggggaggagagttagatcatgcatttgtccgatccatctctgttcacaggacaccagacatcagagacagagagaaaaattcaaagggccaacccgtctttcctttgggcagtagacctgaagtagcgggaagagcagaaaggatggggcagccatctctgacttggatgctgatggtggtggtggcctcttggttcatcacaactgcagccactgacacctcagaagcaagatggtgctctgaatgtcacagcaatgccacctgcacggaggatgaggccgttacgacgtgcacctgtcaggagggcttcaccggcgatggcctgacctgcgtggacctggatgagtgcgccattcctggagctcacaactgctccgccaacagcagctgcgtaaacacgccaggctccttctcctgcgtctgccccgaaggcttccgcctgtcgcccggtctcggctgcacagacgtggatgagtgcgctgagcctgggcttagccactgccacgccctggccacatgtgtcaatgtggtgggcagctacttgtgcgtatgccccgcgggctaccggggggatggatggcactgtgagtgctccccgggctcctgcgggccggggttggactgcgtgcccgagggcgacgcgctcgtgtgcgcggatccgtgtcaggcgcaccgcaccctggacgagtactggcgcagcaccgagtacggggagggctacgcctgcgacacggacctgcgcggctggtaccgcttcgtgggccagggcggtgcgcgcatggccgagacctgcgtgccagtcctgcgctgcaacacggccgcccccatgtggctcaatggcacgcatccgtccagcgacgagggcatcgtgagccgcaaggcctgcgcgcactggagcggccactgctgcctgtgggatgcgtccgtccaggtgaaggcctgtgccggcggctactacgtctacaacctgacagcgccccccgagtgtcacctggcgtactgcacagaccccagctccgtggaggggacgtgtgaggagtgcagtatagacgaggactgcaaatcgaataatggcagatggcactgccagtgcaaacaggacttcaacatcactgatatctccctcctggagcacaggctggaatgtggggccaatgacatgaaggtgtcgctgggcaagtgccagctgaagagtctgggcttcgacaaggtcttcatgtacctgagtgacagccggtgctcgggcttcaatgacagagacaaccgggactgggtgtctgtagtgaccccagcccgggatggcccctgtgggacagtgttgacgaggaatgaaacccatgccacttacagcaacaccctctacctggcagatgagatcatcatccgtgacctcaacatcaaaatcaactttgcatgctcctaccccctggacatgaaagtcagcctgaagaccgccctacagccaatggtcagtgctctaaacatcagagtgggcgggaccggcatgttcaccgtgcggatggcgctcttccagaccccttcctacacgcagccctaccaaggctcctccgtgacactgtccactgaggcttttctctacgtgggcaccatgttggatgggggcgacctgtcccgatttgcactgctcatgaccaactgctatgccacacccagtagcaatgccacggaccccctgaagtacttcatcatccaggacagatgcccacacactagagactcaactatccaagtggtggagaatggggagtcctcccagggccgattttccgtccagatgttccggtttgctggaaactatgacctagtctacctgcactgtgaagtctatctctgtgacaccatgaatgaaaagtgcaagcctacctgctctgggaccagattccgaagtgggagtgtcatagatcaatcccgtgtcctgaacttgggtcccatcacacggaaaggtgtccaggccacagtctcaagggcttttagcagcttggggctcctgaaagtctggctgcctctgcttctctcggccaccttgaccctgacttttcagtgactgacagcggaaagccctgtgctccatggctgccatctcacctcctgctgggcagggggcatgatgcgggccagtgctccagccacagaaaagaaagttcatgctttgttcagcctgccttcttttctcccttttaatcctggctgtcgagaaacagcctgtgtctttaaatgctgctttttctcaaaatgggacttgtgacggtgtacctgaggcccccatctccttaaagagtgtggcaaaataatgatttttaaatctc

SEQ ID NO: 1148 - DNA, 750 bp, Homo Sapiens
tgggcgaaaatttattgcttgctaaatcatggaaaacaacaatatctttttgaacaatatatcccacagaatgttgtagagttcaatgcgaacttcagtccaggtcaacgtcccttggcttatgctctctcataaactctcgatggaagtgacgcctttcatgacgcattccaccaccagtttatcatcctctcgttttctctattatggtggttgattttccatcccatttctgcacatgtaccaggacacccccatactaaggttatggtgctcttgactttcctgtcatctgcagtgacttcgtcaaattcctggcccagtatgaaggaaatctcagtatttttaaaggtactttcagatttaatggtgatcacatcccacattcaaccacttagatgatacatgttaggtttggccatgccagccactttcctggtggcaaagcccactcctacttctttcatataatcatcaaaagttttcactgggagacaaggtttccaggtaccctacaaaaagcatcacacattattgtgagtattctaggattaattcttcaggtgagaaggaagctgcaagttttcaggagggtgctgtcaccaggccgtaatggccgaattcccgggcatatgtccggtaacgtcgactgatacttcgtatacatgtatgctatacgaagttatagcggccgccttcctcgctcactgactcgctgagctcggtcgtacggttggctaaagctaacga

SEQ ID NO: 1149 - DNA, 4030 bp, Homo Sapiens
cgcagcggccggagagggatggggggcgcccacccagtctgagcctcgccgcgggcgccttcggctcacgcagcgcttcccgcgggccgccagtgcgcaccctcggccacatcagcctccgcctggcgggtgcacccgggccggcgaggaaggggcaaccgtccgggtgggtggggcgggctgggtacctgaggtcaccagctcggctgtagaggcaggggcggcggaggcggaactgcggagttgctgggtccaccgacccttaccctcagcgagagaagtaaccaatgtgaaagatgttgcagaagtgttccagaagtggctgaagatagaaggaaaaaagtgccactgcctatcagaaaaaacaaaacaaaacatgggaaatacaaccaccaaattccgtaaagcactcatcaatggtgatgaaaacctggcctgccaaatatatgaaaacaatcctcagctaaaagaatctcttgatccaaatacatcttatggggagccctaccagcacaatactccattacattatgctgctagacatggaatgaataaaatattagggacttttcttggtagagatggaaatccaaataaacggaatgtgcacaatgaaacatctatgcatttgttgtgtatgggacctcaaattatgatatctgaaggagcccttcatcctcgcttggcacgccccacagaagatgatttcagaagagcagattgtctgcagatgatcttaaaatggaaaggagcaaaacttgaccagggtgaatatgagagagcagctattgatgctgttgataacaaaaaaaacacacccttgcactatgctgctgcctcagggatgaaagcctgtgtagagcttttagtaaaacatggaggagacttgtttgctgagaatgaaaataaagatactccttgtgattgtgctgaaaagcaacaccacaaagatttggccctcaatctggaatctcaaatggtattctcacgggatcccgaggctgaagaaatagaagctgaatatgctgcattagacaaacgagagccatatgaaggattaaggcctcaggatcttcgtagactaaaagatatgcttattgtggaaactgcagacatgcttcaggctcctctctttactgctgaagctttacttcgagctcatgactgggacagggagaaattacttgaagcttggatgtccaacccggagaactgctgccaacgatcaggtgttcaaatgccaactccaccaccaagtgggtataatgcctgggacacgctcccatctccaagaactccaaggactacacgctcttctgtcacctccccagatgaaatcagcttatctcctggggatttagacaccagtttgtgtgacatttgtatgtgcagtatctctgtatttgaagaccctgtggatatgccctgtggacatgacttttgtagaggatgttgggagtcgtttttgaatctgaaaattcaagaaggtgaagctcacaacattttttgccctgcatatgattgcttccaacttgtacctgtggatatcatagaaagtgtagtttcaaaggagatggacaaacgatacctacagtttgatattaaggcctttgttgaaaataatcctgccattaaatggtgtcctactccaggctgtgacagagcagtaagactaacgaaacaagggtcaaatacatctggatctgatacactcagcttcccattgctgagagctcctgctgttgattgtggaaaaggacacctcttctgctgggagtgccttggtgaagcacatgagccttgtgactgccaaacatggaagaattggctgcaaaaaataaccgaaatgaaaccagaagaacttgtgggagttagtgaagcctacgaggatgccgccaattgtctctggttattaactaactccaagccttgtgccaactgtaagtctccaatacagaagaatgaaggctgcaatcacatgcagtgtgctaagtgcaagtatgacttttgctggatttgccttgaagagtggaaaaaacatagttcgtccactggaggttattacagatgtactcgctatgaagtcattcaacacgtggaggagcaatccaaggaaatgactgtggaggctgagaaaaaacacaaacgatttcaggaacttgacagatttatgcactattatacaagatttaaaaaccatgagcatagttatcagctagaacaacgccttcttaaaacagccaaagaaaagatggagcaattgagcagagctctcaaagaaactgaaggaggctgtccagataccactttcattgaagatgcagttcatgtgctcttaaaaactcggcgcattctcaagtgttcttatccatatggatttttcttggaacctaaaagcacaaagaaagaaatttttgaactaatgcaaacagacctagaaatggtcactgaagaccttgcccagaaagtcaataggccttaccttcgcacaccccgccacaagatcatcaaagcagcatgccttgtacagcagaagaggcaagaattcctggcatctgtggctcggggagtagctcctgcagactcaccagaagctccaaggcgcagctttgctggtggaacatgggattgggaatatttaggatttgcatcaccagaggaatatgctgaatttcagtatcggaggaggcacagacaacgtcgtcgaggagatgttcacagtctactcagtaatcctccagaccctgatgagccaagtgaaagcactttagatattccagaaggcggcagcagcagccgcaggcctggcacatccgtggtaagttctgcatctatgagtgtgctgcacagctcttccctgcgtgactacacccctgccagtcgctctgaaaaccaggactctcttcaggctctgagttccttggatgaagacgatcccaatatacttcttgcaatacagttatcactgcaagagtctgggctggccctcgatgaagaaactagagacttcctcagtaatgaagcatccttaggtgcgataggcacttctttaccttccaggctggactctgtccccagaaatacagatagccctcgggctgcattgagcagctctgagcttttggaacttggtgacagcctcatgagactaggagcagagaatgacccattttcaactgacaccctgagctcacaccctctcagtgaggcaagaagtgatttctgtccctcatctagtgatcctgactcagctggccaggaccccaacatcaatgacaatcttctcggcaacatcatggcttggtttcatgacatgaaccctcagagtattgccctgattcctccagcaactacagaaatcagtgcagattcccagctcccctgtatcaaagatgggtcagaaggtgtgaaggatgtggaaatggtgctgccagaagattcaatgtttgaagatgccagtgtcagtgaaggtagaggaacccagatagaagaaaatcctttggaagaaaatattctggcgggggaagcagcatctcaagctggtgacagtggtaacgaggcagccaacagaggagatggttcagatgtttcaagtcaaacacctcaaacctcaagtgactggcttgaacaagtacatttagtgtgaactgcacacatctgggctctaaatgaattacaggtacagatggtatgctaggtggagtatgcttgatagagactttgattcacttaattccaactcagtgataaaccactgacattagggttgaatacagagaagttcccttgaatggtagcttcattttttattttaaccttacagggaatttcctttgtacttaattgaatagcttttcccctttttgctgacaaaaagaagagcaagagaaagagaaacaaaaatgaaataaataagttgtattccacactctaagaaaatgcagtcctctatttagcctaggcttgacaatacttaaattgaacatttaaactaaaggcttactccctaatctttgggtggctttccttt

SEQ ID NO: 1150 - DNA, 611 bp, Homo Sapiens
gggctgaagtgcctatttggccgaaagccgtggcagagtggcaaggcagggccaggggaagcggctccgccgccggggccgggcccctgtttggcccggtgcccggtccttagcctgaaggtggcgggcttccgccagaagcccctggcggaagcggtgcccgcgtgcgggccagagtgtgggtgtgcaggtctctgggcggcccaaagggggtgcccctgcctggtaacctagcgggagggtggggacggcggggagggcggcgggcgcggggcacggctccgctgctcagggcaggctccgcccccaggggcgcggatttaaaaggatcgaaggcagccccggagcccagcggccgggaggcgcgcccgaacgaagccgcggcccgggcacagccatggcccggcgggcggggggcgctcggatgttcggcagcctcctgctcttcgccctgctcgctgccggcgtcgccccgctcagctgggatctcccggagccccgcagccgagccagcaagatccgagtgcactcgcgaggcaacctctgggccaccggtcacttcatgggcaagaagagtctggagccttccagcccatccccattggagacag

SEQ ID NO: 1151 - DNA, 335 bp, Homo Sapiens
  misc_feature (25)..(25): n is a, c, g, or t
  misc_feature (286)..(286): n is a, c, g, or t
tttttttttttgagcttaaatgttnggcttttattacgtttacttgctgtgagtaagattattcacaaatgcaaacacactactcttcaaatgttttcttaaaaattatttggccttcacagtctaaacagatatttgaaatatggagtcattttgaagtaaacatttacccctaaaatttatctttaaaatatcctacttaaatcatatgtcatagtgtgatatttaattgttacactgtgggtattaaagcaaaaggggcatcagggacacaacaaaaaaaggntggacctccatccatttacctatccttcctttaaatgcacccaggccaa

SEQ ID NO: 1152 - DNA, 3432 bp, Homo Sapiens
actccagcgcgcggctacctacgcttggtgcttgctttctccagccatcggagaccagagccgccccctctgctcgagaaaggggctcagcggcggcggaagcggagggggaccaccgtggagagcgcggtcccagcccggccactgcggatccctgaaaccaaaaagctcctgctgcttctgtaccccgcctgtccctcccagctgcgcagggccccttcgtgggatcatcagcccgaagacagggatggagaggcctctgtgctcccacctctgcagctgcctggctatgctggccctcctgtcccccctgagcctggcacagtatgacagctggccccattaccccgagtacttccagcaaccggctcctgagtatcaccagccccaggcccccgccaacgtggccaagattcagctgcgcctggctgggcagaagaggaagcacagcgagggccgggtggaggtgtactatgatggccagtggggcaccgtgtgcgatgacgacttctccatccacgctgcccacgtcgtctgccgggagctgggctatgtggaggccaagtcctggactgccagctcctcctacggcaagggagaagggcccatctggttagacaatctccactgtactggcaacgaggcgacccttgcagcatgcacctccaatggctggggcgtcactgactgcaagcacacggaggatgtcggtgtggtgtgcagcgacaaaaggattcctgggttcaaatttgacaattcgttgatcaaccagatagagaacctgaatatccaggtggaggacattcggattcgagccatcctctcaacctaccgcaagcgcaccccagtgatggagggctacgtggaggtgaaggagggcaagacctggaagcagatctgtgacaagcactggacggccaagaattcccgcgtggtctgcggcatgtttggcttccctggggagaggacatacaataccaaagtgtacaaaatgtttgcctcacggaggaagcagcgctactggccattctccatggactgcaccggcacagaggcccacatctccagctgcaagctgggcccccaggtgtcactggaccccatgaagaatgtcacctgcgagaatgggctgccggccgtggtgagttgtgtgcctgggcaggtcttcagccctgacggaccctcgagattccggaaagcatacaagccagagcaacccctggtgcgactgagaggcggtgcctacatcggggagggccgcgtggaggtgctcaaaaatggagaatgggggaccgtctgcgacgacaagtgggacctggtgtcggccagtgtggtctgcagagagctgggctttgggagtgccaaagaggcagtcactggctcccgactggggcaagggatcggacccatccacctcaacgagatccagtgcacaggcaatgagaagtccattatagactgcaagttcaatgccgagtctcagggctgcaaccacgaggaggatgctggtgtgagatgcaacacccctgccatgggcttgcagaagaagctgcgcctgaacggcggccgcaatccctacgagggccgagtggaggtgctggtggagagaaacgggtcccttgtgtgggggatggtgtgtggccaaaactggggcatcgtggaggccatggtggtctgccgccagctgggcctgggattcgccagcaacgccttccaggagacctggtattggcacggagatgtcaacagcaacaaagtggtcatgagtggagtgaagtgctcgggaacggagctgtccctggcgcactgccgccacgacggggaggacgtggcctgcccccagggcggagtgcagtacggggccggagttgcctgctcagaaaccgcccctgacctggtcctcaatgcggagatggtgcagcagaccacctacctggaggaccggcccatgttcatgctgcagtgtgccatggaggagaactgcctctcggcctcagccgcgcagaccgaccccaccacgggctaccgccggctcctgcgcttctcctcccagatccacaacaatggccagtccgacttccggcccaagaacggccgccacgcgtggatctggcacgactgtcacaggcactaccacagcatggaggtgttcacccactatgacctgctgaacctcaatggcaccaaggtggcagagggccacaaggccagcttctgcttggaggacacagaatgtgaaggagacatccagaagaattacgagtgtgccaacttcggcgatcagggcatcaccatgggctgctgggacatgtaccgccatgacatcgactgccagtgggttgacatcactgacgtgccccctggagactacctgttccaggttgttattaaccccaacttcgaggttgcagaatccgattactccaacaacatcatgaaatgcaggagccgctatgacggccaccgcatctggatgtacaactgccacataggtggttccttcagcgaagagacggaaaaaaagtttgagcacttcagcgggctcttaaacaaccagctgtccccgcagtaaagaagcctgcgtggtcaactcctgtcttcaggccacaccacatcttccatgggacttccccccaacaactgagtctgaacgaatgccacgtgccctcacccagcccggcccccaccctgtccagacccctacagctgtgtctaagctcaggaggaaagggaccctcccatcattcatggggggctgctacctgacccttggggcctgagaaggccttgggggggtggggtttgtccacagagctgctggagcagcaccaagagccagtcttgaccgggatgaggcccacagacaggttgtcatcagcttgtcccattcaagccaccgagctcaccacagacacagtggagccgcgctcttctccagtgacacgtggacaaatgcgggctcatcagcccccccagagagggtcaggccgaaccccatttctcctcctcttaggtcattttcagcaaacttgaatatctagacctctcttccaatgaaaccctccagtctattatagtcacatagataatggtgccacgtgttttctgatttggtgagctcagacttggtgcttccctctccacaacccccaccccttgtttttcaagatactattattatattttcacagacttttgaagcacaaatttattggcatttaatattggacatctgggcccttggaagtacaaatctaaggaaaaaccaacccactgtgtaagtgactcatcttcctgttgttccaattctgtgggtttttgattcaacggtgctataaccagggtcctgggtgacagggcgctcactgagcaccatgtgtcatcacagacacttacacatacttgaaacttggaataaaagaaagatttatg

SEQ ID NO: 1153 - DNA, 1743 bp, Homo Sapiens
gccccggcccgcccgccagctgcggcggcgcgtcgggaagtgcttggggcggcgagcatggcggcagcggctgcaggcctgggcggcggcggcgccggcccgggacccgaggccggggacttcctggcccgctaccggctggtatcgaacaagctgaagaagcggttcctgcggaagccgaacgtggcggaggccggcgagcagttcggacagctgggccgggagctgcgcgcccaggagtgtctgccctacgcggcctggtgccagctggcggtggcgcgctgccagcaggcgctcttccacgggcccggggaggcgctggccctcaccgaggccgcccgcctcttcctgcggcaggagcgcgacgcgcgccagcgcctggtctgccccgccgcctacggggagccgctgcaggccgccgccagcgccctgggcgccgcggtgcgtctgcacctcgagctgggccagccggccgccgccgccgccctctgcctcgagctggccgccgccctgcgcgacctgggccagccggccgccgccgccggtcacttccagcgcgccgcccagctccagctgccccagctgcccctggccgcgctgcaggcgcttggcgaggccgcctcctgccagctgctggcgcgcgactacaccggcgccctggcggtcttcacgcgcatgcagcgcctggcgcgggagcacggcagccacccggtgcagtcactgccgccgcccccgccgccggcaccccagcccgggcccggggcgacgcccgccctaccggccgcgctgcttcctccgaactccggctcggcggcgccctctcccgccgccctgggcgccttctcggacgtgctggtccgctgcgaggtgtcccgcgtgctgctgctgctcctcctgcaaccaccgcccgccaagctgctgccggagcacgcccagaccctggagaagtactcctgggaggcttttgacagccacgggcaggagagcagcggccagcttcccgaggagctctttctgctgctccagtctttggtcatggctacccacgaaaaggacacggaagccatcaagtcgctgcaggtggagatgtggccactgttgactgctgagcagaaccacctccttcacctcgttctgcaagaaaccatctccccctcaggacagggagtctgatccatcccattcacccagtgacttctttttgcccaggcctggactttttgcatcagtcacgttaaccagatgactttgcctgttaccaaacctcatgcatccacgtttgcgtctggggaggaataaaaagacatcgttcccgcttctgcgttttgttattcctactgccgccataggaattatttcgttggctgaacgttaccagcaccccgagaacacattttgatagaatcagagtagaggacatggctgtcttctaaaaagccacgacatgaaaatgacaatccctttcgtctccttcctccgctgcttccacctaacgcagcctcctgcctccgcctttgtttcatagtgaggattttattttgcacggcgccctccctctaaatacctaccctagatgatttcatcctgcccctcacttcttaacatattcctgtgtctttgtaatggccaaatttctccttccactcgtccgcacggtacgtcttcatgggagtcattttattccttacagcttccttgtaaccacagccctaaatccatgataaagctactcttgtactcttc

SEQ ID NO: 1154 - DNA, 611 bp, Homo Sapiens
  misc_feature (202)..(202): n is a, c, g, or t
  misc_feature (586)..(586): n is a, c, g, or t
cagtcctgcagccccagcccagccgtcccccgcgggcgtggcaggtcctgagtcagggcctgtccgtggccagcatccctgctgggcgattgagcagcgggaagctgcttggacccagtctcaaacttaaccctcatctagcacccgggcaggcctcctgggttgcagggacttgagaaaaggcagagttctcaggtcctangaagctggggcacgctggcgtgacaagcgtcccggagaaagccaagccctcggggagctggggaccgcagcagggctgcagtcacatcctgcgcgggtgggcggcgggccaggccttcagttgtttcgggacgcgccgagcttcgccgctcttccagcggctccgctgccagagctagcccgagcccggttctggggcgaaaatgcctgcccttcacatcgaagatttgccagagaaggaaaaactgaaaatggaagttgagcagcttcgcaaagaagtgaagttgcagagacaacaagtgtctaaatgttctgaagaaataaagaactatattggagaacgttctggagaggatcctctagtaaagggaaattcagaagacangaacccctttaaagaaaaagcagct

SEQ ID NO: 1155 - DNA, 623 bp, Homo Sapiens
gggacctctagcagttaacgacgcctgcgtcaaggagaccaggaaggggtgagacaaggaagaggatgtctgagctggagaaggccatggtggccctcatcgacgttttccaccaatattctggaagggagggagacaagcacaagctgaagaaatccgaactcaaggagctcatcaacaatgagctttcccatttcttagaggaaatcaaagagcaggaggttgtggacaaagtcatggaaacactggacaatgatggagacggcgaatgtgacttccaggaattcatggcctttgttgccatggttactactgcctgccacgagttctttgaacatgagtgagattagaaagcagccaaacctttcctgtaacagagacggtcatgcaagaaagcagacagcaagggcttgcagcctagtaggagctgagctttccagccgtgttgtagctaattaggaagcttgatttgctttgtgattgaaaaattgaaaacctctttccaaaggctgttttaacggcctgcatcattctttctgctatattaggcctgtgtgtaagctgactggccccagggactcttgttaacagtaacttaggagtcaggtctcagtgataagcgt

SEQ ID NO: 1156 - DNA, 509 bp, Homo Sapiens
gcggccgcaagctcggcactcacggctctgagggctccgacggcactgacggccatggcgcgttcgaacctcccgctggcgctgggcctggccctggtcgcattctgcctcctggcgctgccacgcgacgcccgggcccggccgcaggagcgcatggtcggagaactccgggacctgtcgcccgacgacccgcaggtgcagaaggcggcgcaggcggccgtggccagctacaacatgggcagcaacagcatctactacttccgagacacgcacatcatcaaggcgcagagccagctggtggccggcatcaagtacttcctgacgatggagatggggagcacagactgccgcaagaccagggtcactggagaccacgtcgacctcaccacttgccccctggcagcaggggcgcagcaggagaagctgcgctgtgactttgaggtccttgtggttccctggcagaactcctctcagctcctaaagcacaactgtgtgcagatgtgataagt

SEQ ID NO: 1157 - DNA, 613 bp, Homo Sapiens
ttgaatttaggtgacactatagaagagctatgacgtcgcatgcacgcgtacgtaagcttggatcctctagagcggccgcctactactactaaattcgcggccgcgtcgactggattcctaagtggaaaattgttgaaagaaaatcgtgaatcagaaggaaagactccaaaggtggaactctgacttctccttggaactacatatggccaagtatctactttatgcaaagtaaaaaggcacaactcaaatctcagagacactaaacaacaggatcactaggcctgccaaccacacacacacgcacgtgcacacacgcacgcacgcgtgcacacacacacgcgcacacacacacacacacacacagagcttcatttcctgtcttaaaatctcgttttctcttcttccttcttttaaatttcatatcctcactccctatccaatttccttcttatcgtgcattcatactctgtaagcccatctgtaacacacctagatcaaggctttaagagactcactgtgatgcctctatgaaagaaaggcattcctagagaaagattgttccaatttgtcatttaatatcaagtttgtatactgcacatgacttacacacaac

SEQ ID NO: 1158 - DNA, 368 bp, Homo Sapiens
  misc_feature (326)..(326): n is a, c, g, or t
  misc_feature (350)..(350): n is a, c, g, or t
  misc_feature (362)..(362): n is a, c, g, or t
ttttctttatattcttttatcgaattcatatcttctcatttatgccagtaatgttctcacccataaactctaccctaaggtcaaaatgtttccttcctcctcttttaaataactgtcaatatgggctctcccaataaacaaaccaccgccaaaaaaagaacaacaaaaagcctgtatctgggatgctatgtgaggaaataattacccttcacaaaccctatcttcaggatatttctgtattttaaggccacaccaacataagggtaggatgtatttgtgtgtgttatgtttttccaccttggaaatattttttaaggaggttgggntatattatcttaaattttcatttntcggggtgaggnttgggg

SEQ ID NO: 1159 - DNA, 382 bp, Homo Sapiens
  misc_feature (196)..(196): n is a, c, g, or t
  misc_feature (223)..(223): n is a, c, g, or t
  misc_feature (245)..(245): n is a, c, g, or t
  misc_feature (332)..(332): n is a, c, g, or t
ttatctaccctgtttttttgtttctttgtttgttttgttttttgaggaaatgactcacgaatgaaaatttgtaagagagtttcttgtggacaaaaaagaaaaagaaaatgaggcaaatgaagatcccttgggagcctaagccagcaatccaggatggatacaatgagggtctgaaactgagcttggattgtttgtncaaaatgttaagggtaacaggcttttncaggagttcaccctgtattcanggagtggtacatgtacataaatacaacatgagacaaaatagtaagaggtagagcagagggagaacatggcaaaagcaagtaattctncttttttgaagagaaacgggatgagcttttattactagtagtttccacaa

SEQ ID NO: 1160 - DNA, 754 bp, Homo Sapiens
cagtgtagtcgactgggaaaacctggcgaagcaacaacaaccaaacaagcaagcaagcaagcaagcaaccaaccacccaaccaagtaaccgatcaaaccaacccttggagccctttctaaaactttgacctacaaccctgaatccagaatctctgtttagtgggccaacattaataaatttagcctactccaactttgtgttacttccaccatggtgccacacacttaatatccattcccacatatattctccagatttctttctgtataaattgtgtgtgtgtgtgtgtgtgtgtgtgtgtagaaagagagcatcaactgaaaaatcacacaattttataaatttagaaaagagagctttatttcttataaaggtttgcagcctgcaaggtggccattatgacaggctgggaagtgtggcctacagccaaggctagaggcaggcccttccagggagggacggagaggacaggaatttgagctgaatgagttgactacatatacatactcaataggatatcagaggagctatatcattttatgagaatactcataaaagaggtcctaacacatgcatattgaataaacatgcatgttcattctggtgtggaaacttgacatttacatgtgttataattaggcctaaatatcaaaagtgaagcagggatgaaggtctcagcttctgtaaggaagctctaaatggcaaaacgtccaggggaggctcttcagaaagtatgataggccgcaagaattc

SEQ ID NO: 1161 - DNA, 147 bp, Homo Sapiens
gggcgtggtgcggagggcggtgttggggtctgctctaagctgcagcaagagaaactgtgtgtgaggggaagaggcctgtttcgctgtcgggtctctagttcttgcacgctctttaagagtctgcactggaggaactcctgccattac

SEQ ID NO: 1162 - DNA, 518 bp, Homo Sapiens
tttttcaacacagacacacgcaggcctttattctattacacagagtagggctggggccagggcaggtcattctcaggctgcgtcagaaggtgcagagcgttcgggggacacaggccgaaccccaaagtgataataagttacggggggatttctcaggctgttgtcaggctggagcaagggcaggacgccatgtgaggaccccagagccactttcagctgcccagctcagccgtcccaggcaagcctggttccaggacagactcggcctccacaggccctcagttcagctcctgcagattctcgtaatctggagccccctcttcctccacttactctgcctcctgggaactcagggcggcaggctcagtcttagccgttccaggatgcaattgcctggacaattgcacatactagcggcggccatacagagacgcttatgcactctgcccgctctggggaacggtcaggtagatatcatggtacgtaatggagaaggcacggactgagatgcatggagt

SEQ ID NO: 1163 - DNA, 421 bp, Homo Sapiens
  misc_feature (199)..(199): n is a, c, g, or t
  misc_feature (412)..(412): n is a, c, g, or t
atttaaaatatttcagtgtgccatatagctctgtcccttggtttggttggccttgttttttcctgtgaagaatgaaagggcaaaggtgataccaaaatgaaacagctttggagtgatatctttaggagcctggaagccatttttgtaattttgttgtctatataaatgctacctttgcctggaggtagtgcgcctgtgntgtgtacatccagagggcaacagtaatagccaacaaccagacaaactagtgaagttaatctgtgagtgatgattttatgatacttatatgcaaattaaaggcagaagttagtttcttctcaagatggcctttttggctggaacattaccatttttctttccccagggttttgaaagaaaagggccttttttgggattttaactatattctgtnctgcattcc

SEQ ID NO: 1164 - DNA, 468 bp, Homo Sapiens
ttgacctctaggtttgtttttaatagactaaatttaaatggcaattttaaaaactgaaaagctttcctcatatttctagagtcaacactggaggttgacaattaaaggtgagacaacaggaaaccacacgccccatcacaggtacaacctgtggctcttagtattgaccttcagttgatgtgactgttaatatattacaagactatgcagcagcgctgtaaacacgtgcccatcaaagacccttgcttgtgtaagaaaggcatgaaagggactctcacgacaccttaatgtctggccaaacactgggatgtttcaatgatgaacctgagcaggcactgctgagccatctgacagtgccccgggcacttactgttaacagagccctgtaaaactgcctggcggctgggatcagaagcctcagcatcccttgttctctgtacttatggtacccattttttaagaaaatct

SEQ ID NO: 1165 - DNA, 475 bp, Homo Sapiens
tttttttttttttttgacacaaagcagtcttcatttcttccacacatcggaaacattttcaattacagttcagcttctctgaggtccacatcaagtagtaaaataccaagagcacagaaaagctgggttggaggaaatctctgctaatgaggcactaagtgagaggcttcacttaacaattccaatagacaagctggaggcccatgcaggtccctgagaaaaagagtcattttggcttatgccctgaaggaattctactctgcactttctccttagagtgtgcctatgaagtgccactgtaaagagaggtccttgctgaatggccactagtaaaatcctaacagagagctaatctgcttggggagcagcttttttaatagtggtgattttcttctcagccagagcttctcactggaattaaaaagaccccagccacactgacagttgcaggttccacattagtcagactgtttcc

SEQ ID NO: 1166 - DNA, 677 bp, Homo Sapiens
  misc_feature (54)..(54): n is a, c, g, or t
  misc_feature (83)..(83): n is a, c, g, or t
  misc_feature (110)..(110): n is a, c, g, or t
  misc_feature (356)..(356): n is a, c, g, or t
  misc_feature (448)..(448): n is a, c, g, or t
  misc_feature (485)..(485): n is a, c, g, or t
  misc_feature (496)..(496): n is a, c, g, or t
  misc_feature (508)..(508): n is a, c, g, or t
  misc_feature (533)..(533): n is a, c, g, or t
  misc_feature (547)..(547): n is a, c, g, or t
  misc_feature (583)..(583): n is a, c, g, or t
  misc_feature (585)..(585): n is a, c, g, or t
  misc_feature (588)..(588): n is a, c, g, or t
  misc_feature (618)..(618): n is a, c, g, or t
  misc_feature (634)..(634): n is a, c, g, or t
  misc_feature (643)..(643): n is a, c, g, or t
  misc_feature (648)..(648): n is a, c, g, or t
  misc_feature (652)..(652): n is a, c, g, or t
  misc_feature (661)..(661): n is a, c, g, or t
  misc_feature (665)..(665): n is a, c, g, or t
ttttttttttttttttttgcaattttctatttttatttttttaagctcatcaantttggttagtgttagtgtgttttacatgnggcccaagaaaattcttccaatgcggnccagggaagctaaaatattggacacccctgcctaggggaacttgtttcgtctacttggttagttgtcctaattgcattttacctgcagtccaaaggttattttagatgatagaactgcaagaaccccaaacccaaagaaagaatcgttgaagtggttgggagaggaggtcatttctgagatacatttccaggagaaatacaagtttgagagaaggagctggtagttactgtgtgcaagtgtttttntttgatggggaaggagtagttggcaaagggacaggaatctgtgtgtacatttcctgctcctgtttccttaaccaccatcctcagggcatctntggcacctttggggtcgggtaagatgctctctactgncctcgttttanctgcctttatcntcgtctatatggcacttttctgcgntgaaaagacatttnccttacagggatgaaactggacttgcaagagtttgntntanaaggtgttcaagtcaaggaagatgctcaanaaaatggaccccctgnagaagggtnggcantcanttgcttgancttnaaaaaaaaaaaa

SEQ ID NO: 1167 - DNA, 377 bp, Homo Sapiens
tttttttttttaatgcgtttttttttttttttttttttggactcatgcagtctttattaatctgacaaatacagaaaatctgcaatcagctatcaaaattatatcttaccaagaatttgaaaggtatttaaaaaaggtgtattcacagtctgtctgaattaagtacaaagcagtgtccacagaagcagaaggcagacaacatgtgagagtaaatgatcccactgaaaccctcaccccagcacctccaaggacaccaaaaacaagacagtcctgtacttgctactatatgcagctgactttgaaactgcctagtctcaacaattacgtatttcagaaggaaaattgctttctgggaaatcgtccctgctacacagaca

SEQ ID NO: 1168 - DNA, 686 bp, Homo Sapiens
agcttctcactttccctccaatgaagcatggcagcatgggaaggattttggcagtgtcgaggtctgagttttagtccgttcccctctctgggtctcagtttctcgctggcagcccttggctggtccctgcgagcccgtggagactgccagagatgtcctctttcggttacaggaccctgactgtggccctcttcaccctgatctgctgtccaggatcggatgagaaggtattcgaggtacacgtgaggccaaagaagctggcggttgagcccaaagggtccctcgaggtcaactgcagcaccacctgtaaccagcctgaagtgggtggtctggagacctctctagataagattctgctggacgaacaggctcagtggaaacattacttggtctcaaacatctcccatgacacggtcctccaatgccacttcacctgctccgggaagcaggagtcaatgaattccaacgtcagcgtgtaccagcctccaaggcaggtcatcctgacactgcaacccactttggtggctgtgggcaagtccttcaccattgagtgcaaggtgcccaccgtggagcccctggacagcctcaccctcttcctgttccgtggcaatgagactctgcactatgagaccttcgggaaggcagccccctgctccgcaggaggccacagccacatttcaccagcc

SEQ ID NO: 1169 - DNA, 627 bp, Homo Sapiens
agtctccggcgagttgttgcctgggctggacgtggttttgtctgctgcgcccgctcttcgcgctctcgtttcattttctgcagcgcgccacgaggatggcccacaagcagatctactactcggacaagtacttcgacgaacactacgagtaccggcatgttatgttacccagagaactttccaaacaagtacctaaaactcatctgatgtctgaagaggagtggaggagacttggtgtccaacagagtctaggctgggttcattacatgattcatgagccagaaccacatattcttctctttagacgacctcttccaaaagatcaacaaaaatgaagtttatctggggatcgtcaaatctttttcaaatttaatgtatatgtgtatataaggtagtattcagtgaatacttgagaaatgtacaaatctttcatccatacctgtgcatgagctgtattcttcacagcaacagagctcagttaaatgcaactgcaagtaggttactgtaagatgtttaagataaaagttcttccagtcagtttttctcttaagtgcctgtttgagtttactgaaacagtttacttttgttcaataaagtttgtatgttgcatttaaaaaaaaaaaaaaa

SEQ ID NO: 1170 - DNA, 701 bp, Homo Sapiens
ctaggctccaagctcaggacctcaggatgggagatgaggagaagcggaacagggccatcacggcccgcaggcagcacctgaagagcgtgatgctgcagatagcggccacggagctggagaaggaggagagccgccgtgaggcagagaagcagaactacctggcggagcactgcccgccgctgcatatcccgggctccatgtctgaagtgcaggagctctgcaaacagctgcacgccaagatcgatgcggctgaagaggagaagtacgacatggaggtgagggtgcagaagaccagcaaggagctggaggacatgaaccagaagctatttgatctgcggggcaagttcaagcggcccccactgcggagggtgcgcatgtcggccgatgccatgctcaaggccctgctgggctcgaagcacaaggtgtgcatggacctgagggccaacctgaagcaggtcaagaaggaggacacagagaaggagcgggacctgcgagacgtgggtgactggaggaagaacatcgaggagaagtctggcatggagggccggaagaagatgtttgagtccgagtcctaggccactcgctgcccctacgcctgccccggtgcccggctcccagcagaacatactagggagatgcacccagagcctgccagggagggctggcctcaccaccaccgtcaataaaggatttgaatcccc

SEQ ID NO: 1171 - DNA, 363 bp, Homo Sapiens
ccgtaaactccttgaaaaacattttaaagtcatcaatatgatctgtttcccatgaaacttaagttagctttcttattggagttatttcttttctgtaagtctgaaaagtagagattttgttttacgcattttagtaacctgcaacaaccaactctaaaaaagatttggcttgtaatgacggtctctgcttttttgggtttggagtacacaattgtaatatttacttagttatttgtgtttttctttgttcaaggtattgactagtttcataaattttttgcaagtttttctttcattggttggaaagcagattacattttgcactattaaaataagtttattactttaaaaaaaaagtcgacg

SEQ ID NO: 1172 - DNA, 1550 bp, Homo Sapiens
tggagctaagctgtttccagggtgacagagtggcgacctcggtggtcgattgagcaggtctgagaattgttcccaaagggttgtgcgtcaccgagtcgttggcgctgtcatggcgggtgtgctgaagaagaccactggccttgtgggattggctgtgtgcaatactcctcacgagaggctaagaatattgtacacaaagattcttgatgttcttgaggaaatccctaaaaatgcagcatatagaaagtatacagaacagattacaaatgagaagctggctatggttaaagcggaaccagatgttaaaaaattagaagaccaacttcaaggcggtcaattagaagaggtgattcttcaggctgaacatgaactaaatctggcaagaaaaatgagggaatggaaactatgggagccattagtggaagagcctcctgccgatcagtggaaatggccaatataattattaagtgactttggtgtgttcatgggaaactgatgtaattaaatattctgttatattaagagcgtgttcttattactgacattttgtaatcaagaaaagtgatatagaaaatatgtaggagactgttaaaattggtgattatggtaatatggtcatgtgaatcaatttttgatttataaagtactcacacaagttgtttcaaagatgatatttctgtgaacagagaggccatgggaagatttgaaaattattaaagaaaaattcctacagattttcaatgcagagaccataatcaaaaagtaaactttctttagtagtatgttcaatacatcatttaattttttaagttatcctgaagaaggaaaggtccttaattattatagtctaaacaaatttatagattactgtttgaagtaaataatacgagtgaatattttcaaatgtgataaaatagcacaagtggctggtgataaaatttgaaattatggttaacctcagctgtgatcttatgtatgtaaagtgaaatttaaatagataattataggttgattacaaaatccatagtgtcattttattttagtcattattgaattataccatttactctgttttcttatagtcttaattttattatattttgttgttactgtattatatttgaaaaccttcaaattagaatacattgtacagttaaagaaattgacttggtacttaaaagaaagatttcccattgcatacaggttattggagaaattttccttttgttgcatttgtggaagttagttttctggcccgtggcctttaattttcttaatcaacctaattacatcaggatagaggtagagtttctgtaaaagaagagacattaagagttcctgaaatttatatctggcataccgataggcttatattcaaaacatcttagtcatacgaccataaattaaaagtggagtcactaaatagtttgcagtacgtttctaatataagtgtaggtgggtatcaaaacaagacaaatgctgttcagggaaagaagttggcaagcttaaggttaaacaaaaataaaattacatgtgttttcgccttccta

SEQ ID NO: 1173 - DNA, 3204 bp, Homo Sapiens
cctttactcatctatctatctatctatctattatctatctatcatctatctatctatgcaaacttaagaaaatagtgtgttaaaagaaaagctagagggcaagtgctaaatgtggcatgactagagggcttgtcacaggagagcagagactgccatccctgatgactggcacagggtttcaacatgaggtctcagtgctggtcaatgaataaatgtagaggcgtgattttagatctctctttgataacccatgattttacagaagaaaagatcttaggcttgaaggtgtgatgtttgatgatccaggtgccatttagtgaggaaaagttaaacccgcagtgtctgatgttgttagctttggacatgtgtgaacgattgacatggatatcctcccttctaatccacatgctttgggggaggatctaggaagcacttatggaagaatatgccattgcagctcaagtgtggaagctgagcacctgcgacctgtgtgagatcgccaggaacagcgtgctgcagagcggcctctcgcatcaggtatggagtgtgacggtgctgcctgtgtccctcctgggaaggctgcctgctgtgtgccaggagccttccaggcactggggatctgtgatgaacatagcaggcagggctctgagacactcaggcacagggagagaagacgcggcagcctcctgtgttttcatggctgcttcctcacccttctcagacctctacgcctccttggagaggccttccctgagccgcccattctaaaatagccacacacttgctattattctctatccccttaatcagtttttctccataccatttattcctgctgatgtttagttatgtgtttttctgtctttccctctagcatgtaagctctgtgagggcagaggtttgttccagaattatatcccggccgatagtcctggcacatagcaggctctcaatattcttgatagatgcacagtatctagactgaataaaaatctagactatgggactcagacatctgtcatttttaaaaagcctgatgaggagctggcactgagacccatgttctgatgtacgttaggtcccccgacacctccctgggtgatgtcactggttgggaagaggttgcattaggggctgtgctcgtcggatgatgatgcagcagagttaaaggcttaagattcttttcatgcgcagtgtggtgccttggattggccctccccaggaacattgtccttgtcagctctcaggagggacttcttaattagagtcttacctccttccccttgcctttcccatccccagcagctgctgcagaccttatctttcctctctgatcaaggaaagcacagccaggaatgaagggctgtctgaggatgactgaggttgtcagggtgacatccttgaggacacagaggccagcaggaattttaagagttctgtggggataagatgtcctgaccaaagatctgcttcagggggactagtctgacttgctgtgactgatgtcaaagctgcccacatggctatagaaagtgaatcaaaagtatatagtttcatttgtatttctcttggtccacaggaaaagcaaaagtttctgggacaaaattattataaagaaggacctgaaggaaatgatattcgaaagacaaatgtggctcagatccggatggcattccgatatgagaccttatgcaatgagctcagcttcctgtctgatgctatgaaatcagaagagatcaccgccttgaccaactaggtccagcatttgacatgcattttaactttttggttcaatttcaagtctgctgtggctaatagtggtcaagattccgaactaggactttcctctgtgaagaggatgcctctgaagaaattttaaactggtgattttggttgcactgctcactttaagagttaacatgctcacttgttagtatttctgagtaacaagatggtgacttctccttggggatctgggagctgagcacttgtctatacttgttcctaattttccaagtatttctcttgaaactgccagtgcctgaactgttggggccaggattttccctggtcagatgccaagtaacatgtggttttctgccatacttttctccattggcccaggtaggctaattggtagttgttcatttcagcctctggatggctggctgccttaaacacaatcaatttcaaagctccatttcataaaggggctactttgaaggagttaagatggaagacttccttcttgacaaattgtgtttttagtgaatttcttaaaccgttttatttagccctccttccctctttctagttggaagccaaatgtactcatgaaaacagccactcctattctgagtcttggtttcttcacctagaaagtgagggtttggactagatgagtggctttcagggtgttctgtgaatctcctcatgaatactttagggtgggggagggaagggagtgagtgatgctcaggggctgtcaaagtgactgcgttcatcagttttacactggggctgctacataatattttcatttgaacgaagaacttcaaaaagcacaggactagatgatctctgttccttttggctctaatatgctacaactgtaggccaattatcactttaccaattaagagttaggccagataagtgaaatttaacttaagggcacacagctaataagtaataggcctaaactggatttccttattccaaatcctgtcttttccccactattccattagaccccacaaatgttagttgtgtgtgtgtgtgtgtgtgtttttaatcactgtaaccgggtgcatttttttaaggcaaaatttctcccttatctactgtgatgacttcagaagatacaatggtcccaggggccaagtagaaagcatttttaaagattaatctgaattaagctttatcagtgtactctttatctgtgttactagtgcctggtatgtagtaggtgctcaataaatgcatattgaataactaagtgaatttcttttggcaactttttaaggacatgtgctcttagtacttaagaggctgctcaaggaccttcctatctatttctgtggtcaaattcagactacaggaggtctttttgaatcattatagttagaagaagaatccagtttctgcctgtgaacttatttgactttagattgtctcatcttgtgactttataatgcctgtccc

SEQ ID NO: 1174 - DNA, 303 bp, Homo Sapiens
  misc_feature (9)..(10): n is a, c, g, or t
  misc_feature (64)..(64): n is a, c, g, or t
  misc_feature (294)..(294): n is a, c, g, or t
  misc_feature (300)..(300): n is a, c, g, or t
atttttttnntttttttttcctctcactcagcgtcctgtgattccaaagaaatgagtctctgcngtttttgggcagcagatatcctagaatggactctgacctaagcatcaaaattaatcatcataacgttatcattttatggccccttcttcctatatctggtagcttttaaatgatgaccatgtagataatctttattgtccctctttcagcagacggtattttcttatgctacagtatgactgctaataatacctacacatgttagaaccattctgactcctcaagaaccnaacctncac

SEQ ID NO: 1175 - DNA, 1482 bp, Homo Sapiens
gcgcactcacagtcgcaacctttccccttcctgacttcccgctgacttccgcaatcccgatggaataaatctagcacccctgatggtgtgcccacactttgctgccgaaacgaagccagacaacagatttccatcagcaggatgtgggggctcaaggttctgctgctacctgtggtgagctttgctctgtaccctgaggagatactggacacccactgggagctatggaagaagacccacaggaagcaatataacaacaaggtggatgaaatctctcggcgtttaatttgggaaaaaaacctgaagtatatttccatccataaccttgaggcttctcttggtgtccatacatatgaactggctatgaaccacctgggggacatgaccagtgaagaggtggttcagaagatgactggactcaaagtacccctgtctcattcccgcagtaatgacaccctttatatcccagaatgggaaggtagagccccagactctgtcgactatcgaaagaaaggatatgttactcctgtcaaaaatcagggtcagtgtggttcctgttgggcttttagctctgtgggtgccctggagggccaactcaagaagaaaactggcaaactcttaaatctgagtccccagaacctagtggattgtgtgtctgagaatgatggctgtggagggggctacatgaccaatgccttccaatatgtgcagaagaaccggggtattgactctgaagatgcctacccatatgtgggacaggaagagagttgtatgtacaacccaacaggcaaggcagctaaatgcagagggtacagagagatccccgaggggaatgagaaagccctgaagagggcagtggcccgagtgggacctgtctctgtggccattgatgcaagcctgacctccttccagttttacagcaaaggtgtgtattatgatgaaagctgcaatagcgataatctgaaccatgcggttttggcagtgggatatggaatccagaagggaaacaagcactggataattaaaaacagctggggagaaaactggggaaacaaaggatatatcctcatggctcgaaataagaacaacgcctgtggcattgccaacctggccagcttccccaagatgtgactccagccagccaaatccatcctgctcttccatttcttccacgatggtgcagtgtaacgatgcactttggaagggagttggtgtgctatttttgaagcagatgtggtgatactgagattgtctgttcagtttccccatttgtttgtgcttcaaatgatccttcctactttgcttctctccacccatgacctttttcactgtggccatcaggactttccctgacagctgtgtactcttaggctaagagatgtgactacagcctgcccctgactgtgttgtcccagggctgatgctgtacaggtacaggctggagattttcacataggttagattctcattcacgggacccgg

SEQ ID NO: 1176 - DNA, 392 bp, Homo Sapiens
atctgacacgtcagtgtgagtgtgtgtgctggatggtctgtgagccccaagctgtctgtcctgaatatccgtatgtcctcatgggtgtctctgtccctttatgccctagcttcctatggctgagtctgtgtgatcacacccatgcaagtgcctgacaagaactctctcaccagtaaaagcagttagcccatgctggcagagtacatgagaaaaaccgtctttgcttctacgcctgctagtgagctcaggcttggaaaggggtcaggggtgagtggtggggcagcccagaagagagaagaaagccgagatgcttacaggtacctggctggagagggcgaaggtgctagctgggctcttcttcttgctgttgctgttgttggtgttgccaccac

SEQ ID NO: 1177 - DNA, 687 bp, Homo Sapiens
atttaggtgacactatagaagagctatgacgtcgcatgcacgcgtacgtaagcttggatcctctagagcggccgcctactactactaaattcgcggccgcgtcgacgcctagaaggttaaggatgtccccagggtcacacagtgagcggggctcagagcttgagtgtctttgtgctttgtgtacattgtgttctccctagggtgctttagaccctgtttgttttcttctgcatgaggctgatttccagtttgtcatcaacctctttatcttataatttaggatagagttgaacgttagtcttgaaagattttctaaagtagtctttcaaactgttcctcagaggcctaggattttccaaaagtaccttaggaaccttgtaggctgcagtgggggtgtggcgatagagcaggaggcagggagacagggctgcagggcctcccaccttccaacagacaggctctgctgtatctgttgtacatactgggattctgtaaaggacattatctggggtgttggatgtatttttgtgtgttctgctttttttaaataaacttgaaaagctactgaaaaaaaaaaaaaaaaagtcgacgcggccgcgaatttagtagtagtagtcgacccgggaattccggaccggtacctgcaggcgtaccagctttccctatagtgagtcgtattaaaacttg

SEQ ID NO: 1178 - DNA, 484 bp, Homo Sapiens
  misc_feature (170)..(170): n is a, c, g, or t
  misc_feature (480)..(480): n is a, c, g, or t
gtaatttggtctctcccattaacaccattaaatagatgataactgattttatttccttctctttcaaaggaaaaccagtgttctctggacatgaaaagcaaactgaatacaagtaaacaagcagaaaatggacaaccagaaccacaaaacaaggttccggctgaggaccnttacattgacattcagtgatgtaccaaatggatcagccttgacacaagagaatatcagcctcctatcaaacaagaccagctctctgaacctgtcagaggaccctgagggaggaggggataataatgactcccagagatcaggagttactcccagttctgctccttaaaatatgaggagtcctacttttatcttctgctcctaatcagtttgtccgggcataggggtaggagaacgcataacttctaaactttttctcctaagagcggtcagaggaaatccaggaaattcaccaggaggcaatgtgcacancacc

SEQ ID NO: 1179 - DNA, 4040 bp, Homo Sapiens
gtcgcctctcacccgccccggccgctccagcccgaggcgccccgaccccgcgccactccgcgcccggccagccgcccgcagccatggggctcctgcccaagctcggcgtgtcccagggcagcgacacctctactagccgagccggccgctgtgcccgctcggtcttcggcaacattaaggtgtttgtgctctgccaaggcctcctgcagctctgccaactcctgtacagcgcctacttcaagagcagcctcaccaccattgagaagcgctttgggctctccagttcttcatcgggtctcatttccagcttgaatgagatcagcaatgccatcctcatcatctttgtcagctactttggcagccgggtgcaccgtccacgtctgattggcatcggaggtctcttcctggctgcaggtgccttcatcctcaccctcccacacttcctctccgagccctaccagtacaccttggccagcactgggaacaacagccgcttgcaggccgagctctgccagaagcattggcaggacctgcctcccagtaagtgccacagcaccacccagaacccccagaaggagaccagcagcatgtggggcctgatggtggttgcccagctgctggctggcatcgggacagtgcctattcagccatttgggatctcctatgtggatgacttctcagagcccagcaactcgcccctgtacatctccatcttatttgccatctctgtatttggaccggctttcgggtacctgctgggctctatcatgctgcagatctttgtggactatggcagggtcaacacagctgcagttaacttggtcccgggtgacccccgatggattggagcctggtggctaggcctgctcatttcttcagctttattggttctcacctctttccccttttttttcttccctcgagcaatgcccataggagcaaagagggctcctgccacagcagatgaagcaaggaagttggaggaggccaagtcaagaggctccctggtggatttcattaaacggtttccatgcatctttctgaggctcctgatgaactcactcttcgtcctggtggtcctggcccagtgcaccttctcctccgtcattgctggcctctccaccttcctcaacaagttcctggagaagcagtatggcacctcagcagcctatgccaacttcctcattggtgctgtgaacctccctgctgcagccttggggatgctgtttggaggaatcctcatgaagcgctttgttttctctctacaaaccattccccgcatagctaccaccatcatcaccatctccatgatcctttgtgttcctttgttcttcatgggatgctccaccccaactgtggccgaagtctacccccctagcacatcaagttctatacatccgcagtctcctgcctgccgcagggactgctcgtgcccagattctatcttccacccggtctgtggagacaatggaatcgagtacctctccccttgccatgccggctgcagcaacatcaacatgagctctgcaacctccaagcaactgatctatttgaactgcagctgtgtgaccgggggatccgcttcagcaaagacaggatcgtgccctgtcccctgtgcccacttcctgctcccggccatcttcctcatctccttcgtgtccctgatagcctgcatctcccacaaccccctctacatgatggttctgcgtgtggtgaaccaggaggaaaagtcatttgccatcggggtgcagttcttgttgatgcgcttgctggcctggctgccatctccagccctctatggcctcaccattgaccactcctgcatccggtggaactcgctgtgcttggggaggcgaggggcctgcgcctactatgacaacgatgctctccgagacaggtacctgggcctgcagatgggctacaaggcgctgggcatgctgctgctttgcttcatcagctggagggtgaagaagaacaaggagtacaacgtgcagaaggcggcaggcctcatctgaccccaccctgggccactgcctgctccagagagtggaccttgactcttccacacctgcctatactcactaatgttaacacgtcatttcctttttgtatttttaaacaagaaagaaaaccccagtcctcatttgccttccctacctcttcctcccagagtcctccccacagttcctaagggccactgtgtacccgggctgtgtgggccagaactggggggctgagtcttccctggccccttggaagaggcccccagatgcccaggctcacttcagtgttgagtcctccattgaggatgcccactgaggcagccaggcccctcaccagccctggggggaatcctaaacagagagagaaaaagggtatctgcccttcttgccaggcagctccactctcccgctgactgcccacaccctgcagagtggcaggggtgaaaggaagaaggaagtggctgagttattaatagccagagccactgggagactggggagactggctgtaacccccttcacacctgggtttggcatcagcacagactacgggaggggctggctccctccccctcagaccctcacttcctgtacctagaggccattctggatgctgccatgttgggaagtacagtctctgcccattacctgcatgcaggcaccagagcagggactgagaaaccccaaggatgggtcatctaagtgctgtccatatgaaccctggactttctgtccttagatcctcacatgttatccctgtctttctggggtacgtttcaaactgaggaagctacaacacagtgaagacccaaggaaggcctatgaaatggtcctgatgcccaacctcccaccccttcaatgtggggacgagaccccctcatctcagagtaatgggaagaacctcccacatctccctggcagcagatgaggtggcttcacatgcacttccctgtctggacttcagcccgtattccgaggagtagagaggcagaagagatgtcagcaaagcaagtgatgaagcagagtggatgtccactgtcaccaagctggatggcaagctgcggcccacaaaacagccagtcaggttggctttcctggtttcagacatgctcataccattcccattttctcagcctcttctctgcctccagagaggtggatgcctgggttgagagacacagctgctacgtgatagatgttgagagacagaagccaacgaaggaggtcattcatcaacaaatatatttattggagaccgactttgtgcaaagcaatgctaatcagggttctccatggagcttccctcagctcttacctcacctccctccatttacattagggccttctcccagggtgtgctcggtgggcagtgtgggactgggggtgtgggagttggtgagagcaggaggagaggtggggacagcaagaagccacagattggcatgaaggatcctgacctgactatccatgccatccatggcccccagactgactctgcacctggccctttgccagacagctctgtctccccatgtcctctggaacagctgggcatgggtcatggccattcatgacccttaagtgccacccttcttggaagaccccctccagaagcatactggaagccacctctggaaaagcctcatatggtgatatgccaaaatatttatgtcaatgtccaaacaaagtccaatgccatgagactgaagtctttgtggaaaccactgttacagacaagcttatttccaaagccacctcatttccaaacatctcactcaggaagggaggctcaatgtaacctcaggggccagttttagcatttgaaatggttctgcttggaaaatgatgccctgcaactaaccctggtctttcccatggcaatttaaccacatttggaaggcactgccttcagctgagtttatgaacaatgaatgccaaccttcaggttctagaagattggttgcactcccaaacctttattctattatattactattaaaatattctaattttgctattgaggtaaaaaaaaaaaaa

SEQ ID NO: 1180 - DNA, 414 bp, Homo Sapiens
ttttttttttttttttttttttttttttttgcacttgggtttttaaagtttatttcctttgtggatacaacattatttttacaaaaatgcaaattgggaggaaaaactaaggctagagaatatatcttctacttcttggcaaagcatgtttactattggtcaatgttattatttgactctatattgccaaagggataatcggggagaaggtcataggaattttcatccttctttaatagcagacattaaagatgtctcctattataaggagttatgtgaggtcagctaaaactaattatttgaggtcatacaaatgactcaaaattcttagagaaaccatgggtttggagaggaatcctcatatatatttcagaagaggagaaaaaataagatagaaataagatcttgtatttt

SEQ ID NO: 1181 - DNA, 453 bp, Homo Sapiens
  misc_feature (376)..(376): n is a, c, g, or t
  misc_feature (431)..(431): n is a, c, g, or t
tggagaagattgatagattttactacacaataattaaacaccgtaaaagatactattctaaataaagagttaagacaaatggtagattgaaagaaaatatttgtaacatatatgacaaaggattaatagccttaacagatcaagaatattaattccatcagaaaaagagtaaaaatgggaagacgacatgaaaaggcaatgcacagcggaggaaggcagcaacatgttaatcagtcccccatccactcggtgcctgggccagggaggggccccgctcccgccagcctcttcctagtgcagacatcactgctgcctaagggatgagtccatcaccatggaggacccaacgttaggcttccaaacagctttctggggncacagcttttgggagaggagttgcccttttttaaccaaaattcaaagttcctggntacaggggacatgttttttttt

SEQ ID NO: 1182 - DNA, 375 bp, Homo Sapiens
gttaatagcctttgcgatatttaaatgtgtgggttaatttttttatccagtttaataactttttattcctccctctacttctttggtttctctttctgctctgaagccgtggatacagaaatctctgcaggcaagttgctccagagcatattgcaggacaagcctgtaacgaatagttaaattcacggcatctggattcctaatccttttccgaaatggcaggtgtgagtgcctgtataaaatattctatgtttaccttcaacttcttgttctggctatgtggtatcttggatcctagcattagcaatatggggtacgagtaagcaatgactctcaagcaattttggggtcctgaagattgtaggctctagctcc

SEQ ID NO: 1183 - DNA, 346 bp, Homo Sapiens
atgcttttttttttttttttttgtctttttgtgagtgttttctgactgcaaaagaacagttcatcaaattacttatcttttaaaaaacacaatcacaaaatcatattcatatactgctactgtagtattagggaatcccaagcctaaacaggctgtttaattaaaaaaaaatgtaaggatgcttgtttaaacaactcagaaagcatttttcccccagaaatattacagtgataagggaaacgatctgaccacctaagcctcagttccacaatctccctctaaattctctggtctagaaaaccccatgctctctgggatgcttcttatgcttttcaggagtttccct

SEQ ID NO: 1184 - DNA, 407 bp, Homo Sapiens
gcgggcggggctcggccggggcaccggtgagtgccgggtgcagagggaggcggcactggtccgacgtggggcggcacgatgaagcgcccagttcaatacaaacaagtgagtttgactcatcagatgaagagcctattgaagatgaacagactccaattcatatatcatggctatctttgtcacgagtgaattgttctcagtttctcggtttatgtgctcttccaggttgtaaatttaaagatgttagaagaaatgtccaaaaagatacagaagaactaaagagctgtggtatacaagacatatttgttttctgcaccagaggggaactgtcaaaatatagagtcccaaaccttctggatctctaccagcaatgtggaattatcacccatcatcatccaatcgcagat

SEQ ID NO: 1185 - DNA, 2066 bp, Homo Sapiens
tcgcgctggagggcagccgcttagcgtgcgctcttgtccccgcaggtcgcagccaggcggcgggcgcgcccagccccggcccctggagcgcccgccgcggtccccacctccatggacgccttcaaggggggcatgagcctggagcggctgccggaggggttccggccgccgccgccgccaccccatgacatggggcccgccttccacctggcccggcccgccgacccccgcgagccgctcgagaactccgccagcgagtcgtctgacacggagctgccagagaaggagcgcggcggggaacccaaggggcccgaggacagtggtgcgggaggcacgggctgcggcggcgcagacgacccagccaagaagaagaagcagcggcggcaacgtacgcacttcacaagccagcagttgcaagagctagaggccacgttccagaggaaccgctaccccgacatgagcatgagggaggagatcgccgtgtggaccaacctcaccgagccgcgcgtgcgggtctggttcaagaacaggcgagccaagtggcgtaagcgcgagcgtaaccagcagctggacctgtgcaagggtggctacgtgccgcagttcagcggcctagtgcagccctacgaggacgtgtacgccgccggctactcctacaacaactgggccgccaagagcctggcgccagcgccgctctccaccaagagcttcaccttcttcaactccatgagcccgctgtcgtcgcagtccatgttctcagcacccagctccatctcctccatgaccatgccgtccagcatgggcccaggcgccgtgcctggcatgcccaactcgggcctcaacaacatcaacaacctcaccggctcctcgctcaactcggccatgtcgccgggcgcttgcccgtacggcactcccgcctcgccctacagcgtctaccgggacacgtgcaactcgagcctagccagcctgcggctcaagtccaaacagcactcgtcgtttggctacggcggcctgcagggcccggcctcgggcctcaacgcgtgccagtacaacagctgaccgccccgccgcaccacgcgggccggcggccggagcggggaagggcgcgggcgcggaggacgcacgcggggccccggctcgcaagccccagctcaccgcgccgcggacctcacacctgcgcagccccctcctcccacttcccactccgggttggttttgtgtttgcttttccggaccccactctgccctccaaaaagacaaaaaaaaaaaaaaaaaaaaaagcaaaaagacgtcggagaaaagtgccgcgaaaaaatggatgagttgcaatttctctcgggatggcgcgggtggtgtgtgtgtgttcccacgggccccggaggcccactccgcggagggcacgcggcgcggtaggcaagcgccgaggcccagcggccgggggaggacaacctcgtatcccgcgcccccgccgcgctggatccggactgagcggccgggcctgcggactggatgtgcggggcctggacttgcctaggatttcccgaccccgtacaaaccaagttgccctctccgagctaggcccggccgagagcgccttaactcgagtcggatccgtgttggggcgggcgttgggtttggggggacggtgcccccagcccaggatcgggcactcagtggagccgcacacggcccggcgcgcctggtagagcctcgctggccccgcgccccggagccctatattaaggccacggagcgacagcgggcagtgcgggcctggcgggaggtgggggaggtccatctcagaacaccccagccttgagcttagctgcaggcccaggccctctgctctgctcccgggctaggaggtggccctctgtctgggcgaacagccccctcctcaccgcccgccgtgcaagagtcgagccggcagagcaaggggcgcggccccagggccctgcgcccactttgcacacccgctctccggcccgcgcccctgtttacagcgtccctgtgtatgttggactgactgtaataaatctgtctatatcgactaaaaaaaaaaaaaaaaa

SEQ ID NO: 1186 - DNA, 244 bp, Homo Sapiens
ggcacgaggcagccgctcgcccctcttttccatgtatccgtccaggatcccatgacagattctgttgtcacgtctccttacagagtttgagcggtgctgaactgtcagcaccatctgtccggtcccagcatgccttctgagaccccccaggcagaagtggggcccacaggctgcccccaccgctcagggccacactcggcgaaggggagcctggagaaggggtccccagaggataaggaagcca

SEQ ID NO: 1187 - DNA, 631 bp, Homo Sapiens
tcggcacgagggcccagccgaagtgtccgcgatagcccctggcgaaggcgatggcggaggcggcggctttggctcctggctggacggacggttggaggcactgggagtggaccgagccgtttatggagcctacatcttgggtatcctgcaggaggaggaggaagaagagaagctggacgctctgcaggggatcctctctgctttcctggaagaagattccctccttaatatctgcaaggagattgtggaacgatggtcagaaactcagaatgttgtcaccaaagtgaaaaaagaagatgaagtacaggccattgccaccctaattgagaagcaggcacaaatcgtagtaaagccaaggatggtgtcagaagaggagaagcagagaaaagctgccctcctggcccagtatgctgatgtgacagatgaagaggatgaagcagatgagaaggatgattcaggtgctaccacaatgaacattggttctgacaaacttctgttccgaaacaccaatgtggaagatgtccttaatgcccgaaaactggagcgagactcacttcgggatgaatcccaaaggaagaaggaacaggacaagctgcagagggagagagacaaactagccaagcaggagcgc

SEQ ID NO: 1188 - DNA, 443 bp, Homo Sapiens
cttctccattccttggctttctggagtacagtgcctttgcctgtgaccacgaccgagagaggtctgttcttgagtgtggttgcagagttgactggggtacagtctggggcagaggcaggcgtgacagctttggggcgggggctcacattctccaggtgggtggtgtccacggtggtgcctaacgtcacaggccctgcctcagccttcttcaggttgtccttcacctccatgatgctgagctccaggtccacgcgcctgctctcctcgccccggcactcctcgtcaatttccttcagcttctgctccaggctcgccaggacttccttgtctgtgcatttcagtagggtttcctttagctcccgtttctctttccggagctgagccaggtgcccccggatttcttctttcttcttttcaagcctctccttctcctctgtgtaccg

SEQ ID NO: 1189 - DNA, 5071 bp, Homo Sapiens
ggcctgatagcgcggcgtgtggaccggccgaagagcgcgcccagagcggcgccgtcgcgagccacagcccgagccggtcccagccgagccgagccccagccgagccgagccggcccgagcgctccggtgcccgcagccatgccggccggccgcgcgcgcacctgtgcgctgctcgccctctgcctcctggggccccaggatttcgggccgacgcgcttcatctgcacttcggtgccggtggacgccgacatgtgtgccgcgtccgtggccgcgggcggcgcggaggagctccggagcagcaatgtgctgcagctccgggagaccgtgctgcagcagaaggagaccatcctgagccagaaggagaccatccgcgagctgaccgccaagctgggccgctgcgagagccagagcacgctggaccccggagccggcgaggcccgggcgggcggcggccgcaagcagccgggctcgggcaagaacaccatgggcgacctgtcccggacaccggccgccgagacgctcagccaactcgggcaaactttgcaatcgctcaaaacccgcctggagaacctcgagcagtacagccgcctcaattcctccagccagaccaacagcctcaaggatctgctgcagagcaagatcgatgagctggagaggcaggtgctgtcccgggtgaacaccctggaggagggcaagggggggcccaagaacgacaccgaggagagggtcaagatcgagaccgccctgacctccctgcaccagcggatcagcgagctcgagaaaggtcagaaagacaaccgccctggagacaagttccagctcacattcccactgcggaccaactatatgtatgccaaggtgaagaagagcctgccagagatgtacgccttcactgtctgcatgtggctcaagtccagcgccacgccaggtgtgggcacgcccttctcctacgctgtgcccggccaggccaacgagctggtcctcattgagtggggcaacaaccccatggagatcctcatcaatgacaaggtggccaagctgccttttgtcatcaatgatggcaagtggcaccacatctgtgtcacctggaccacccgggacggggtctgggaggcctaccaggatggcacgcagggtggcagtggcgagaacttggcgccctatcaccccatcaagccccagggcgtgctggtgctgggccaggagcaggacactctgggtggtgggtttgatgccacccaggcatttgtgggtgagctggcccacttcaacatctgggaccgcaagctgacccccggggaggtgtacaacctggccacctgcagcaccaaggctctgtccggcaatgtcatcgcctgggctgaatcccacatcgagatctacggcggggccaccaagtggaccttcgaggcctgtcgccagatcaactgagcacggcaggccaggctgagccgcccgccctcgccccctgcttgtgcggcgatgatctgtttgtgcgtctcttctctcccttttccccaggaatgaaccgaggccgtcgccctgcacacgcacacgcacacagcctggttttgtcctcatgcacacgaagcagcccctgctcccatctgtccctgaggaagccccacttctctgtaggagcccggactctctcagcatgccccattcacagctgaagtgggtgctgcaacgtcttgaacaaggcagaagttggtgagaggatctgtgtgtgcgtgtctacatgtgtgtgtctacgtgtgtgcgtgcgtggctgggggaggccttttctttgaggacgtacctcatttccttctttcttctggctttggaaaaatctcatgatgaaaattcatatttgccaactttgttagctgcgtgcgtgctttggggttggtgcaacctcagtacacgcatttgtctttgtttgcaaacctttctcagagcgacatatctttatattgatgtaataaatgtcttttagtggtttgtcaaaggccgggggcgggggctctctacagagaatttttattttgtaatagaagtgaactgtctctgaaggtgaaggcaggccgtcctgggatggtaccctgtgctctcccgtggaggagaggggatggctgaggacactggcccttacccagggcgaacagcatccatccctgctgtttgcatcttgagagcagcatggggcctgggaggtcggcctgtgtgcccagctcagctagctctgccccaggacggccctgccctcgaccttcccacctcctcagatcctgcaaggctgggtctgcccctcccttctcacctctggagctgtgctgcactgcttcccagagagggccctgagagaggagcgtgccacccaccagggaagccgggccccagcacccctctcctttggcctcccggagtgcagaccagaggggaccttttaaggaaagaagccgtgtttcgatgaagacctggccacatggggcactgggacttcaacccagcccatcggtgggaaggtcctttttgggggactttgacagccatatccctcccagcacaccaggcgccaggtgagctggttcagacccctccagggtactccagagacctcacgtgtggagccaggcctggccaggcaggggcctgaaacccactcctccatctcatgggctcacggcctacacgagcccacaagctgccactggccggcgacactgacacctgagcagtgtccagaacctttttgcctttttttgttccccgtgaaaagcaacatggacatttccttctagtccttccaaggaggggagagaagtgtatgtgcatttgtgtgtgtgtgtgtgtgttgtgtgtgtgtgtgcgctaagtgagaaagagagcaggctcgggaggccctgcccagggtaggaggagcttcctgctttgcaccatctggtggtcgcaccctggagggcaccccgactctgtctccaggagtctcatcagcaaaccgctgacaagtctttctagaaattctactgcactgcctggctcagctgcacgctgcagacatttctgcaggaggagcaggtgtttctgtcttctgttccttctagggccacctgtccccttaaacacaggtccacgttgtgtcaagaacctagtgcatctgtgtgtgtctgtcagtgtctctgtgtcagtgttctcgtgggtgtctgcacggtaccggcccgccttctgcaatcatcactcccgcagagggggtgcagatcaggcgccgtgctgcggttgttgttcaacagtgctttttcttagatagcgtcttcctcagcgcccgtcggttgtggcatccttgatctcagggatcttctccgtttgcatgtcctcggagtggcgtgttccttctccctgggtccgacatgtgttcccgcacctgcatggactgccccggttctgtgttgtgtgccgagtgccgcccagtgttctgtgaccacccgtgtagctactgaaaatggctgggtaagcaagtcaagggtgttggaggaggtcaagagagagctcagtttccctctccccctccccaaacacaccaagaagcatttttaacgtgtaggttgagaacaagcctaaaggattcccacagctgggagccagcaagagagcttggagtcgcctctctagaccagatctagccccaccctcactccagccatctcggagcccttgtgtaggcaacgccggtgcgcggctgtgtggggtgctccctgccagcacctccggccagccccgcccctgccgatctactggaccgcagaccaccttctgcccccgtggccaggtgggagctgtccgttcaggaccatgagccatcctctgccctgactagcgaggggcagagcacaccccagtgcttacgcctccacccctgcagcctcctggcccgctcaccttcctcacccctcctctgacccacccatggtgccagggccgaagctgacctttagctccctcctgcccttgctagggtctgagccaagcccctcgactcctcactgtgttgacacttggcactttgctggccccgagaaggtcgatgacacagccgcaaatctaatccacgtagttcccatttactccttaatctgattgatgttccctcttgcactgaataatacatgcctctctcaggtaagccattttataaaacaagaagataaaaagcactgttgaggcagtgtttgcttttgccgagctggtgtccgacagctccctgggtgtccggggtgggagagctgttgacagaagctctccgggcctcagggcttagatcccacttgagtcgtaagccttcttgcttttgataacacagtattatttctcttactgtagaagaaaaagtttattaccaaacaagagtatttttatgaaagaaaaggacaaacctataaattaactcaacctatatctcccttgaaaatactttcaggctccaccaaaacgtagaactgaaagcatgtattttggaagaaagagatacattttgtatgctttcttttccttttgtagattcccagtttattttctaagactgcaaagatcactttgtcaccagccctgggacctgagaccaagggggtgtcttgtgggcagtgagggggtgaggagaggctggcatgaggttcagtcattccagtgagctccaaagaggggccacctgttctcaaaagcatgttggggaccaggaggtaaaactggccatttatggtgaacctgtgtcttggagctgacttactaagtggaatgagccgaggatttgaatatcagttctaaccttgatagaagaaccttgggttacatgtggttcacattaagaggatagaatcctttggaatcttatggcaaccaaatgtggcttgacgaagtcgtggtttcatctcttaaacacagtgtgtaaatttattcaactaacgatgggaaatgtattacttctgtacacagtggactgaagtgcaatttgttgaaagggaacaagtcattgaagagaaaaaaaaaaagcccaatacttagagtcccaattttgtctcatttgccaaaaaaa

SEQ ID NO: 1190 - DNA, 6057 bp, Homo Sapiens
ctcgaggaccggctcttccaccagttcaagcgcttcggcgagatcagcctccgcctgtcgcacacgcctgagctgggccgtgtggcctacgtgaatttccggcacccacaggacgcacgcgaggcccgccagcacgccctggcccggcagctgctgctctacgaccgcccgctcaaggtagagcccgtgtacctgcgtggcggcggcgggagcagtcggcgaagtagcagcagcagcgccgccgcttccacgcctcccccagggccgcccgcgcccgccgacccgctcggctacctcccgctacacggaggctaccagtacaagcagcgctcgctgtcccccgtcgctgccccgcccctgcgggagccccgtgcccgtcacgccgccgcagccttcgccctggatgccgctgctgccgccgccgtgggactgtcccgggagcgggccctggactactacgggctgtacgacgaccgtgggcgcccctatggctacccagctgtgtgtgaggaggacctgatgcccgaggatgaccagcgggccacgcgcaacctcttcattggtaacctggaccacagcgtatctgaggtggagctgcgaagggccttcgagaaatatggcatcatcgaggaggtggtcatcaagaggcctgcccgtggccagggcggtgcctatgccttcctcaagttccagaacctggacatggcccatagggctaaggtggccatgtcgggccgagtgattggtcgcaaccccattaagataggctatggcaaggccaaccccaccactcgtctctgggtgggtggcctgggacctaacacgtcactggcggctctggcccgagagtttgaccgctttgggagcattcggaccattgatcacgtcaaaggagatagctttgcctatattcagtacgagagcttggacgcagcccaggccgcctgtgctaaaatgaggggttttcccttgggtggaccagaccgcaggctccgcgtggattttgccaaagcagaggagactcggtacccccagcagtaccagccctcgccactccctgtgcattatgagctgctcacagatggatacacccggcaccgcaacctggacgccgacctggtgcgggacaggacgcccccacaccttctgtactcagaccgagaccggacttttttggaaggggactggaccagccccagtaaaagctctgaccgccgaaacagccttgagggctacagtcgctcagtgcgcagccggagtggtgagcgttggggggcagatggagaccgtggtttgcccaagccctgggaagagaggcggaaacggagaagcctttccagtgaccgtgggaggacaacccattccccatatgaggaacggagtaggaccaagggcagtgggcagcagtcagagcggggctccgaccgcacccctgagcgcagccgcaaggagaaccactccagtgaagggaccaaggagtccagcagcaactccctcagcaacagcagacatggggctgaggaacggggccaccaccaccaccaccacgaggctgcagactcttcccacgggaagaaggcaagagacagcgagcgcaatcaccggaccacagaggccgagcccaagcctctggaagagccaaaacacgagaccaaaaagctgaagaatctttcagagtacgctcagacactacagctgggttggaatgggcttctggtgttgaaaaacagctgcttccccacgtctatgcatatcctagagggggaccagggggtgatcagcagtctcctcaaagaccacacttctgggagcaagctgacccagctgaagatcgcccagcgccttcgactggaccagcccaagcttgacgaggtcacacgacgcatcaagcaggggagccccaacggctatgcggtcctcttagccacccaggcaacccccagtgggcttggcactgaggggatgcccacagtagagcccggtctgcagaggcggcttctcaggaacctggtctcctacttgaaacagaagcaggccgcaggggtgatcagcttgccagtgggggggtccaagggcagagacggcacaggcatgctctacgccttcccaccctgcgacttttcccagcagtacctccagtcagcactaaggacattgggcaagctagaagaagaacacatggtgatagtcatcgtcagagacactgcctagcccaagcctgtctttcccagcgtcatgtttgtgtcacaaaagcagttattttaaaatctgatcccctctctaccctaccactttggtttgaattatctcctgggttattttggttcatttgggtggggatcaaagtcctgtccaccaccaaaactaagttcttagattttgggggatttttttttttaaacgatgagaagggaatccggttatgttgatttctagtgtacaagatactgtctgctgtggttctgtatttttttattttttgaccaactgtatggaaagttgtcagtaaaacctttgacagaggatggatttttaaacctgttcagagtcctggtttaatcaatcaagctaaaagaatcgaagacatccctagtgcatgtacacgaatgccctacgtcatccttccagcaccactgctgcatgggtcactctcggcctctcaattcttcaggctcagtctggactctacttatttacactcatttttatcttggctgacagcaggcaagcttcagtttgggctgtggacgctgccacacaagcctgagtagagcccatgcaaaggaagggatggggtgagcgcaaggcctgtggtcagcagctactgatggttttttctgccttaaaccgtgtgtgtgtccatcatcatcagtttgagctgtggctgtttgtttgggacagagtgcccactcagcatgtttggcagcaggtagccttcagcagctgtgtagtcttgtacaaggagaagctgtgcactgttgatgccagggggtctcggggcccctgatctgtccaggctcctggttcggcctactttctagcctcactcagcccagggatagccagtgttgggagacagagttgcctcaggttcccaggggcccgggagtccaaatactggaatggagggttggaggcagccttccttggatttactcatgaactttgcctagttgtttgtgatttttggctttctctggtcgttcaggggtgatgggtaatagagcaggcccgtgtccagtcatacctagagatttgtggggggatactgaacctctagactgaagtacttaccggggagcacagtggactaggggatgcccttgataatgacggtttcctaggtgcaagatcagagcatgtgcctacaccttgtgccctgatgccgaggtggagaccattgggaaataattaatagatatttttctggggggaaatcacaagtcactgaggtgtttgtttgtttgttaggcagtgctagagcttgaagccactcaagccagttggggaggaaagggatgcggaggtaccctctagctgggaagaagggtgagattctgtcttcttccctgtctcaagtaagtaaggaaggtactgcggacagtgcgggccagggaggaaaaccagagcacacagttttgtcaccatggaacaccccaaatgccattcttcagcgtgtctggtaccttggatgttcaaacagggaacactgtcagggctgaggagaacagaagctctggtaagcgaatgagcccctagatgataaccaggaactccaggttctgctggccgtggcatcctctctccaggtctgctcccttaccggagctaggataaggtagcatgagtgacacctgagattagaggctggggctcactgcaggctgtggagaggtcatgctggtccacaggaacacttggcagtgctctcgtagacccctcggtgatgtggaatggacaggtgcctcgcaagagagcaagcacgttcataacaaaacagcaacacaaagacatgttaagcatgtttatttatttgcctgtttttgtttttttacttgagctgtggtcacagctgccaggtacctaagcaagtcagttgggtacagcaggacacgccaccattccagggtagctggtaccgccagaaacaggagtgggtcttgtcctgttgcaggcacactgcagtggttttcctgcagctctccaacaaacgcctgagtcacaggccagagctgccttggtatgttgttaagtccaaaacttcttctctgggctacctatcttccttcatgaagcaggtgctcaggacccggaagaatcatctacctcccagctttgtgagacagaaccaagtaaaaggaaacatgctagaaaacgtgcctagagaagacacttcaacctttgccttatccaacccctcttcagagaaaggtgtcccatggccccaaaaagaactgccaagttttggtgaggagtaacaccctggcatgacattccttctctttcctggccctcaaccacttccttcctttggctcttaagacctagcaggttctgtgaactctcaggccttggccagcactagttaggggaggtcaggtggtcaatgtcctggtgattttatgagactgccccactgagaaaacttacttcaggcatccagtgcccccacccagggttcaggccctgtctaaggtgttgcttaaagacaaaaaggcaacatgtgcctcactggtggtgtgccactgttctcatgctgcctcctaagtgactccgattttcagccctggtagaataaggaagacagctgatgcctccttagccccttagcacatgttcctaaggtgtgttgtcaagccaacctgaattctgcctccctgttatagtccctgtctcccccacagagacctgtgggtgctcccagcagagttgagactggctccgttgagttaatgactagaatatagtgctttcactacttgattgttaacctgttttcttctgatgccatcagtaccagcagtcagactattccactggttaagtgtttactaccattaaagcgaggcatgaagcaaagagctgagtgagtcctctgctctccagaggaccaagaaatacctgtgtgacacagacccacttcagtgtgtacagcaaattctatagtgcttctgagcccagcagggctttacctgcccctggagagttttagccgtcttgtgtttcttgtttacttcacaaccaaatttgtcccctcttctctctgttaagggagagaagtcactttagctggataatacctatgtaacaaactgagcagctgttatttgggcaaaatcaaaggaagaaagagactatggtcttctatttattgtgggaaggaaaacagggtggggcgggtgagtgaaaaggtggaaatccctggtaccttgcctggtggttacacagtttaaccataggccaattttaggggcctctgaagtatctttctacaaacgcagacaagctccactacccctaacctgccaggatgctcaagtccactgtcacaatccctttcagaaaacattagtggccgctgccccagctacagagacggccgaaatgctttcactccttagctttgccaactccatcctccaaaacttcccagaatacctccctttccagttctaccaaatctgtacttgggagcagcctgctggatccagaacatgacaacagagagctgcgtccacagggaacaaagccctgacctctctctccacattacccttacaaaaacaggccctccccatgagagagctacacggcaggggcagacactgtgagtataagctactttcctccctggagtgctctatgtgggcagaacatgctctccttgcctctcctggaaggtgtcttctctatggcctggctagagctgcaaaaaagggacacaccccacttcggtaaaagaaaatagggaaaggccataaacaaagacagacttgtagtttattttgtattttttttaaataaatacactttacattaagaaaaaaaaaaaaaaaa

SEQ ID NO: 1191 - DNA, 452 bp, Homo Sapiens
  misc_feature (8)..(8): n is a, c, g, or t
  misc_feature (61)..(61): n is a, c, g, or t
  misc_feature (63)..(63): n is a, c, g, or t
  misc_feature (392)..(392): n is a, c, g, or t
cgcacgtngggggcgggagcggtgcgcgcaacttctcgggccaataactgcgcagcgcggngnacccgggtggggaagctggagctgttgcggggtccgcggggaagtcttggcggtggagccatggtcggccagctgagcgagggggccattgcggtgaggaggccatcatgcagaagggggatacaaacataaagcccatcctccaagtcatcaacatccgtcccattactacggggaatagtccgccgcgttatcgactgctcatgagtgatggattgaacactctatcctctttcatgttggcgacacagttgaaccctctcgtggaggaagaacaattgtccagcaactgtgtatgccagattcacagatttattgtgaacactctnaaagacggaaggagagtagttatcttgatggaattagaagttttgaagtcagctgaagca

SEQ ID NO: 1192 - DNA, 2053 bp, Homo Sapiens
catctttgatgagggcagagctcacgttgcattgaagacgaaacctcggggaggtcaggcgctgtctttccttccctccctgctcggcggctccaccacagttgcaacctgcagaggcccggagaacacaaccctcccgagaagcccaggtccagagccaaacccgtcactgaccccccagcccaggcgcccagccactccccaccgctaccatggccgaagacgcagacatgcgcaatgagctggaggagatgcagcgaagggctgaccagttggctgatgagtcgctggaaagcacccgtcgtatgctgcaactggttgaagagagtaaagatgctggtatcaggactttggttatgttggatgaacaaggagaacaactcgatcgtgtcgaagaaggcatgaaccatatcaaccaagacatgaaggaggctgagaaaaatttaaaagatttagggaaatgctgtggccttttcatatgtccttgtaacaagcttaaatcaagtgatgcttacaaaaaagcctggggcaataatcaggacggagtggtggccagccagcctgctcgtgtagtggacgaacgggagcagatggccatcagtggcggcttcatccgcagggtaacaaatgatgcccgagaaaatgaaatggatgaaaacctagagcaggtgagcggcatcatcgggaacctccgtcacatggccctggatatgggcaatgagatcgatacacagaatcgccagatcgacaggatcatggagaaggctgattccaacaaaaccagaattgatgaggccaaccaacgtgcaacaaagatgctgggaagtggttaagtgtgcccacccgtgttctcctccaaatgctgtcgggcaagatagctccttcatgcttttctcatggtattatctagtaggtctgcacacataacacacatcagtccacccccattgtgaatgttgtcctgtgtcatctgtcagcttcccaacaatactttgtgtcttttgttctctcttggtctctttctttccaaaggttgtacatagtggtcatttggtggctctaactccttgatgtcttgagtttcatttttcattttctctcctcggtggcatttgctgaataacaacaatttaggaatgctcaatgtgctgttgattctttcaatccacagtattgttcttgtaaaactgtgacattccacagagttactgccacggtcctttgagtgtcaggctctgaatctctcaaaatgtgccgtctttggttcctcatggctgttatctgtctttatgatttcatgattagacaatgtggaattacataacaggcattgcactaaaagtgatgtgatttatgcatttatgcatgagaactaaatagatttttagattcctacttaaacaaaaactttccatgacagtagcatactgatgagacaacacacacacacacaaaacaacagcaacaacaacagaacaacaacaaagcatgctcagtattgagacactgtcaagattaagttataccagcaaaagtgcagtagtgtcacttttttcctgtcaatatatagagacttctaaatcataatcatccttttttaaaaaaaagaattttaaaaaagatggatttgacacactcaccatttaatcatttccagcaaaatatatgtttggctgaaattatgtcaaatggatgtaatatagggtttgtttgctgcttttgatggctacgttttggagagagcaatcttgctgtgaaacagtgtggatgtaaattttataaggctgactcttactaaccaccatttcccctgtggtttgttatcagtacaattctttgttgcttaatctagagctatgcacaccaaattgctgagatgtttagtagctgataaagaaaccttttaaaaaaataatataaatgaatgaaatataaactgtgagataaatatcattatagcatgtaatattaaattcctcctgtctcctctgtcagtttgtgaagtgattgacattttgtagctagtttaaaattattaaaaattatagactcc

SEQ ID NO: 1193 - DNA, 405 bp, Homo Sapiens
tttttttttttttttttttttttttttttgtttttggtggttggttttccatccttttgcttggcaggtttctgctaatagcttcaacctcaagagtcccattatacagacactaatagcacctactatgtgtcagtctgtagtgcctactatgggccaggcattggagataatataatgatgaacaagataaacatgacatttggaaaagagagtctggttcccactctcagcccaccccaaagagaggccagaattgggcttccaaagaaatcagatgcccttgcatcacctccctgaagaggacgggtgaagctttggtgtctgcagagaatttggctggacaatccccctgttttggaacgacgcgcgaaggagctgccatctgtgtttaagatgagaagt

SEQ ID NO: 1194 - DNA, 453 bp, Homo Sapiens
ttttttttttttttttattgcaaaactgaggtttaaaggacaaatacattatccatttaaaaacagatatctaagacaaaataactcaaacattctgaggtcagatacttgcttatgcacactgacatccacaactgctaccggtgcggaagcaacgccaggcctggttctgtatagtcacagccgagctgaacaccttagctccgacacctggatgtgttctaaagaatgacaggctgaaactgtagtttggtttaactactggctttgttgcaataatcctcgaataccacacagtggcagcttttggcatcataaaaatgggacataactgaagggaaggcttcacacatcacaaagaccgggttggttaatgactaaatctcactacatgaatacgcaatcttaaattactgtgcttatcagccatttctcgcattcatgtgtagaaaa

SEQ ID NO: 1195 - DNA, 2559 bp, Homo Sapiens
agattcgcagtggtcgcttcttctccttggatttgttaaggattccaagtaactcttatttggagagaagacgatctgcacttcgcattttggcattgacatttaattttagggtcctttatatagaagggagactacatgaatgtgtaagatcttggaggaagacagcagagagagagagagagagcagagatcccagggttaaaagttggagaaatttcacagtacatcatccaaaagaggagtccatgatggaggcagaggtaaacttggagaggacaggaagatgtcacccaagcgcatagctaaaagaaggtcccccccagcagatgccatccccaaaagcaagaaggtgaaggtctcacacaggtcccacagcacagaacccggcttggtgctgacactaggccagggcgacgtgggccagctggggctgggtgagaatgtgatggagaggaagaagccggccctggtatccattccggaggatgttgtgcaggctgaggctgggggcatgcacaccgtgtgtctaagcaaaagtggccaggtctattccttcggctgcaatgatgagggtgccctgggaagggacacatcagtggagggctcggagatggtccctgggaaagtggagctgcaagagaaggtggtacaggtgtcagcaggagacagtcacacagcagccctcaccgatgatggccgtgtcttcctctggggctccttccgggacaataacggtgtgattggactgttggagcccatgaagaagagcatggtgcctgtgcaggtgcagctggatgtgcctgtggtaaaggtggcctcaggaaacgaccacttggtgatgctgacagctgatggtgacctctacaccttgggctgcggggaacagggccagctaggccgtgtgcctgagttatttgccaaccgtggtggccggcaaggcctcgaacgactcctggtccccaagtgtgtgatgctgaaatccaggggaagccggggccacgtgagattccaggatgccttttgtggtgcctatttcacctttgccatctcccatgagggccacgtgtacggcttcggcctctccaactaccatcagcttggaactccgggcacagaatcttgcttcataccccagaacctaacatccttcaagaattccaccaagtcctgggtgggcttctctggtggccagcaccatacagtctgcatggattcggaaggaaaagcatacagcctgggccgggctgagtatgggcggctgggccttggagagggtgctgaggagaagagcatacccaccctcatctccaggctgcctgctgtctcctcggtggcttgtggggcctctgtggggtatgctgtgaccaaggatggtcgtgttttcgcctggggcatgggcaccaactaccagctgggcacagggcaggatgaggacgcctggagccctgtggagatgatgggcaaacagctggagaaccgtgtggtcttatctgtgtccagcgggggccagcatacagtcttattagtcaaggacaaagaacagagctgatgaagcctctgagggcctggcttctgtcctgcacaacctccctcacagaacagggaagcagtgacagctgcagatggcagcgggcctctccccagccctgagcactgtgtcagttcctgccttttctcatcagcagaacagaatccttttcctcttttccttcctcctctttggaattttcctgggacctacagaataaagggggggatggacagggggttttcaaaaggaacatggctcactcagagctatatggttagacgtttctccccttttccctaccttccatggtcctggttggccctggctttgcctactagaaaaccaaaacttcccccctggggttttgtgcccactctctgagaagttggggctccatcaagccccattctagtcatgtgcccctttcctgtccctaacagtccacaggcaaacaaatggtacagtcataagagccatctgtcacggacccacgcccagaggaacgtgcagaaaaaagcagagctacatggctgtgggcaactataagccaaatatttggctcagaacaggtgtccatgggacaaaaaagaacgatcctccacttgaccaagaaaaaagtgattctcccagaagcacaaagcatactcttgcccctcaggtgttgcttgtgtacatcgtacccatccattcggcttcacctgcagccaacggcctggaatcgcaaagagacaccactctgggcagagcagagcagggtatggggtggggagagagggtggagggttttataaacaaacttaacagcaatattgaaaggaggtgggggattgagggagggacagagtgttggagggccagagactagtcctgagatggaaacagcaacttgtacagtggctgagaaaataggatatagttttgatttttttaattgtaaaatattttggagggagaacaaaatcttttaacattttgaataaatttagagttttataaaatagaaaaaaaaaaaaaaaaaaaaaaaa

SEQ ID NO: 1196 - DNA, 1365 bp, Homo Sapiens
gctgaaagaggctggcttggggccacggtgaaactgcctcctcaccatccgtcctgcctccctggcgcccccagagccttctgatgaagattgacgccttccactacgtgcagctggggacagcctacaggggcctccagcctgtgccagacgaggaggtgattgagctgtatgggggtacccagcacatcccactataccagatgagtggcttctatggcaagggtccctccattaagcagttcatggacatcttctcgctaccggagatggctctgctgtcctgtgtggtggactactttctgggccacagcctggagtttgaccaagcacatctctacaaggacgtgacggacgccatccgagacgtgcatgtgaagggcctcatgtaccagtggatcgagcaggacatggagaagtacatcctgagaggggatgagacgtttgctgtcctgagccgcctggtggcccatgggaaacagctgttcctcatcaccaacagtcctttcagcttcgtagacaaggggatgcggcacatggtgggtcccgattggcgccagctcttcgatgtggtcattgtccaggcagacaagcccagcttcttcactgaccggcgcaagcctttcagaaaactcgatgagaagggctcacttcagtgggaccggatcacccgcttggaaaagggcaagatctatcggcagggaaacctgtttgacttcttacgcttgacggaatggcgtggcccccgcgtgctctacttcggggaccacctctatagtgatctggcggatctcatgctgcggcacggctggcgcacaggcgccatcatccccgagctggagcgtgagatccgcatcatcaacacggagcagtacatgcactcgctgacgtggcagcaggcgctcacggggctgctggagcgcatgcagacctatcaggacgcggagtcgaggcaggtgctggctgcctggatgaaagagcggcaggagctgaggtgcatcaccaaggccctgttcaatgcgcagttcggcagcatcttccgcaccttccacaaccccacctacttctcaaggcgcctcgtgcgcttctctgacctctacatggcctccctcagctgcctgctcaactaccgcgtggacttcaccttctacccacgccgtacgccgctgcagcacgaggcacccctctggatggaccagctctgcaccggctgcatgaagacccccttccttggtgacatggcccacatccgctgagggcacctttattgtctgggacaggccctcagcccctcctgccccatccacccagacaagcaataaaagtggtctcctccctgtgcaaaaaaaaaaaaaaaaaaaaaaa

SEQ ID NO: 1197 - DNA, 6237 bp, Homo Sapiens
ctaagatggcgacgcctttggcggtaaattcggctgctagtctatggggtccttacaaagacatttggcataaagtgggaaatgctctttggagaagacaacctgaagctgttcaccttcttgataagattttgaagaaacacaaacctgacttcatctcattgttcaaaaatccgccaaaaaatgttcaacagcatgagaaggttcagaaagccagtacagagggagtcgccattcagggtcaacagggaactcgacttcttcctgaacagctcattaaagaagcctttattctcagtgacctttttgatattggagaattggcagctgttgagcttcttcttgctggagagcatcaacagccacattttcctggccttaccagaggattagtagctgttcttctgtactgggatggaaagcgatgcattgcgaattccttgaaagccttgatacagtctagacggggaaagacatggaccctagaactcagtccagagctggcttccatgacaacacgctttacagatgagctgatggagcaaggattgacttataaagttcttacgctggtgtcacagattgatgtgaataatgagtttgagaaactacagcgagagagaggtttgggcagtgaaaaacatcgcaaagaggtttctgatctcattaaggagtgcaggcagtctcttgcagaaagcctttttgcctgggcttgccagtcacctttaggcaaagaagacactctcctcctcattggacatttggaaagagtgacagttgaggctaatggctcactggatgcagtgaatctggctcttcttatggcgcttctatactgttttgatatcagttttatagagcaaagcacagaggaacgagatgatatgattcatcaacttccactgttgacagaaaaacagtacattgcaacaattcactctcgtcttcaggactcacagctttggaaactgcctgggctccaagccactgttagacttgcctgggcgctggcattgaggggaatatcccagctacctgatgtgacagctctggcagaattcacagaggcagatgaagcaatggcagaactcgcaattgctgacaacgttttcctgttcctcatggaatctgtagtggtatcagaatacttttatcaggaagaattttatattcgcagagtccataatctcatcacagatttccttgcacttatgccaatgaaggtgaaacagctgaggaatcgggcagatgaagatgctcgaatgattcacatgagtatgcagatgggtaatgaaccccccatttcacttagaagggacctggaacacttaatgcttttgattggcgagctatataaaaagaacccttttcatctggagcttgctctagaatattggtgtcccacagagcctcttcagactccgactatcatgggctcttatctaggggtggctcatcagcggccccctcaacgccaggttgtcttgtcaaagtttgttaggcaaatgggtgacctgttgcctccaactatttatattccttatttgaagatgctccagggattggccaatgggcctcagtgtgcccactactgtttcagcctgctcaaagtcaatggtagtagtcatgttgaaaatattcagggagcaggtggcagtcctgtttcctgggaacatttctttcactccttgatgctttaccacgaacaccttcggaaggatcttccaagtgcagatagtgtccagtaccgtcaccttccttcccgtggcatcacccagaaggagcaagatggattgattgcttttttgcagctcacgtctaccatcattacttggagtgaaaatgctcgcttggccctctgtgaacaccctcagtggacccctgttgtggtgattctgggactcctccaatgcagtattccccctgtcctaaaagctgagctactgaagacactcgcagcttttggaaaatctcctgaaattgctgcttccctctggcagtcattggaatacactcagatactgcagaccgtgaggattccaagccaaaggcaagctattggtattgaggttgaactaaatgaaatagaatcccggtgtgaagaatacccattgactcgggccttttgccagcttattagtactctggtggagagctcatttccttctaatttgggtgctggactgcggccccctggctttgacccttatttgcagttccttagagactctgtgtttctacgattccgtacaagagcttaccggagagcagctgaaaagtgggaagttgctgaggtggttttggaggtgttttataaattgctcagagattatgagcctcagcttgaagattttgtagaccagtttgtggaactacaaggagaagaaatcatagcctataagccacctggatttagtctgatgtatcatctgctgaatgagtcaccaatgttggagcttgctctcagtttactggaagaaggagttaagcagcttgacacctatgccccctttcctgggaaaaaacacctggagaaagcagtacagcattgccttgcacttctcaatcttactctgcaaaaggaaaatctttttatggaccttctaagagagagtcaactggctctaatagtctgtcctttagaacagcttttgcagggaattaatcccagaactaagaaggcagataatgtggtaaacattgccagatacctatatcatggcaatactaatccagaattggcttttgaaagtgccaagatcctctgttgtatctcttgcaactctaatattcagataaagttggttggagatttcacacatgaccagagtataagtcagaaactaatggctggatttgtggagtgtttggattgtgaagatgcagaagaatttgtacgtctggaagagggatcagaacttgaaaagaaattagttgcaattcgtcatgaaacaagaatccacatcttgaatcttctcattacctctctggaatgcaatccacccaatcttgctctctacctgttgggctttgaattgaaaaaacctgtcagtactacaaacctacaagatccaggagtgttaggttgccctcggacatgccttcacgccattctaaacatcttggagaaaggaacggaagggagaacaggcccagtggcggtgcgagaatctcctcagctggctgagctatgttaccaggtcatatatcagttatgtgcatgctctgatacatctggtcctactatgaggtacttgagaaccagccaggatttcttattttcccagttgcagtatctaccattttctaacaaagaatatgaaatatctatgctgaaccagatgtcatggcttatgaaaactgcctcaatagagctaagggtaacctctctgaatcgtcagcggtcacatacccagaggctcctacacctcttactggatgacatgccagtgaaaccatactcagatggtgaaggaggaatagaagatgaaaacaggtctgtttctgggttccttcactttgacactgctacaaaagtacgtcgaaaaattctaaatattcttgactcgattgacttcagtcaggagatccctgagcctttgcagttggatttttttgatcgggcccagattgaacaagttattgctaactgtgaacacaagaatttacggggacagacagtctgcaatgtcaagcttcttcatagggttcttgtagctgaagtaaatgcccttcagggtatggcagccataggacagagacctctactaatggaggaaatcagcactgtacttcagtatgtggtaggaagaaataaattgctgcagtgtcttcatgcaaaacgtcatgctctggagtcgtggaggcaactagtagaaattatactgacagcttgtccccaggacctcattcaggcagaggatcgacaactgattattcgtgatattttacaagatgtgcatgataagatactggatgatgaagctgcgcaagagttaatgcctgtggtcgccggggcagtgttcacactgactgctcacctaagccaggccgtcctcactgaacagaagcaaacatcagtcttgggaccagcagaggcccattacgcttttatgcttgatagttgcttcacctcacctcctcctgaagagaacccattagtgggttttgcttctattggagattcttcactttacatcatattgaagaaactgttagacttcattttgaagacaggtggtggattccaacgagtgaggactcacttgtatggctctctgctttattacttacagattgcccagagacctgatgaaccagacaccttagaagcagccaagaaaaccatgtgggaaaggctgacagcccctgaagatgtatttagcaaattacagcgagaaaacatagccattattgaaagttatggcgccgccctcatggaagtggtctgtcgagatgcttgtgatggtcatgagattggaaggatgctggccctggctctacttgatagaattgtctccgtggataaacagcagcagtggcttttgtatctttctaacagtggctacttgaaggtcctcgtagacagcttggtagaagatgaccgtactttgcagagcttactcaccccacagcctccccttttaaaagcactttatacttatgaatctaaaatggcatttctcacaagagtggcaaagatacagcagggtgcattagagctgctaagatcaggggtgattgtgagactagctcaatgccaagtctatgacatgcgcccagaaacggacccgcagagcatgtttggcatgagagaccctccaatgttcatccctaccccagtggatcgctaccgccagattctcctcccagctctccagctgtgccaggtcatcctcacatctagtatggcccagcacttgcaggcagcagggcaggtattgcagtttcttatttcacattctgataccatacaagcaattctgcgctgtcaggatgttagtgctgggtctttgcaggaattggctctgctgacaggaattataagtaaagcagcacttcctggaatattaagtgaacttgacgttgatgtaaatgaagggtctctaatggagctacagggacatattggaagattccagcgccagtgcttaggactactaagtcgctttggtggctctgacagactgcgtcagtttaaatttcaagacgataatgtggagggagataaagtaagcaagaaagatgagattgaactggctatgcagcagatttgtgccaatgtaatggaatattgccagtcactcatgttacagagttcccctaccttccagcatgctgtgtgtctcttcactcctagcctttcagaaacagttaatagagatggaccgcggcaagatacccaagctccagtggttccatactggcgcctgcctggtttaggcattatcatctacctgctgaaacagagtgctaatgatttcttcagctattatgacagtcatcgacagagtgtcagcaagctacaaaatgtagagcagcttcccccagatgagataaaagagttgtgtcagtctgtgatgcctgctggtgttgataaaatctccactgctcagaaatatgttctagcaagacggcgcttggtgaaggtgatcaacaatcgagctaaactgctttccctttgttcttttatcatagagacctgcctatttattctttggcgccatctggagtactacttgttacattgcatgcccacggattctcaagattccttatttgcctcgagaaccttgtttaaaagcagaagactgcaagattccttcgcctcagaaaccaatctagattttagaagtgggctggctatagtgagccaacatgatttagaccagcttcaggctgatgcaatcaacgcttttggagaatcactacaaaagaaacttctggacattgaaggattatattcaaaagttcgatctcgatatagtttcatacaggctcttgtcagacgtatccgtggcctcttgaggatatcaaggaactgagagcccgtgcttatgctcttctatgagagagatgaattggggagaattgtctccattttatagattagtttctttctaaattatgaccaaaaatattttgctatttctttctttgtatatggacatcttttctgtaaacttcttcccctagttccatcctcactagtaaaaaataaatactttttaaaaaaac

SEQ ID NO: 1198 - DNA, 442 bp, Homo Sapiens
  misc_feature (191)..(191): n is a, c, g, or t
  misc_feature (193)..(193): n is a, c, g, or t
  misc_feature (245)..(245): n is a, c, g, or t
  misc_feature (438)..(438): n is a, c, g, or t
tttttttttagaccttcatcttctttattttatatatgatgcttcttttaatgcagccaaaagtgatatttgcttttctcagaaccataatcgatacaagatgcagtgaccaattcattccttaaaacacctgggctccttaaggggctagaagacacaagttacatccagcccatcagggagccagaggngnaggggtccccagccaagctctggcaggcctgccatggggcgagcctgtaccntgcagccagaggtgtcaggaggcctggggaagggtgggcagaggcagctgggctctcagtcctgggaaccggagaccaagggctgctcatcaagttccgttcaggcaagggcggcctcatctgtgcctggtagattctaactgcttccaaggtagaggaggacgcgttcaggaaattcgttttcaattgtcancttt

SEQ ID NO: 1199 - DNA, 383 bp, Homo Sapiens
  misc_feature (348)..(348): n is a, c, g, or t
  misc_feature (373)..(373): n is a, c, g, or t
taaaagataaggtcttactctgtcgctcaggctggagtagttggtgtactccagcctggaactccgaggctcaagcaatcctcccgcctcagcctcccaaagtgctaggattacaggtgtgcatgagccaccatgcccagccctatctattaaaccttgattgaatataacagaccaagtacaactgcaccaaatggatgggctgtaaccatccacactggctccaaggaagcagaccgctggaccccagctctgcacatggctcaggcaaggcccgtggcgagcccttgtatccattatctttgagatcctggcaggttggccttcttccttccttcctcggaccanttgtaatggcccccagtttccttantttttatccc

SEQ ID NO: 1200 - DNA, 2271 bp, Homo Sapiens
ggcacgagcgcaaccacagcgcgcagggcaggcgcgagctggcctctgagccccggcctcggaccgcccactccactcccggcacgcccggtgccgccttccggctccagtccccgggctcggcctcggcgaggtgtaattcgcagcgcgggccggccccggaggctctcggcgagcgcggcgcggtaacaagtgggcgaggatgccgtacgagatcaagaaggtgttcgccagcctcccgcaggtggagaggggcgtctccaagatcatcggcggcgaccctaagggcaacaattttctgtacaccaatggaaagtgcgtcatcctaaggaacatcgacaacccagcccttgctgacatctacacagagcacgcccatcaggtggtggtggccaagtatgcgcccagcggattctacattgcctccggagatgtgtctgggaagctgaggatctgggataccacgcagaaggagcacctgttgaagtatgagtaccagcctttcgctgggaagatcaaagacattgcttggactgaagacagtaagaggatcgccgtggtcggggaaggaagggagaagtttggagcagtcttcctctgggatagtggctcttctgtgggcgagattacaggacacaacaaagtcatcaacagcgtggacatcaagcagagccggccataccggctggccacgggaagcgatgataactgcgcggcattctttgagggacccccattcaagttcaagttcacaattggcgaccacagccgctttgtcaactgtgtgcgattctctcctgatgggaacagatttgccacagccagtgctgacggccagatatacatctatgacgggaagactggggagaaggtgtgcgcgctgggcggaagcaaggcccacgacggtgggatttacgcaattagttggagtcccgacagcacccatttgctttctgcttctggggacaaaacttccaagatttgggacgtcagcgtgaactccgtggtcagcacatttcccatgggctccacggttctggaccagcagctgggctgcctatggcagaaggaccacctgctcagtgtctccctgtccgggtacatcaactatctggacagaaacaaccccagcaagcccctgcacgtcatcaagggtcacagtaaatcgatccagtgtctgacggtgcataaaaacggcggcaagtcctacatttactctgggagccacgacggacacattaattactgggattcagagacgggggagaacgactccttcgctgggaaaggccacacgaaccaggtgtccaggatgaccgtggatgagtcggggcagctcatcagctgcagcatggacgacaccgtgcggtacaccagcctcatgctgcgggactacagcggacaaggagttgtgaaactggacgttcagccaaagtgcgtagccgtcggccccgggggatacgccgtggtcgtgtgcattggacagattgtcctgctgaaggatcagaggaagtgcttcagcatcgacaaccccggctacgagcccgaagttgtggcagtgcaccccggcggggacacggtggcaattgggggtgtggacggcaacgtccgcctgtattccatcctgggcaccacgctgaaggatgagggcaagctcctagaggccaagggccccgtgaccgacgtggcctactcccacgacggcgccttcctcgcggtgtgcgacgccagcaaggtggtcacagtgttcagcgttgctgacggctactcggagaacaatgttttttatggacaccatgcaaaaatcgtctgcctggcctggtccccagacaatgaacactttgcctccggtggcatggacatgatggtgtatgtttggaccctgagtgacccggaaaccagagtcaagatccaagatgcacaccggctgcaccatgtcagcagcctggcctggctggacgagcacacgctggtcacgacctcccatgatgcctctgtcaaggagtggacaatcacctactgaggagccccacccccgcctctggatggaccgaatcagggactagagtttaactgcagcggaacatgtcatttctttatttctgtgacgcgcccccatgcccccaccccaccacaagaggcaggagggcccagtcatgaccctcgtctctgcagggtgtctgtacacgttcttctgaaagctttagacagtaacagtttgcacatgaaaaataaagcgagcacctaaacaaaaaaaaaaaaaaaaaaaaa

SEQ ID NO: 1201 - DNA, 386 bp, Homo Sapiens
tttttttttacatatataacttttgtaataataaaaaacatacttctacttaaagagaatatcaataagccctaaagtttttcatagtgaaagcccttcaaaattgcttgacaaataaattctaagtatactaactatgggaaaaatgtatgcttgcgaagactttgttagacacattttcttaaatgctgaagctataatttaaaaatgaagatttcaggagacaaaataaagtcagctggataaaaaatgtgcagagagaaaaaatataccaaaatgttaagagtgagtgtctcggccgggcgcagtggctcatgcctgtaatcccggcacttcgggaggctgatgcgggcggatcacggggtcaagagtttgagatcagccgg

SEQ ID NO: 1202 - DNA, 935 bp, Homo Sapiens
tatttatctcgatgtttaccattatcttagacattaacttagtgtattcttttcctgcaaatccatatttctttcggtgtaggatctagctgtagctgcaccatcatcgctgaggtaggcacatccttcactccctctcatgccaaacgatttggtaaatgtagctccatctacccatatgtcctgttcgattttttgccatcttcagtccaatccagtgatcagaactgcatttataccgcctaagaaaattcatttcttctatgttgtcacttatagttaggtcggcatgttgagtggaacagttgtatttacttgaattccaatctccttctttctttagagaaataatagcatatgtttcggaaaccaatccaatcataggggcataaactctgagaatctcgcagttagtttaactatcagagtaataatattagttgttattaaaacaccaacaattataaaacactttttatgtgttggtacatcataccgtgcttcttattaatcagcgtttagatattactgctagcagctttgtgtcatgtcttgcagaaactctcttcaaagttgtaactattactttaaactttaatactacacactgtgactctgatttttaaaagcgccagctccaaaactagaggtattgcccccaccgggcccgtaatgggccgaatttccccgggcgatatgtgccggggaaccgcacgaacctgagaaacgttacgtaataatgtattgctaataccgaaagttaatgcacggcgcgatacctcgccacacctgacttcgctgcgcatcaggccgtacgagtgacagggaactagcagcccaaagtgagtcggataaacagatcctcaaggaccggcgattcaacaagcgtcaggcgaggaaaacgaatatccacaggatcagggaaacgcaggaaa

SEQ ID NO: 1203 - DNA, 273 bp, Homo Sapiens
  misc_feature (80)..(80): n is a, c, g, or t
gatgtggccctgtctggctagtcctgtctagcgcgcccatttcgagcccaagtttccagctcgggtttccgggctcaganatttccaggagtgggttcttgggcagtggctgtgggagcaggaatggcgcagctagagggttactgtttctcggccgccttgagctgtacctttttagtgtcctgcctcctcttctccgccttcagccgggcgctgcgagagccctacatggacgagatcttccacctgcctcaggcgcagcgctactgtgag

SEQ ID NO: 1204 - DNA, 905 bp, Homo Sapiens
cgctcagggaaggcgggtgcgcgcctgcggggcggagatgggcagggggcggtgcgtgggtcccagtctgcagttaagggggcaggagtggcgctgctcacctctggtgccaaagggcggcgcagcggctgccgagctcggccctggacgcggcgagaacatggtgcgcaggttcttggtgaccctccggattcggcgcgcgtgcggcccgccgcgagtgagggttttcgtggttcacatcccgcggctcacgggggagtgggcagcgccaggggcgcccgccgctgtggccctcgtgctgatgctactgaggagccagcgtctagggcagcagccgcttcctagaagaccaggtcatgatgatgggcagcgcccgagtggcggagctgctgctgctccacggcgcggagcccaactgcgccgaccccgccactctcacctgacccgtgcacgacgctgcccgggagggcttcctggacacgctggtggtgctgcaccgggccggggcgcggctggacgtgcgcgatgcctggggccgtctgcccgtggacctggctgaggagctgggccatcgcgatgtcgcacggtacctgcgcgcggctgcggggggcaccagaggcagtaaccatgcccgcatagatgccacggaaggtccctcagacatccccgattgaaagaaccagagaggctctgagaaacctcgggaaacttagatcatcagtcaccgaaggtcctacagggccacaactgcccccgccacaacccaccccgctttcgtagttttcatttagaaaatagagcttttaaaaatgtcctgccttttaacgtagatatatgccttcccccactaccgtaaatgtccatttatatcattttttatatattcttataaaaatgtaaaaaag

SEQ ID NO: 1205 - DNA, 330 bp, Homo Sapiens
tttttttttttttttttttttttttttttttcacttaaagaacatctttatttgaactttaatatacaatattacctttaatttataaaaatcacatactggaggacatgactggaaaccagtttaggagcagccagtgggtaccaatttaggagattatacttaccccacttattagtttaagaaaaaattctatcaatgaatttgagaccagtgatattgaaggatggcatttcaacttccaaatccagtaattaaaattgaagatactttaattcagcaaaaacttctaaattttctttaaaaatattttttcccaatgaagaactg

SEQ ID NO: 1206 - DNA, 1386 bp, Homo Sapiens
ggcgaagacccttattacacggaaaacggtggaggccagggctatagctcaggacctgggacctcccctgaggctcagggaaaggccagtgtgaaccgaggggctcagaaaaacgggaccggccaggccacctccagaaacggccattcagcaagacaacacgtggtggctgataccgaattgtgactcggctaggtggggcaaggctgggcagtgtccgagagagcacccctctctgcatctgaccacgtgctacccccatgctggaggtgacatctcttacgcccaacccttccccactgcacacacctcagaggctgttcttggggccctacaccttgaggagggggcaggtaaactcctgtcctttacacattcggctccctggagccagactctggtcttctttgggtaaacgtgtgacgggggaaagccaaggtctggagaagctcccaggaacaatcgatggccttgcagcactcacacaggacccccttcccctaccccctcctctctgccgcaatacaggaacccccaggggaaagatgagcttttctaggctacaattttctcccaggaagctttgatttttaccgtttcttccctgtattttctttctctactttgaggaaaccaaagtaaccttttgcacctgctctcttgtaatgatatagccagaaaaacgtgttgccttgaaccacttccctcatctctcctccaagacactgtggacttggtcaccagctcctcccttgttctctaagttccactgagctccatgtgccccctctaccatttgcagagtcctgcacagttttctggctggagcctagaacaggcctcccaagttttaggacaaacagctcagttctagtctctctggggccacacagaaactctttttgggctcctttttctccctctggatcaaagtaggcaggaccatgggaccaggtcttggagctgagcctctcacctgtactcttccgaaaaatcctcttcctctgaggctggatcctagccttatcctctgatctccatggcttcctcctccctcctgccgactcctgggttgagctgttgcctcagtcccccaacagatgcttttctgtctctgcctccctcaccctgagccccttccttgctctgcacccccatatggtcatagcccagatcagctcctaacccttatcaccagctgcctcttctgtgggtgacccaggtccttgtttgctgttgatttctttccagaggggttgagcagggatcctggtttcaatgacggttggaaatagaaatttccagagaagagagtattgggtagatattttttctgaatacaaagtgatgtgtttaaatactgcaattaaagtgatactgaaacac

SEQ ID NO: 1207 - DNA, 194 bp, Homo Sapiens
tttttttttttttttttttttttttttttttttttttttgcgggtctcacattggaattctcagaggggaaaactatacaaaaattgctggagcagtttgaatctttagaaaacattcacctccccacccactaccccaacccatgcccttgacctccaaaaactgagccgagcctggggcacccgcggcctgc

SEQ ID NO: 1208 - DNA, 379 bp, Homo Sapiens
ctgaggtgggcatctgcttttgtaaagcctccagtgtccattccatccctgatgggggcatagtttgagactgcagagtgagagtgacgttttcttagggctggagggccagttcccactcaaggctccctcgcttgacattcaaacttcatgctcctgaaaaccattctctgcagcagaattggctggtttcgcgcctgagttgggctctagtgactcgagactcaatgactgggacttagactggggctcggcctcgctctgaaaagtgcttaagaaaatcttctcagttctccttgcagaggactggcgccgggacgcgaagagcaacgggcgctgcacaaagcgggcgctgtcggtggtggagtgcgcatgtacg

SEQ ID NO: 1209 - DNA, 456 bp, Homo Sapiens
gcacgaggcggtgccgggggcggggcgcggcggctgtcagctgactgtggcggcggcggcctcgaggtgacaactgtctccgtcgcaggctccggcgggggcgcaggaggtcgcccggcgcgtcactgtcgggtcggcgagccacgggggccgccgcagcaccatggcgaccaccgtcagcactcagcgcgggccggtgtacatcggtgagctcccgcaggacttcctccgcatcacgcccacacagcagcagcggcaggtccagctggacgcccaggcggcccagcagctgcagtacggaggcgcagtgggcaccgtgggccgactgaacatcacggtggtacaggcaaagttggccaagaattacggcatgacccgcatggacccctactgccgactgcgcctgggctacgcggtgtacgagacgcccacggcacacaatggcgccaagaatcc

SEQ ID NO: 1210 - DNA, 451 bp, Homo Sapiens
  misc_feature (276)..(277): n is a, c, g, or t
ttttttttttttttatttgcagtagtttattcatattttgtcacaaatggccggggagggggtgccggactcctccaggcgacataaaaaataggtccaagagacaaggtgggctgaggttggggcagatggagacagggctggagaaagagcctgggggagaggggagggcagactaggggtggggctgcccccctgctgagcctgctcattcccggtgcgggtacccccccacctgcagggggagcctcagggtgggggtggaggggggaatgnncaaaattttccaggtaaagctctgccccttggcagggcccaagtttcccccgaaatggacaaggccggaggtcctgccccttccaggaatgactgccatgcccacaggctggcagaggagcccctgcccctgtttagagctttgcccagccgctctagtccaagggggagggct

SEQ ID NO: 1211 - DNA, 383 bp, Homo Sapiens
cgggcagtagcggcgagaggcggcgagaggcgggctgaggcggcccagcggcggcaggtgaggcggaaccaaccctcctggccatgggaggggccgtggtggacgagggccccacaggcgtcaaggcccctgacggcggctggggctgggccgtgctcttcggctgttacgtcatcactggcttctactacgccttccccaaggccgtcagtgtcttcttcaaggagctcatacaggagtttgggatcggctacagcgacacaaactggatctcctacatcctgctggccatgctctacgggacaggtacactctgcagtgtgtgcgtaaaccgatttgactgccctaccgtcatgcttgtggggggactttttacaacattg

SEQ ID NO: 1212 - DNA, 311 bp, Homo Sapiens
cgaggccactggactggggcgtcgcggggaggcggtggtcacggcccgctcggttgcccttcgcgaccgccgcacctcgctcgcaggctcgcgcgggccccggccaatcgcgctgacccaacaagcctagcgagaacttgggctctgtacgtggcaggtgggggaagaacagaggcgggagcaagaaaaaaaaaaatgtcctttcgcccctccttattgcgcgtggacatacccaggacgcatgcgcgacggcgcgaggcgcagggctggctgggtcccggctgcctaggccgaagagtccctgctttctc

SEQ ID NO: 1213 - DNA, 2074 bp, Homo Sapiens
atacacgcttgagcaagctttgctatcagccagccaagagatagaaatgcatgcagataacccagcagccattcagacagtggtgttacaaagggatgatttacaaaatggactgcttagtacgtgtcgagaactttctcgagccactgccgaattggaacgagcatggagagaatatgataagttagaatacgatgtaactgttaccaggaaccagatgcaagagcagctggatcaccttggtgaagttcagacggaatcagcaggaattcagcgtgcacagattcagaaaaagaactttggcgaattcaggatgtcatggaagggctgagtaaacataagcagcaaagaggtactacagaaataggttcccactttcctgttggagtagtccctccaagagcaaaatcaccaacacccgaatcttcgacaatagcttcctatgtaaccttgaggaaaactaagaagatgatggatctaagaacggaaagaccaagaagtgcagtggaacagctctgtttggctgaaagtactcgaccaaggatgactgtggaagagcaaatggaaagaataagaagacatcaacaagcgtgcctgagggagaagaaaaaagggttaaatgttatcggtgcttcagaccagtcacccttacaaagcccttcaaatttaagggataatccatttaggactactcagactcgaaggagggatgataaggaactggacactgccattagagaaaatgatgtaaagtcagaccatgaaactcctgcaacagaaattgttcaactaaaagaaaccgaaccccaaaatgtggacttcagcaaagagttaaaaaaaactgaaaacatttcatatgaaatgctttttgaacctgagccaaatggagtaaattctgtggaaatgatggataaagaaagaaacaaagacaaaatgcctgaggatgttacattcagccctcaagatgaaacacagaccgcaaatcataaaccagaagagcatcctgaagaaaatacaaagaacagtgttgacgaacaggaagaaactgttatttcttacgaatcaactcctgaggtttctagaggaaatcaaacaatggcagtgaaaagtctgtccccatctcctgagtcctcggcatcgccagttccatccactcagccgcagctcacagaaggatcacatttcatgtgtgtgtagtcttagaagaactatactgacttctgttgaaaccattcaaagctaaagacatggaccttcagcagtgtaagaagatattgtacagtatattttaaatctatgaaattcatagttctgatgcttttggtcacagagcatcattttatcacttctggaaaatgtttattccaaaacggctttaatggcccatatgtacacttcgtaatctcaaggttattattctgacaccagcttgctgctatgatttcagagcacataagtaaaggtgctttttaatgtgcagtctatttccagagcttacttagttgctgatttccagatttcgatgtttcttaagtctaggtgaatttatatatatatttttttgcttctcattttctaaagttagttattatttccattgaagcttgttttctttttttcttcccattttagctactgcagtgcttttgtttcacacttgatttgtaaaaattttatatatatgtatttaaaatgtgccattttattgctaagtgaagtatgtcctgttttctgctataattctttctcggtcagattgcaatgtcagcagttactgccacactcctgtcagcttaaacacaaatgttactgcttatcttttcttaaaaaaaaaaaaaacaaagtgtaggtattttgaagtactgggcttatatttcattggaatacatgtgtacagcaataagcaggttcccaaatccggtacttagtttgtgtacaaatgtaattatgttcattgtgtatatattatacaatgagcacatgtaatgtattaaaggctacttactattgtttaaatgcaaatgttcatatctcatttctttttttatcatgttaaataaatgttgatgttctt

SEQ ID NO: 1214 - DNA, 566 bp, Homo Sapiens
caaatgcaaatagtctttattatgagaaagcagtgttatctaggaaagtcacatgctggtttctttctaataaaatgacaaagcaggtttcttaaataatttacaaagggcagaaattgctcttgaacagggctacccctcctggcacatccacagtgctctgcactgagcatataaataggtacccgtgagcccagggtcgtaagcctggaaatatctcctatgccttcctccgagtccctggtagggaaaggagggatgagagtggggccctcaagagccttggcaccagaaacacagtgggtgagtgactctgcggatgactccccaaaaaccaggcacccgggtacacagctaagagctctcaaatatctgatgctagcacttcatgttatagatgaggcaaatagaaggctcaaggtcaagtgtacgatgagtttctaagctcaagagtcccctaggaaagcagaaggaacaattctccccctctgcaaggtctccccaagacactctcaggctatggcaggcagtcactgatgggtccagatgtggctggagcagggggc

SEQ ID NO: 1215 - DNA, 5503 bp, Homo Sapiens
agccgccgccggggctgtaggcgccaaggccatgtccgactcgtgggtcccgaactccgcctcgggccaggacccagggggccgccggagggcctgggccgagctgctggcgggaagggtcaagagggaaaaatataatcctgaaagggcacagaaattaaaggaatcagctgtgcgcctcctgcgaagccatcaggacctgaatgcccttttgcttgaggtagaaggtccactgtgtaaaaaattgtctctcagcaaagtgattgactgtgacagttctgaggcctatgctaatcattctagttcatttataggctctgctttgcaggatcaagcctcaaggctgggggttcccgtgggtattctctcagccgggatggttgcctctagcgtgggacagatctgcacggctccagcggagaccagtcaccctgtgctgctgactgtggagcagagaaagaagctgtcttccctgttagagtttgctcagtatttattggcacacagtatgttctcccgtctttccttctgtcaagaattatggaaaatacagagttctttgttgcttgaagcggtgtggcatcttcacgtacaaggcattgtgagcctgcaagagctgctggaaagccatcccgacatgcatgctgtgggatcgtggctcttcaggaatctgtgctgcctttgtgaacagatggaagcatcctgccagcatgctgacgtcgccagggccatgctttctgattttgttcaaatgtttgttttgaggggatttcagaaaaactcagatctgagaagaactgtggagcctgaaaaaatgccgcaggtcacggttgatgtactgcagagaatgctgatttttgcacttgacgctttggctgctggagtacaggaggagtcctccactcacaagatcgtgaggtgctggttcggagtgttcagtggacacacgcttggcagtgtaatttccacagatcctctgaagaggttcttcagtcataccctgactcagatactcactcacagccctgtgctgaaagcatctgatgctgttcagatgcagagagagtggagctttgcgcggacacaccctctgctcacctcactgtaccgcaggctctttgtgatgctgagtgcagaggagttggttggccatttgcaagaagttctggaaacgcaggaggttcactggcagagagtgctctcctttgtgtctgccctggttgtctgctttccagaagcgcagcagctgcttgaagactgggtggcgcgtttgatggcccaggcattcgagagctgccagctggacagcatggtcactgcgttcctggttgtgcgccaggcagcactggagggcccctctgcgttcctgtcatatgcagactggttcaaggcctcctttgggagcacacgaggctaccatggctgcagcaagaaggccctggtcttcctgtttacgttcttgtcagaactcgtgccttttgagtctccccggtacctgcaggtgcacattctccacccacccctggttcccagcaagtaccgctccctcctcacagactacatctcattggccaagacacggctggccgacctcaaggtttctatagaaaacatgggactctacgaggatttgtcatcagctggggacattactgagccccacagccaagctcttcaggatgttgaaaaggccatcatggtgtttgagcatacggggaacatcccagtcaccgtcatggaggccagcatattcaggaggccttactacgtgtcccacttcctccccgccctgctcacacctcgagtgctccccaaagtccctgactcccgtgtggcgtttatagagtctctgaagagagcagataaaatccccccatctctgtactccacctactgccaggcctgctctgctgctgaagagaagccagaagatgcagccctgggagtgagggcagaacccaactctgctgaggagcccctgggacagctcacagctgcactgggagagctgagagcctccatgacagaccccagccagcgtgatgttatatcggcacaggtggcagtgatttctgaaagactgagggctgtcctgggccacaatgaggatgacagcagcgttgagatatcaaagattcagctcagcatcaacacgccgagactggagccacgggaacacattgctgtggacctcctgctgacgtctttctgtcagaacctgatggctgcctccagtgtcgctcccccggagaggcagggtccctgggctgccctcttcgtgaggaccatgtgtggacgtgtgctccctgcagtgctcacccggctctgccagctgctccgtcaccagggcccgagcctgagtgccccacatgtgctggggttggctgccctggccgtgcacctgggtgagtccaggtctgcgctcccagaggtggatgtgggtcctcctgcacctggtgctggccttcctgtccctgcgctctttgacagcctcctgacctgtaggacgagggattccttgttcttctgcctgaaattttgtacagcagcaatttcttactctctctgcaagttttcttcccagtcacgagatactttgtgcagctgcttatctccaggccttattaaaaagtttcagttcctcatgttcagattgttctcagaggcccgacagcctctttctgaggaggacgtagccagcctttcctggagacccttgcaccttccttctgcagactggcagagagctgccctctctctctggacacacagaaccttccgagaggtgttgaaagaggaagatgttcacttaacttaccaagactggttacacctggagctggaaattcaacctgaagctgatgctctttcagatactgaacggcaggacttccaccagtgggcgatccatgagcactttctccctgagtcctcggcttcagggggctgtgacggagacctgcaggctgcgtgtaccattcttgtcaacgcactgatggatttccaccaaagctcaaggagttatgaccactcagaaaattctgatttggtctttggtggccgcacaggaaatgaggatattatttccagattgcaggagatggtagctgacctggagctgcagcaagacctcatagtgcctctcggccacaccccttcccaggagcacttcctctttgagattttccgcagacggctccaggctctgacaagcgggtggagcgtggctgccagccttcagagacagagggagctgctaatgtacaaacggatcctcctccgcctgccttcgtctgtcctctgcggcagcagcttccaggcagaacagcccatcactgccagatgcgagcagttcttccacttggtcaactctgagatgagaaacttctgctcccacggaggtgccctgacacaggacatcactgcccacttcttcaggggcctcctgaacgcctgtctgcggagcagagacccctccctgatggtcgacttcatactggccaagtgccagacgaaatgccccttaattttgacctctgctctggtgtggtggccgagcctggagcctgtgctgctctgccggtggaggagacactgccagagcccgctgccccgggaactgcagaagctacaagaaggccggcagtttgccagcgatttcctctcccctgaggctgcctccccagcacccaacccggactggctctcagctgctgcactgcactttgcgattcaacaagtcagggaagaaaacatcaggaagcagctaaagaagctggactgcgagagagaggagctattggttttccttttcttcttctccttgatgggcctgctgtcgtcacatctgacctcaaatagcaccacagacctgccaaaggctttccacgtttgtgcagcaatcctcgagtgtttagagaagaggaagatatcctggctggcactctttcagttgacagagagtgacctcaggctggggcggctcctcctccgtgtggccccggatcagcacaccaggctgctgcctttcgctttttacagtcttctctcctacttccatgaagacgcggccatcagggaagaggccttcctgcatgttgctgtggacatgtacttgaagctggtccagctcttcgtggctggggatacaagcacagtttcacctccagctggcaggagcctggagctcaagggtcagggcaaccccgtggaactgataacaaaagctcgtctttttctgctgcagttaatacctcggtgcccgaaaaagagcttctcacacgtggcagagctgctggctgatcgtggggactgcgacccagaggtgagcgccgccctccagagcagacagcaggctgcccctgacgctgacctgtcccaggagcctcatctcttctgacgggacctgccactgcacaccagcccagctcccgtgtaaataatttattacaagcataacatggagctcttgttgcactaaaaagtggattacaaatctcctcgactgctttagtggggaaaggaatcaattatttatgaactgtccggccccgagtcactcagcgtttgcgggaaaataaaccactggtcccagagcagaggaaggctacttgagccggacaccaagcccgcctccagcaccaagggcgggcagcaccctccgaccctcccatgcgggtgcacacgaagggtgaggctgacacagccactgcggagtccaggctgctagaggtgctcatcctcactgccgtcctcaggtgggttcgggcttcaccgcctggccctctgtggtcacagaggggctcggtggcccaggtggtggttccgcctccaggggcagggccttgtcctgggtctgtgtcagcgggtgcaccatggacatgtgtacattgaggttgtgggccttctcaaaccgccggccacactggtcacaggcaaagtccagctcagtctcagccttgtgtttggtcatgtggtacttgagggatgcccgctgcctgcactggaacccacagacctcacacctgggggacagaggcagataagaaggtgcgaggccacagccctgggagggggtcctgactcacacttactgcaaaggcttggctcccgaatgtcgcatttggtggacgagaaggtgcttccgctgcttgaaggtttgtccacattcgtcacagatatagttccgcacctctgagaggggagagtccagtgagtccaggcccctgatgctccaacctcccggggggacgacgatgacaatgtgaaaccatcacagctgggaagacatttctgcacatggttcaccatgcagtgggcccaagcaaggggcctatgagggcctcgtttattaagatctttaaactgctttatacactgtcacgtggcttcatcagctgtgtgcatttcaggatggtttttaaagaaacctcagaaagctatttccttaaaaaaaaaaaaaaaaaaaaaaaaaaaaaaaaaaaaaaaaaaaaaaaaaaaaaaa

SEQ ID NO: 1216 - DNA, 4684 bp, Homo Sapiens
actggcgtccggcgtgtaccgagagactggcgtccggtgtgcaggtggccacatggatcctggcagccggtggcggaacctgcccagcgggcctagcctaaagcacttgactgacccctcttatggaatcccgcgggaacagcaaaaggcagcgttgcaggagctgacgcgggcgcacgtggagtccttcaactacgctgtgcacgagggtctcggcctcgcggtgcaggctatacctccctttgaatttgctttcaaagatgagcgtatctcttttactattctggatgctgttatcagtccacctacagttccaaaagggaccatctgcaaagaggccaatgtttatccagcagaatgccggggccgaaggagtacctaccgtgggaagttgacagctgatatcaactgggcagtgaatggaatctcaaaaggaatcattaagcagtttcttggctatgttcccatcatggtgaaatccaagctttgcaacttacgtaaccttcccccacaagccctcattgagcaccatgaggaggcagaggaaatggggggctattttataatcaatggcattgaaaaagtcatccgaatgttgattatgcctcggagaaattttcccattgcaatgataagaccaaaatggaaaaccagagggcctggttatactcagtatggagtttcaatgcactgtgtgagggaagaacattccgctgtcaatatgaacctccactacttggaaaatggcacagttatgttgaactttatttaccgaaaagaactgttctttcttcctttgggatttgcacttaaggcacttgtcagcttttctgattatcagatctttcaggagctcatcaaaggaaaagaggatgattctttccttaggaactctgtttctcagatgttaaggattgtaatggaagagggttggttgacacaaaaacaggtccttaactacctaggtgaatgcttcagagtaaaactcaatgttcctgactggtacccaaatgagcaagctgcggagttcctgtttaaccagtgcatctgtatccacttgtaatccaatactgaaaagttttatatgctttgtctcatgacgcgaaagctctttgctttagccaaaggagagtgcatggaggacaatcctgatagtttggtgaaccaggaagtcctcacaccgggtcagctcttccttatgttcctgaaggaaaaactggaaggttggttagtgtctattaaaatagcttttgataagaaggctcagaagaccagtgtttccatgaacactgacaatttgatgaggatttttacaatgggcatagaccttacaaaaccatttgaatacctttttgctactgggaatctgcgttctaaaacaggtcttggcctcctacaagattctggactttgtgttgtggctgacaagctgaacttcatacgctacctctcccatttccgctgcgtgcacagaggggctgattttgccaagatgaggaccaccacagtacgcaggctgctgccagagtcctggggcttcctttgtcccgtgcataccccagacggggagccctgtggcctgatgaaccacctaactgccgtatgtgaggtcgtcacacagtttgtgtatacggcatctattccagctttactgtgcaacttgggggtcactcccattgatggagctccccaccgatcatacagtgagtgctaccctgtcctgctggacggcgtcatggttggctgggtggataaggatcttgctccaggcatcgcagattctcttcgtcattttaaggtgttgagagagaaaagaattcctccctggatggaagtggtccttatacccatgacaggaaaaccaagtctgtacccaggattgttcctttttaccactccttgtagactggtacggcctgtgcagaacttagcattgggcaaagaagagctaattggaactatggaacagatcttcatgaatgtcgctatctttgaggatgaagtttttgctggagttaccacacaccaggaactctttccacacagcctgctgagtgtgattgccaacttcatccctttctctgatcacaaccagagtccacggaacatgtaccaatgccagatgggtaagcaaactatgggctttccacttctcacttatcaagaccgatcggataacaaactgtatcgtcttcagactcctcagagtcccttggtgagaccctccatgtatgattattatgacatggataactatccaattgggaccaatgccatcgttgctgtgatttcttacactggctatgatatggaagatgccatgattgtgaataaggcctcttgggaacgaggctttgcccatggaagtgtctacaagtctgagttcatagacctctctgaaaaaattaaacaaggagatagtagcctggtgtttggcatcaaacctggtgacccacgcgttctgcagaagttagatgacgatggattgccgtttataggagcaaaactgcagtacggagatccgtattacagctacctcaacctcaacaccggggaaagttttgtaactggatgttgtttaacttgatgttgaccttttggattaagaggactatcagattaaagcaaaatgtaattttaattcaatgaagatatcattaccaggttactcttgagatttttcaacggtgttagaactctcaaccaagacctgaaaaccaagtatgcaaggtttctgaatctctctggtagattaactattgacaatgattttctgttatctttgttcaaaaagttcatgtcttctcaaaatatgaaatattgataaatggaagagcatacggtgacaagtctcctttccaaccccaggttccctacaccctgctctcagcaggcagtgagtgtcacacacctgttaatccatcttgagcaggacagtactatacaaatagaatgcaagctgtaatgtaattttatattttcttatagccacgttgaagtaaaaacaaacaggtacagtgttttttaccagctttatagaagtacagttgttacatatttaatgaatacaatttgatgggtctgactatatgcacacacctttgataccatcaccacaatcagggtaataaacatacctgtcatctccacaagtttcctcctgcccctttgttttttgctttttggttgctgttgagtttttgttttgtcttctgtggtaagaacacctaactcaagacctaccctcttaacaaatctttaagtgcacgatatagtattgttaattccaggcaccatgttgtacaacagatctttagaccttacttgtcttgcataactgaagctttatacctgttgaacaactctccatttccctggcccctagcaaccacccttctaccctgtttctatgagtttgactattacagatatctcatatagtgggatcatgcaatatttgtcctgtgactggcttatttcacttagcatagtgaaataagattcatccattttggaagccaggcatggtgctgtgcatctatagtccctgctatttgagaggctgaggtgggaggatcatttgagtgcaggagttcaaggacagcctgggtaatataggaagaccctgtcttaaagaccctgacctcaagtgatccacccacctcggcctccgaaagtgctaggattacaggtgtgagccactgtgcctggcctccggtgagtattttatatttagtctacacttccatacttggcttttttctgcttttatattgatctgctttcatagcagtgtgtagagtgccacttatgttttctttcttgtgtacagtattttattgtatggatttaccatcccctgtgtatttaagttgttccattctttggccattataacttttttctgcaaatattctggtgacttatctttggccattataaactgttgataatagatcatcttgtatatacttctgcaattataagatgttttttgatgatgagagctttcctaaggtaattctttcctgagtttggttcagatggtctgtcactaattataaggcagataggaacagacagaaaaatctatcatttcaagataggcttagcaggatgggcgcagtggctcacgccactaatcccaacattttaggaggcctaggcaggagcaatcacttgtgcctgggagttctagactagcctgggcgagacttcatctctacaaaaaaagcaacaacgacaaaaaaaattagccaagcatagtggcacacccctgtagtcccagctacttgggaggctgaggtgggaggattgcttgaacccaagaggtcgaggctgcagtgagccaagattgtgccactgcactccagcctgggtgacagagcaggaccctgtctctattttataaattaaaaaaggctgggtgtggtggctcacacccataatcccaacactttggctcagcagattgcttgaacccaggaattcaagtccaatctgggcaacatggggaaaccccagctctacaaaaaaaattagcctggtgtggtggcacatgcctgtagttccagctactcaggaggctgaggtgggagaatctcctgagcctggaaggtccaggcagtgagccaagattgtgccaccacactccagcctgggcgacagaatgagaccctgtctc

SEQ ID NO: 1217 - DNA, 380 bp, Homo Sapiens
  misc_feature (35)..(36): n is a, c, g, or t
  misc_feature (254)..(254): n is a, c, g, or t
  misc_feature (346)..(346): n is a, c, g, or t
  misc_feature (354)..(354): n is a, c, g, or t
ggtcagactttttttttttttttttaaggttcttnnccagctcttttatttcacagatgggaaaataaggcactgtccaagtaacacacagtgacagtggcaaagtcgtgcttgcttcccaggtccctgacctcagacaagggtgttctctcccattaaatgcttttttctcctcatcttgctccattttcctatcttgtggcaagagattaacaatctaaattccaatcctagttctgacactgaccaatganataaacatttaggctgggtgtggtggctcacacctgtaatcccatcaaggcaggaggatcacttgaggccaggagttcaaacactaagtgtngggctacnaagcaagacccccgtctctacagaaa

SEQ ID NO: 1218 - DNA, 424 bp, Homo Sapiens
  misc_feature (17)..(17): n is a, c, g, or t
  misc_feature (26)..(26): n is a, c, g, or t
  misc_feature (385)..(385): n is a, c, g, or t
  misc_feature (408)..(408): n is a, c, g, or t
ctagaagttttatggcntgggatttnatgtttaggtctgtgatccatctcaaattaatttttgtgaacagaatgaggtttggtttttttccagcatggatatacagttgttccagcaacatttacttaaaaagacttttctttacccattagattgacttggtagcttggttaaaaattgatcacgtgtgtgtgtatttctacattttctgttctgttccattaatctatttgtgtatccttacatcagtaccacactttggattattgaaactttctagtaagtctttaaattagtaaatccttcctttttgttatttttcaagatcgctttggttattgtcgattccttggattgtcataaaagttttacaattagcccatcntgtttttcaaacgtagatgtgcnggggtagccgtgttcg

SEQ ID NO: 1219 - DNA, 838 bp, Homo Sapiens
aaggctaggtacgaggctgggtgtgaatcggccgaggctgctttctgcacgtctcgccgcgcgccgccagtccgtttgtgctagctctggccgtgagccggccgcccgctgccgccggccgccccgcagctgcctgcgccccagccgcgcctcgcggccagcccggctagctcaggtccgctcccggagcccgcgcccctccacgctgccccctgcctgtccccggccatgctgtcccttcagtaccccgacgtgtaccgcgacgagaccgccgtacaggattatcatggtcataaaatttgtgacccttacgcctggcttgaagaccccgacagtgaacagactaaggcctttgtggaggcccagaataagattactgtgccatttcttgagcagtgtcccatcagaggtttatacaaagagagaatgactgaactatatgattatcccaagtatagttgccacttcaagaaaggaaaacggtatttttatttttacaatacaggtttgcagaaccagcgagtattatatgtacaggattccttagagggtgaggccagagtgttcctggaccccaacatactgtctgacgatggcacagtggcactccgaggttatgcgttcagcgaagatggtgaatattttgcctatggtctgagtgccagtggctcagactgggtgacaatcaagttcatgaaagttgatggtgccaaagagcttccagatgtgcttgacacgagtcaagttcagctgtatggcctggacccatgatgggaacgggaatgtcctacaactcatacctcaacaggatgtcaaacgtgatggccagagacattca

SEQ ID NO: 1220 - DNA, 377 bp, Homo Sapiens
  misc_feature (366)..(366): n is a, c, g, or t
tttttaatcattgttatcgtttattaaacaacagggccacattcaaacgctttccaattctctctaaataacagcctaacgctgacgtttttgttggcctgtatctcataattatttttatttagaggaatttggtagtggcggggttggggtgggaggtggtgtgtggacggtgtgaattgacagaaacaatttccctacaccaaaatacaggtatgttttcattctctatgcccctaaacaccctccctgcagctatgcaaccgagcaattcacgggaagaggcttctttacatagacccctgtttttggtgttttgatttaccttttgtgtatagaggttgatctgtccctcttcccattggngtccccccccc

SEQ ID NO: 1221 - DNA, 505 bp, Homo Sapiens
agcggccgccctttttttttttttttttttttttttgttgaacaagttcagatttattgaaagtaaacatttacattcgctacaatgttggaactattacaaagctggataaaagaggctttagtagcaatagaaagcaagagcaataaaaagtgaatagagaaaatatttggccttactgatctcttggcagtatttacattatgtacatattggtaaatatttataataattctaaggcaccaaaggctaaatagcaggttgcaatactatcctgtgcacaaaaatcaagaaatttattgtaaagaggctgtatagttaaagaaacataggcatatcttaatgtttacataatggagcggctgcatttttaaaaatctcaaatgatacattaaatattgggcagatcgaagatattatttttagaacattaaattatattgactatgtaaataagcactattttttactgacttgctggtaaatgtgaaatgtaatctattcg

SEQ ID NO: 1222 - DNA, 4744 bp, Homo Sapiens
aaataataaagaaattgaaaacaatacattaatataccataacactaaaaagagcaggagcgagagatgagaaagggaatccagcccgctctggagcagtacctggtgaccgccgggggtggggagggggcggctgtcgtcgccgccgccgctgcagcctccatggacaaaagggcactgctagccagccccggcttcgccgccgccgccgccgctgccgccgccccgggcgcgtacatccagatcctcaccacgaacacttccaccacctcctgttcctcctccctccaaagcggcgccgtagccgccggccccctcctccccagtgcccccggcgcggagcagaccgccggcagcctcctctacaccacgccgcacggaccctccagcagagccgggctgctgcagcagccaccagcgctgggacgcggcggcagcggcggcggcggcggccctccggcaaagcgaaggctggagctaggagaaagcggtcatcagtacctctcagatggtttaaaaacccccaagggcaaaggaagagctgcactacgaagtccagatagtccaaaaactccaaaatctccctcagaaaaaacgcggtatgatacgtctcttggtctgctcaccaagaagttcattcagctcctgagccagtcacccgatggggtattggatttgaacaaggcagcagaagtgctaaaagtgcaaaagagaaggatttatgatatcaccaacgttctggaaggcatccacctcattaagaagaagtctaaaaacaacgtccaatggatgggctgcagtctgtctgaggatgggggcatgctggcccagtgtcaaggcctgtcaaaagaagtgaccgagctcagtcaggaagagaagaaattagatgaactgatccaaagctgcaccctggacctcaaactgttaaccgaggattcagagaatcaaaggttagcttatgttacatatcaagatattcgaaaaattagtggccttaaagaccaaactgttatagttgtgaaagcccctccagaaacaagacttgaagtgcctgactcaatagagagcctacaaatacatttggcaagtacccaagggcccattgaggtttacttatgtccagaagagactgaaacacacagtccaatgaaaacaaacaaccaagaccacaatgggaatatccctaaacccgcttccaaagacttggcttcaaccaactcaggacatagcgattgctcagtttctatgggaaacctttctcctctggcctccccagccaacctcttacagcagactgaggaccaaattccttccaacctagaaggaccgtttgtgaacttactgcctcccctgctgcaagaggactatctcctgagcctcggggaggaggaaggcatcagcgatctcttcgatgcttacgatttggaaaagctcccactggtggaagacttcatgtgtagttgattatgcttcgtgtgaactctccttaaaaaccgatatttttttatcatggaccagaacatctgtcatgcagtgttgtcccttcctaccttcttcctccaagagagtatcatgaagtaaactacaaacttcagaagaaagctgacattttaatgaattttttaaaaaattaataaacaaattgtctaaacgcacagttgcaggctcccttgggaaagccctgctttgctccaggctccaagatctcctggctaagtcagcaagtgagaaaatgtgcaatcaggtgtctctcaccccgaattgtccttcctccttcctccccggattggcttgctgtgcctgacggatgggctgtagaatggggtctggccacctggcctgctgggaaacagcaatcttccttaatagcatttcaagccgtgccttctccgcagaatgcatgtctttgaggtctgctaatatggaatggaactgcagcaaatgcaaacttgaagtcatgcaaaagtatgaaatggatttcttcagctcttcttaggaatatttaaattactgtcataattcagtttaagctatgaactgtgtgtcccagtaggaggtcaagaaaacctccacagccttctggatgaagaacctgttttcaaatatacttgttgcagatacagaagactagtagagttctgccactctaagctgttgtggattttcctgtctccatgaaccactcccattcccccgtccccaatgtgtttgtgagtttccagttgatttgtagcaaatgcctacttagttctttgtggattgttctagacttttaatttttttagctgccatttaagcattcctgtggcacccatcaccatttcaatttaattgtttactttgaagcggtttttgcaaattcatattacttaagcagagggagagaacctctactgatcagagcatctaaacctgtgtgatctaaggtttatcagcctctgcaaggagctttgtcccatcgtgcttccattcccaggagggggagcttggagcgagtcagtcctggggcttgctgacatgggtggcccattggaaaggagaaccaggtcagatgatgtaacagccccaaggagcagcaggcatgggtccctccatccttgggcttcccgggcccctgtgacaggggaaagggctctcttacaccgcactcagggagaccacttctcaggatggggtcagatggagagacctctagggagaaagacatccccattgtgtgagtggcatttccttaagctggcaggaacagggagcagccctgtgtcgggggctggaatagttctggccagaccccgttccccttcctctatgaaggaataagttggaccaagggaagtcggggacgtaaaaaatgaagcaaaacaatgccagggtgtctcccgctttactcttcaggaatggtgtcccaagttggaggctttgtgtcagctgcaaatcctaccagttatgtccaagaatggctttccctcgggcaggtggcagcggccatctcccactgggaatatggcgtagtatctccggtccattccttggatgctaaggactgcgggaatgagggagtcagataaagaacaaacctcgaaacgaacagttaaattgaaatgctatgtgcctgacccaatggtaggcacatagtaggcactcaactcatatgtttaattgaattgaaaatatcccttaggaaaaaaaaaaaacacacaaaaaaccacaagagccccagccagtttactccaggtagatttccacaatatgcaaagtggtggtggggtcaagacagatgacaccagcactttaaactctttgtgtgggtatgcgtgggtgtatgtttgggaagaaaaacaaaggtgcagactatcttcctttttttcttcttcagcctccatccctggcctcctcccctcacacacactggacttggtacaaaatgtcggtgtggtcctagatgaagcattggggtgggggagggagagggagctttgtgttaagtgcctactggaaatgcactgtggggttttttcctgtatgggaaaccatttatgccaagcttttccccatttcccatatttatctcatctggttagctgcctctgcttccagctttgtgtaattctctttgccagctgcacaaagctgattttttccaaagtctaaagactgagctcacctggctagattgttgtgtgttttgttgaattttttcataatgtaatgccgtatttattgtttttaaaatgaaaggaatactaataagtcttaaaagttccttcatgcataagatttttttccagttactgggcttaactggtgtacattaattagatgtccatactgtattttgtttgcattaagtaattttctttttgacttagtatccggcacacaaagtgggttagtactacagtatttgcgttactttaagtactaagtatgcaggtttcctggtaccattgagttgctgctattaaagctcacacacgaaatggctaaaagttacaagtgtgcaaattatgactgcgtgagccttagaaaataaaatgtataaagggcaacacatgagctgtcaaacagtgttaggagtgtgtttatatgtacagagttgtgcatagcaatcgttttatttaagttgatatgtagtctactcacattttcattatttagcaattttgtacaaaaatagcaattaatttgtaaacactgccagaatactttctagctgctttgtaattttttaagagtgttattttgtttttgtttttctgttctttgttgtggctcttgttttcatttttgttgtacgtgtagatctgtaaataaaattgcagtatttaaagcttaagctttcaggaaaaagaaaataagaattcagtgtgtgcatgacaactcgtgtgtatgagaaggagggatatgaaggaagatggcttgcagagtaagtcgggtggcaattgtcagggtgtgggaatttcttttcctacggggtacgtgattttgtaaaaaggaagtatttctcccaaaattgggagtaggcaaactactaatcagtttagctttgtgttgtatgctagtttaaaaaagaaaatatgtaatataatgtaaaaaaaaacaaaaaaaagcttttatgatggattttgtaaatagatttgttacagggtgacctgttctctagctgtgatcttaccacttcaaatgggtgtaatttgaataaattttgtatggtaaaggatcaataaaatgattttttttaaga

SEQ ID NO: 1223 - DNA, 2132 bp, Homo Sapiens
catgtctggagaccattttcaacctgaatttatctctgatgccagtccccaagatgagccattggttgcttattctttggggtcacccaagatggcagcactgaaggccacatggctggggttttctataccttgggattacatgttatacaaaacagctgactgacaatgcagaatgagggaagggacacctccaaattccttcagcctcccaaagtgctgggattacaggcatgacccaccgctcccggccttgttttccgtttaaagtcgtcttcttttaatgtaatcattttgaacatgtgtgaaagttgatcatacgaattggatcaatcttgaaatactcaaccaaaagacagtcgagaagccagggggagaaagaactcagggcacaaaatattggtccgagaatggaattctctgtaagcctagttgctgaaatttcctgctgtaaccagaagccagttttatctaacggctactgaaacacccactgtgttttgctcactccctcactcaccgatcaaaacctgctacctccccaagactttactagtgccgataaactttctcaaagagcaaccagtatcacttccctgtttataaaacctctaaccatctctttgttctttgaacatgctgaaaaccacctggtctgcatgtatgcccgaatttgtaattcttttctctcaaatgaaaatttaattttagggattcatttctatattttcacatatgtagtattattatttccttatatgtgtaaggtgaatttatggtatttgagtgtgcaagaaaatatatttttaaagctttcatttttcccccagtgaatgatttagaattttttatgtaaatatacagaatgttttttcttacttttataaggaagcagctgtctaaaatgcagtggggtttgttttgcaatgttttaaacagagttttagtattgctattaaaagaagttactttgcttttaaagaaacttggctgcttaaaataagcaaaaattggatgcgtaaagtaatatttacagatatggggagatgtaataaaacaatattaacttggtttcttgtttttgctgtatttagagattaaataattctaagatgatcactttgcaaaattatgcttatggctggcatggaaatagaaatactcaattatgtctttgttgtattaatggggaatattttggacaatgtttcattatcaaattgtcgacatcattaatatatattgtaatgttgggaagagatcactattttgaagcacagctttacagatgagtatctatgatacatatgtataataaattttgatcgggtattaaaagtattagaaggtggttataattgcagagtattccatgaatagtacactgacacaggggttttactttgaggaccagtgtagtcaagggaaaacatgagttaaaaagaaaagcaggcaatattgcagtcttgattctgccacttacaggatagataatgcctgaactttaatgacaagatgatccaaccataaaggtgctctgtgcttcacagtgaatcttttccccatgcaggagtgtgctcccctacaaacgttaagactgatcatttcaaaaatctattagctatatcaaaagccttacattttaatataggttgaaccaaaatttcaattccagtaacttctattgtaaccattatttttgtgtatgtcttcaagaatgttcattggatttttgtttgtaatagtaaaataccggatacatttcacgtgtccttcagtattgatttggttgaatattgggtcataatggttgagaagcatggacactagagccagaatgcttggatatgaatcctggatctgtcacttacttctgtgtgacctttgaaaggctacttatttcctctcttagctttctcattaaaatcaatgaacaatgccagcctcatggggttgttgaatgattaaattagttaatatacctaaagtacatagaacactgcctgcacatagtaaaagaattataagtgtgaggtagttggtaaaattatgtagttggatatactaccgaacaatatctaatctctttttagggaaataaagtttgtgcatatatataatcccgaaacatg

SEQ ID NO: 1224 - DNA, 3029 bp, Homo Sapiens
ttaaattctaattagagatgcaggaatcaatgatagggaggttggacagctcagttccccagtgccagcccaatagacggatgagttattgtcatgtaaaaagcgccagcaataagaccaaccgctttgctattgtccaagtggaaagagccaagtttattatgaggactatatgctctagagacctcagacaaggcatctcataggaggctttttcataaaactaggctctgctggtagtaaggaggccagtttggaggcaggcgttgagctgtgcacatctccccactccagccaccttctccatatccatcttttatttcatttttccacttggctgagccatccagaaccttttcaatgtataaaatggaatattcttacctcaattcctctgcctacgagtcctgtatggctgggatggacacctcgagcctggcttcagcctatgctgacttcagttcctgcagccaggccagtggcttccagtataacccgataaggaccacttttggggccacgtccggctgcccttccctcacgccgggatcctgcagcctgggcaccctcagggaccaccagagcagtccgtacgccgcagttccttacaaactcttcacggaccacggcggcctcaacgagaagcgcaagcagcggcgcatccgcaccactttcaccagtgcccagctcaaagagctggaaagggtcttcgcggagactcactaccccgacatctacactcgggaggagctggccctgaagatcgacctcacagaggcgcgagtccaggtgtggttccagaaccgccgcgccaagtttcgcaagcaggagcgcgcagcggcagccgcagcggccgcggccaagaacggctcctcgggcaaaaagtctgactcttccagggacgacgagagcaaagaggccaagagcactgacccggacagcactgggggcccaggtcccaatcccaaccccacccccagctgcggggcgaatggaggcggcggcggcgggcccagcccggctggagctccgggggcggcggggcccgggggcccgggaggcgaacccggcaagggcggcgcagcagcagcggcggcggccgcggcagcggcggcggcggcagcggcagcggcggcagctggaggcctggctgcggctgggggccctggacaaggctgggctcccggccccggccccatcacctccatcccggattcgcttgggggtcccttcggcagcgtcctatcttcgctccaaagacccaacggtgccaaagccgccttagtgaagagcagtatgttctgatctggaatcctgcggcggcggcggcggcggcgacagcgggcgagccagggcccgggcgggcgagtgggcgagcgggtaggcccaaggctattgtcgtcgctgctgccatggctttttcattgagggcctaaagtaatcgcgctaagaataaagggaaaacggcgtcgccctcatttcaaccccactcctacccccttcctcaacccccaaacaaaacaaacaaacttccctggcttcgcacctgcctggggcctcgcagcggggccagggctccgcctgctgatcgggggttgtgagcagcgcggcctggacgcggggcactctcagggggctgtgtctgcgtgtcagtttgtgtctgtctcggggaatgtgtgtctgtggcccaagcaggtgacaggaagagatggggggcctcaaccaacttagtgacttgtttagaaaaaaaagacaaaaaagtaaaaataaaaacaaaaaagttggaaggcagaaaccattaaaaaacaaaaagccaacaacccagaaaggtttaaaaaacataaggaaaaaaaagacaaattaaaggaggggctaggggagaagctgcagctggagctgaaggctcgatcttgtgaacccctaaatccgctccctcctaacagcacggattctcttggggctcttcttcagggaagagtagggacgccgttccagccccccttcctatcgtgtccttgggttcgggtcactgcggcgacgacttgctcagactgtcccggcggccggagtgactttctcgcacccccttgcctgtcccacctcgctgaacaccatcccgccattagcgcatcggaaccccacacagttgcaactcccaaccccgaatctttgcagccgttcggccctgaaagatgccctatccatgagatgccttttcatctgcaaactctgcaaaatgtgtctcatgtttcgcaactctttttttccccctcgctcccgcctaccccgtcggcattttcttcttccaccagcttttactgaactttttggcactgctttggattggggtcaattgcagtccacgtaactggctgcagagaaatctaccgagcaaggaaaaggcacacacacacgtttgcaggggtgtctcggtttgcatttctgttggaatgatccgaactggactcacatcctgtatggtggatggactgtatattgagggttccattcttcgcgcagtttagacatctctgttttgattctttgttgttgtttttattttaaaaggcacaaactctagatattagttgaatgttgaggctttaactttttcggtgtctttctacaactgtgttctgtgactcaattgtatcgtgttaatatcagtgcagactgtctcctctacgtgaccgtataatgtttttctcgtcttgtagtctctatggcgtgtctttatggtgtaataaggttctcacggggtcaatcttttgtgtttagagaggccacggttcagacaatggtatatatttttgttatcaggtgcatgtctgtctgatttctttttttttcctgttggactatgtttgtgaacataattgtcataagttatgtttcagatttttgaatttatttatatgtgttataatgaatgcttctatttaaaagggaaatatttctacatgtgcttatagttttccaagagtgtaccattaacttgattgttgataataaaaaccaaaagcaagtct

SEQ ID NO: 1225 - DNA, 203 bp, Homo Sapiens
gcagccgggcgcggggcgcggagtcggcggggcctcgcgggacgccgggcagtgcggagaccgcggcgctgaggacgcgggagccgggagcgcagccgcggggtggagttcagcctactctttcttagatgtgaaaggaaaggaagatcatttcatgccttgttgataaaggttcagacttctgctgattcataaccatttgg

SEQ ID NO: 1226 - DNA, 806 bp, Homo Sapiens
agcagggggcgctgtgtgtaccgagaatacgagaatacctcgtgggccctgaccttctctctgagagccgggcagaggctccggagccatgcaggccgaaggccggggcacagggggttcgacgggcgatgctgatggcccaggaggccctggcattcctgatggcccagggggcaatgctggcggcccaggagaggcgggtgccacgggcggcagaggtccccggggcgcaggggcagcaagggcctcggggccgggaggaggcgccccgcggggtccgcatggcggcgcggcttcagggctgaatggatgctgcagatgcggggccagggggccggagagccgcctgcttgagttctacctcgccatgcctttcgcgacacccatggaagcagagctggcccgcaggagcctggcccaggatgccccaccgcttcccgtgccaggggtgcttctgaaggagttcactgtgtccggcaacatactgactatccgactgactgctgcagaccaccgccaactgcagctctccatcagctcctgtctccagcagctttccctgttgatgtggatcacgcagtgctttctgcccgtgtttttggctcagcctccctcagggcagaggcgctaagcccagcctggcgccccttcctaggtcatgcctcctcccctagggaatggtcccagcacgagtggccagttcattgtgggggcctgattgtttgtcgctggaggaggacggcttacatgtttgtttctgtagaaaataaaactgagctacgaaaaaaaaaaaaaaaaaaaaaaaa

SEQ ID NO: 1227 - DNA, 1871 bp, Homo Sapiens
atggggcagccgagagagttctggcatctcaggtcccaggttccagttccaacctgccacctgctcaccgtgcagccttggtgcctgcttcctcaccccaccccagctggagggcgtgagcgcaggcacagtgcttcctccctgcttgcggctctgtgcctgaggaaggcggttctgcggccccatcctgctgtcctgcctggagttggagggtgtgtggtcctttcctctgggcggatgaaggctcccttgaggggcggcctggctctggggacagggccagctcccacgaagctgcagcttctccatgactggcagagcgagcctgggccgagtggctggcagcaaggcccttctccgcctctcttcccggcaggcacttccctcgtccagcacctgatgaccgtcctcatccgcaaacacagccagctcttcacggcaccggtcccggaagggcccacctccccgcgcgggggcctgcaatgcgcagtggggtggggctccgaggaggtcaccagggacagccaaggagagcccggcggccccggcctgcccgcgcacaggacctcttccctggacggggcggccgtggcggtgctctccagaacagcccccacggggccggggagccggtgcagccctgggaagaaggtgcagaccctgcccagttggaagtcctccttccggcagccgaggtccctatcgggaagcccgaaggggggcggctcatccctggaggtgcccatcatctcctccggcgggaactggcttatgaacgggctgtcctccctgcgcggacaccgccgggcctcgtcgggagaccggctcaaggactcgggctccgtgcagagactctccacctacgacaatgtgcccgcgccgggcctggtccccggcatacccagcgtggccagtatggcgtggtccggggcctcgtccagcgagtcgtcggtggggggctcactcagcagctgcacggcctgccgcgccagcgactcgtctgcccgcagttccctgcacaccgactgggccctggagccctccccgctccccagcagcagcgaggaccccaagtccctggacctggaccacagcatggacgaggcgggcgcgggtgccagcaacagcgagcccagcgagccggacagccccacccgggaacacgcgcgccgctccgaggccttacaggggctggtcactgagctcagggccgagctgtgccgccagcggactgagtacgagaggagtgtgaaaagaatcgaagaagggagtgctgacctgagaaaacgaatgtcccggttagaagaagaactggaccaggaaaagaaaaaatacatcatgctggaaataaagctgcggaactctgaacgggcgcgggaggatgcggagaggaggaaccagctgttgcagagggaaatggaggagtttttttcgaccctaggaagcttgactgttggggcaaaaggtgccagggccccaaagtaaaaggaatggcagagctcacttctgtaccacgtctgctggtctccagccttgtatggagttagaagcgtctgtatctctggagcagccaggcgctctggagccagctggagagagagagatcctgatacctctgtggggactgtggggacttttgggaccccacacactccaggtgggatcagatgctgctccaaccatgcagttcctggtgagggtcagaaggggacggtaccaagagcagcgcttagcccttacccaggaaatatccttcatggccacagaaatggagggcgcccaggatccaggcagccaccgggaacagtcagctttctttattaaatgtgctcacaaagcaaaaaaaaaaaaaaaaaaaaaaaaaaaaaaaa

SEQ ID NO: 1228 - DNA, 1845 bp, Homo Sapiens
gaagttggctggttgcaccgatctgggggcttcccgggctcgggtaaccggagtgctggtatctaatcgtcgctcaaaagctcctaggtgcgcgggtggatataattcccggcttctcgagaagacactacagcctcaaggaggtatatcccgtgccttacctgactgggggctctgagtccagttgtgttgtcttcaacttagacaccatggaggcacctccagtcaccatgatgcctgtcactgggggcaccattaacatgatggagtacctgttgcagggaagtgttttagatcacagtttggaaagcctcatccaccgccttcgtggtttgtgtgacaacatggaacctgagactttccttgaccatgagatggtattcctccttaagggccagcaagccagcccatttgttctcagggcccgacgctctatggacagggcaggggcaccctggcatctgcgctacctgggacagccagaaatgggagacaagaaccgccatgccctggtgcgaaactgcgtggacattgccacatctgagaacctcaccgacttcttgatggaaatgggcttccgcatggaccatgagtttgttgctaagggacatttgttccgtaagggcatcatgaagattatggtgtacaagactttccgcatcctggtgccagggaacacagacagcactgaggccttgtcactctcctatctcgtggaattaagtgtggtagcacccgctgggcaggacatggtctctgatgacatgaagaacttcgcagaacagctaaaacctctggttcacctagagaaaatagaccccaagaggctcatgtgactaagaggatctgtccacatttggggcctatccttacttgtttgaaaaaatatgtttgctttttttggtttttgttttgttttgtttttgagacggagtctcgctttgtttcccaggctggagtgcagtggcacgatctcggctcactgcaacctctgcctcctgggttcaggcaattctcccacctcagcctcctgagtagctgggattacaggcacatgccaccatgctcagctaatttttgtatttttagtagaaatggggattcaccatgttggtcaggctattctcgaactcctgacctcgtgatccacccaccttggcctcccaaagtgctgggattacaggcatgagccaccacgcctggccaaaaaaatatgttttaaatgtcccatttcaccattgccaggcaggcattcttccttcagggagaggatggtgagaattaattggttctttgcactgttctcctcatgtggcgatttcactttcatgacagcctttctttaaaggctcaggatgtcacggagaatctatctaatcccactgtattaagaggggaaaccgggccaagcgcagtggctcacacctctaatcccagcactttgggaggctgaggtaggtggatcacccaaggtcaggagtttgagaccagcctggccaaatggtgaaaccccatctctacgaaaaatacaaaatttagccgggcatggtagcaggcgcttgtaatcccagctacttgggaggctgaggctggagaatcgcttgaacccaggaggtgaaggttgcagtgaccggagatgacgccattgcactccagcctgggtgagaagagcgaaactccgtctcaaaaaaaaaataaaaatgaagaggggaaaccagaataaattatcttttggaaaggacaatttcttgtttggccatttgtgtacaaggttggtaacattagaggctgtgagcttgtgttacatggtaataaagccaatgaagagaaaaaaaaaaaaaaaaa

SEQ ID NO: 1229 - DNA, 905 bp, Homo Sapiens
  misc_feature (624)..(624): n is a, c, g, or t
  misc_feature (853)..(853): n is a, c, g, or t
aatatctaagctagcactttattttaaaaagtaacttattaatcacacattgatggtacaccttgtatttagcaaatgtttgcatgttgataaaatctcctgtgtcttctttcttaaatccagttgctgattttgtaaaatacagttgtgataaagcagcattacgggggggaaaaagctatattccaactggtgttaaatgtattcaacaaaatcttacatcatacagtatttatttcttaattaatagaacttcagtgatatacttggtagatatctcaagcctttgtcttttacacaatggtgctctatcctatgttttcttttcaaagaagcatctgaacacttgcatttctattttcctatccaaaggcatccacatctaagtgtgtttttaaagttgattaaaattatttttctgttaaagcattctgaaagtgtttgtctttacctagaatgatttgtacacactcgtggtcactgaacatgaatgtcagtagtagtctaattatgggaagggtaaacgtgttagattaaggctcttaaagctctaaacatattaactatggacttgtatcatgatttaactgttcttagatcttttcttacacagtgatttcattncctctatttgtacaggtggctttatgaaatgttgtgcaattgatactgttatccataaaggtgcttttaaccagaaaaaaaaactcgtaactataaacatacaaaaaaggcggggccctgaaataacccccgggggccccccgtttgcgtccccggtttttggaaaagggcccaaggggggtaaaaaaagcacgcgggtttaaaacggctggaaaagggctggctttangcccctttggggcaggcaccccagaccggaaaagttgaccttggattatagc

SEQ ID NO: 1230 - DNA, 545 bp, Homo Sapiens
agcggccgcccttttttttttttttttttttttgttaaaatatcttttaattttaccggcaaaatacatcaatgactaatatattcccgtatggaatatattcttattggaatatattcttatatagaatatatagactatgtatatatacatatgtgtatatacctatatacatatatatatcttggagatataaaactaattgggaataatgtcatatatatagatagtaagcaaacattttttaaaacattttaaagactccaaactattcatttctatccacctataaaaaactagcaattaaacctgtcaaatcacagccatcttgctttacgcagattcagaaacatgagatccttttacctttgaaactctagtttcaaagctgttctaaagtgacttggttttaatttatatacttgcagggataagaagtagctgtagggccataaaaatgtaaagaatacagtatcgtgcccatacacaactgcaaacacttatttttaagtgttcgtaaaagatagtggtcttcagaaacaccc

SEQ ID NO: 1231 - DNA, 2945 bp, Homo Sapiens
ccagccccccttcccttccctgaccccttcttgccatcgccccagacatggggaacgcggcgaccgccaagaaaggcagcgaggtggagagcgtgaaagagtttctagccaaagccaaagaagactttttgaaaaaatgggagaatccaactcagaataatgccggacttgaagattttgaaaggaaaaaaacccttggaacaggttcatttggaagagtcatgttggtaaaacacaaagccactgaacagtattatgccatgaagatcttagataagcagaaggttgttaaactgaagcaaatagagcatactttgaatgagaaaagaatattacaggcagtgaattttcctttccttgttcgactggagtatgcttttaaggataattctaatttatacatggttatggaatatgtccctgggggtgaaatgttttcacatctaagaagaattggaaggttcagtgagccccatgcacggttctatgcagctcagatagtgctaacattcgagtacctccattcactagacctcatctacagagatctaaaacctgaaaatctcttaattgaccatcaaggctatatccaggtcacagactttgggtttgccaaaagagttaaaggcagaacttggacattatgtggaactccagagtatttggctccagaaataattctcagcaagggctacaataaggcagtggattggtgggcattaggagtgctaatctatgaaatggcagctggctatcccccattctttgcagaccaaccaattcagatttatgaaaagattgtttctggaaaggtccgattcccatcccacttcagttcagatctcaaggaccttctacggaacctgctgcaggtggatttgaccaagagatttggaaatctaaagaatggtgtcagtgatataaaaactcacaagtggtttgccacgacagattggattgctatttaccagaggaaggttgaagctccattcataccaaagtttagaggctctggagataccagcaactttgatgactatgaagaagaagatatccgtgtctctataacagaaaaatgtgcaaaagaatttggtgaattttaaagaggaacaagatgacatctgagctcacactcagtgtttgcactctgttgagagataaggtagagctgagaccgtccttgttgaagcagttacctagttccttcattccaacgactgagtgaggtctttattgccatcatccgtgtgcgcactctgcatccacctatgtaacaaggcaccgctaagcaagcattgtctgtgccataacacagtactagaccactttcttacttctctttgggttgtctttctcctctcctacatccatttcttccttttcaatttcattggttttctctaaacagtgctccattttattttgttggtgtttcagatgggcagtgttatggctacgtgatatttgaagggaaggataagtgttgctttcagtagttattgccaatattgttgttggtcaatggcttgaagataaactttctaataattattatttctttgagtagctcagacttggttttgccaaaactcttggtaatttttgaagatagactgtcttatcaccaaggaaatttatacaaattaagactaactttcttggaattcactattctggcaataaattttggtagactaatacagtacagctagacccagaaatttggaaggctgtagatcagaggttctagttccctttccctccttttatatcctcctctccttgagtaatgaagtgaccagcctgtgtagtgtgacaaacgtgtctcattcagcaggaaaaactaatgatatggatcatcacccagattctctcacttggtaccagcatttctgtaggtattagagaagagttctaagttttctaaaccttaactgttccttaaggattttagccagtattttaatagaacatgattaatgaaagtgacaaattttaaattttctctaatagtcctcatcataaactttttaaaggaaaataagcaaactaaaaagaacattggtttagataaatacttatactttgcaaagtcaaaaatggcttgatttttggaaacaatatagaggtattcatatttaaatgagggtttacatttgttttgttttgtaaccgttaaaaagaagttgtttccagctaattattgtggtgtactatatttgtgagcctagggtaggggcactgctgcaacttctgctttcatcccatgcctcatcaatgaggaaagggaacaaagtgtataaaacctgccacaattgtattttaattttgaggtatgatattttcagatatttcataatttctaacctctgttctctcagtaaacagaatgtctgatcgatcatgcagatacaatgttggtatttgagaggttagtttttttcctacacttttttttgccaactgacttaacaacattgctgtcaggtggaaatttcaagcacttttgcacatttagttcagtgtttgttgagaatccatggcttaacccacttgttttgctatttttttctttgcttttaattttccccatctgattttatctctgcgtttcagtgacctaccttaaaacaacacacgagaagagttaaactgggttcattttaatgatcaatttacctgcatataaaatttatttttaatcaagctgatcttaatgtatataatcattctatttgctttattatcggtgcaggtaggtcattaacaccacttcttttcatctgtaccacaccctggtgaaacctttgaagacataaaaaaaacctgtctgagatgttctttctaccaatctatatgtctttcggttatcaagtgtttctgcatggtaatgtcatgtaaatgctgatattgatttcactggtccatctatatttaaaacgtgc

SEQ ID NO: 1232 - DNA, 625 bp, Homo Sapiens
ttgaatttaggtgacactatagaagagctatgacgtcgcatgcacgcgtacgtaagcttggatcctctagagcggccgcctactactactaaattcgcggccgcgtcgacttttttttttttttttttacagcttcctctttgccccttcattgccctcaaaaagaggcccatctgcaggactcttatgcctcatcctatcttagctcaaaggtggaaatctgcacacagcctagaagggataccagatcttagtactgacaggcctcttcccagggttggggttgttccttctgcctgaaatcacaagcttcctggggcggagctcccgcctaagtgcaggcactgagggccgcctacgtgagcctcacggtcactcaccgggtgcgttatctgaaggactggaaggacatcacacccaattatttccccaaataattaccaaggactccaacattttgctactaaaaatgcattcctttgatctgtccacccaatgtcaagctctttcaaaagtaaatgctcctgggagaggcattcatgctatagtgttatgacttacaattcagactatagccttaatgacttattagggctatgtttttctcattccccttgaaaggcga

SEQ ID NO: 1233 - DNA, 548 bp, Homo Sapiens
gtcattagttatcattagtttattataaaagagaaatatggaaattatttacatgacgaaagatttcagaacttcagtggaatgggcagcatcatgttgatgccatttcaatagtgacttatttcagtctacgtactttccaagaatgtcaccatctctaaataggaaataatccttgtcatctagaactactttggtgcctccatattctgggagaagaactttatctccaactttcacgctaactggttgaatctctccaccctttcctttagaacccgatccaacagcgactactgttgcttgcaatacttttccttgagatttttctggaagcataatgcctcctttggttacagtttcagcagcactcctttcaaccaatactcggtcaaagagtggaagaaactttctaaacgcttgtcctgccattactccctccgcctcagactcgtactctgctctagtgtagcgccgcaaagagactcgcagtccggccctggcgacaccgtgaaaaaatcacccagcgcgcaggcgcgctcgccccc

SEQ ID NO: 1234 - DNA, 658 bp, Homo Sapiens
gcgacaggtataatacatataaacaaccaaaatacaattcaatgcaaagtagaatagacatcatattgcaccaaaatttatccatacaaaagcacatgcatcaagagtttccataagatgaaaacaaacacacttacttcatagcatcttaccacttacttacacaaatagcccataaacaccatctggcattgtgattgcagtaccagaactctccccagaggaaactcatttagctatagaagaatccattttatttcacatatcacatgcttgtgctggcatcagtgcaaggaaccctaagaaacaacgcaatccacagatgaaagtctctctgcaccatttatatcttcttagataaatatcttagttctaatatgattggaatgtggatgctgaaataaaaatgcagtttggctctttaagaattttatcaatgtaagacattgtattaaatttgtataaaatacacacaatcccctctactaaagtttcatgatcacagtgccagagtgaagaaactctgcttgagttgaggaccagtcagttaggatatagaggatcactcttttccaagcaggatctctctgttcttgtgtttccatcactagaccaaaccacgatgccctgaaatctgggatggacaggtctactaatg

SEQ ID NO: 1235 - DNA, 2290 bp, Homo Sapiens
acttggtctggggctggccacatggagcccgggctggagcacgcactgcgcaggaccccttcctggagcagccttgggggttctgagcatcaagagatgagcttcctagagcaagaaaacagcagctcatggccatcaccagctgtgaccagcagctcagaaagaatccgtgggaaacggagggccaaagccttgagatggacaaggcagaagtcggtggaggaaggggagccaccaggtcagggggaaggtccccggtccaggccagctgctgagtccaccgggctggaggccacattccccaagaccacacccttggctcaagctgatcctgccggggtgggcactccaccaacagggtgggactgcctcccctctgactgtacagcctcagctgcaggctccagcacagatgatgtggagctggccacggagttcccagccacagaggcctgggagtgtgagctagaaggcctgctggaagagaggcctgccctgtgcctgtccccgcaggccccatttcccaagctgggctgggatgacgaactgcggaaacccggcgcccagatctacatgcgcttcatcgaggagcacacctgctacgatgccatggcaactagctccaagctagtcatcttcgacaccatgctggagatcaagaaggccttctttgctctggtggccaacggtgtgcgggcagcccctctatgggacagcaagaagcagagctttgtggggatgctgaccatcactgacttcatcctggtgctgcatcgctactacaggtcccccctggtccagatctatgagattgaacaacataagattgagacctggagggagatctacctgcaaggctgcttcaagcctctggtctccatctctcctaatgatagcctgtttgaagctgtctacaccctcatcaagaaccggatccatcgcctgcctgttcttgacccggtgtcaggcaacgtactccacatcctcacacacaaacgcctgctcaagttcctgcacatctttggttccctgctgccccggccctccttcctctaccgcactatccaagatttgggcatcggcacattccgagacttggctgtggtgctggagacagcacccatcctgactgcactggacatctttgtggaccggcgtgtgtctgcactgcctgtggtcaacgaatgtggtcaggtcgtgggcctctattcccgctttgatgtgattcacctggctgcccagcaaacctacaaccacctggacatgagtgtgggagaagccctgaggaagaggacactatgtctggagggagtcctttcctgccagccccacgagagcttgggggaagtgatcgacaggattgctcgggagcaggtacacaggctggtgctagtggacgagacccagcatctcttgggcgtggtctccctctccgacatccttcaggcactggtgctcagccctgctggcatcgatccctcggggcctgagaagatctgagtcctcaatcccaagccacctgcacacctggaagccaatgaagggaactggagaactcagccttcatcttcccccacccccatttgctggttcagctatgattcaggcttcttcaggccctcccaaattgcccttgccctaccagagctcccagaagccctcggcatgccagtgcaccatgggatgatgaaattaaggagaacagctgagtcaagcttggaggtccctgaaccagaggcactaggattaccccagggccatctgtgctccatgcccgcccatccccttgccgcctgactgggtcggatggcccccagtgggtttagtcagggcttctggatcctcggtttctgggctacctatgcttcaccttcagctcctgggagttcccagcaacgtcgccactgcccctcctactctccaggggttggtcatttcaaggctgctgaaatgctgcatttcagggggccaccatggagcagccgttatttatagaactgccctgttggaggtggggagtcctccctccattcttgtccagaaaactccttagctctcgcagtgagcccatgttcttagtctccagggatggatggccttgtatatggacccctgagaatgagcaattgagaaaacaaaacaaaaggaacaatccatgaacttagattttattggtttcactcaaaatgctgcagtcatttgacctgaacttgtggcaagagacttgtgctttctaaattcaaagactagaagggaaatggataaaaatcacaagtgccgtttctcttgc

SEQ ID NO: 1236 - DNA, 442 bp, Homo Sapiens
  misc_feature (354)..(354): n is a, c, g, or t
ccaatttttttctctttttttttttttttattgtgaacacaattttctttatttcatttttggagttttctgaacagaaaaatacaattgattttctgtatattgatctagcctgtgaccttgctgaacttgattaattctattacactatgattttttgttgtggttagacccttacacaatcaaatgaggttaaaaaaaattgtcagagtggccccagaccaacaacaggatgacagtagcctttgcccatacagagataaaatttagtttttgcagtcctttcccatagagattgtatgggcagtagccaattctatggcctactgccatacaacctgaactgaagtccanaaagtttaggtgactgggccacagagctaattacctgggtggagccaagaagagaaattatatccctacctccttgcccactaagctc

SEQ ID NO: 1237 - DNA, 529 bp, Homo Sapiens
  misc_feature (393)..(393): n is a, c, g, or t
ctgtttcttcaatggttctcttcccttttccatcctccaaacctggcctgagcctcctgaagttgctgctgtgaatctgaaagacttgaaaagcctccacctgctgtgtggacttcatctcaaggggcccagcctcctctggactccaccttggacctcagtgactcagaacttctgcctctaagctgctctaaagtccagactatggatgtgttctctaggccttcaggactctagaatgtccatatttatttttatgttcttggctttgtgttttaggaaaagtgaatcttgctgttttcaataatgtgaatgctatgttctgggaaaatccactatgacatctaagttttgtgtacagagagatatttttgcaactatttccaccttctnccacaaccccccacactccactccacactcttgagtctctttacctaatggtctctacctaatggaccctcgtggccaaaaagtccattaaaccagaaaggtgattggaaaaaaaaaaaaaaaaactcgagggggg

SEQ ID NO: 1238 - DNA, 325 bp, Homo Sapiens
  misc_feature (238)..(238): n is a, c, g, or t
  misc_feature (299)..(299): n is a, c, g, or t
  misc_feature (308)..(308): n is a, c, g, or t
  misc_feature (320)..(320): n is a, c, g, or t
aatgcttgttggcatctgtcaaatcaatactgaaaggatgcatttcggcttttaaccagtttggttctgatcattgcaacctctgtgcttttataattcaaagaacaaggatagctttcttcggtatcttttaatataagaacactgaattttggcttgaaatattgtgactaaattgcacaatctctggctattagcactgttcactacattaacatgcaagagagagagaagcctngttacatttcctgctatttaacaaactgtccaattaggtcagcaaagcctgtttagggccnttcactgcnacgcccctggcnccaca

SEQ ID NO: 1239 - DNA, 310 bp, Homo Sapiens
ttttttttttacattttagatttattttattatttttaatgaactatgtttaacattttacaaatcttcaggttgttacagttttcagcagtaaatatagtagtaacagcaataaatacaccgaaatatgagatttctctgaaagaatacaaaaaatagaaacacctggaaacaagaaggcaaaatgtcaattctagatctgaaatagaaattaatacagctgaattcctttacaatgctcgtacatgggaaaatgagaaactcatgcgccttataaatgaatgtgtgactttgagcttcacctttttag

SEQ ID NO: 1240 - DNA, 398 bp, Homo Sapiens
gaactggacaccgaacagcagctctgggtcaaatttcagctgcaggaaatagccactcagctgctgcacgtactccttccgattacaatcttgatggtctcccctatgaggatgaggcgggtcgtctggaaaagctgctcatcgccccaggtggggtgctcagccttcagcaggtcacacacacggttgtgctcatgtagccagagcgtggcatacagcatgagcccaggaagcagcccaaacacctcctggcccacagccatctggctctggggcgggatgcctcgggggtagtgcatcaacacaggcgcctcttctaccgagggcgggtacatttctccatccagcacctggtacttgagtttcccatccttaaagaaccgcagttgaaagacgca

SEQ ID NO: 1241 - DNA, 1611 bp, Homo Sapiens
atgtctggggtctctgcccgctggtgctgctgtctcccactcggtcatcctgagaacacagcctgagcgtctctgtcactcggggtagaccacgcggggaggcgagcaagatggcgcagacgcagggcacccggaggaaagtctgttactactacgacggggatgttggaaattactattatggacaaggccacccaatgaagcctcaccgaatccgcatgactcataatttgctgctcaactatggtctctaccgaaaaatggaaatctatcgccctcacaaagccaatgctgaggagatgaccaagtaccacagcgatgactacattaaattcttgcgctccatccgtccagataacatgtcggagtacagcaagcagatgcagagattcaacgttggtgaggactgtccagtattcgatggcctgtttgagttctgtcagttgtctactggtggttctgtggcaagtgctgtgaaacttaataagcagcagacggacatcgctgtgaattgggctgggggcctgcaccatgcaaagaagtccgaggcatctggcttctgttacgtcaatgatatcgtcttggccatcctggaactgctaaagtatcaccagagggtgctgtacattgacattgatattcaccatggtgacggcgtggaagaggccttctacaccacggaccgggtcatgactgtgtcctttcataagtatggagagtacttcccaggaactggggacctacgggatatcggggctggcaaaggcaagtattatgctgttaactacccgctccgagacgggattgatgacgagtcctatgaggccattttcaagccggtcatgtccaaagtaatggagatgttccagcctagtgcggtggtcttacagtgtggctcagactccctatctggggatcggttaggttgcttcaatctaactatcaaaggacacgccaagtgtgtggaatttgtcaagagctttaacctgcctatgctgatgctgggaggcggtggttacaccattcgtaacgttgcccggtgctggacatatgagacagctgtggccctggatacggagatccctaatgagcttccatacaatgactactttgaatactttggaccagatttcaagctccacatcagtccttccaatatgactaaccagaacacgaatgagtacctggagaagatcaaacagcgactgtttgagaaccttagaatgctgccgcacgcacctggggtccaaatgcaggcgattcctgaggacgccatccctgaggagagtggcgatgaggacgaagacgaccctgacaagcgcatctcgatctgctcctctgacaaacgaattgcctgtgaggaagagttctccgattctgaagaggagggagaggggggccgcaagaactcttccaacttcaaaaaagccaagagagtcaaaacagaggatgaaaaagagaaagacccagaggagaagaaagaagtcaccgaagaggagaaaaccaaggaggagaagccagaagccaaaggggtcaaggaggaggtcaagttggcctgaatggacctctccagctctggcttcctgctgagtccctcacgtttctttcccc

SEQ ID NO: 1242 - DNA, 1079 bp, Homo Sapiens
gaattcggcacgagagcactccaagcactgctgtcttctcacagagtcttgaagccagagcagcgccaggatgtcacgggagctggccccactgctgcttctcctcctctccatccacagcgccctggccatgaggatctgctccttcaacgtcaggtcctttggggaaagcaagcaggaagacaagaatgccatggatgtcattgtgaaggtcatcaaacgctgtgacatcatactcgtgatggaaatcaaggacagcaacaacaggatctgccccatactgatggagaagctgaacagaaattcaaggagaggcataacgtacaactatgtgattagctctcggcttggaagaaacacatataaagaacaatatgcctttctctacaaggaaaagctggtgtctgtgaagaggagttatcactaccatgactatcaggatggagacgcagatgtgttttccagggagccctttgtggtctggttccaatctccccacactgctgtcaaagacttcgtgattatccccctgcacaccaccccagagacatccgttaaggagatcgatgagttggttgaggtctacacggacgtgaaacaccgctggaaggcggagaatttcattttcatgggtgacttcaatgccggctgcagctacgtccccaagaaggcctggaagaacatccgcttgaggactgaccccaggtttgtttggctgatcggggaccaagaggacaccacggtgaagaagagcaccaactgtgcatatgacaggattgtgcttagaggacaagaaatcgtcagttctgttgttcccaagtcaaacagtgtttttgacttccagaaagcttacaagctgactgaagaggaggccctggatgtcagcgaccactttccagttgaatttaaactacagtcttcaagggccttcaccaacagcaaaaaatctgtcactctaaggaagaaaacaaagagcaaacgctcctagacccaagggtctcatcttattaaccatttcttgcctctaaataaaatgtctctaacaaaaaaaaaaaaaaaaaaaaaaaaaaaaactcgag

SEQ ID NO: 1243 - DNA, 183 bp, Homo Sapiens
  misc_feature (11)..(11): n is a, c, g, or t
  misc_feature (103)..(103): n is a, c, g, or t
  misc_feature (108)..(108): n is a, c, g, or t
  misc_feature (170)..(170): n is a, c, g, or t
cacgggtgcgngcccacgaccgccagactcgagcagtctctggaacacgctgcggggctcccgggccttagccaggtctgttctccacgcaggtgttccgtgngcccngttcagccatgtcgtccggcatccatgtagcgctggtgacttgaggcaacaaggggcatcgncttggccatcgtg

SEQ ID NO: 1244 - DNA, 350 bp, Homo Sapiens
ttttttttaacttataagataggcctttcctgatgccaaataagggcaatgatcagcttccccattcctggagccaggacctgccacatcatttgcagtgcaaaatgcaaatgagagccccttgttcaaagagcaagataaaagtgccatcctaggcgctcaaaatacaaaggttcctcctttcttctatggtctgtcaattggtcaaggcattttaatttgctacttaatgtcatgcttgctgggcactggaatactcatgcggtgagtgtaggatcccacgggtatctggaggctcgccctgcaatttagcatgtgcaaggagctccccacctctgccagcccaggat

SEQ ID NO: 1245 - DNA, 457 bp, Homo Sapiens
atgcaacacactcacaacactgacaataatttaattaataaagagtccaccttttaatattcgtgtttaacacatctatgggtttggtagaaagcaaattcatgaccttgaaatagtagtaggtgataacatgtgacttgccagtaaattctcatatcttcactgtcacttaggagataatcgaagaatatgaacatatttaattcctaaagttcctgcaataacctacatacaccttaacattcagctttattaaacaggctttttgaaatagcatgtgaagaagttatcgctgtgcctcattttgaatggtattttctgcttcattttgattttcaacagcaaaaggatatggtgctcttcctaaaagaaactgttcccatttgggaatatattcttctactgatgcccagtaacgagtctcaagagaaaccacctcaggccgtggaagtgggtg

SEQ ID NO: 1246 - DNA, 2208 bp, Homo Sapiens
atgggcaagtacacggtccgcgtagccaccggggatttgctcctggcgggctctcccaacctggtgcagctatggctggtgggcgagcacggggaggcagacctagggaagcagctgccaccggtgtggggaaaggaggcagagtttgagatcgacgtccccctgcacctggggcgcctcctgatggtgaagctgcgcaaacacaacgtgctgttgagtctcgactggttctgcaagtggatctcagtgcagggcccggggacccaaggcgcggcctttttcccctgctaccgctgggtgcagggccacggaattatctgcctgcctgagggtactggtggggctcctggaaagatgggttaatcctgcctatagcagggaataggcaaccggaccttcctagggacgagcgattcctcgaggataaggatttagactttaatgtctccctagcaaaagggttgaaggacttggccattaaggggacactggatttcataaattgtgtgaaaaggctggaagatttcaaaaaaatattcccacatggaaagactgtcctggctgagcgggtttatgattcttggaagaatgatgccttctttgggtaccagtttctcaatggtgcaaaccccatgctcctgaggtgttcttcaaggctcccagcctgcctggtgctgcctccagggatggaagacttgaagacccagctggagaaagaactccaggctggatctctgtttgaagtggatttctccttgctggatggagtcaagcctaatgtcatcatttttaagcagcaatgcgtggcagcccctttggtcgtgctgaagcttcagcctgatggaggactcttacccatggtcatccagctccagccaccttgacacggatgtcccccacctctgctctttctgccctcgcatccccccatggcctggctcctggccaagacctgggtccggagctctgatttccagctgcagcagttacagtcacatctgctgaggggacacttgattgctgaggttattgctgtggctacaatgagaagcttgcctagcctccatcctatctacaagctcctgatcccccacttccgctacaccatggcgatcaacacgctggcccagagtagtcttgtctccgaatggggaatttttgacctggtggtgagcactggtagtggaagccacgtggacattcttcagagagccatggcttgtttgacctatcattccctctgtcctcctgatgacctggctgaccgtgggctcctggatgtgaaatcttctttttatggctaagatgccatcaggctgtggggaatcatcagccgggaataggtacgtggaggggatggttgggcttttctacaatagtgaccaagccatgaaggatgatctagagctgcaggcctggtgcagagagatgactgagactggactgcagagggcccaagaccaggggttcctcatctccttagagtcccgggctcagctctgccactttgtcaccatgtgcatcttcacatgcacaggtcagcatgcttctaaccacctgggccagctggactggtactcctggatccctaatggcccatgcaccatgcagaagcccccgcccatctctaaggatgtgacagagaaggatatagtggacttactgcccaatctccaccaggcacgtatgcaaaagaccttcacaaagttccttggcagacgccagcctgtcatgcatgaggagaaatatttctctggtcctgagccccaagctgtgctgagacaattccaggaggaactggcttccatggacaaggagattgaggtccggaatgcagtcctggacctgccctgtgagtacctttgacccagcatggtagagaacagcgtgaccatctgagaggccttgccgcctcagctccaaagctccaccatccctgagtgcctttgagtattccgtcctcctcacatcctctggtgaacaaattgtccccaaagctttgtggtcagggtatccagagctgctcaccacacaactatggggaatacacagtgatggtccccattgcatttggaagtggcatcccccaaagctgccctaccttaaatgtccatccagtcctgcacttcctcaccccgatccctgcacacctcctcattgccaaaggacctggcttagatacaagtaaaaatatatgattaaataaca

SEQ ID NO: 1247 - DNA, 578 bp, Homo Sapiens
  misc_feature (502)..(502): n is a, c, g, or t
caaggattacgaaattcttctgtcttagttacaaacaaaatgcagctatgaagcactgggaagtaaatgcaaaatatagaaagaatcttcatgattctcccaaactgtaagcacagctcacaaagtctcattgctttagaatgttttctggatgaacaagttaccagctgcaaaccgacttcagaagtgaggaaaatgttttctcatgtttcatgtagctgtcaaattttcaaaaatcctccatccttcaatcacccagtggggaaaatgtgttataaaacactgccccctggagtattctgggaggaatgtcttaaaaaaaaaaaaaaaacagcaaggagaaagtactttcaaattctttactaaccactaacagaatttctaagaagcaaaagaaaaccacagaaaggaaatgtacatgaataaagttgagcaggatgtgtacaactttaaactgtattgtattcatgttgctaaacaatattggccttctcgatgattntattcatgttgctccaaagttaaccctgtagaactaagtaggtgaagagatattttgtataagtgccacagaagag

SEQ ID NO: 1248 - DNA, 513 bp, Homo Sapiens
aatcttcatgctacagtcgaaagcacacaaacacacaaaaaaacaaacacaaacatatacacacacagggacaaaatacttacacctgcaagggaataaagatgtgagagtatgtctccattgttcactgtagcatagggatagataagatcctgctttatggggacttggcgcagataatgtatatatttagcaactgtgcactatgataaagtaccttatgtagtgcactttaaatctctctccggagggtactttaatgtgaaatgcactttatgcacagttatgtcttataacttgagttgaaaatcacaactttgtgcacccatgtcacagaaatacttgttacgcattgttcaaagtgaaggaaatttctaataatcccgaataatgaacgtagaaatctatctccataaattgagagaagaggaaggtgataagtgttgaaaattaagtgtgataacctttgaaccttgaattgtggagatgtattcccaagaggagaatgcgact

SEQ ID NO: 1249 - DNA, 684 bp, Homo Sapiens
tttttccattttccaatatgtgacctttattcccaccatgtcccaaataaacgagtcctaggatttcctagaaggtggacctcaattattgtgtcccttttatatataaggcaaacattgcttttaagttctgttggaacatgggaactttcactagaatgcttagaatgttcagaaaaaatgtcccaaagctctcttctggtccatacaagacaatcagaatgtaacacagtagcagagggtgtggaacatacactagtcatatttgattctctctgtcaggggttcttctttgtaatgggaaataatttgaatcaggatggaacaattgataagaagaaagaacaaaccagctaaccaaataaacagaaaggtgttctttccttgaaactctagaacataggcaggagccagccacatggcctgccctataaaccataacattaggagaactacagctcttttccaaggcattctgactagtggcatcacaagaggcaggaagcagaggtaccaaagaaagtactgggaggtgcagactttgttaaaagtcacaaaaatggacgtgtgaagaaaacaacaaaaaacgaggtctctgtaataggcgaaagacacaactgaaagccagatgagctgtggcaaggatgcagcaattcccaggaaaaaactcacggacgcgtgggt

SEQ ID NO: 1250 - DNA, 1262 bp, Homo Sapiens
ctcagagccttcctgatgtatatatgcaggtagtgagaattgaatcggccctttgagacagtaatataataaaactctgatttggggagcagcggttctccttatttttctactctcttgtgggaatgagttgccaagcttttacttcggctgatacctttatacctctgaattctgacgcctctgcaactctgcctctgataatgcatcacagtgctgccgagtgtctaccagtctccaaccatgccaccaatgtgatgtctacagcaacaggacttcattattctgttccttcctgtcattatggaaaccagccatcaacctatggagtgatggcaggtagtttaaccccttgtctttataaatttcctgaccacaccttgagtcatggatttcctcctatacaccagcctcttctggcagaggaccccacagctgctgatttcaagcaggaactcaggcggaaaagtaaattggtggaagagccaatagacatggattctccagaaatcagagaacttgaaaagtttgccaatgaatttaaagtgagacgaattaaattaggatacacccagacaaatgttggggaggccctggcagctgtgcatggctctgaattcagtcaaacaacaatctgccgatttgaaaatctgcagctcagctttaaaaatgcatgcaaactgaaagcaatattatccaaatggctggaggaagctgagcaagtaggagctttgtacaatgaaaaagtgggagcaaatgaaaggaaaagaaaacgaagaacaactataagcattgctgctaaagatgctctggagagacactttggagaacagaataaaccttcttctcaagagatcatgaggatggctgaagaactgaatctggagaaagaagtagtaagagtttggttttgcaaccggaggcagagagaaaaacgggtgaaaacaagtctgaatcagagtttattttctatttctaaggaacatcttgagtgcagataagatttttctattgtataatagcctttttctcccgtttcattcctttctcttcctcaacaaaaacagaaattacttggttgacttaaaatcattttatatcaatagcttttacagaagctttacttttccacttttttttaaaaaaaagaaaccaacaatttaaattatattgatgttatttacttaaaataattattctcagaagccacattatctattttaagccaaatatattaacagtaataaaatgatctctctgtc

SEQ ID NO: 1251 - DNA, 365 bp, Homo Sapiens
cttgagcccaggaggtggaggttgcagtgagctgagattgagccactgcactccagcctgggcaacagagtgagactctgtctcaaaaaaacaaaacaaaatgaaacaaaacaaaacaagtcaaacagtacaaggagtcttctcttcttccttccagtcccacccctctataatgaatgagtgataatggtaacagtttggtggtctccttcctttttgatgcttatacaaacatgttcaaagatatatgtgcatataagattctttcaaacactggatcgtactgtaatatattaaaataacagactcttttcacttaacattttttcatggacatctgtccagatcaatccatttatatataa

SEQ ID NO: 1252 - DNA, 1164 bp, Homo Sapiens
gtcgccgctgccgggttgccagcggagtcgcgcgtcgggagctacgtagggcagagaagtcatggcttctccgtccaaaggcaatgacttgttttcgcccgacgaggagggcccagcagtggtggccggaccaggcccggggcctgggggcgccgagggggccgcggaggagcgccgcgtcaaggtctccagcctgcccttcagcgtggaggcgctcatgtccgacaagaagccgcccaaggaggcgtccccgctgccggccgaaagcgcctcggccggggccaccctgcggccactgctgctgtcggggcacggcgctcgggaagcgcacagccccgggccgctggtgaagcccttcgagaccgcctcggtcaagtcggaaaattcagaagatggagcggcgtggatgcaggaacccggccgatattcgccgccgccaagacatacgagccctaccacctgcaccctgaggaaacacaagaccaatcggaagccgcgcacgccctttaccacatcccagctcctcgccctggagcgcaagttccgtcagaaacagtacctctccattgcagagcgtgcagagttctccagctctctgaacctcacagagacccaggtcaaaatctggttccagaaccgaagggccaaggcgaaaagactgcaggaggcagaactggaaaagctgaaaatggctgcaaaacctatgctgccctccagcttcagtctccctttccccatcagctcgcccctgcaggcagcgtccatatatggagcatcctacccgttccatagacctgtgcttcccatcccgcctgtgggactctatgccacgccagtgggatatggcatgtaccacctgtcctaaggaagaccagatcaatagactccatgatggatgcttgtttcaaagggtttcctctccctctccacgaaggcagtaccagccagtactcctgctctgctaaccctgcgtgcaccaccctaagcggctaggctgacagggccacacgacatagctgaaatttcgttctgtaggcggaggcaccaagccctgttttcttggtgtaatcttccagatgcccccttttcctttcacaaagattggctctgatggtttttatgtataaatatatatatataataaaatataatacatttttatac

SEQ ID NO: 1253 - DNA, 494 bp, Homo Sapiens
  misc_feature (3)..(3): n is a, c, g, or t
  misc_feature (188)..(188): n is a, c, g, or t
  misc_feature (321)..(321): n is a, c, g, or t
  misc_feature (477)..(477): n is a, c, g, or t
gtncagtggtgcggtcttggatcactgcaagctctgcctcccgggttcatgccattctcccgcctcagcctcccaagtagctgggactacaggcatgcaccaccatgcccagctaattttttgtatttttagtagagacagggttttgccatgttggtcaggctggtctcgaactcctaatctcaggngatccacctgcctcgcctcccaaagtgctgggattacaagcatgagcagccgcgtccagccctatatatgtacagctttttatatatcagttgaacctcaataaaattagttttcagtaagagatacagagtnctgttactgtcattcaaaattgttggggaaaagaaagtgtcttttctctgtccttttttgctatttcagagaaggaaggaatgggaaaccaatgttccccaagtgtgttctgtgtctcagatgaacagacgtgggaggcaacctcacacatgctantctttcatcctcacggc

SEQ ID NO: 1254 - DNA, 5927 bp, Homo Sapiens
ccaggcggcgttgcggccccggccccggctccctgcgccgccgccgccgccgccgccgccgccgccgccgccgccgccagcgctagcgccagcagccgggcccgatcacccgccgcccggtgcccgccgccgcccgcgccagcaaccgggcccgatcacccgccgcccggtgcccgccgccgcccgcgccaccggcatggcgctccggggcttctgcagcgccgatggctccgacccgctctgggactggaatgtcacgtggaataccagcaaccccgacttcaccaagtgctttcagaacacggtcctcgtgtgggtgccttgtttttacctctgggcctgtttccccttctacttcctctatctctcccgacatgaccgaggctacattcagatgacacctctcaacaaaaccaaaactgccttgggatttttgctgtggatcgtctgctgggcagacctcttctactctttctgggaaagaagtcggggcatattcctggccccagtgtttctggtcagcccaactctcttgggcatcaccacgctgcttgctacctttttaattcagctggagaggaggaagggagttcagtcttcagggatcatgctcactttctggctggtagccctagtgtgtgccctagccatcctgagatccaaaattatgacagccttaaaagaggatgcccaggtggacctgtttcgtgacatcactttctacgtctacttttccctcttactcattcagctcgtcttgtcctgtttctcagatcgctcacccctgttctcggaaaccatccacgaccctaatccctgcccagagtccagcgcttccttcctgtcgaggatcaccttctggtggatcacagggttgattgtccggggctaccgccagcccctggagggcagtgacctctggtccttaaacaaggaggacacgtcggaacaagtcgtgcctgttttggtaaagaactggaagaaggaatgcgccaagactaggaagcagccggtgaaggttgtgtactcctccaaggatcctgcccagccgaaagagagttccaaggtggatgcgaatgaggaggtggaggctttgatcgtcaagtccccacagaaggagtggaacccctctctgtttaaggtgttatacaagacctttgggccctacttcctcatgagcttcttcttcaaggccatccacgacctgatgatgttttccgggccgcagatcttaaagttgctcatcaagttcgtgaatgacacgaaggccccagactggcagggctacttctacaccgtgctgctgtttgtcactgcctgcctgcagaccctcgtgctgcaccagtacttccacatctgcttcgtcagtggcatgaggatcaagaccgctgtcattggggctgtctatcggaaggccctggtgatcaccaattcagccagaaaatcctccacggtcggggagattgtcaacctcatgtctgtggacgctcagaggttcatggacttggccacgtacattaacatgatctggtcagcccccctgcaagtcatccttgctctctacctcctgtggctgaatctgggcccttccgtcctggctggagtggcggtgatggtcctcatggtgcccgtcaatgctgtgatggcgatgaagaccaagacgtatcaggtggcccacatgaagagcaaagacaatcggatcaagctgatgaacgaaattctcaatgggatcaaagtgctaaagctttatgcctgggagctggcattcaaggacaaggtgctggccatcaggcaggaggagctgaaggtgctgaagaagtctgcctacctgtcagccgtgggcaccttcacctgggtctgcacgccctttctggtggccttgtgcacatttgccgtctacgtgaccattgacgagaacaacatcctggatgcccagacagccttcgtgtctttggccttgttcaacatcctccggtttcccctgaacattctccccatggtcatcagcagcatcgtgcaggcgagtgtctccctcaaacgcctgaggatctttctctcccatgaggagctggaacctgacagcatcgagcgacggcctgtcaaagacggcgggggcacgaacagcatcaccgtgaggaatgccacattcacctgggccaggagcgaccctcccacactgaatggcatcaccttctccatccccgaaggtgctttggtggccgtggtgggccaggtgggctgcggaaagtcgtccctgctctcagccctcttggctgagatggacaaagtggaggggcacgtggctatcaagggctccgtggcctatgtgccacagcaggcctggattcagaatgattctctccgagaaaacatcctttttggatgtcagctggaggaaccatattacaggtccgtgatacaggcctgtgccctcctcccagacctggaaatcctgcccagtggggatcggacagagattggcgagaagggcgtgaacctgtctgggggccagaagcagcgcgtgagcctggcccgggccgtgtactccaacgctgacatttacctcttcgatgatcccctctcagcagtggatgcccatgtgggaaaacacatctttgaaaatgtgattggccccaaggggatgctgaagaacaagacgcggatcttggtcacgcacagcatgagctacttgccgcaggtggacgtcatcatcgtcatgagtggcggcaagatctctgagatgggctcctaccaggagctgctggctcgagacggcgccttcgctgagttcctgcgtacctatgccagcacagagcaggagcaggatgcagaggagaacggggtcacgggcgtcagcggtccagggaaggaagcaaagcaaatggagaatggcatgctggtgacggacagtgcagggaagcaactgcagagacagctcagcagctcctcctcctatagtggggacatcagcaggcaccacaacagcaccgcagaactgcagaaagctgaggccaagaaggaggagacctggaagctgatggaggctgacaaggcgcagacagggcaggtcaagctttccgtgtactgggactacatgaaggccatcggactcttcatctccttcctcagcatcttccttttcatgtgtaaccatgtgtccgcgctggcttccaactattggctcagcctctggactgatgaccccatcgtcaacgggactcaggagcacacgaaagtccggctgagcgtctatggagccctgggcatttcacaagggatcgccgtgtttggctactccatggccgtgtccatcggggggatcttggcttcccgctgtctgcacgtggacctgctgcacagcatcctgcggtcacccatgagcttctttgagcggacccccagtgggaacctggtgaaccgcttctccaaggagctggacacagtggactccatgatcccggaggtcatcaagatgttcatgggctccctgttcaacgtcattggtgcctgcatcgttatcctgctggccacgcccatcgccgccatcatcatcccgccccttggcctcatctacttcttcgtccagaggttctacgtggcttcctcccggcagctgaagcgcctcgagtcggtcagccgctccccggtctattcccatttcaacgagaccttgctgggggtcagcgtcattcgagccttcgaggagcaggagcgcttcatccaccagagtgacctgaaggtggacgagaaccagaaggcctattaccccagcatcgtggccaacaggtggctggccgtgcggctggagtgtgtgggcaactgcatcgttctgtttgctgccctgtttgcggtgatctccaggcacagcctcagtgctggcttggtgggcctctcagtgtcttactcattgcaggtcaccacgtacttgaactggctggttcggatgtcatctgaaatggaaaccaacatcgtggccgtggagaggctcaaggagtattcagagactgagaaggaggcgccctggcaaatccaggagacagctccgcccagcagctggccccaggtgggccgagtggaattccggaactactgcctgcgctaccgagaggacctggacttcgttctcaggcacatcaatgtcacgatcaatgggggagaaaaggtcggcatcgtggggcggacgggagctgggaagtcgtccctgaccctgggcttatttcggatcaacgagtctgccgaaggagagatcatcatcgatggcatcaacatcgccaagatcggcctgcacgacctccgcttcaagatcaccatcatcccccaggaccctgttttgttttcgggttccctccgaatgaacctggacccattcagccagtactcggatgaagaagtctggacgtccctggagctggcccacctgaaggacttcgtgtcagcccttcctgacaagctagaccatgaatgtgcagaaggcggggagaacctcagtgtcgggcagcgccagcttgtgtgcctagcccgggccctgctgaggaagacgaagatccttgtgttggatgaggccacggcagccgtggacctggaaacggacgacctcatccagtccaccatccggacacagttcgaggactgcaccgtcctcaccatcgcccaccggctcaacaccatcatggactacacaagggtgatcgtcttggacaaaggagaaatccaggagtacggcgccccatcggacctcctgcagcagagaggtcttttctacagcatggccaaagacgccggcttggtgtgagccccagagctggcatatctggtcagaactgcagggcctatatgccagcgcccagggaggagtcagtacccctggtaaaccaagcctcccacactgaaaccaaaacataaaaaccaaacccagacaaccaaaacatattcaaagcagcagccaccgccatccggtcccctgcctggaactggctgtgaagacccaggagagacagagatgcgaaccacccaaaacacgcacaccctgcccctggtgccctgagacagacacacagcctcacgcccccaggaatgcaagtggtttcctggtgcttcccacggaggagttttggcagccagacttctggaggaattggttgtatagaagatcctagtgaccaaattcagcctactgcctcggatctctccagccgaagtctgtggactgcaagtctttgagatgcttctggctcccatcacctctaacatccttgtctgggtctaccaggaacgcttcatttccttggggctgcagttttgtggttgaggggcctggagaaaatcattttctccccttggcagtgtcccagggccctggatggtcctcttaccaacatctggtcttccaggcactcaaaagctgggaaccagcatctcagcgccagctctaccagttctcgttttgggccagaggcagcctctgcactcccacgcctgtcctcctggaagggacctggttggactaacggctaacctggacctggaactgtagggccaggggattgtctcagggccgacgttccacctggggcttccctccccacccaccccgactccaggctttcccttttttcttttgttcaacattgtaagaacaatcaatgctgttattactgatcccaccatgattgatgtggggtaaatattaaggagatggcctcatgggaatttgaccttgactagaaatagagactgagagtgagcaaccagctggaaggtactatgccagtcctagcagaaaaatgtgttaggggcctggcccaaagcagtgttggttgcttacagtgttgattgattttgttcttttttcttaccacctcttttctttccctctcatggtacctgctcatggttatgaagctttcaaagtaaagaacacgaaatac

SEQ ID NO: 1255 - DNA, 166 bp, Homo Sapiens
agtgttcccgggggagatactccagtcgtagcaagagtctcgaccactgaatggaagaaaaggacttttaaccaccattttgtgacttacagaaaggaatttgaataaagaaaactatgatacttcaggcccatcttcactccctgtgtcttcttatgctttattt

SEQ ID NO: 1256 - DNA, 388 bp, Homo Sapiens
tttttttttttttttttcccagagggcactggcatgtaggagaagcggatttaccactagtagatgttaatgaaatttcagcttctaggctcctaacttgcaggacctgcccaaggccctgaacttaattttgttttcatcatttggtatttttttgttaaaagagccaccgaccacctccccgctaccccagaactgcacgtgtttctggccctacaaacccagatcgtcccttggaatatacacagggcaatttgtgtaggatcacactgcgctaaaagtgaggcatggtgggctaggcgcactggctcacgcctgtaatcccagcactttgggagaccaagacaggaggtcttaagtgattaagcccaggagttcgagatcagct

SEQ ID NO: 1257 - DNA, 409 bp, Homo Sapiens
ttatattcattccttcccttaggttatagttctgcaggtataaagcataagtataaaggtggaggtggtgtagggggttggggaggggtgctggcgctggtgtggggcgaggagttctccaggatacaacattccagatgatttctaagttcccttccaaagccacatttctattacttgctggtttctctggtgggcatttgtcccagacaggagctcctatgcagcagcggttctcaatctcaattagggggcggctatttttcctccagggcacacttggcaatgcctgcagacatttttgttgtcacagctggggatggggtgcactactggcatctagtgggcagagaccaaggatgctgctgctaactaaacaccctataatgcacagggcaggccacacaac

SEQ ID NO: 1258 - DNA, 480 bp, Homo Sapiens
  misc_feature (373)..(374): n is a, c, g, or t
tttaacttttggtagagacaaggtatcactatgttgcccaggctggtttaggactcctgagctcaagtgatccgcccgccactgcctcccaagtgctaggattacaggcgtgagccaccatgcctggcctgttcatgttttaataggtcagaaataaagtcatgaaaaggaatttctctgtgacagttcgcaaagaattctaccaatttaaaataaaataatctaggataaactctggccaattcaaagctaaaagaaaaaaacatttttactagaagtttcttaaagcctctcaacgcacagggactagctgaaccagaaggtacttcattttctaatagataatgtacacgaagctcactcctggttcagnncattttgcgtggcttccaactgaacgcaagggcagctcagggccatgtaaaatctgagtctactacagaaaccctcgccccacccccaaaacacctctaaatttca

SEQ ID NO: 1259 - DNA, 193 bp, Homo Sapiens
  misc_feature (165)..(165): n is a, c, g, or t
cgcggcggcctcctcggtgcgcgacccccggctcagaggactctttgctgtcccgcaagatgcggatgctgctggcgctcctggccctctccgcggcgcgccatcggcagtgcagagtcacactggtgctacgaggttcaagccgagtcctccaactacccctgnttggtgccagtcaagtggggtggaaact

SEQ ID NO: 1260 - DNA, 453 bp, Homo Sapiens
atttggagaaaacatcaaggtcgaggaaccctgggtatggccattaccatctgattagaagatgaacaggtattttgaatctgatctgacatggaacagtttacctcattgtaggtagggaacaagagaacccatctattaaaattgccttagatctgggaaagtaaccatccttctggcaaagtaggatggcacttttaagtttttcttccttttttccctctgtttatattgcacatcaagtcaaaaacatgtttgggaaagatggttttcaattctgaagttatacctagtgatgttttttgcagtacatttgaatggattgtagacactgcctcaacccttttgaggttttgatttggaaatagatttaaaagaaaacaggctaagataatatccttgttctcatttacaccctgcagtttggaccacatttgacctcataagtttttg

SEQ ID NO: 1261 - DNA, 591 bp, Homo Sapiens
  misc_feature (467)..(467): n is a, c, g, or t
  misc_feature (535)..(535): n is a, c, g, or t
  misc_feature (584)..(584): n is a, c, g, or t
tttaggtccaagtagacttgaattaatgtcataattgtcagtattattgaaaattatgtcaactgtactgttattcatctgtcccatagtttagaacatgacctggctatctggcattgttgcaagtgccttaaattcatggcatcctattaaaaaaacaaatttggtgttatgctgcatgacaaagacaaacacacctcaaaatgttgtcctttcttagcttgctgcgttttacagttctttctgctaacaatttataagcctttattatataatattgatgaattacagaaatgatgaagttgttctcttatttctgttaaatgtaccagagctgtgtatctgttaatgagatacagcgtcatttctgtgaaatgtataaatgtatgtgcaggtcaaattaatatatgacattctatccagtctggtatacagggtattcctggttttggctaagctgtgcagantcctgtaaaaaataaattaagtgcagtccagttcctaacatatccccattttatagaccccattgacnatgggtccaaccggaaaagaaaattgggaatgactggctaaccagaccncggtaat

SEQ ID NO: 1262 - DNA, 239 bp, Homo Sapiens
  misc_feature (30)..(30): n is a, c, g, or t
  misc_feature (114)..(114): n is a, c, g, or t
gtgattagtgggtttgaaaagggaaccgtnggctcggcctcatttcccgctctggttcaggcgcaggaggaagtgttttgctggaggatgatgacagaggtcaggcttggctantgggccagtgaggagcggtggaggcgaggccgggcgccggcacacacacattaacacacttgagccatcaccaatcagcataggaatctgagaattgctctcacacaccaacccagcaacatccg

SEQ ID NO: 1263 - DNA, 2376 bp, Homo Sapiens
gaggaggagtggggaccgggcggggggtggaggaagaggcctcgcgcagaggagggagcaattgaatttcaaacacaaacaactcgacgagcgcgcacccaccgcgccggagccttgccccgatccgcgcccgccccgtccgtgcggcgcgcgggcggagacgccgtggccgcgccggagctcgggccgggggccaccatcgaggcgggggccgcgcgagggccggagcggagcggcgccgccaccgccgcacgcgcaaacttgggctcgcgcttcccggcccggcgcggagcccggggcgcccggagccccgccatgtcgcgatccaaccggcagaaggagtacaaatgcggggacctggtgttcgccaagatgaagggctacccacactggccggcccggattgacgagatgcctgaggctgccgtgaaatcaacagccaacaaataccaagtcttttttttcgggacccacgagacggcattcctgggccccaaagacctcttcccttacgaggaatccaaggagaagtttggcaagcccaacaagaggaaagggttcagcgaggggctgtgggagatcgagaacaaccctactgtcaaggcttccggctatcagtcctcccagaaaaagagctgtgtggaagagcctgaaccagagcccgaagctgcagagggtgacggtgataagaaggggaatgcagagggcagcagcgacgaggaagggaagctggtcattgatgagccagccaaggagaagaacgagaaaggagcgttgaagaggagagcaggggacttgctggaggactctcctaaacgtcccaaggaggcagaaaaccctgaaggagaggagaaggaggcagccaccttggaggttgagaggccccttcctatggaggtggaaaagaatagcaccccctctgagcccggctctggccgggggcctccccaagaggaagaagaagaggaggatgaagaggaagaggctaccaaggaagatgctgaggccccaggcatcagagatcatgagagcctgtagccaccaatgtttcaagaggagcccccaccctgttcctgctgctgtctgggtgctactggggaaactggccatggcctgcaaactgggaacccctttcccaccccaacctgctctcctcttctactcacttttcccactccaagcccagcccatggagattgacctggatggggcaggccacctggctctcacctctaggtccccatactcctatgatctgagtcagagccatgtcttctccctggaatgagttgaggccactgtgttccttccgcttggagctattttccaggcttctgctggggcctgggacaactgctcccacctcctgacacccttctcccactctcctaggcattctggacctctgggttgggatcaggggtaggaatggaaggatggagcatcaacagcagggtgggcttgtggggcctgggaggggcaatcctcaaatgcggggtgggggcagcacaggagggcggcctccttctgagctcctgtcccctgctacacctattatcccagctgcctagattcagggaaagtgggacagcttgtaggggaggggctcctttccataaatccttgatgattgacaacacccatttttccttttgccgaccccaagagttttgggagttgtagttaatcatcaagagaatttggggcttccaagttgttcgggccaaggacctgagacctgaagggttgactttacccatttgggtgggagtgttgagcatctgtccccctttagatctctgaagccacaaataggatgcttgggaagactcctagctgtcctttttcctctccacacagtgctcaaggccagcttatagtcatatatatcacccagacataaaggaaaagacacattttttaggaaatgtttttaataaaagaaaattacaaaaaaaaattttaaagacccctaaccctttgtgtgctctccattctgctccttccccatcgttgcccccatttctgaggtgcactgggaggctccccttctatttggggcttgatgactttctttttgtagctggggctttgatgttccttccagtgtcatttctcatccacataccctgacctggccccctcagtgttgtcaccagatctgatttgtaacccactgagaggacagagagaaataagtgccctctcccaccctcttcctactggtctctctatgcctctctacagtctcgtctcttttaccctggcccctctcccttgggctctgatgaaaaattgctgactgtagctttggaagtttagctctgagaaccgtagatgatttcagttctaggaaaataaaacccgttgattact

SEQ ID NO: 1264 - DNA, 605 bp, Homo Sapiens
  misc_feature (446)..(446): n is a, c, g, or t
  misc_feature (454)..(454): n is a, c, g, or t
ttttttttttttttctaacaaaaaccacttttatttttaaatcaatttactatcaaatacacaacagaactcggtgtggaggcagtgtttgatttcaactggttatctgttaaaaggcttgtgtcccagtgcaacactacctttgtgcagaaaatgttcactgaaaataaatatcctaagaatggataatcttcactgtagcatcttgtcagtggcactacttttaaaaaaatgattccctttagaaaagctagtatatttgtattcagagattacaagtgagggaacacactgtgaatattaggtttaccatatgtgaaatttgtttttgacttacaaaaatgcccatatcacatggttcaccttttatctactaaagtttaaaacaaatgtcatttgtgttgactttgttttttaagatgcagtgattaggaccattatagacntcttttcncactatagacaaatctttttgataagccttaaaaggtcttctacaactgtaaacaatgctgtttctatatgcattcagttttaggtaagaacaaacaacccgtgcgaatcctgctcgggccaattccatagggcggataattggagcagca

SEQ ID NO: 1265 - DNA, 1813 bp, Homo Sapiens
caggccttgaggttttggcagctctggaggatgagagagaacatggccaggggcccttgcaacgcgccgagatgggtgtccctgatggtgctcgtcgccataggcaccgccgtgacagcggccgtcaaccctggcgtcgtggtcaggatctcccagaagggcctggactacgccagccagcaggggacggccgctctgcagaaggagctgaagaggatcaagattcctgactactcagacagctttaagatcaagcatcttgggaaggggcattatagcttctacagcatggacatccgtgaattccagcttcccagttcccagataagcatggtgcccaatgtgggccttaagttctccatcagcaacgccaatatcaagatcagcgggaaatggaaggcacaaaagagattcttaaaaatgagcggcaattttgacctgagcatagaaggcatgtccatttcggctgatctgaagctgggcagtaaccccacgtcaggcaagcccaccatcacctgctccagctgcagcagccacatcaacagtgtccacgtgcacatctcaaagagcaaagtcgggtggctgatccaactcttccacaaaaaaattgagtctgcgcttcgaaacaagatgaacagccaggtctgcgagaaagtgaccaattctgtatcctccaagctgcaaccttatttccagactctgccagtaatgaccaaaatagattctgtggctggaatcaactatggtctggtggcacctccagcaaccacggctgagaccctggatgtacagatgaagggggagttttacagtgagaaccaccacaatccacctccctttgctccaccagtgatggagtttcccgctgcccatgaccgcatggtatacctgggcctctcagactacttcttcaacacagccgggcttgtataccaagaggctggggtcttgaagatgacccttagagatgacatgattccaaaggagtccaaatttcgactgacaaccaagttctttggaaccttcctacctgaggtggccaagaagtttcccaacatgaagatacagatccatgtctcagcctccaccccgccacacctgtctgtgcagcccaccggccttaccttctaccctgccgtggatgtccaggcctttgccgtcctccccaactcctccctggcttccctcttcctgattggcatgcacacaactggttccatggaggtcagcgccgagtccaacaggcttgttggagagctcaagctggataggctgctcctggaactgaagcactcaaatattggccccttcccggttgaattgctgcaggatatcatgaactacattgtacccattcttgtgctgcccagggttaacgagaaactacagaaaggcttccctctcccgacgccggccagagtccagctctacaacgtagtgcttcagcctcaccagaacttcctgctgttcggtgcagacgttgtctataaatgaaggcaccaggggtgccgggggctgtcagccgcacctgttcctgatgggctgtggggcaccggctgcctttccccagggaatcctctccagatcttaaccaagagccccttgcaaacttcttcgactcagattcagaaatgatctaaacacgaggaaacattattcattggaaaagtgcatggtgtgtattttagggattatgagcttctttcaagggctaaggctgcagagatatttcctccaggaatcgtgtttcaattgtaaccaagaaatttccatttgtgcttcatgaaaaaaaacttctggtttttttcatgtg

SEQ ID NO: 1266 - DNA, 211 bp, Homo Sapiens
  misc_feature (137)..(137): n is a, c, g, or t
  misc_feature (148)..(148): n is a, c, g, or t
ctgacttcacatcaaaactcctatactgacctgagacagaggcagcagtgatacccacctgagagatcctgtgtttgaacaactgcttcccaaaacggaaagtatttcaagcctaaacctttgggtgaaaagaactnttgaagtcatnattgcttcacagtttctctcagctctcactttggtgcttctcattaaagagagtggagcctgg

SEQ ID NO: 1267 - DNA, 338 bp, Homo Sapiens
  misc_feature (322)..(322): n is a, c, g, or t
  misc_feature (331)..(331): n is a, c, g, or t
tcttatatatcaccttggcttgcatcgaatgcacctgcttttcagttctttttttttcacatagtacattaaataagagtttgttgaatgactattttctttttgtccagaattttgtatatgcttagctagtatgtaaacaatgaaaagcattgtatagattttttgctcaattaagcatccagacatattgactcagaaatcccataagaatatatcttttgttaattaggctggacgtgggtgggtgcgtgcctgtagtcccagctacttcggggagggctaaagggcaggaaggattcgctttaaaccccggggaggncagaggttncccagtg

SEQ ID NO: 1268 - DNA, 420 bp, Homo Sapiens
ttacaataaggaattatatttaaattccacactgaagatctggagtatgggggggatataggaatttcagcatatgtattatctgaactaaatttacaaaagtggaacagttggaaggtacttataggtagacctgagggtctgttaccttattttcagttcagtgaaaatgaaatgagagcagattccagattttaccagcggatggaagactccatcttcccatcatgctctcagcatgcacctctgataagcagcttaaagggaatttcctgggggtcagacataaatagagattctcaggttctcttaatccagacacacatcgcttgcgagtttagggcctccataaatctccaaaaacagtcaggcaacatatggaaagggcatgtttgtttaggaagggctccaaattacatt

SEQ ID NO: 1269 - DNA, 572 bp, Homo Sapiens
ttgcttttctaaagcaacaaataattctccaaagaaggggatgaaaatgctagttcctttaagcacttactgactgtaaagttggtccctgcttaaattcatacccatagttttgagtcggtatgacaccactgcagtgtgagcaaggtgaatccgtgtgccatgcatggaccaccttgggataccgcagcaccatcaacatccgccttgctgatggaagccacacacgctgcccagcccacagcagtcgcacgcagccgatgggctcggactcttagctggcaggctaggacacacagtgaacattaatgtactgtgaatcgttcctgataagtgaataaaacattgtgaccaaacaatcagcttattcacttatcaggaatcgactgttctgctaatttgctgttgttgtttttcatctctgttgtagttcactatttttgctgtgttctgttttctcctctcatgcttgggcaaatcactgggaatattatcttcatgtgaccatgaaacgtttctattgagtgaaaatgatatcttaacaaaatctatgcacttgctttcaggaacct

SEQ ID NO: 1270 - DNA, 221 bp, Homo Sapiens
ttttttttttttttttttttttttttttttttttatatttggaccggttttatttggaaaaataaccatctgaatgcatttccatagtatattacagttaagtacttcattacgttattagagcattcagtagttgcaaaagtattaaactgggcttgagaagattcagattggttcaaagtcattcactgaactaaaagtcattttccccatttttacag

SEQ ID NO: 1271 - DNA, 507 bp, Homo Sapiens
acgcgtggggtgggagaccggagcgggagacagcggtgacaggagcagcggccgggagcccttagggaggcagacagagcctgcagccaatgccccaggagccctcggttccaaccaactgatgcccctgtgcccactggcccacgccatgcagccccagtccgttctgcacagcggctacttccacccactacttcgggcctggcagacagccaccaccaccctcaatgcctccaacctcatctaccccatctttgtcacggatgttcctgatgacatacagcctatcaccagcctcccaggagtggccaggtacggtgtgaagcggctggaagagatgctgaggcccttggtggaagagggcctacgctgtgtcttgatctttggcgtccccagcagagttcccaaggacgagcggggttccgcagctgactccgaggagtccccagctattgaggcaatccatctgttgaggaagaccttccccaaccttctggtgggctgtga

SEQ ID NO: 1272 - DNA, 2838 bp, Homo Sapiens
gggcgcagagctgggccgagccgtcgccggcgccacgcgagtcccgcagccgccgcgcccgggcaatgggccgggggcactgagggccgccggggccgagcgcggaggggggaccgagccagtgccgtgccctcgggccgcgccaacatgccccgcggcttcctggtgaagcgcagcaagaagtccacgcccgtttcctaccgggtccgcggcggcgaggacggcgaccgcgcactgctgctctcgcccagctgcgggggcgcccgcgccgagcccccggcgccgagcccggtccccgggccgctgccgccgccgccgcccgcggagcgcgcccatgcagcgctcgccgccgcgcttgcctgcgcgcctgggccgcagccacccccgcagggcccgcgggccgcgcacttcggcaaccccgaggctgcgcaccccgcgccgctctacagtcccacgcggcccgtgagccgcgagcacgagaagcacaagtacttcgaacgcagcttcaacctgggctcgccggtctcggccgagtccttccccacgcccgccgcgctgctcggagggggcggcggcggcggcgcgagcggagctggcggaggcggcacctgcggcggcgacccgctgctcttcgcgcccgccgagctcaagatgggcacggcgttctcggctggcgccgaggcggcccgcggcccgggccccggccccccactgccccctgccgccgccctgcggcccccgggaaagcggcccccgccccctaccgccgcggagccgcccgccaaggcagtcaaggccccgggcgccaagaagcccaaggccatccgcaagctgcacttcgaggacgaggtgaccacgtcgcccgtgctggggctcaagatcaaggagggcccggtggaggcgccgcggggccgcgcggggggcgcggcgcggccgctgggcgagttcatctgccagctgtgcaaggaggagtacgccgacccgttcgcgctggcgcagcacaaatgctcgcgcatcgtgcgtgtggagtaccgctgtcccgagtgcgccaaggtcttcagctgcccggccaacctggcctcgcaccgccgctggcacaaaccgcggcccgcgcccgccgccgcccgcgcgccggagccagaagcagcagccagggctgaggcgcgggaggcacccggcggcggcagcgaccgggacacgccgagccccggcggcgtgtccgagtcgggctccgaggacgggctctacgagtgccatcactgcgccaagaagttccgccgccaggcctacctacgcaagcacctgctggcgcaccaccaggcgctgcaggccaagggcgcgccgctagcgcccccggccgaggacctactggccttgtaccccgggcccgacgagaaggcgccccaggaggcggccggcgacggcgagggggccggcgtgctgggcctgagtgcgtccgccgagtgccacctgtgcccagtgtgcggagagtcgttcgccagcaagggcgctcaggagcgccacctgcgcctgctgcacgccgcccaggtgttcccctgcaagtactgcccggccaccttctacagctcgcccggccttacgcggcacatcaacaagtgccacccatccgaaaacagacaggtgatcctcctgcaggtgcccgtgcgcccggcctgctagagcgcgccctccaccccggcccccgaactgtgccttcgcttggagacccacaaagagagtgcgccctgcacgccccgaacccgagtccgcgctgggggagcctcgcccccgcccccaccgggtgagagtgtcgtctccgcttctctcggtgtggcgtgacggtaaccccatactctccttttgactccttttggaacccccacttttacgttgtgtccctccgcctcccccatggcgcaacaggagtcagtctctttctgtacaagggagaaaagctgtacgcgtttgtctcgtggttggaagcctccccttggcggggagaagctttttttcttgctagtattcgctgtgttcatggtctagaaatgcggtctggtctcgcctcgcctaccaatctctgctctctatgtatgtagcgtacgggttgttttgggtgaatcttgaggaataaatgcctttatatttcacaggctgtaaattgaacttcccacacgattagctttattatggcttgtgaactgctggagtctggctttacctttttgtatgtgaacaaatcaaattgcttaaaaaagagttttctttagtatagccacaaatgccttgaactgttgtctgggattgttttgtggggggagggaagggagtgttccgaagatgctgtagtaactgcctcagtgtttcacgtaagactttttggtttgatcatctttgttgaggtaggactatcagttccctctaaatgtatatgttgatttatgagtaattgttatttattctttatttatttatattaattatgaagattatgatattatttgattgcagatttttttggcgcgctgccccctccccaccctgccactcttgacattccactgtgcgttttagaagagagcctttttctaaagggatctgcttaaagttttaacttttatacctatctgagtgaattacagacaacctatcatttattctgcttcgagggtccccagggcccttgtacaaccgacagctcttacttttaaatgcaatctcttttctacatacattattttcttaattgttagctatttatagaaagcttcaatagaactgtttcaactgtataactatttactattcaaataaaatattttcaaagtcaaaaaaaaaaaa

SEQ ID NO: 1273 - DNA, 485 bp, Homo Sapiens
tttttttttttttttttttaaataatttgcctgttgtttttaattgttgaggcagtaatacttggttcatgaaactgcaatatacagagaggggaaataaatagcttatatatatataatatatataatatagctggttttaaaatattcccttatcattggtgtactaggtcacgtgagtcacggaaggtcgatagcagcatcctccaaaactgcgagcaaggcagggtcaccatgattggacgaggcgtctgtcgtcgggaggtcgaggcgcggagaattcccaggggcaccccttccctgcgcggtgtctcggggcagcttgcagcggacaataaataaatgactgcaaaccaaagagcgatttttgttggagtttggggcaggaacagaggattgggaaagttagggggagtttgttggtgggcggagcactactttctctttgcttttctttttttttgctttttttttttttcctttca

SEQ ID NO: 1274 - DNA, 6314 bp, Homo Sapiens
gtcggcgaggagggtccggccggagttgaaggattgaactttccggctcagtcgcggcggctgcctggtcctcagcagtgcagccccggcgcggagcagggagcctcggcccgcgcccggcgccctcgccctcgccctcgacccgcagccatggtgcccggggtgcccggcgcggtcctgaccctctgcctctggctggcggcctccagcggctgcctggcggccggccccggcgcggctgctgcgcggcggctggacgagtcgctgtctgccgggagcgtccagcgcgctccgtgcgcctccaggtgcctgagcctgcagatcactcgcatctccgccttcttccagcacttccagaacaatggttccctggtttggtgccagaatcacaagcaatgttctaagtgcctggagccctgcaaggaatcaggggacctgaggaaacaccagtgccaaagcttttgtgagcctctcttccccaagaagagctacgaatgcttgaccagctgtgagttcctcaaatacatcctgttggtgaagcagggggactgtccggctcctgagaaagccagtggatttgcggccgcctgtgttgaaagctgcgaagttgacaatgagtgctctggggtgaagaaatgttgttcgaatgggtgtggacacacctgtcaagtacccaagactctgtacaaaggtgtccccctgaagcccagaaaagagttacgatttacagaactgcagtctggacagctggaggttaagtggtcctcgaaattcaatatttctattgagcctgtgatctatgtggtacaaagaagatggaattatggaatccatcctagcgaagatgacgccactcactggcagacagtggcccagaccacagacgagcgagttcaactgactgacataagacccagccgatggtaccagtttcgagtggctgctgtgaatgtgcatggaactcgaggcttcactgcccccagcaaacacttccgttcttccaaagatccatctgccccaccagcaccggctaacctccggctggccaactccaccgtcaacagtgatgggagtgtgaccgtcactatagtttgggatctccccgaggagccggacatccctgtgcatcattacaaggtcttttggagctggatggtcagcagtaagtctcttgtcccaacaaagaagaagcggagaaagactacggatgggtttcaaaattctgtgatcctggagaaactccagccagactgtgactatgttgtggaattgcaagccataacgtactggggacagacacggctgaagagtgcaaaggtgtcccttcacttcacatcgacacatgcaaccaacaacaaagaacagcttgtgaaaactagaaaaggtggaattcaaacacaactcccttttcaaagacgacgacccactcgcccgctggaagtcggagctcccttctatcaggatggccaactgcaagttaaagtctactggaagaagacagaagatcccactgtcaaccgatatcatgtgcggtggtttcctgaagcgtgtgcccacaacagaacaaccggatcagaggcatcatctggcatgacccacgaaaattacataattcttcaagatctgtcattttcctgcaagtataaggtgactgtccaaccaatacggccaaaaagtcactccaaggcagaagctgttttcttcactactccaccatgctctgctcttaaggggaagagccacaagcctattggctgcctgggcgaagcaggtcatgttctttctaaggtgctagctaagcctgagaacctttctgcttcattcatcgtccaggatgtgaacatcaccggtcacttttcttggaagatggccaaggccaatctctatcagcccatgactgggtttcaagtgacttgggctgaggtcactacggaaagcagacagaacagcctacccaacagcattatttcacagtcccagattctgccttccgatcattatgtcctaacagtgcccaatctgagaccatctactctttaccgactggaagtgcaagtgctgaccccaggaggggaggggccggccaccatcaagacgttccggacgccggagctcccaccctcttcagcacacagatctcatcttaagcatcgtcatccacatcattacaagccttctccagaaagatactaaactgttcaaaaagattttgtgaaattgcacagatgtgtaagcttgttgaacttcggccacgagacatgcacacttccagaggcagtgggaactgctcagaggcccggactctcctatgtgactttagtgcaggaagaacttctgtcaatcatggacgcatctggagacaagtgagaaacagtagattggtgaagacagacaccagttccctacaagcatggagaaaatgaagaataggcctgtttaatgctaaattttgttttcatgtatggtgtcgctcatttctattgaattacaacagaactcagttttccctgaatttggagcaccaaactccgccccaaaaaggagagtaacaaatacacaattcacacataacactaagcgtaaatctaatcaataaaatatatttttgactaaattattgattcgatatgaaaaatcaactaagattacacagctttgtttttttgaatctttcctaagatcatttttatcctaggtgatttttaaatgaaaatgtgtaatctaaaatataccagcgaatttaaatctaaaaatgctcctactttaagtaccttgtgctgctctttatgcaaaggtaaatcaaagttccctctataaattatgatttacaaaagacacccaagccagaggaactcaatgaaataagctgctaatcagattttaccttggagaaatgaaaattatttcttggggatgccttttaatatttgatcctattatgtgagagattttcctgatatgttatcttatttatattttcccttattttcctcaatgcagataatagcttttggtgcacttttgtttcaccatctgaaaattcacaaaacttcttgcttcaaatgaaaaaatcccaactattgagcatgtttaaatctttgcagagatttgccttttcttaatcaaagaaaggtctttgtgtgctagaatattattggtaatgttttaaaaattcctttgattgatagagaaggacagttatttgcatttaattcacccatatgctttcaaatctagtatatcttactttttggaaatgttttatgctacaaattagtgccttgtagcatgaacttaagtcaaaacgtgttatcaatatagagtgttgcagtgtatattgtaacaacctaaaacgcagagaagtttaatttaatactgttttttttcttgaaggaatactcacatacatggtttgaaatgtgcatagatatgcatgtctatataattataaatgcatgtgtatatatatgcaaatatatgtacatatacatgtatatacacacagacacatgcatatacatgaatataccttgagcatgaatccctggagaaatcgttttcgtaggctcaccaatggtgagtaaagatacagctcttttaaaggtcataaggataatatattttccccatcaatgctgattctgagaaaagagcaatttatcaaaattaaacactgtaaaagaaaggtgtccatatgtctttacctacctaagtaaaacaggaagaaaatcagtaacattatccttaggttttgacaatggtacttgcttcttgttgttttattgtttcctgaattcatgcagatgcctggccattcctgggaagagtggataactcagaagtcactgtactccacagagcctcactgcagtgtctaaaggtagatgcaaattaaaatgcagggaaaataacttttctgatgttgatgcatgtctttgggaaacacatttataaacatggatacctgataatagatattgaaacccatttcctgtgtgttaaaatatttaaaaagtggatattccaggaatgttttgcagctttgtacaagtaacataaattggacacctcagaatgaaagttcatgttggttctgaatggttcactgcagctcctgtcacaagctgggatggatttatcacattgagttatgaaattacctggttctaagaatttttgagtggcaaaaatagaaaacaatcttcatttgaaaacatccctaagcttgaataaatggataccatagatagcttctcttttttattctggtgtcattaccagcatctgaatttcaagttcttaaaatttcaaaaattaaaatttttcattattagctatccatttatcttttacatgaacttgtcatgaacaaattcaaatgtttatgccagcaaatttttgtactgttgcatagttaaaaatgctgggagtctctgcatagatacaaaatattattaaattattacataaatttaattttataaaatttaatcatgcttcttttgtctggtaatagacattggacagatatttttagttcagatggtgattctgaagcttacatctcccttaaaaaaatctaaagcagctcttatgggcttctaattttaatataaataaataatttaaattttattggtgttattggaagaaaaatgctattaatgggctaataaaaaacatgtgtttctcttatggattttaataagctccagtattattcaaatgatcaaaaatatagttataattttttgaattttaaaaatgtgattgctctaataaagaataaaatctatgctttttaacaaacatagttttggtgcctaattctgtaatatgttttattgaaattagattcatttctctaatgtgagaaaaatatatccagtaatagtattgactgtttaaaaaattgagctcatcaaaaatattgtcatcaaatacaggtggttaatctgacatacattgcagttacatgcattatttttatttacaacatttgctccttaatgatgaatttatctgtgttaccctgtttttctacctggaactccatagaatgatgtttgcaaaccaacatgtgctcttttcagtcattcactgttttaatatgacatggtagagaagataaggtttatggcaggtaattttttgtaatgtgtattaaacgaagttcaaagattagaaatacatctgtgtcctgaaaaccttagatacatagccgactgtatacagaggttcatctcaacctcaacactattgacttttggggctggatagttctctgttgtgggggtttgtcttgtgcactgtaggtttttagtagcatccacactttctcctcaccagatgccagttgcaccctcccccaagttgagacaaccaaaaatgtctccagatattgccagctaccccttgagggatggtacctctggttgagaaccattgctagagaatgatctttactgaatttgccctttataagaaacccagtgaatttctagagcaagtcccaaaaactaagggacagctaagaagttattatggttgacttcaaaggcctaaactgtgttttttatgtccactaaacaacttgattaaaagacggaattttgactcgtgtctgtatcatacaagtacaaatactaattttgccctatgtatccgtaaatgtcatttgtgattttgacttatttatttaatgccctttcttatgccgtgggttttcaagtttactcatttctatggttgcaaataactctaaaacttattatataaactttcatattataggcagaacacaatggctaaatatctgttgcatgtactttaaagtttattataaaatataaacagatatataaagatgttgactcttacctgtgattttgcatggtcagactcggtgtcaggtacggagaggattctcatgactgtcttacctctactgaatattctagtgagttatatgatttacggagtgattaacagaggtctatataaagttacttttcccctttacttaattatattgtagtgtgcagataacaaaactgctaccttctcatccaagtggtctgtagaattcatgtcccttacagtggtcatttaaagtcaatatttatttatgtatgtaataaaaaaagttggatttttgtgtatgtctgtcacattatttagagagaagtaatcttgtaaaaatgttttgtaaaaaacaaaaaagtattgtaaatagtcttgatattctgtgactcattattttcatgttagagtttgtacatactggttcaataataaagtatccttaaaccaga

SEQ ID NO: 1275 - DNA, 1804 bp, Homo Sapiens
cgctccacctctcaagcagccagcgcctgcctgaatctgttctgccccctccccacccatttcaccaccaccatgacaccgggcacccagtctcctttcttcctgctgctgctcctcacagtgcttacagttgttacaggttctggtcatgcaagctctaccccaggtggagaaaaggagacttcggctacccagagaagttcagtgcccagctctactgagaagaatgctgtgagtatgaccagcagcgtactctccagccacagccccggttcaggctcctccaccactcagggacaggatgtcactctggccccggccacggaaccagcttcaggttcagctgccacctggggacaggatgtcacctcggtcccagtcaccaggccagccctgggctccaccaccccgccagcccacgatgtcacctcagccccggacaacaagccagccccgggctccaccgcccccccagcccacggtgtcacctcggccccggacaccaggccggccccgggctccaccgcccccccagcccatggtgtcacctcggccccggacaacaggcccgccttgggctccaccgcccctccagtccacaatgtcacctcggcctcaggctctgcatcaggctcagcttctactctggtgcacaacggcacctctgccagggctaccacaaccccagccagcaagagcactccattctcaattcccagccaccactctgatactcctaccacccttgccagccatagcaccaagactgatgccagtagcactcaccatagcacggtacctcctctcacctcctccaatcacagcacttctccccagttgtctactggggtctctttctttttcctgtcttttcacatttcaaacctccagtttaattcctctctggaagatcccagcaccgactactaccaagagctgcagagagacatttctgaaatgtttttgcagatttataaacaagggggttttctgggcctctccaatattaagttcaggccaggatctgtggtggtacaattgactctggccttccgagaaggtaccatcaatgtccacgacgtggagacacagttcaatcagtataaaacggaagcagcctctcgatataacctgacgatctcagacgtcagcgtgagtgatgtgccatttcctttctctgcccagtctggggctggggtgccaggctggggcatcgcgctgctggtgctggtctgtgttctggttgcgctggccattgtctatctcattgccttggctgtctgtcagtgccgccgaaagaactacgggcagctggacatctttccagcccgggatacctaccatcctatgagcgagtaccccacctaccacacccatgggcgctatgtgccccctagcagtaccgatcgtagcccctatgagaaggtttctgcaggtaatggtggcagcagcctctcttacacaaacccagcagtggcagccacttctgccaacttgtaggggcacgtcgcccgctgagctgagtggccagccagtgccattccactccactcaggttcttcagggccagagcccctgcaccctgtttgggctggtgagctgggagttcaggtgggctgctcacaccgtccttcagaggccccaccaatttctcggacacttctcagtgtgtggaagctcatgtgggcccctgaggctcatgcctgggaagtgttgtggtgggggctcccaggaggactggcccagagagccctgagatagcggggatcctgaactggactgaataaaacgtggtctcccactg

SEQ ID NO: 1276 - DNA, 484 bp, Homo Sapiens
  misc_feature (451)..(451): n is a, c, g, or t
tgcggccgctgcaggtcgctcagcgacgtgcgcgtgcgtggtccggtcccacagcacgtagggaagcacacgacgggcagccgctgcggcttctggcagctccctcgacagcttctccaggggttcactcaagatcagttggaacccctggcgccacgggctgtcatcagtggacagtctgcccctagatgagttgcccagcacggtacagctactgcctgccccgaccccagcccctgattctaccgccgctcggcagggggacggccagggagaggtccagccgcgcgcaagcctggggaatcccgcagcgcctccagtgataccatcgagctttgaagagcggtcctgacgcagggccaggaccctgcccgatgcccacatggcatggcctactgggacagttgagcctttaaaaaatgggcatcctggccaggcgcggtggctcacncaggaatcccagcactttgggaggccgagccgg

SEQ ID NO: 1277 - DNA, 495 bp, Homo Sapiens
taaccatttattatacatataatctattgaatataaaaagattcaccttgaaataatatttgactatataggtacatatctgtaaaagatgaccaccttaactaaatcagattttacatttataaattttatatttaattagtcaaatcaatttttaaatcataactccttaatctcataagaagcaataaatgcataaagcattatattaaaataccagggttacttatgtcattgacagggaaaagactttgtataaacaattatgcaccatctatttttgtactcttactcatgatccatttaaaagtctactcagctctagattagataccagaagaccctctaagtaactgataactgagattcgggaccatgtcttgtttgccattgtgcccttggaatttaatacaagtgcctaacccacagtagggttgattgattcactgattagttttactgccatgtgcctataactataggttattctctttc

SEQ ID NO: 1278 - DNA, 412 bp, Homo Sapiens
gcgtccctactactactaaattcgcggccgctcgaccgatggtggaaacgaagaaaaccctcaaattatatcacaaaagccattattttttgcatccaaagagttttttttttaaggaaaatcattctactttgagaactgtaattaaagccctaaataacagacactactttgttgagctattgtgaaaaaaaaacaacacattcgccaaggttatatggagcccctgatttccatcaaaaaggtttctataagtatattatttacatttttatacatgataactcttgcctttgtgttgaaaaaaaaaaagtctcttttttttcccccactcagcagttattggaaatagactgttcccatctgaaaccgtatcgtaatttgcatcaggaaacccaactgctgacattga

SEQ ID NO: 1279 - DNA, 424 bp, Homo Sapiens
tttttttttttttttttttgcttaaaaaaaagccatgacggctctcccacaattcatcttccctgcgccatctttgtattatttctaatttattttggatgtcaaaaggcactgatgaagatattttctctggagtctccttctttctaacccggctctcccgatgtgaaccgagccgtcgtccgcccgccgccgccgccgccgccgccgccgcccgccccgcagcccaccatgtctcgccgcaagcaaggcaaaccccagcacttaagcaaacgggaattctcgcccgagcctcttgaagccattcttacagatgatgaaccagaccacggcccgttgggagctccagaaggggatcatgacctcctcacctgtgggcagtgcaggatgaacttcccattgggggacattcttatttttatcg

SEQ ID NO: 1280 - DNA, 536 bp, Homo Sapiens
  misc_feature (65)..(65): n is a, c, g, or t
  misc_feature (476)..(476): n is a, c, g, or t
  misc_feature (513)..(513): n is a, c, g, or t
  misc_feature (527)..(527): n is a, c, g, or t
gggaatttgtgaggtaggccggaagtggtgttgcggagggaagtgtggggagagcagaggcgcantctgctggaagagacctgaggcttgcagcgctgggcccggccgggtcgctgcggctgggctggaggtcaaggatgcattccaggaaagttctataaaaatataccatcaactccaacctgatatttgacctagccatggaaaacctcattggctcctcactggatcagaccataaaaatgatccaggaatgaaaatctaagataaattcccaccacttcaagatgttcttatacaagtcaacagtctagcagatcagccagtctctttcatcatcaagcagacatactcaaggtaccaacacagcaaaggcacaaaatgtcttctattattcagtattttttcatgggtatattgttgaggaccctttaggttgagggcttgaattcatttttgtgagttcacatggaacntttgtcttaaaaaacaaattaaattgttaaattaccnagtgtttttgctgnatcctttgc

SEQ ID NO: 1281 - DNA, 1694 bp, Homo Sapiens
taggtgagatagccctggggatggaggcaagccctggaggtaggtagctggagaggggggagtctgaaccaggtcagaggtcgggcactgacttgtgtcctgccaccccaggtctgatcatcgacgcttttggtgagctccgagaccaacaagagcaagtgaaggaggatatggaggtaggtcatgtctgggggtgacccagagggattacgggattcagggggtcaagtgggcctccactctgatgtctcttgccactcacagaccaagtgcttcatctgtggaatcggcagtgactactttgatacgacaccgcatggcttcgagactcacacgctggaggagcacaacctggccaattacatgtgagcagacacactggccagtcaggagggtggggggcatggctgccaatagccagcagtggggtacttagctttggccagttaggaaagggggtgtagtgtccatgtgggcagattccctgccagccaatcagaaggtaagggtggggccccgcaagatggttcacacctgtaagcccagcactttgggaggccaagtggggaggattacttgaggccaggagttcgagaccagcttgggcaacatagcaagacttcctctctactataaatgaaaaataaaataaggtaagggtggttctgacttgtctcctgtggtcctctcaccctcaggtttttcctgatgtatttgataaacaaggatgagacagaacacacgggtcaggtaagggggtgttaatgggaggacagtgggcaggacgtggagccctttaacataaggccagtcagtaggtggcagtaaaaagctcctatcaatatcaagggttagggctgggggctgggcacggcggctcacgctgtaatcccaacactttgggaggccaaggcgggtggattacttgaggtcaggagttcaagaccagcctggccagcatggtgaaattcagtctctactaaaaatgcaaagattagcagggcgtggttgtgcatgcctgtaatcccagctacttggaaagctgaggtgggagaatcgcttgaacccaggaggcagaagttgcagtgagccaagatcatgccactgtactccagcctaggtgacagagcgatactccatctcaaaaaaaatgggtttgggctggctcacgcctgcaatcctagcacttcgtgaggccacagcgggagaattgcttgagaccagaagttcaagacagcctaggaacacagcagccctttctctattaaaaaattagccaggggtggtggtgtgcacctgtagtcccagctactctggagactgaggtggagaatcgcttgagccaggaggctgtagtgagctgtgattgtcgccactgcactccagcctgggcaacagagcaacaccctgtctaaaaatatatatatatatatgtctcaagggtttgaagatgtgaccaatgaactctttctatccccaatcctaggagtcttatgtctggaagatgtaccaagagagatgttgggatttcttcccagctggtgattgtttccgtaagcagtatgaggaccagcttagctgacacacccccagctggccctccacccccacctcaagtgccttattctcacagcaagccccttagtccccaagcccctccccctaaggcagctgggggagaggtgacctagtac

SEQ ID NO: 1282 - DNA, 287 bp, Homo Sapiens
  misc_feature (23)..(23): n is a, c, g, or t
  misc_feature (256)..(256): n is a, c, g, or t
ttacagcctgcttctgtgctgtnccttcttgcctctaacttgtaaacaagacgtagtaggacgatgctaatggaaagtcacaaaccgctgggtttttgaaaggttccttgggacctcatgcacatttgtggaaactggatggagagatttggggaagcatggactctttagccagcttagttctctgtggagtcagcttgctcctttctggaactgtggaaggtgccatggactttgatcttgatcaatttcctanctcttgtatctgatgctgaaacatcttctca

SEQ ID NO: 1283 - DNA, 2069 bp, Homo Sapiens
taacacgttgcgcccggcctcggcagccgcctgtcgccgcgggagcagccgctatctctgtgtgtccgcgtgtgcgcccggtccccgcctgccgcaccatggagagctaccacaagcctgaccagcagaagctgcaggccttgaaggacacggccaaccgcctacgtatcagctccatccaggccaccacggcggcgggctctggccaccccacgtcatgctgcagcgccgcagagatcatggctgtcctctttttccacaccatgcgctacaagtcccaggacccccggaatccgcacaatgaccgctttgtgctctccaagggccatgcagctcccatcctctacgcggtctgggctgaagctggtttcctggccgaggcggagctgctgaacctgaggaagatcagctccgacttggacgggcacccggtcccgaaacaagctttcaccgacgtggccactggctccctgggccagggcctcggggccgcttgtgggatggcctacaccggcaaatacttcgacaaggccagctaccgagtctattgcttgctgggagacggggagctgtcagagggctctgtatgggaggccatggccttcgccagcatctataagctggacaaccttgtggccattctagacatcaatcgcctgggccagagtgacccggccccactgcagcaccagatggacatctaccagaagcggtgcgaggccttcggttggcatgccatcatcgtggatggacacagcgtggaggagctgtgcaaggcctttggccaggccaagcaccagccaacagccatcattgccaagaccttcaagggccgagggatcacgggggtagaagataaggagtcttggcatgggaagcccctccccaaaaacatggctgagcagatcatccaggagatctacagccagatccagagcaaaaagaagatcctggcaacccctccacaggaggacgcaccctcagtggacattgccaacatccgcatgcccagcctgcccagctacaaagttggggacaagatagccacccgcaaggcctacgggcaggcactggccaagctgggccatgccagtgaccgcatcatcgccctggatggggacaccaaaaattccaccttctcggagatcttcaaaaaggagcacccggaccgcttcatcgagtgctacattgctgagcagaacatggtgagcatcgcggtgggctgtgccacccgcaacaggacggtgcccttctgcagcacttttgcagccttcttcacgcgggcctttgaccagattcgcatggccgccatctccgagagcaacatcaacctctgcggctcccactgcggcgtttccatcggggaagacgggccctcccagatggccctagaagatctggctatgtttcggtcagtccccacatcaactgtcttttacccaagtgatggcgttgctacagagaaggcagtggaactagccgccaatacaaagggtatctgcttcatccggaccagccgcccagaaaatgccatcatctataacaacaatgaggacttccaggtcggacaagccaaggtggtcctgaagagcaaggatgaccaggtgaccgttatcggggctggggtgaccctgcacgaggccttggccgctgccgaactgctgaagaaagaaaagatcaacatccgcgtgctggaccccttcaccatcaagcccctggacagaaaactcattctcgacagcgctcgtgccaccaagggcaggatcctcaccgtggaggaccattattatgaaggtggcattggtgaggctgtgtccagtgcagtagtgggcgagcctggcatcactgtcaaaacaatggcagttaaccgggtaccaagaagtgggaagccggctgagctgctgaagatgtttggtatcgacagggatgccattgcacaagctgtgaggggcctcatcaccaaggcctagggcgggtatgaagtgtggggcgggggtctatacattcctgagattctgggaaaggtgctcaaagatgtactgagaggaggggtaaatatatgttttgag

SEQ ID NO: 1284 - DNA, 528 bp, Homo Sapiens
agtggacccatgtttgaaggcagtggaggaagtccctggcagatttggtagaaatcacaagacaactagaattagaattagggccttaaggtgagatgaaattgctgtaaactcatgatgaaacttgaacaaatagggagttgcttcttatggacgagcaaagaaaatattttcttgagatggaatataatccaggtggagatgctatcaacattgttgaaatgacaacaaaggatttagaatattccataaacctagttgataaagcagcagcagggtttgagagggtttactccaattttgaaagaagttctactgttgataaaatgctgtcaaacagcatcacatgctacagggaaatcttttgtgaaaggaacaaacttcattgttttaaaaaattgacacaggcctccaaccttcagcagcccccacactgattagccagcagtcatcaatatagaggcaagactctcaccagcaaaaagattatgacttggtaaggctcagatactcattagcattttttag

SEQ ID NO: 1285 - DNA, 560 bp, Homo Sapiens
  misc_feature (32)..(32): n is a, c, g, or t
aatcagctcggtccacttctaccacggggtgnccgctgaacggatggctaggagccccgcggatcgtttaggaaagccggccagctgatcgtcgtgtgttgccacccattcatgtcaagatgactaagtttggattttatgcgattgtcctatgagaagcaggacacacttctgaagcttctcattctgtcaatggctgctgtattatccttctccactcgtctgtttgctgtcctgagatttgaaagtgttatccatgagtttgatccgtactttaattatcggactaccaggttcctggctgaggaggggttttataaattccataactggtttgatgaccgagcctggtaccctttgggacgaatcattggaggaacaatttacccaggtttaatgatcacctctgctgcaatctaccatgtactccattttttccacatcaccatcgacattcggaatgtctgtgtgttcctggcccctctcttctcctccttcaccaccatcgtcacgtaccaccttaccaaagagctcaaggatgcaggggctgggcttcttgc

SEQ ID NO: 1286 - DNA, 560 bp, Homo Sapiens
aatagctgaggtctttatttcaatttctatatacagtaaaagtgctgctgagaatctgcagcgaccagacagaacataaatttaaatctctctcaacaattagcagcttaagatctatcaactacagtgttaacgttcacacgttcaccagtgtcatttcttacgtttcaattcgtgcaagtgagtttttattcttacacactttgataaaacacacagtctagtagtcaatccctactgaggatatcacctagcatacacgacatacagacagcaatgttaactcttagagccacattcaaaatcccaggtttcatttggggtttgggtgtgggaaccataattttgcctgtgtcagattacaataatgtttggttttgttttagatgcatattttccaaagctgaaaggcagctcctcattggaactctctcagaactcagcattttcatctgactgtacctcaaaggaacatgaaatcagaaacaaaaccaaatgcagtgaagaccacatgaaaatacgctcattatttggacatggctagtgaggaaggctcgctc

SEQ ID NO: 1287 - DNA, 485 bp, Homo Sapiens
tttttttttttttttttgcagctccagctcaaaggaaaacaaaaactgggtttgaatcctcgctctaccactaggctgcgtgactagcactaggctgcgtgactaggggaatgtcacttagcacctaggagccttggtttcatcacattgcaagggtggtgtgagaatcaagtgataaaatgttaagtgccaaccaggcacaatgtctgggtgcaaatggttgcatgacaatagaggtttctttacattatgatgactactcagccttttaagtgacaaagcatcttttaggtggagaccatgtatttctagtgatcaattcaaattagtacgactttccctagaagagtcctttcctgatatttgcagggttaggccagtcccctggcctaatccagtgctgtgcaaaagaccgtgccagacggggaaaatggttaacaatatttggcttctcaatcagcaccattctttttcacaaataaaga

SEQ ID NO: 1288 - DNA, 611 bp, Homo Sapiens
gatagtgggggaaatgccagatgaaaccaactcttgctctcactagttgtcagcttctctggataagtgaccacagaagcaggagtcctcctgcttgggcatcattgggccagttccttctctttaaatcagatttgtaatggctcccaaattccatcacatcacatttaaattgcagacagtgttttgcacatcatgtatctgttttgtcccataatatgctttttactccctgatcccagtttctgctgttgactcttccattcagttttatttattgtgtgttctcacagtgacaccatttgtccttttctgcaacaacctttccagctacttttgccaaattctatttgtcttctccttcaaaacattctcctttgcagttcctcttcatctgtgtagctgctcttttgtctcttaacttaccattcctatagtactttatgcatctctgcttagttctattagttttttggccttgctcttctccttgaatttaaaaatccttctatagctagagcttttctttctttcattctctcttcccgcagggttttgctacatcaagaacttagtacataagttaaatgattgagagtgggctgatttag

SEQ ID NO: 1289 - DNA, 327 bp, Homo Sapiens
ctggaagacaatgactaagcagaaatcgtagccgagaaagtgcttcgtaaccgttactcatcccgcggcggggcaggggcggggcgcgaatgggctgcgggacgccggcccgcaagtgactggcccttggcctgcggcgggcgtggcgacgggtggtgcgcggcgggcgcgcgggtcgagagagcgtggcggcgcggcccggagcgcagcgcgcggcagggctccccctggcggtcagaggacagcgcgaggcagacaccgcctccgcctggtgaggtagacaccgcctccgcctggtgaggtctcccggcgttcaggtcgcggctc

SEQ ID NO: 1290 - DNA, 2333 bp, Homo Sapiens
tgcggagcttcgtgatgcacgccccgatgcctgcggggctataaaaacgctcgcaagcgccaagtctcctcaggagccgccggcaagggggcaacgaggaagctcttaagagcgcggccggaaagcagttgagttacagacatcctgccaaaatgatttcttcaaagcccagacttgtcgtaccctatggcctcaagactctgctcgagggaattagcagagctgttctcaaaaccaacccatcaaacatcaaccagtttgcagcagcttattttcaagaacttactatgtatagagggaatactactatggatataaaagatctggttaaacaatttcatcagattaaagtagagaaatggtcagaaggaacgacaccacagaagaaattagaatgtttaaaagaaccaggaaaaacatctgtagaatctaaagtacctacccagatggaaaaatctacagacacagacgaggacaatgtaaccagaacagaatatagtgacaaaaccacccagtttccatcagtttatgctgtgccaggcactgagcaaacggaagcagttggtggtctttcttccaaaccagccacccctaagactactaccccaccctcatcaccacctccaacagctgtctcaccagagtttgcctacgtcccagctgacccagctcagcttgctgctcagatgttaggtaaagtttcatctattcattctgatcaatctgatgtgttaatggtggatgtggcaaccagtatgcctgttgttatcaaggaggtgccaagctcagaggctgctgaagatgtcatggtggctgctcctcttgtgtgttctggaaaggtgctagaagtgcaggttgtgaaccaaacatctgtccatgtagatttgggttctcaacctaaagaaaatgaggctgaaccatcaacggcttcctcagtccccttgcaggatgaacaagaacctcctgcttatgatcaagctcctgaggtcactttgcaggctgatattgaggttatgtcaactgttcatatatcatctgtctataacgatgtgcctgtgactgaaggagttgtttatatcgagcaactgccagaacaaatagttatcccttttactgatcaagttgcttgtcttaaagaaaatgagcagtcaaaagaaaatgagcagtcaccacgagttagtcccaaatctgtagtagaaaagaccacctctggcatgtctaaaaaatctgtagagtctgtaaaacttgcacagttggaggagaatgcaaaatattcctcagtatatatggaggcagaagcaacagctctgctctctgacacatctttgaaaggtcagcctgaggtacctgcacaactcctggatgcagaaggtgctatcaaaataggctctgaaaaatctctgcaccttgaagtggagatcacttcaatagtctctgacaatactgggcaggaggagtctggggaaaactctgtaccccaggagatggaaggcaaacctgtgctctctggggaagctgcagaagcagtgcactcaggtacatctgtaaagtcatctagtggccccttccctcctgctccagaaggccttactgcaccagaaattgaaccagaaggggaatcaacagctgaataaggtttgatgaagccagcaatggcaacaagtgaacgaggacaaccaccaccatgttctaacatgtggaccctttattgtctaactgataagaatcaacaaggtcacccatcaccgccacctgcacctgggccttttccccaagcaaccctctatttacctaatcctaaggatccacagtttcagcagcatccaccaaaagtcacttttccaacttatgtgatgggcgacaccaagaagaccagtgccccaccttttatcttagtaggctcaaatgttcaggaagcacagggatggaaacctcttcctggacatgctgtcgtttcacagtcagatgtcttgagatatgttgcaatgcaagtgcccattgctgttcctgcagatgagaaataccagaaacataccctaagtccccagaatgctaatcctccaagtggacaagatgtccccaggccaaaaagccctgttttcctttctgttgctttcccagtagaagatgtagctaaaaaaagttcaggatctggtgacaaatgtgctccctttggaagttacggtattgctggggaggtaaccgtgactactgctcacaaacgtcgcaaagcagaaactgaaaactgatccagaaatgacgctgtctgggtcaacatttcagggaggagtctgccaccagtgtaatgtatcaataaacttcatgcaagcata

SEQ ID NO: 1291 - DNA, 512 bp, Homo Sapiens
  misc_feature (482)..(482): n is a, c, g, or t
tgcggccgccgggccgccagctttcccctgcgccaggtactcctgcagctggcggtggaggtccgccatcttggacaaggcggtggcagaaaggaaaagctgcggctcacttccggccctccgctgaagcggctcggtcttcgggcggcaattggtcggcgacggcgaaaggggcagggcctgcggcgctcgcggaagtgccgcggtgcctgctctgcggacttttgtggtgtccccaagtaccgtggtcgcaggtgctgcctgtccgcttgcagtcgccctcccagcgcctgaccctcttccttgttcggagtaggcgcccttgcggtctgggctagtcctgccagcattaatagttggaaggcaggggtgggtgtggttctaaaggggcacaagaagtgacccttttgctgacggaaatgtcttatggcctcactgcgtctaccgtggcggtgatattgtgctagttatgcaacatggangaatgggtaaagggtacacagaatctctct

SEQ ID NO: 1292 - DNA, 258 bp, Homo Sapiens
gtcgacttttttttttttttttttttttttttttttttcgggtaatgaatatgtttatttaaatatgtatacaagcatggccctaggagcagcagatacactttcccaaaggtggttgcttcctttaagatattgcacaatagaaaataaactcttgtcaatccttaaaattagtcttcaatgctatgtattttagctatgtaacttgtactgtgtcaacagtgaaccttattagattcacggtgtcatcgaacttat

SEQ ID NO: 1293 - DNA, 446 bp, Homo Sapiens
tttttttttttttttttaaaataactgctttaatgagacataattgtgtaattcccataccatacaattcatccatttaaagtgtgcaattctgtgggtcttagcatattcagaggtatgcaaacatcaccaacggccaatatcaaaacacttcctcaccccagaaagaaaccccaaaccagcaaccgtcgctcccaacccccgtcccgggcaccggcagcgccatctcccttcttccctctggacgtgcccattcgggacacatcacgtgagcaggatcacgccgtccgctccgtgtgcctggcttttcacttagcatgatgtctccaagtctgtgtcgcccgtctgtgtcgcccagtgcatcagggtctcattccttttgaccgtgggcgccgttctacggcctggattccagtgcctggactggccatgtttagtccatgcac

SEQ ID NO: 1294 - DNA, 186 bp, Homo Sapiens
gattccatactactttccaactaacagaggaccatggattcctttctatcacctcagcagcatgtttccaacacttccacctaaaattactttagagtttagcagctcaacacacgactgacttggaaacatcgggaaacctctggtattgataccaccaccttgtactttgctcccatttctggt

SEQ ID NO: 1295 - DNA, 3363 bp, Homo Sapiens
gcccccgcccggcccgccccgctctcctagtcccttgcaacctggcgctgccatccgggccactgtcccaggtcccggcccggagctatggagcggcgctggcccctggggctagggctggtgctgctgctctgcgccccgctgcccccgggggcgcgcgccaaggaagttactctgatggacacaagcaaggcacagggagagctgggctggctgctggatcccccaaaagatgggtggagtgaacagcaacagatactgaatgggacacccctgtacatgtaccaggactgcccaatgcaaggacgcagagacactgaccactggcttcgctccaattggatctaccgcggggaggaggcttcccgcgtccacgtggagctgcagttcaccgtgcgggactgcaagagtttccctgggggagccgggcctctgggctgcaaggagaccttcaaccttctgtacatggagagtgaccaggatgtgggcattcagctccgacggcccttgttccagaaggtaaccacggtggctgcagaccagagcttcaccattcgagaccttgcgtctggctccgtgaagctgaatgtggagcgctgctctctgggccgcctgacccgccgtggcctctacctcgctttccacaacccgggtgcctgtgtggccctggtgtctgtccgggtcttctaccagcgctgtcctgagaccctgaatggcttggcccaattcccagacactctgcctggccccgctgggttggtggaagtggcggggacctgcttgccccacgcgcgggccagccccaggccctcaggtgcaccccgcatgcactgcagccctgatggcgagtggctggtgcctgtaggacggtgccactgtgagcctggctatgaggaaggtggcagtggcgaagcatgtgttgcctgccctagcggctcctaccggatggacatggacacaccccattgtctcacgtgcccccagcagagcactgctgagtctgagggggccaccatctgtacctgtgagagcggccattacagagctcccggggagggcccccaggtggcatgcacaggtcccccctcggccccccgaaacctgagcttctctgcctcagggactcagctctccctgcgttgggaacccccagcagatacggggggacgccaggatgtcagatacagtgtgaggtgttcccagtgtcagggcacagcacaggacggggggccctgccagccctgtggggtgggcgtgcacttctcgccgggggcccgggcgctcaccacacctgcagtgcatgtcaatggccttgaaccttatgccaactacacctttaatgtggaagcccaaaatggagtgtcagggctgggcagctctggccatgccagcacctcagtcagcatcagcatggggcatgcagagtcactgtcaggcctgtctctgagactggtgaagaaagaaccgaggcaactagagctgacctgggcggggtcccggccccgaagccctggggcgaacctgacctatgagctgcacgtgctgaaccaggatgaagaacggtaccagatggttctagaacccagggtcttgctgacagagctgcagcctgacaccacatacatcgtcagagtccgaatgctgaccccactgggtcctggccctttctcccctgatcatgagtttcggaccagcccaccagtgtccaggggcctgactggaggagagattgtagccgtcatctttgggctgctgcttggtgcagccttgctgcttgggattctcgttttccggtccaggagagcccagcggcagaggcagcagaggcagcgtgaccgcgccaccgatgtggatcgagaggacaagctgtggctgaagccttatgtggacctccaggcatacgaggaccctgcacagggagccttggactttacccgggagcttgatccagcgtggctgatggtggacactgtcataggagaaggagagtttggggaagtgtatcgagggaccctgaggctccccagccaggactgcaagactgtggccattaagaccttaaaagacacatccccaggtggccagtggtggaacttccttcgagaggcaactatcatgggccagtttagccacccgcatattctgcatctggaaggcgtcgtcacaaagcgaaagccgatcatgatcatcacagaatttatggagaatggagccctggatgccttcctgagggagcgggaggaccagctggtccctgggcagctagtggccatgctgcagggcatagcatctggcatgaactacctcagtaatcacaattatgtccaccgggacctggctgccagaaacatcttggtgaatcaaaacctgtgctgcaaggtgtctgactttggcctgactcgcctcctggatgactttgatggcacatacgaaacccagggaggaaagatccctatccgttggacagcccctgaagccattgcccatcggatcttcaccacagccagcgatgtgtggagctttgggattgtgatgtgggaggtgctgagctttggggacaagccttatggggagatgagcaatcaggaggttatgaagagcattgaggatgggtaccggttgccccctcctgtggactgccctgcccctctgtatgagctcatgaagaactgctgggcatatgaccgtgcccgccggccacacttccagaagcttcaggcacatctggagcaactgcttgccaacccccactccctgcggaccattgccaactttgaccccagggtgactcttcgcctgcccagcctgagtggctcagatgggatcccgtatcgaaccgtctctgagtggctcgagtccatacgcatgaaacgctacatcctgcacttccactcggctgggctggacaccatggagtgtgtgctggagctgaccgctgaggacctgacgcagatgggaatcacactgcccgggcaccagaagcgcattctttgcagtattcagggattcaaggactgatccctcctctcaccccatgcccaatcagggtgcaaggagcaaggacggggccaaggtcgctcatggtcactccctgcgccccttcccacaacctgccagactaggctatcggtgctgcttctgcccactttcaggagaaccctgctctgcaccccagaaaacctctttgttttaaaagggaggtgggggtagaagtaaaaggatgatcatgggagggagctgaggggttaatatatatacatacatacacatatatatatttttgtaaataaacaggaactgattttctgcctccatcccacccatgagggctgcaggcactacaaaagagctgactactgagaa

SEQ ID NO: 1296 - DNA, 216 bp, Homo Sapiens
  misc_feature (55)..(55): n is a, c, g, or t
  misc_feature (110)..(110): n is a, c, g, or t
  misc_feature (158)..(158): n is a, c, g, or t
  misc_feature (168)..(168): n is a, c, g, or t
  misc_feature (180)..(180): n is a, c, g, or t
  misc_feature (186)..(186): n is a, c, g, or t
  misc_feature (192)..(192): n is a, c, g, or t
tttttttttttttttgcaattaaattcagtcttttatttaattatattaatttancccagcaacttcaaagacccacaatgccaatgataaagttcagttaaaaaacagnggtcttgaaaaattttttttcttcagccgctaataccatttacacggncgccatctgngaatttgtagcnccgtcncagtcncaggatttagggaaatttgtttta

SEQ ID NO: 1297 - DNA, 444 bp, Homo Sapiens
gcgcgagcgtgaccttgggctcgttcgtccgagaaggcagtggagggagaggcgtcactgcaagcctggggcgagtgggactctgtacagagccaggagctcaaggggcttcgtgtgagatggtgaactcctgtcccaagtatgccaaccagtggtggggacaactgaaccatgtgggacttgaggctactgtggtggggacagctgaaccacgtggggctgggtagttgtctccagggtggagggaggggggatgaactggatacctgactgtctgcatctccaggaggtgagatggcagctgggcaaaatgggcacgaagagtgggtgggcagcgcatacctgtttgtggagtcctcgctggacaaggtggtcctgtcggatgcctacgcgcacccccagcagaaggtggcagtgtacagggctctgcaggctgccttggca

SEQ ID NO: 1298 - DNA, 504 bp, Homo Sapiens
gcggccgccttttttttttttttttgttcaaaagcaatatttatttttcatgaagataagaggcatattacattcgctatagaaaatgctatgagaggaaaaagctgcatgttaccgatatgacaaaaaacataaaaaactctacttatgaaagtgttttgccctataagaacatattcaataaaaggcattattccaggtgaatgagccatgcggaaatgtggatttattagggtttgttttgaaatgtaatttgtacggccagctttttattcctttgatggctatcaaatagatttattggctacatgttagaagtgcaaaagataacaggtaaccaagggagaagttttaataaaactctcaggaaaggcaaagaaaagtgagtgaatatgcctgcttatatttcagctaataaataaaaagtgcagatagggctttaactgaaaaccttgctggttattgcagcctggaaggtttattgaaaactgggtagaacactct

SEQ ID NO: 1299 - DNA, 297 bp, Homo Sapiens
gcacgaggcccccgctgcctccccaaatgtccggcgcctggagtataagcccatcaagaaagtcatggtggccaacagaggtgagattgccatccgtgtgttccgggcctgcacggagctgggcatccgcaccgtagccatctactctgagcaggacacgggccagatgcaccggcagaaagcagatgaagcctatctcatcggccgcggctggcccccgtgcaggcctacctgcacatcccagacatcatcaaggtggccaaggagaacaacgtagatgcagtgcaccctggctac

SEQ ID NO: 1300 - DNA, 400 bp, Homo Sapiens
  misc_feature (51)..(51): n is a, c, g, or t
cgtgatagcgggtgcctgtaatcccagctgctcgggaggctaaagcacccngaattgtttgaacctgggagtgggaggttgcagtgagccgaggtcgtgccattgcactccagcctggccaacaagagcgagactctgtctaaaaaaaaagaaatgcttgctttctgtgtagttttttaacttaggtcagtgccataggactgaccaaatcataaattgaggatgctgttggtattcaaagtttttactcattacccttactcagtttgcagctgcaatgatctgtacttaacctgcttttacatattatgcttccttgacaatgggagggaatttttaatgggttaacttgcagaatatggacagatacttggccttaatatccattccttccctacca

SEQ ID NO: 1301 - DNA, 1057 bp, Homo Sapiens
gtctcagcggctgccaacagatcatgagccatcagctcctctggggccagctataggacaacagaactctcaccaaaggaccagacacagtgagcaccatgggacagtgtcggtcagccaacgcagaggatgctcaggaattcagtgatgtggagagggccattgagaccctcatcaagaactttcaccagtactccgtggagggtgggaaggagacgctgaccccttctgagctacgggacctggtcacccagcagctgccccatctcatgccgagcaactgtggcctggaagagaaaattgccaacctgggcagctgcaatgactctaaactggagttcaggagtttctgggagctgattggagaagcggccaagagtgtgaagctggagaggcctgtccgggggcactgagaactccctctggaattcttggggggtgttggggagagactgtgggcctggagataaaacttgtctcctctaccaccaccctgtaccctagcctgcacctgtcctcatctctgcaaagttcagcttccttccccaggtctctgtgcactctgtcttggatgctctggggagctcatgggtggaggagtctccaccagagggaggctcaggggactggttgggccagggatgaatatttgagggataaaaattgtgtaagagccaaagaattggtagtagggggagaacagagaggagctgggctatgggaaatgatttgaataatggagctgggaatatggctggatatctggtactaaaaaagggtctttaagaacctacttcctaatctcttccccaatccaaaccatagctgtctgtccagtgctctcttcctgcctccagctctgccccaggctcctcctagactctgtccctgggctagggcaggggaggagggagagcagggttgggggagaggctgaggagagtgtgacatgtggggagaggaccagctgggtgcttgggcattgacagaatgatggttgttttgtatcatttgattaataaaaaaaaatgaaaaaagtgaaaaaaaaaaaaaaaaa

SEQ ID NO: 1302 - DNA, 435 bp, Homo Sapiens
  misc_feature (168)..(170): n is a, c, g, or t
  misc_feature (176)..(176): n is a, c, g, or t
  misc_feature (193)..(193): n is a, c, g, or t
  misc_feature (204)..(204): n is a, c, g, or t
  misc_feature (207)..(207): n is a, c, g, or t
  misc_feature (219)..(219): n is a, c, g, or t
  misc_feature (223)..(223): n is a, c, g, or t
  misc_feature (341)..(341): n is a, c, g, or t
  misc_feature (380)..(380): n is a, c, g, or t
catattaaatcttcagaccctggtaggtatttactcaccgcacacctcaactctggattagccacatatcaagtgctcacagccacacatactcatggctcatggttacagtgctgggcagtgcagctcgaaagcatgacaggcttttgctaaccacaagcctttagnnncacagngtcctttttcccttccnacctccttttngtnatccccctcttnatcnagattcctcaaggtccaactcaagtagaacctcttgagaaaggcctatcccagcaactccagctcttaatgatcctgacccactacaataaaactgaatggcaaactgtggggcaatngagtatggggagggcctatttacagaaaaaaagttccangacaggaaacccctcaagggaatttgacccttttcggggttacaaatatggataa

SEQ ID NO: 1303 - DNA, 1185 bp, Homo Sapiens
agaaaaccactttggtagtgccagtgtgactcatccacaatgatttctccagtgctcatcttgttctcgagttttctctgccatgttgctattgcaggacggacctgtcccaagccagatgatttaccattttccacagtggtcccgttaaaaacattctatgagccaggagaagagattacgtattcctgcaagccgggctatgtgtcccgaggagggatgagaaagtttatctgccctctcacaggactgtggcccatcaacactctgaaatgtacacccagagtatgtccttttgctggaatcttagaaaatggagccgtacgctatacgacttttgaatatcccaacacgatcagtttttcttgtaacactgggttttatctgaatggcgctgattctgccaagtgcactgaggaaggaaaatggagcccggagcttcctgtctgtgctcccatcatctgccctccaccatccatacctacgtttgcaacacttcgtgtttataagccatcagctggaaacaattccctctatcgggacacagcagtttttgaatgtttgccacaacatgcgatgtttggaaatgatacaattacctgcacgacacatggaaattggacaaaattaccagaatgcagggaagtaaaatgcccattcccatcaagaccagacaatggatttgtgaactatcctgcaaaaccaacactttattacaaggataaagccacatttggctgccatgatggatattctctggatggcccggaagaaatagaatgtaccaaactgggaaactggtctgccatgccaagttgtaaagcatcttgtaaagtacctgtgaaaaaagccactgtggtgtaccaaggagagagagtaaagattcaggaaaaatttaagaatggaatgctacatggtgataaagtttctttcttctgcaaaaataaggaaaagaagtgtagctatacagaggatgctcagtgtatagatggcactatcgaagtccccaaatgcttcaaggaacacagttctctggctttttggaaaactgatgcatccgatgtaaagccatgctaaggtggttttcagattccacataaaatgtcacacttgtttcttgttcatccaaggaacctaattgaaatttaaaaataaagctactgaatttattgccgcaaaaaaaaa

SEQ ID NO: 1304 - DNA, 531 bp, Homo Sapiens
  misc_feature (255)..(255): n is a, c, g, or t
  misc_feature (302)..(302): n is a, c, g, or t
  misc_feature (423)..(423): n is a, c, g, or t
accccgcgcgccactcgctcgctcagagggaggagaaagtggcgagttccggatccctgcctagcgcggcccaacctttactccagagatcatggctgccgaggatgtggtggcgactggcgcgacccaagcgatctggagagcggcgggctgctgcatgagattttcacgtcgccgctcaacctgctgctgcttggcctctgcatcttcctgctctacaagatcgtgcgcggggaccagccggcggcagcggancacgacgacgacgagccgccccctctgccccgcctcaagcgcgcgancttcacccccgccgagctgcggcgcttcgacggcgtccaggacccgcgcatactcatggccatcaacggcaaggtgttcgatgtgaccaaaggccgcaaattctacgggcccgaggcgtantgggggtctttgctggaagagatgcatccaggggccttgcacaattttgcctggataaggaagcactgaaggatgagtacgatgacctttctgacctcactgctgccc

SEQ ID NO: 1305 - DNA, 311 bp, Homo Sapiens
gagagttttcaatgtgtgaacatagaataaaatggtctggtgaccaaaaggctctattaaagataatatgagatgttcaaaacactggctattttcttgggaacaaaagttgaacttctaaatctttctcacagattgtagaccaaaggaatgaattctgattggcagaatataagcctacgtaatataaaaaagacttccaggtttggccctctgagtcttgacccattacacaccatctcacaggcttattttggctttcaacaaggaaatttggaacccaggttttcccaacctacatctacaaaatg

SEQ ID NO: 1306 - DNA, 402 bp, Homo Sapiens
  misc_feature (20)..(20): n is a, c, g, or t
  misc_feature (42)..(42): n is a, c, g, or t
  misc_feature (96)..(96): n is a, c, g, or t
  misc_feature (296)..(296): n is a, c, g, or t
  misc_feature (304)..(304): n is a, c, g, or t
  misc_feature (377)..(377): n is a, c, g, or t
ataggtctttttcttggctncaagaggaggttgaggagtctnctggggggcatgtgctctagcatattaacctcaaaccagcaagaattagcagantccaaggaggaccagagacccactggcttctgctctcaggaacaggaagtggctctgatgttgcctggacctcccagaatttaaaccaaaccctcttgcttccttaacaaattctggctgacgaaggtccaggtactcttaaaaactggccctgggaaaattttgaatgaaatttcaagggaatttgtcccctctgggtntccacttnaggttgtgccgatgctgctaccacactgtcgagcccaggtaagtcctactgcaggattttgtgctgtggcacnccatgagtgtccctggaaataaaat

SEQ ID NO: 1307 - DNA, 1618 bp, Homo Sapiens
tctgacagcgccgaggtgcgccgagcaggagcagggaacaaaggagcggagaggggaggggagagagttgggcgagggagagcccccggccggctgccagaagatcccggcgggaggaagcccaagtgtcacttgaattccacccaaggagcgggcgcctgggatcagagcgtcctgtttagcaataacggctggagcacgtcctacaagttacgggagagtcggctgtgaaggagacgttcgcttatcccctgtgtccccgctcctggcccctccagacccccgccttgcctcgcgctgggaggggagatccagaatgaaaggcaagaaaggtattgttgcagcatctggcagtgagactgaggatgaggacagcatggacattcccttggacctttcttcatccgctggctcaggcaagagaaggagaaggggcaacctacccaaggagtctgtgcagattcttcgggattggctgtatgagcaccgttacaatgcctatccttcagagcaagaaaaagcgttgctgtcccagcaaacacacctgtctacgctacaggtctgtaactggttcatcaacgcccgccgcaggctcctccctgacatgctgagaaaggatggcaaagatccaaatcagttcacaatttcccgccgtggggccaagatttctgaaacgagctctgtggagtccgtgatgggcatcaaaaacttcatgccagctctagaggagaccccatttcattcctgtacagctgggccaaacccaaccctagggaggccactgtctcctaagccgtcatccccgggatcagttttggctcgtccatcagtgatctgccataccactgtgactgcattgaaagatgtccctttctctctctgccagtcggtcggtgtgggacaaaacacagatatacagcagatagcggccaaaaacttcacagacacctctctcatgtacccagaggacacttgtaaatctggaccaagtacgaatacacagagtggtcttttcaacactcctccccctactccaccggacctcaaccaggacttcagtggatttcagcttctagtggatgttgcactcaaacgggctgcagagatggagcttcaggcaaaacttacagcttaacccattttcaagcaaaacagttctcagaaatgtcatgattgccggggtgaaggcaagagatgaattgcattattttatatattttttattaatatttgcacatgggattgctaaaacagcttcctgttactgagatgtcttcaatggaatacagtcattccaagaactataaacttaaagctactgtagaaacaaagggttttcttttttaaatgtttcttggtagattattcataatgtgagatggttcccaatatcatgtgattttttttttcctccccttccctttttttgttattttttcagactgtgcaatacttagagaacctatagcatcttctcattcccatgtggaacaggatgcccacatactgtctaattaataaattttccattttttttcaaacaagtatgaatctagttggttgatgccttttttttcatgacataataaagtattttctttaaaaaaaaaaaaaaaaa

SEQ ID NO: 1308 - DNA, 2839 bp, Homo Sapiens
gcacgagctgcggctccgctctcgtcgcaacgagatctttcgagatcttctccgcccccgctaccggcgcctcctctgcggccactgagccggagccggcctgagcagcgctctcggttgcagtacccactggaaggacttaggcgctcgcgtggacaccgcaagcccctcagtagcctcggcccaagaggcctgctttccactcgctagccccgccggggtccgtgtcctgtctcggtggccggacccgggcccgagcccgagcagtagccggcgccatgtcggtggtgggcatagacctgggcttccagagctgctacgtcgctgtggcccgcgccggcggcatcgagactatcgctaatgagtatagcgaccgctgcacgccggcttgcatttcttttggtcctaagaatcgttcaattggagcagcagctaaaagccaggtaatttctaatgcaaagaacacagtccaaggatttaaaagattccatggccgagcattctctgatccatttgtggaggcagaaaaatctaaccttgcatatgatattgtgcagttgcctacaggattaacaggtataaaggtgacatatatggaggaagagcgaaattttaccactgagcaagtgactgccatgcttttgtccaaactgaaggagacagccgaaagtgttcttaagaagcctgtagttgactgtgttgtttcggttccttgtttctatactgatgcagaaagacgatcagtgatggatgcaacacagattgctggtcttaattgcttgcgattaatgaatgaaaccactgcagttgctcttgcatatggaatctataagcaggatcttcctgccttagaagagaaaccaagaaatgtagtttttgtagacatgggccactctgcttatcaagtttctgtatgtgcatttaatagaggaaaactgaaagttctggccactgcatttgacacgacattgggaggtagaaaatttgatgaagtgttagtaaatcacttctgtgaagaatttgggaagaaatacaagctagacattaagtccaaaatccgtgcattattacgactctctcaggagtgtgagaaactcaagaaattgatgagtgcaaatgcttcagatctccctttgagcattgaatgttttatgaatgatgttgatgtatctggaactatgaatagaggcaaatttctggagatgtgcaatgatctcttagctagagtggagccaccacttcgtagtgttttggaacaaaccaagttaaagaaagaagatatttatgcagtggagatagttggtggtgctacacgaatccctgcggtaaaagagaagatcagcaaatttttcggtaaagaacttagtacaacattaaatgctgatgaagctgtcactcgaggctgtgcattgcagtgtgccatcttatcgcctgctttcaaagtcagagaattttctatcactgatgtagtaccatatccaatatctctgagatggaattctccagctgaagaagggtcaagtgactgtgaagtcttttccaaaaatcatgctgctcctttctctaaagttcttacattttatagaaaggaacctttcactcttgaggcctactacagctctcctcaggatttgccctatccagatcctgctatagctcagttttcagttcagaaagtcactcctcagtctgatggctccagttcaaaagtgaaagtcaaagttcgagtaaatgtccatggcattttcagtgtgtccagtgcatctttagtggaggttcacaagtctgaggaaaatgaggagccaatggaaacagatcagaatgcaaaggaggaagagaagatgcaagtggaccaggaggaaccacatgttgaagagcaacagcagcagacaccagcagaaaataaggcagagtctgaagaaatggagacctctcaagctggatccaaggataaaaagatggaccaaccaccccaagccaagaaggcaaaagtgaagaccagtactgtggacctgccaatcgagaatcagctattatggcagatagacagagagatgctcaacttgtacattgaaaatgagggtaagatgatcatgcaggataaactggagaaggagcggaatgatgctaagaacgcagtgagggaatatgtgtatgaaatgagagacaagcttagtggtgaatatgagaagtttgtgagtgaagatggtcgtaacagttttactttgaaactggaagatactgaaaattggttgtatgaggatggagaagaccagccaaagcaagtttatgttgataagttggctgaattaaaaaatctaggtcaacctattaagatacgtttccaggaatctgaagaacgaccaaaattatttgaagaactagggaaacagatccaacagtatatgaaaataatcagctctttcaaaaacaaggaggaccagtatgatcatttggatgctgctgacatgacaaaggtagaaaaaagcacaaatgaagcaatggagtggatgaataacaagctaaatctgcagaacaagcagagtttgaccatggatccagttgtcaagtcaaaagagattgaagctaaaattaaggagctgacaagtacttgtagccctataatttcaaagcccaaacccaaagtggaacctccaaaagaggaacaaaaaaatgcagagcagaatggaccagtggatggacaaggagacaacccaggcccccaggctgctgagcagggtacagacacagctgtgccttcggattcagacaagaagcttcctgaaatggacattgattgattccaacacttgtttctattaaaacagactattataaa

SEQ ID NO: 1309 - DNA, 455 bp, Homo Sapiens
aaaatgtttttatttaattaaaaaaagacagaacaaccaacccaaaaccagtagtaggtactggagtcacaggtgcttaactggcgaaacacacaggggtgggggcgagggggcgggtcgggaggagggagagaaggtgggcacaggccaccacatccccccgttgggtgtcaggtctgagatgcagcgggagggccaggaatgggcggcccagggcccagggtccccggagacccagctggccgcggggagaaggctgagaaggcccgggtgtctgaggtggttttgctcccggctcgtccccttcttcctactctttcttggtccctaggtgggccctgcttactctgcctgggactgggcaagaggtaggattcattggaacacagctttctccatggaatgatagaaacttctggggcagcgggaggggaggtggcggatggagaggaact

SEQ ID NO: 1310 - DNA, 665 bp, Homo Sapiens
tgttaatcggcacgagggccgccgctgctgcctcccgctcgccctgaacccagtgcctgcagccatggctcccggccagctcgccttatttagtgtctctgacaaaaccggccttgtggaatttgcaagaaacctgaccgctcttggtttgaatctggtcgcttccggagggactgcaaaagctctcagggatgctggtctggcagtcagagatgtctctgagttgacgggatttcctgaaatgttggggggacgtgtgaaaactttgcatcctgcagtccatgctggaatcctagctcgtaatattccagaagataatgctgacatggccagacttgatttcaatcttataagagttgttgcctgcaatctctatccctttgtaaagacagtggcttctccaggtgtaagtgttgaggaggctgtggagcaaattgacattggtggagtaaccttactgagagctgcagccaaaaaccacgctcgagtgacagtggtgtgtgaaccagaggactatgtggtggtgtccacggagatgcagagctccgagagtaaggacacctccttggagactagacgccagttagccttgaaggcattcactcatacggcacaatatgatgaagcaatttcagattatttcaggaaacagtacacgcaaggcg

SEQ ID NO: 1311 - DNA, 506 bp, Homo Sapiens
ttttttttttttttttttcatagaccaaaatagagatttttatttccaaacacaaagcagatacatttttaaaaacataaaacaacagcaaaaacgtcaaaccatcttttagaacactgctacttccaacttgcacaaaaggaaggggaggaaaacgtcaatgcaactttaaaatatagcactaagaagaaactccggggtcctggtgttcctccctggatggcggggaaggctccattagctttggacttgatatgaaccgagataacacacacatgttccgagacagtcgtttggctccaatactgcttgccttcccagaaagcttaatttattgcaaatgcatgttttaccatcacaaataatatgacaagagtagatatggtccctctgcgtattgtttacataatagaatatttaaaacaatggaatgtgtttgtctttgacatcaaaaatcatttatgcagcatctacatgcacatatacacacacaagtgtgaacgcat

SEQ ID NO: 1312 - DNA, 494 bp, Homo Sapiens
cggccgctacttctgggcggtgggcgaggaggagtttgtctgcgagccgcccgtggtgactcaccgctcaccacctctggctgtgcccgcaggtcggccggctgccctgcgctgccgggcagtgggggacccagagccccgtgtgcgttgggtgtcaccccagggccggctgctaggcaactcaagccgtgcccgcgccttccccaatgggacgctggagctgctggtcaccgagccgggtgatggtggcatcttcacctgcattgcggccaatgcagctggcgaggccacagctgctgtggagctgactgtgggtcccccaccacctcctcagctagccaacagcaccagctgtgaccccccgcgggacggggatcctgatgctctcaccccaccctccgctgcctctgcttctgccaaggtggccgacactgggccccctaccgaccgtggcgtccaggtgactgagcacggggccacagctgctcttgtcc

SEQ ID NO: 1313 - DNA, 5286 bp, Homo Sapiens
gcgcgcctgtcgcggtggtgggtgcaggactggacccacgggcccattgtgcgcccgcccgcggcagccaggaccatgtgggtgaacccggaggaggtgttgctggccaacgcgctgtggatcaccgagagggccaacccatacttcatcctgcagcggaggaagggccacgccggcgatggaggcggcggcggcggactggcgggcctgctggtgggtacccttgatgttgtgttggactccagcgcccgggtcgctccttaccgaatcttgtaccagactccagactccctggtctactggaccatcgcctgtggtggttccaggaaagaaatcactgaacactgggaatggcttgagcaaaatctcttgcagacactctccatctttgaaaatgagaatgatatcaccacatttgtgagaggaaaaatacagggcatcattgcagaatacaacaaaatcaatgatgtaaaggaagatgatgacacggagaagtttaaagaagccattgtgaaatttcataggctgtttgggatgccagaggaagagaaactcgtcaactattactcttgcagctattggaaggggaaggtcccccgtcagggttggatgtacctcagcattaaccacctttgcttttattcttttcttatgggaagggaagcgaaactggtcatccggtgggtagacatcactcagcttgagaagaatgccaccctgcttctgcctgatgtgatcaaagtgagcacacggtccagtgagcatttcttctctgtattcctcaacatcaacgagaccttcaagttaatggagcagcttgccaacatagccatgaggcaactcttagacaatgagggatttgaacaagatcgatccctgcccaaactcaaaaggaaatctcctaaaaaagtgtctgctctaaaacgtgatcttgatgccagggcaaagagtgagagataccgtgcacttttccggctgcccaaagatgaaaaattagatggccacacagactgcactctctggactccatttaacaaaatgcacattttggggcagatgtttgtgtccacaaattacatctgttttaccagcaaggaggagaacttatgtagcctcattatcccgctccgtgaggtgacaattgtggaaaaggcagacagctccagtgtgctccccagtcccttatccatcagcacccgaaacaggatgaccttcctatttgccaacttgaaagatagagactttctagtgcagaggatctcagatttcctgcaacagactacttccaaaatatattctgacaaggagtttgcaggaagttacaacagttcagatgatgaggtgtactctcgacccagcagcctcgtctcctccagcccccagagaagcacgagctctgatgctgatggagagcgccagtttaacctaaatggcaacagcgtccccacagccacacagaccctgatgaccatgtatcggcggcggtctcccgaggagttcaacccgaaattggccaaagagtttctgaaagagcaagcctggaagattcactttgctgagtatgggcaagggatctgcatgtaccgcacagagaaaacgcgggagctggtgttgaagggcatcccggagagcatgcgtggggagctctggctgctgctgtcaggtgccatcaatgagaaggccacacatcctgggtactatgaagacctagtggagaagtccatggggaagtataatctcgccacggaggagattgagagggatttacaccgctcccttccagaacacccagcttttcagaatgaaatgggcattgctgcactaaggagagtcttaacagcttatgcttttcgaaatcccaacatagggtattgccaggccatgaatattgtcacttcagtgctgctgctttatgccaaagaggaggaagctttctggctgcttgtggctttgtgtgagcgcatgctcccagattactacaacaccagagttgtgggtgcactggtggaccaaggtgtctttgaggagctagcacgagactacgtcccacagctgtacgactgcatgcaagacctgggcgtgatttccaccatctccctgtcttggttcctcacactatttctcagtgtgatgccttttgagagtgcagttgtggttgttgactgtttcttctatgaaggaattaaagtgatattccagttggccctagctgtgctggatgcaaatgtggacaaactgttgaactgcaaggatgatggggaggccatgaccgttttgggaaggtatttagacagtgtgaccaataaagacagcacactgcctcccattcctcacctccactccttgctcagcgatgatgtggaaccttaccctgaggtagacatctttagactcatcagaacttcctacgagaaattcggaactatccgggcagatttgattgaacagatgagattcaaacagagactgaaagtgatccagacgctggaggatactacgaaacgcaacgtggtacgaaccattgtgacagaaacttcctttaccattgatgagctggaagaactttatgctcttttcaaggcagaacatctcaccagctgctactggggcgggagcagcaacgcgctggaccggcatgaccccagcctgccctacctggaacagtatcgcattgacttcgagcagttcaagggaatgtttgctcttctctttccttgggcatgtggaactcactctgacgttctggcctcccgcttgttccagttattagatgaaaatggagactctttgattaacttccgggagtttgtctctgggctaagtgctgcatgccatggggacctcacagagaagctcaaactcctgtacaaaatgcacgtcttgcctgagccatcctctgatcaagatgaaccagattctgcttttgaagcaactcagtacttctttgaagatattaccccagaatgtacacatgttgttggattggatagcagaagcaaacagggtgcagatgatggctttgttacggtgagcctaaagccagacaaagggaagagagcaaattcccaagaaaatcgtaattatttgagactgtggactccagaaaataaatctaagtcaaagaatgcaaaggatttacccaaattaaatcaggggcagttcattgaactgtgtaagacaatgtataacatgttcagcgaagaccccaatgagcaggagctgtaccatgccacggcagcagtgaccagcctcctgctggagattggggaggtcggcaagttgttcgtggcccagcctgcaaaggagggcgggagcggaggcagtgggccgtcctgccaccagggcatcccaggcgtgctcttccccaagaaagggccaggccagccttacgtggtggagtctgttgagcccctgccggccagcctggcccccgacagcgaggaacactcccttggaggacaaatggaggacatcaagctggaggactcctcgccccgggacaacggggcctgctcctccatgctgatctctgacgacgacaccaaggacgacagctccatgtcctcatactcggtgctgagtgccggctcccacgaggaggacaagctgcactgcgaggacatcggagaggacacggtcctggtgcggagcggccagggcacggcggcactgccccggagcaccagcctggaccgggactgggccatcaccttcgagcagttcctggcctccctcttaactgagcctgccctggtcaagtactttgacaagcccgtgtgcatgatggccaggattaccagtgcaaaaaacatccggatgatgggcaagcccctcacctcggccagtgactatgaaatctcggccatgtccggctgacacgggcgccttcccgggggagtgggaggagagggaggggagggattttttatgttcttctgtgttgagttttttctttctttcttttaaattaaatatttattagtacctggcttgaagcctagtgttttcataatgtaattcaatgaaaactgttggagaaatatttaaacacctcaatgtaggtacattacactcttgttgcggggaggggatttaccagaatacagtttatttcgtgaattctaaaaaacaaaaagatgaatctgtcagtgatatgtgtgtattataacttattaatcttgctgttgagctgtatacatggtttaaaaaatagtactgtttaatgctaagtaaggcagcagtcatttgtgtattcaggctttttaaataaaattagagctgtaaggaaaatgaaaagccacaaatgcaagactgttcttaaatggaaggcatagtcagcgagggtaaatcctataccactttaggaagtattaaaaatatttttaagatttgaaatatatttcatagaagtcctctattcaaaatcatattccacagatgttccccttcaaagggaaaacatttggggttctaaacagttatgaaagtaagtgatttttacatgattccagaataacacttgtattgaccaatttagacagataccagaccaattttgcatttaagaaattgttctgattatttacgtcaactcattagaattcagtgaaaagtaacagtcttttgtcacagagaatctgaaagtagcagcaaagacagagggctcatgacaggtttttgcttttgctttgcttttgtttttgaaagagtaaaagtactgatgcttctgatactggatgtttagcttcttactgcaaaaacataagtaaaacagtcaactttaccatttccgtattctccatagattgaagaaatttataccacatatcgcatatgaccatctttccatcaaatcaatgtagagataatgtaaactgaaaaaaaatctgcaagataatgtaactgaatgttttaaaaacagaacttgtcactttatataaaagaatagtatgctctatttcctgaatggatgtggaaatgaaagctagcgcacctgcactttgaattcttgcttcttttttattactgttatgattttgctttttacagatgttggacgattttttcttctgattgttgaattcataatcatggtctcatttcctttgcttctttggaatatttctttcaacacattcctttattttattatacattgtgtcctttttttagctattgctgctgttgttttttattctatttacaggatgatttttaaactgtcaaatgaagtagtgttaacctcaaataggctaaatgtgaacaaataaaatacagcaaatactc

SEQ ID NO: 1314 - DNA, 779 bp, Homo Sapiens
cccgctggcccaatggcagcgtcctacagtgtagcctccgcctcccgattgactggcctgcttggcaaggcaagtagcggcggcgcttcaagatgcgctgcctgaccacgcctatgctgctgcgggccctggcccaggctgcacgtgcaggacctcctggtggccggagcctccacagcagtgcagtggcagccacctacaagtatgtgaacatgcaggatcccgagatggacatgaagtcagtgactgaccgggcagcccgcaccctgctgtggactgagctcttccgaggcctgggcatgaccctgagctacctgttccgggaaccggccaccatcaactacccgttcgagaagggcccgctgagccctcgcttccgtggggagcatgcgctgcgccggtacccatccggggaggagcgttgcattgcctgcaagctctgcgaggccatctgccccgcccaggccatcaccatcgaggctgagccaagagctgatggcagccgccggaccacccgctatgacatcgacatgaccaagtgcatctactgcggcttctgccaggaggcctgtcccgtggatgccatcgtcgagggccccaactttgagttctccacggagacccatgaggagctgctgtacaacaaggagaagttgctcaacaacggggacaagtgggaggccgagatcgccgccaacatccaggctgactacttgtatcggtgacgccccaccggcctgcagcccctgctgcccaataaaaccactccgaccccacgg

SEQ ID NO: 1315 - DNA, 291 bp, Homo Sapiens
gcattttaagcatggttgaaatttgctgccacaaccataacattaaaatttggagatcattgtagattcatgcggttgtaagaaataatatagagatcttgcataccttccacccagtctcccaaatgataacgtgtgtgtaactacagtatactggacattcctcccccttttttttcggagaagttacagattgcctcataatcctgtggggatactatgtggctatgatgagtgatgactacactgaaataggagaactagacggtttcatgataacctgattttttt

SEQ ID NO: 1316 - DNA, 541 bp, Homo Sapiens
  misc_feature (13)..(13): n is a, c, g, or t
  misc_feature (44)..(44): n is a, c, g, or t
cacgaggccgcanatgacttttttttttttttttttttttgganagaaaccattaagacatttatttatataaatgaacaaagtatacagataaatcacataaaagcaaatcagaaaaactttgatttctctcctatgtttactaaattagcaacaacatataaaacccctactcaaatggtaacactgtaaaatgttacaactctttgggaatgcaataaggcaaacataagtcataaagttcttcatattatttcactaaataatccccctcccaggaatttatcataataaaatttaaaactacttaagtattcagcaatagagaaatactctaaataaattaagagtataaagtaatataattaaaataatcattatcacaactacatacatatagataatatcaaatgaaaaagtcaatttaaaagtataggtgccttaagactatgtgaacaacaaaaaggaaaatagtaatataaaaatttaaaatctaaagttactacattaagatggtagaggtaacagtaattttcccatt

SEQ ID NO: 1317 - DNA, 617 bp, Homo Sapiens
aaaacaactctagctttacaaaagtgattactttaatgggacagaaatacctgctaccaccgaaaagcagttttcttttatctgacatttcttgtatgcaaccacttctaaactataggaaaacatttgatgtaattgtgatagatccaccatggcagaacaaatcagttaaaagaagtaataggtacagttatttggtcacccctgcaaatacagcaaatacctatccctaaattggctgctccaagactgtcttcttgttacttgggtgaccaatagacagaagcacctacgttttataaaggaagaactttatccctcttggtctgtggaggtagttgctgagtggcactgggtaaaaataaccaattcaggagaatttgtgttcccattagattctccacgacaaaaagccctacgaaggtcttatactggggagggttcaagaaaaaactgctctaccattgaggaatgcagatgtaaacgtgctccccattccagaccacaaattaattgtcagcgtgccctgtactcttcactcacataagccaccgttgctgaggttttaaaagactacatcaagccagatggggaatatttggagctgttgctcgaaa

SEQ ID NO: 1318 - DNA, 400 bp, Homo Sapiens
tttttttttttgaactaatagaaatttaatgttgttttaagataatacttaaatattaagaaagctaaaatttaaaatgtgttgactaggtttttctacacaattatatttacataatgactaaggtaaaacctttccacaaatagttgcccaggaggaagaaaaagcaacctacaacagtctctggggcttgcactgccttctcaggccagctataccctagctgagcaaagaactgaagaagcaagtgtccactccccacccctctcccctgccccccttttgttacttgaagtgtttctgagtaacaaatgcaaaactaggtttgaatataaaagctagacgaccacgccaattcaggattgtgtttcatctgaggagacctggcatagaaaaaaca

SEQ ID NO: 1319 - DNA, 878 bp, Homo Sapiens
cagattttcaggttgattgatgtgggacagcagccacaatgaggaactcctatagatttctggcatcctctctctcagttgtcgtttctctcctgctaattcctgaagatgtctgtgaaaaaattattggaggaaatgaagtaactcctcattcaagaccctacatggtcctacttagtcttgacagaaaaaccatctgtgctggggctttgattgcaaaagactgggtgttgactgcagctcactgtaacttgaacaaaaggtcccaggtcattcttggggctcactcaataaccagggaagagccaacaaaacagataatgcttgttaagaaagagtttccctatccatgctatgacccagccacacgcgaaggtgaccttaaacttttacagctgacggaaaaagcaaaaattaacaaatatgtgactatccttcatctacctaaaaagggggatgatgtgaaaccaggaaccatgtgccaagttgcagggtgggggaggactcacaatagtgcatcttggtccgatactctgagagaagtcaatatcaccatcatagacagaaaagtctgcaatgatcgaaatcactataattttaaccctgtgattggaatgaatatggtttgtgctggaagcctccgaggtggaagagactcgtgcaatggagattctggaagccctttgttgtgcgagggtgttttccgaggggtcacttcctttggccttgaaaataaatgcggagaccctcgtgggcctggtgtctatattcttctctcaaagaaacacctcaactggataattatgactatcaagggagcagtttaaataaccgtttcctttcatttactgtggcttcttaatcttttcacaaataaa

SEQ ID NO: 1320 - DNA, 1438 bp, Homo Sapiens
ggatgctctgatggccgggcctgcggcgctgagcgcggcggcggcggctgctctggcggccgccctgctcctgctgcgtcgtgaggacccggggccgggggctggccccagcatggccgaaacagaagccctgtcgaagcttcgggaagacttcaggatgcagaataaatccgtctttattttgggcgccagcggagaaaccggcagagtgctcttaaaggaaatcctggagcagggcctgttttccaaagtcacgctcattggccggaggaagctcaccttcgacgaggaagcttataaaaatgtgaatcaagaagtggtggactttgaaaagttggatgactacgcctctgcctttcaaggtcatgatgttggattctgttgcctgggtaccaccagagggaaagctggggcggagggatttgttcgtgttgaccgagattatgtgctgaagtctgcagagctggcaaaagctggagggtgcaaacatttcaacttgctatcctctaaaggagctgataaatcaagcaattttttatatctacaagttaagggagaagtagaagccaaggttgaagaattaaaatttgatcgttactctgtatttaggcctggagttctgttatgtgataggcaagaatctcgcccaggtgaatggctggttagaaagttctttggctccttaccagactcttgggccagggggcattctgtgcctgtggtgaccgtggttagagcaatgctgaacaatgtggtgagaccaagagacaagcagatggaactgctggagaacaaggccatccatgacctggggaaagcgcatggctctctcaagccatgaccacactggagaaatggtttttattgtcaaccttaacacccatcaccaaatcggtaatttcagggtctaaaaaaagtcagcatgttttaactttgttgttttactatcctcaggcatccattccaatcaagaaatgatggtgctctgcatcagtggttcagagcctggttatacatatagatcactcagggagctttggaaaaataaagatttgtcagccctatctcaaacttgaatcaaaatttctggggtgtgggcacaataatctgtaattttctttgtttatacttcccctgatgccactggttccgatgccactggctggggggcctgctttgaaatgcttgtctgcagagtcacagcagccatgaaaaccttatgaccgtgcaaatgagctctgctctaaaattgttgacattcatgtctctgagttacaaaagtgctaattcactacatgtaattgtgtaagtaaacattgtgcctttactacttctttatgtaatagaagttatatacctaagcttatataatacatggggaggattaaataaaggaataaagatgaatggacaactccaaaaaaaaaaaaaaaaaaaa

SEQ ID NO: 1321 - DNA, 108 bp, Homo Sapiens
  misc_feature (107)..(107): n is a, c, g, or t
ggcaatcctttctttcagctggagtgctcctcaggagccagccccacccttagaaaagatgttttccatgaggatcgtctgcctggtcctaagtgtggtgggcacanc

SEQ ID NO: 1322 - DNA, 514 bp, Homo Sapiens
tttttcaaaaggaagtgaaatcctatatcaaggtgcttagtgcatgtcaatacctagtgagggtattacagtcatactcctgagtctctggtcatgattgtcctttggccacttccaaactggaagccactgttattttcagcctttgaacctgaagctttgcaagggagagccccgggtctgtcagtatggtggccacccgctcctgtctgtttccccactcagtgacctcataccaggtgggtggatgagggttgtggccaccgtttgcctggtttggggtggtgcccggtcggtctcctgctggccggggctgctgtcttcagcaaactttagggaaacccgggcgctgagatttcagctcttaggccccagaaggcctctaagaatcactagctcagtccttccccaccccagcctctagaggtcctggcccttgtgccatgactggccccacagtagtcattttgggaagaaacccaggaatgggcagaatgggagacaaagccttgat

SEQ ID NO: 1323 - DNA, 191 bp, Homo Sapiens
cgctcgtagtgtggctcttcgggggtctcattatcttctggttcctgtgtgtggtctgcgccatcgtcccattccgctccaagatccttttagccaaggcagagggtgagatctcagaccccttccgcttcaccaccttctacatccactttgccctggtactctctgccctcaaagcgccacaccaagag

SEQ ID NO: 1324 - DNA, 1576 bp, Homo Sapiens
gctgaagcaaaagatttgcatttaaggagagaaatacaccctgaaatttgagtttgaaagattagaacatagagggtctctacagtgtttttctgcaacaccaagtagtcaaatctatttatagaaactctgattacaacagaaattttaaaatgaaattttccacatcggtattttgtaggaaagctcttataatcaatgcttaagctgctttttgaggcttttcttgtacagaggttgcagccaattacattttaattggtaggctgctgaataatgtttttgtatgttttaaaataatatttattttaataggttttttaacattatgcaaatcccaataaagaactgacacgttccataggccattgactgggaaattttgtgaaacacagcctaaatacacagtttttacaccaactaatttgtcttgcctttaaaactgattataactcttctttaagtacaacttttataaagaaaaaatacaacactaagactgtatgttctgtaaattatagtgtgatgacccatgcagaaccgctgtctgaagcttactcagcgattcatagccatctccagccatgttttatcaaatcacacactaaaaataaatggaaatgctacagtgaaaaaccaaaagttacagagcaacataagtaaaatgactaggcagtttcttagtaacatgtttgaaatgggaaaggtgactgactgcctttcaccagagtcttagctgtttcacgttcactattttaggttaattttcttgggaaatcaatttgaatattcccccctgtccttttgcattaaaggacgaaaatatatgttgagagtttgacagactttttaaatatgcctctttcccaattttatgtatttttggttctgcgcacacagatttatcaatgaagtacatttgcctctggctttatcacaaggaaaaaggaatcaaacattgaacacaaatgtgttccaaaccagtcttgtccatcttgtcacttttatgtgactgctcctctgaaccagaaggggcacgatagaaggccataggaatgaaagtaaatcattcaggtgaagtgagaaattcttccatatacagagtgaaaatgtgtgatttcattcctgccttcctttaaacgttgtcttgatctctgcctagtagtagttgagccctcagtcgcccaaacatgaggagagacccaactccagcagccagaatttagtatttacatttgccttcccaagttgagaatagaatgtggtgttctgtgctttctgtttttattattccaaaatatttttttaaagaagtgttatttttcaacagattcataaattagttcctgatgtacggtaaattaaaactcccactgtgtcagtcaaactgagatgtgctcatttcataaccactcatttctagtctgtcagagctgcactggtggcttattgctggtttttaaaggtgtttttaacttacatgtaacatgtttaggacatgttttttttttctaatttgtgtgtctttacaactgattaaacagtagtttaaaaataaaaaaaaaaaaaaaaaaaa

SEQ ID NO: 1325 - DNA, 480 bp, Homo Sapiens
gcgtcgactttttttttttttaaactgaatcctacgtctcaaccctcatttttaggtaaggaatcttaagtccaaagatattaagtgactcacacagccaggtaaggaaagctggattggcacactaggactctaccataccgggttttgttaaagctcaggttaggaggctgataagcttggaaggaacttcagacagctttttcagatcataaaagataattcttagcccatgttcttctccagagcagacctgaaatgacagcacagcaggtactcctctattttcacccctcttgcttctactctctggcagtcagacctgtgggaggccatgggagaaagcagctctctggatgtttgtacagatcatggactattctctgtggaccatttctccaggttaccctaggtgtcactattggggggacagccagcatctttagctatcatttgagtttctgtctgtcttcagtagag

SEQ ID NO: 1326 - DNA, 560 bp, Homo Sapiens
tttttttttttttttttgtggtgagaacatttgaaatttattgtcttagcaattttgaaatacacaatacttcattgttaactacagtcaccatgctgtgctgtagatctcaacaaaatatattcctcctgtctcaactaaaacattgtactctttgacaacatttccccattcctctcaccccctccaaaaacacccattctttatgttgaagagaatggctaaaaagtcccagcaggtttcaacagacggcttcagtggttgtcccatcacacttcaatgttattaataaaaaggggaggggcaatacataattcggacaggctgaaagtaccattgtaaccactttcttgacttcacagaaaaagtcctcttgttttcatctgtaaaatgggaactgcatgaataccattcttcttttcttcagcccggccctgtagattccaaggcagctcccagttttccatattgttcccaacgcattcactgcccacagtccccacacaaacttctttcgcaggctcacaacatagtccctctgccccgcctcgtgccgaatt

SEQ ID NO: 1327 - DNA, 354 bp, Homo Sapiens
gcgtcgacgatgatactggttaaaatgctcaaaaagcctctggatcatccgagacagactcacagttcttggtcctcttcctccaggcctcattgtcttactgcttccatgttaaagcacccagacccttgtccagaacttttatagcaagataaaagatcccttccctgagcaacttcctcctgctttgggacacatcttccctcagggcacaatctgtcagacactcgctcgcctggcctgctgtctcccctcccggcctgatgttggatttcagtaggttgcagctaatgttgaatatatttcagatgctgtaccctctctgtgaactatgaagacatgattagcagatac

SEQ ID NO: 1328 - DNA, 1857 bp, Homo Sapiens
ccgagcaggccgtgttgcatctggggtctgcttccatttattcactagccatcactacaatcaccagcttttaaaacaacagctaccagaaatacaaagagtgccattggaacagctgtgtctaagaattaaaattttagagatgtttagtgctcataatctccagtctgtgttctctcggctcattgaacctccacacaccgattctcttcgtgcctcaaaaatacgattacgagacttaggagcattaactccagatgaaagattgacccctcttgggtatcatttggcctctctgcccgtggatgtgagaattggcaaactaatgttgtttgggtctatcttccgctgtttggatcctgctctcaccattgctgccagtttggcttttaagtctccgtttgtatctccctgggataaaaaagaagaagctaaccagaaaaagctggaatttgcattcgcaaacagtgattatctggcccttctacaagcgtataagggatggcagctaagtacaaaagaaggcgtgcgtgcaagttataattactgcagacaaaacttcttgtctggaagagttctgcaggaaatggccagcctcaaacgacaattcacggaactgttatcggatatagggtttgcaagggaagggctcagagcaagggaaattgagaaaagggcccaaggaggagatggtgtcttagatgccacaggagaagaggcaaactcaaatgctgagaaccccaagctgatatcagcaatgctgtgtgctgctttgtatccaaatgtagtgcaggtgaaaagcccagaaggaaaatttcagaagaccagtactggagctgtcagaatgcaaccaaaatcagctgagttgaagtttgtcaccaagaacgatggatatgtacacattcacccttcatcagtgaactatcaggtgagacactttgacagcccctacctgttgtaccacgagaagataaaaactagtcgagtattcatccgagactgcagcatggtgtctgtgtacccgctggtcttgtttggaggaggccaagtgaatgtgcagcttcaaagaggagagttcgttgtctccctggatgatggttggatccgttttgtagctgcttcccatcaggtggctgaactggtaaaggagcttcgttgcgaacttgatcagcttctccaggataaaattaaaaacccaagcattgatctgtgtacgtgtcctcgaggatcccggatcatcagcacaattgtgaaacttgtcaccacacaataaaaagcagtcttagagagtgcttgctactcacctgcttctagctcacctgggaaataacagcagaacctctacctcgaactaaagacctattggggctggccctggtggaggagcccagggcatgaagcccaaggcagctgaggcagtgtatatacccttagggccatttctaacaaagccttggccactcccagcacaatttggagtgtcaagggtgagagcctaaaacccagcttgcctgtctttgtctctgtgattgttctggagtgaattaagttcacctgataactcaaaagtgaatgtataatacaattctgttttaatctgtgtattctttttctcctactttttactggggtgagaggggcatgaagagaaatacgcctttttttttttcttttcctgtcgccaaggctcgactgagagaagtcagaacagagaaggggaaaaaaaacccaaaattatgtgaacaagcaaaattaaaatttcattttaggctattggctactgagtaaacttgacttgtgaggggtttttatttttactcattaaaagtcaacttaaaaaaaaaaaaaaaaaaaaaa

SEQ ID NO: 1329 - DNA, 268 bp, Homo Sapiens
cgactagtcccaaccatacaacacctgtgtaatcaggaaatactgcactccagcctgggcaacagagcaagactctgtctcaaaaaaaaaaaaaaagagaaataagaaaatgggaagcaatatttgacatagttctttttagtcaaatctacttgttaaaaaaagggtagcagtttattcatctgtgaaaggaaaataatacttatcttacaaggttgcaagagctcaaggagaccatgtatgtaaagttcctgctgtaaatatgaac

SEQ ID NO: 1330 - DNA, 689 bp, Homo Sapiens
cccactcctatagatcagtagcttggaccgcatcctagccgccgactcacacaaggcaggtgggtgaggaaatccagagttgccatggagaaaattccagtgtcagcattcttgctccttgtggccctctcctacactctggccagagataccacagtcaaacctggagccaaaaaggacacaaaggactctcgacccaaactgccccagaccctctccagaggttggggtgaccaactcatctggactcagacatatgaagaagctctatataaatccaagacaagcaacaaacccttgatgattattcatcacttggatgagtgcccacacagtcaagctttaaagaaagtgtttgctgaaaataaagaaatccagaaattggcagagcagtttgtcctcctcaatctggtttatgaaacaactgacaaacacctttctcctgatggccagtatgtccccaggattatgtttgttgacccatctctgacagttagagccgatatcactggaagatattcaaatcgtctctatgcttacgaacctgcagatacagctctgttgcttgacaacatgaagaaagctctcaagttgctgaagactgaattgtaaagaaaaaaaatctccaagcccttctgtctgtcaggccttgagacttgaaaccagaagaagtgtgagaagactggcta

SEQ ID NO: 1331 - DNA, 252 bp, Homo Sapiens
gcgtcgaccgccaatatcaagcatgtcatcagatatgccaggtatgtggagtgtttttgtttcttttgttttttaatgaaggcggaatagcagcaggatcaaccgaagtcacactgggcacccttacagaagatggctgatacatgagaaccctgttttaaatagcacgggaaattacaaacaatctggctgttagttcacaggagagaagagctgcaccactgggcattctcagtcgttcgttcgtcgacg

SEQ ID NO: 1332 - DNA, 1633 bp, Homo Sapiens
ctgagctgcatcatggtgcggtctgtggcctgggcaggtttcatggtcctgctgatgatcccatggggctctgctgcaaaactggtctgctacttcaccaactgggcccagtacagacagggggaggctcgcttcctgcccaaggacttggaccccagcctttgcacccacctcatctacgccttcgctggcatgaccaaccaccagctgagcaccactgagtggaatgacgagactctctaccaggagttcaatggcctgaagaagatgaatcccaagctgaagaccctgttagccatcggaggctggaatttcggcactcagaagttcacagatatggtagccacggccaacaaccgtcagacctttgtcaactcggccatcaggtttctgcgcaaatacagctttgacggccttgaccttgactgggagtacccaggaagccaggggagccctgccgtagacaaggagcgcttcacaaccctggtacaggacttggccaatgccttccagcaggaagcccagacctcagggaaggaacgccttcttctgagtgcagcggttccagctgggcagacctatgtggatgctggatacgaggtggacaaaatcgcccagaacctggattttgtcaaccttatggcctacgacttccatggctcttgggagaaggtcacgggacataacagccccctctacaagaggcaagaagagagtggtgcagcagccagcctcaacgtggatgctgctgtgcaacagtggctgcagaaggggacccctgccagcaagctgatccttggcatgcctacctacggacgctccttcacactggcctcctcatcagacaccagagtgggggccccagccacagggtctggcactccaggccccttcaccaaggaaggagggatgctggcctactatgaagtctgctcctggaagggggccaccaaacagagaatccaggatcagaaggtgccctacatcttccgggacaaccagtgggtgggctttgatgatgtggagagcttcaaaaccaaggtcagctatctgaagcagaagggactgggcggggccatggtctgggcactggacttagatgactttgccggcttctcctgcaaccagggccgataccccctcatccagacgctacggcaggaactgagtcttccatacttgccttcaggcaccccagagcttgaagttccaaaaccaggtcagccctctgaacctgagcatggccccagccctggacaagacacgttctgccagggcaaagctgatgggctctatcccaatcctcgggaacggtccagcttctacagctgtgcagcggggcggctgttccagcaaagctgcccgacaggcctggtgttcagcaactcctgcaaatgctgcacctggaattgagtcgtaaagcccctccagtccagctttgaggctgggcccaggatcactctacagcctgcctcctgggttttcctgggggccgcaatctggctcctgcaggcctttctgtggtcttcctttatccaggctttctgctctcagccttgccttccttttttctgggtctcctgggctgcccctttcacttgcaaaataaatctttggtttgtgcccctcttca

SEQ ID NO: 1333 - DNA, 444 bp, Homo Sapiens
  misc_feature (23)..(23): n is a, c, g, or t
  misc_feature (294)..(294): n is a, c, g, or t
  misc_feature (297)..(297): n is a, c, g, or t
  misc_feature (359)..(359): n is a, c, g, or t
gtgaatatattaaaatatctttnttttttttttgatgcggagtcttgctctgttgtccagcctggagtgcagtggcatgatctcggctcactgcgacctctgcctcccaggagaatcacttgaaccagggaggtggaggttgcagtgagccaagattgcaccactgcactccagcctgggcgacagagtgagactccatcttggggggaaaaaagtatatatatatacacacccacagacacacacacacacacatactctctctaaatgtgtgtatagaaccttttatcagtnctnacattgatttataattaaatgtgggtgaggaagaatgtgtggagtgtttcagaaattttgancttaaaagccttttcagaaactcaaagctttcagaaatttataggttatattaatagccttctaaacagcattaagttttcaatt

SEQ ID NO: 1334 - DNA, 3755 bp, Homo Sapiens
ggcggctgcggcacgggaaaggctcagtgactgaagctccaaaggccagcaggctggtggggacgtgaccgaagcgaggctctggttccctttcggtgggcgccatttgagcctcatctctggcttccccaggatgcgccggcagccggggagcggctccgggcgcgaggtctgaggatgatctttcctgtcgcccgctacgcgctccggtggctgcgacggcccgaagaccgtgccttttcccgcgccgccatggagatggccctccgaggcgtgcggaaagtcctctgtgtggccgaaaaaaacgacgcggccaaggggatcgccgacctgctgtcaaacggtcgcatgaggcggagagaaggactttcaaaattcaacaagatctatgaatttgattatcatctgtatggccagaatgttaccatggtaatgacttcagtttctggacatttactggctcatgatttccagatgcagtttcgaaaatggcagagctgcaaccctcttgtcctctttgaagcagaaattgaaaagtactgcccagagaattttgtagacatcaagaaaactttggaacgagagactcgccagtgccaggctctggtgatctggactgactgtgatagagaaggcgaaaacatcgggtttgagattatccacgtgtgtaaggctgtaaagcccaatctgcaggtgttgcgagcccgattctctgagatcacaccccatgccgtcaggacagcttgtgaaaacctgaccgagcctgatcagagggtgagcgatgctgtggatgtgaggcaggagctggacctgaggattggagctgcctttactaggttccagaccctgcggcttcagaggatttttcctgaggtgctggcagagcagctcatcagttacggcagctgccagttccccacactgggctttgtggtggagcggttcaaagccattcaggcttttgtaccagaaatcttccacagaattaaagtaactcatgaccacaaagatggtatcgtagaattcaactggaaaaggcatcgactctttaaccacacggcttgcctagttctctatcagttgtgtgtggaggatcccatggcaactgtggtagaggtcagatctaagcccaagagcaagtggcggcctcaagccttggacactgtggagcttgagaagctggcttctcgaaagttgagaataaatgctaaagaaaccatgaggattgctgagaagctctacactcaagggtacatcagctatccccgaacagaaacaaacatttttcccagagacttaaacctgacggtgttggtggaacagcagacccccgatccacgctggggggcctttgcccagagcattctagagcggggtggtcccaccccacgcaatgggaacaagtctgaccaagctcaccctcccattcaccccaccaaatacaccaacaacttacagggagatgaacagcgactgtacgagtttattgttcgccatttcctggcttgctgctcccaggatgctcaggggcaggagaccacagtggagatcgacatcgctcaggaacgctttgtggcccatggcctcatgattctggcccgaaactatctggatgtgtatccatatgatcactggagtgacaagatcctccctgtctatgagcaaggatcccactttcagcccagcaccgtggagatggtggacggggagaccagcccacccaagctgctcaccgaggccgacctcattgccctcatggagaagcatggcattggtacggatgccactcatgcggagcacatcgagaccatcaaagcccggatgtacgtgggcctcaccccagacaagcggttcctccctgggcacctgggcatgggacttgtggaaggttatgattccatgggctatgaaatgtctaagcctgacctccgggctgaactggaagctgatctgaagctgatctgtgatggcaaaaaggacaaatttgtggttctaaggcagcaagtgcagaaatacaagcaggttttcattgaagcggtggctaaagcaaagaaattggacgaggccttggcccagtactttgggaatgggacagagttggcccagcaagaagatatctacccagccatgccagagcccatcaggaagtgcccacagtgcaacaaggacatggtccttaagaccaagaagaatggcgggttctacctcagctgcatgggtttcccagagtgtcgctcagctgtgtggcttcctgactcggtgctggaggccagcagggacagcagtgtgtgtccagtttgtcagccacaccctgtgtacaggttaaagttaaagtttaagcgcggtagccttcccccgaccatgcctctggagtttgtttgctgcatcggcggatgcgacgacaccctgagggagatcctggacctgagattttcagggggcccccccagggctagccagccctctggccgcctgcaggctaaccagtccctgaacaggatggacaacagccagcacccccagcctgctgacagcagacagactgggtcctcaaaggctctggcccagaccctcccaccacccacggctgctggtgaaagcaattctgtgacctgcaactgtggccaggaggctgtgctgctcactgtccgtaaggagggccccaaccggggccggcagttctttaagtgcaacggaggtagctgcaacttcttcctgtgggcagacagccccaatccgggagcaggagggcctcctgccttggcatatagacccctgggcgcctccctgggatgcccaccaggcccagggatccacctaggtgggtttggcaaccctggtgatggcagtggtagtggcacatcctgcctttgcagccagccctccgtcacacggactgtgcagaaggatggacccaacaaggggcgccagttccacacatgtgccaagccgagagagcagcagtgtggctttttccagtgggtcgatgagaacaccgctccagggacttctggagccccgtcctggacaggagacagaggaagaaccctggagtcggaagccagaagcaaaaggccccgggccagttcctcagacatggggtccacagcaaagaaaccccggaaatgcagcctttgccaccagcctggacacacccgtcccttttgtcctcagaacagatgagctcagggtagggtagagaacgccactttctcagacctgtcccctttgtgtttagaaatgagttaaccaggaccaagtggccatttagtgtcctggaaacttagaggacagtgttggcctttggagtcgggccttcttgtgttaaggggcacaaggtccagatcactctggagcaggccagctctgctggacagtgaccctcttcccaggcctcaggagtgaccatagccactgctgaaaagtcacgcagctgctccctcggaccccccaaggatggttgctgttagcagaggattggtgcagtcccagctgaagcccactgtgtgccaaaggaagaagctcccagggctgcttccttcacctgcagaaagccccaagtgagccaccagcactcatggggcagtccctgtccaggctgcccagggcttctcatagacgtcctgagaaggacggtgtaatgcaaggaaatggctgtggtaacactgatccttcagaagaagcttcattccctcttaatctagttaagccaggacatccagaattcattgctttaataaagaacccaggccggg

SEQ ID NO: 1335 - DNA, 454 bp, Homo Sapiens
gagacagagtcttgaggaaatacatttctaagaaggatttttacagacactcatctttcatacccaaccacagggtctaactctaaagaggataaaaccaattactttcgtcccaagagctcatgactaatgacagcgtaaatctatgctatcaaaacctgcgtctctcatctgttacgagtattcaggcaggattcaaatattctcaaagaaagaaacacagtgcatgctgtgatcgcctgctcagcaacaacaagcactgcatcccaaactatctcctcccaggaattaaatgaggccagttgtgtacactggcatttcctccactgtggtactgcagaaggtctcagtgtcacaaagaatccttttgtcttctttaatatttatggtcacagctgtcttcccaagttgaccccgactgccagttcaacaagtcagtagcagtcaaaatatg

SEQ ID NO: 1336 - DNA, 314 bp, Homo Sapiens
  misc_feature (221)..(221): n is a, c, g, or t
  misc_feature (224)..(224): n is a, c, g, or t
  misc_feature (226)..(226): n is a, c, g, or t
aaatctacaacattcagggctgaaactgcttttttttttcttcagtagttgcaaaagggaccagaattctatttccatttcaagcaaatatgccacttttaaatgcaagagaatgtcattactccttaccaaacaatctttctttctctctccttccttccctcccttctttccttccttccttctttccttgcttccttccttccttccttccttccaanaananatacttgatagcaatactgctatctgattttaagctctttactgcatttcatcgttttaacgcagattacttttttagttcttgctaa

SEQ ID NO: 1337 - DNA, 4069 bp, Homo Sapiens
ggcgtctgggaagtgaggagcgtctctgcctggcagaggctgcaatctctgcactttggggggccaaggcaggcgctgagaaggacgcgcagtccatctctctcaggttagtgaaatgaggctctccgcggggccggcccggggacagtgcgctgctggtcccagcatgaatgcgggccccggctgtgaaccctgcaccaaagcgacccgctggggcgccgctacaacttcgccggctgcttcggacgcccggagctttccgagcaggcagaggcgcgtcctcgaccccaaggacgctcacgtgcagttcagggtcccaccgtcctcgccagcctgcgtcccagggcaggcgggacagcacagaggcagcgccacctcgcttgttttcaaacaaaagactattaccagttggatggacactaaaggaatcaagacagcggaatcagaaagtttggatagtaaagaaaacaacaatacaagaatagaatccatgatgagttctgtacaaaaagataacttttaccaacataatgtagaaaaattagtaaatgtttctcagctaagtcttgataagtcactcactgaaaaaagtacacagtatttgaaccagcatcagactgcagcaatgtgtaagtggcaaaatgaagggaaacacacggagcagcttttggaaagtgaacctcaaacagtaaccctggtaccagagcagtttagtaatgctaacattgatcggtcacctcaaaatgatgatcacagtgacacagatagtgaagagaatagagacaatcaacagtttctcacaactgtaaagcttgcaaatgcaaagcagactacggaagatgaacacgccagagaagccaaaagccaccagaagtgcagcaagtcttgccatcctggggaagactgtgcaagttgtcagcaagatgagatagacgtggtgccaaagagtccattgtcagatgttggctctgaggatgttggtactgggtcaaaaaatgacaacaaattgattagacaagaaagttgcctaggaaattctcctccatttgagaaggaaagtgaacccgaatcaccgatggatgtggataattctaaaaatagttgtcaagactcagaagcagatgaggagacaagtccaggttttgatgaacaagaagatggtagttcctcccaaacagcaaataaaccttcaaggttccaagcaagagacgctgacattgaatttaggaaacggtactctactaagggcggtgaagttagattacatttccaatttgaaggaggagagagtcgcactggaatgaatgatttaaatgctaaactacctggaaatatttctagcctgaatgtagaatgcagaaattctaagcaacatggaaaaaaggattctaaaatcacagatcatttgatgagactgcccaaagcagaggacagaagaaaagaacagtgggaaaccaaacatcaaagaacagaaaggaagatccctaaatacgttccacctcacctttctccagataagaagtggcttggaactcccattgaggagatgagaagaatgcctcggtgtgggatccggctgcctctcttgagaccatctgccaatcacacagtaactattcgggtagatcttttgcgagcaggagaagttcctaaaccttttccaacacattataaagatttgtgggataacaagcatgttaaaatgccttgttcagaacaaaatttgtacccagtggaagatgagaatggtgagcgaactgcggggagccggtgggagctcattcagactgcacttctcaacaaatttacacgaccccaaaacttgaaggatgctattctgaaatacaatgtggcatattctaagaaatgggactttacagctttgatcgatttctgggataaggtacttgaagaagcagaagctcaacatttatatcagtccatcttgcctgatatggtgaaaattgcactctgtctgccaaatatttgcacccagccaataccactcctgaaacagaagatgaatcattccatcacaatgtcgcaggaacagattgccagtcttttagctaatgctttcttctgcacatttccacgacgaaatgctaagatgaaatcggagtattctagttacccagacattaacttcaatcgattgtttgagggacgttcatcaaggaaaccggagaaacttaaaacgctcttctgctactttagaagagtcacagagaaaaaacctactgggttggtgacatttacaagacagagtcttgaagattttccagaatgggaaagatgtgaaaaacccttgacacgattgcatgtcacttacgaaggtaccatagaagaaaatggccaaggcatgctacaggtggattttgcaaatcgttttgttggaggtggtgtaaccagtgcaggacttgtgcaagaagaaatccgctttttaatcaatcctgagttgattatttcacggctcttcactgaggtgctggatcacaatgaatgtctaattatcacaggtactgagcagtacagtgaatacacaggctatgctgagacatatcgttggtcccggagccacgaagatgggagtgaaagggacgactgcgagcggcgctgcactgagatcgttgccatcgatgctcttcacttcagacgctacctcgatcagtttgtgcctgagaaaatgagacgcgagctgaacaaggcttactgtggatttctccgtcctggagtttcttcagagaatctttctgcagtggccacaggaaactggggctgtggtgcctttgggggtgatgccaggttaaaagccttaatacagatattggcagctgctgcagctgagcgagatgtggtttatttcacctttggggactcagaattgatgagagacatttacagcatgcacattttccttactgaaaggaaactcactgttggagatgtgtataagctgttgctacgatactacaatgaagaatgcagaaactgttccacccctggaccagacatcaagctttatccattcatataccatgctgtcgagtcctgtgcagagaccgctgaccattcagggcaaaggacagggacctgaggagccgagcgaatagcatctcctcccacctcccaccagagacgtcctgtttgagctgtcaggtgtaatatatgaattgacttaagttaatataaatgtgtacataatccacatttgtagtcaaggacgcaatctcttccacacatgtgcagttgtcagttggtacatctaaactccctccatcctgactcacgtggacttagatatgttttgtttctattttcttctatttcagtttttcattctttgatgtttatttcttttgtccatcagatctcttgtgaaatcccatggaaggttgtgctcagctgtcgggtctctttcttcctgcccatatattataccagttgcttctgcagcccgcagatgcccagcgatgcccaggaaacaagttgaaatcccaggaatctctttaactgattttgctaaaaatctccctgtgagccttccactcaactcttaatatgcttgcattgtttaagtttttaaattctgaaaattaataattagggtttttttcatatgtgttgcataatgcaaacctcctaggttaaaatagtttctttatttaagatagaataatttccagaaattgtacttttgaggtatcatttttatctgtaatggtttgtctgtcttttttcctctgatcagtatttttttataccagttttggagactgcctgagatgaaaggaaatgtggaataaaaggaggttttcctgatgtggtgtaaagaaaacagattccaagagaattgaagattttttttgtttccttggtacttttttctttttaaattaggactaatgtttcttttgtggtgcttgaggcatattcatataaccaaagtttgagaactgggaacttcatgctgatttgtacatattgaagtttctctggtattcaaaggttatatagtgaatgaattttcattaataaatcactttgtcagaaaaaaaaaaaaaaaaaa

SEQ ID NO: 1338 - DNA, 2390 bp, Homo Sapiens
  misc_feature (2227)..(2227): n is a, c, g, or t
ctgcagtagcttttaagtatgtatcaacatttcattataaattatagcttcctggttctgtgtctcagctgtttcagaactttcagccaagttaaatcttttttggtgttgaaacttttagtaagttgagtaagctatttttttccctacggtaatccacaatctgttctttgtgtgggttgacacctatttataattcttaaaataagggtagctcaaaggagccaaatacagtagtttagcttgctactgttgagcatgaatagcagtaggttgttttcattaatgcagttttcataatgtatcccagaattttaaatcttgaccatagaaaaatacagtcattcattggcaaagatgtacagtggtggtttagtgcagtgaggaaatgatgggaatttttatcttagaaatggatgattcgtgaataaaactaggtacatagtaagtgtatgatagatgtttgatttgtaaattacaaatataaattatcacccccatttccatttattttcttgatatatcaaaatgtgttgacttagtgattctcaatcttagctacatattagcctggcagagctttaaaaaattgatacctgggtcctattccataacaactaaatcaaaatcaccctttttttttttttgtaaagctttccaggtggttctaaaggacacctagggtcaataacccattataaaatgatctgattacactggacactcttaggaagtatcaaaatagaacagttcaatttgcagctacttaatgattaattacatttcttaggttttttttttgttttttttttggtttgtttgttttttgttttaaaagagacaggatcttgctttgtctcccaggctggaacacagtggtgtgatcatagctcactgcagcctgaaactccttggcttccacctcagcctcccaaagcattaggattataggcgtgagccactgcacctggccaagtaatttcttttaggaataaaaggtacttggcattccttatttgggaagtaattacagtcttatctttttttttcttttttctttttttaataaaatctaccagtaatttaaatgtgagctttttatgtctgtcatcattctgccccctttgcctttaaaacttacaaaaatacgtgtttgttatttgagaaagcatgtttaaaaattgcagatgagaaatattgtcgttaataattatgtactgtcttaatgtgggcacttcatttgttagtataatactagataatagcagcctagttctttaggatttgacgattcaaattttttttttgttttttgtttttgtttttttttgagacagagtcttgctctgttgcccaggctggcgtgcagtggtgtgatctcggctcacttcagcctccgccacctcaaggcagttcaagcaattctcctgcctcagcctcccgagtagctaggactacaggcgtgtgccacctctcccggctaatttttttgtatttttagtagagacggggtttcaccgtgttagccaggatgatctcgatctcctgacctcgtgattcacccccctcggcctcccaaagtgctggaattactggcgtgagccaccatgcccagcctcaaatatgttttttaaaaatatcattgtcctcctcctcttaagatttttttaagttattttgctcaagtacttaagtagtctggctcaagtactttgcttacaattaaaatggatattatagcatttaatagaagaaatggttatggcttatccaaaaagaatgtcagcatgacctggtgtagacttaaaaaactacatgtttgtgaatattttataatgtggaatgatcattgaaatatcaaggattctagtaattgtatttcctgaataaatgtatgtttatgaattttctaacttacattttgttgtgtcctctgccaacaatctggttttataattgttgtctaaagtttgctagtagtgtttcttcaaaggttattccaggtatggttaagtagtgagaaaaatcacttattaattttcaagaactttgagactaatttgtattgactcggttttttaaaataactggcaaatgctatgcttctacttttaaaatttgtggtaatacccagaatggatgtaaaataacatttttcaatagattacttcatttatcaatttaattctgattttaaggcttatttaaaataaatttgtatgagttnaaaaaaaaaaaaaaaaaaaaaaaaaaaaaaaaaaaaaaaaaaaaaaaaaaaaaaaaaaaaaaaaaaaaaaaaaaaaaaaaaaaaaaaaaaaaaaaaaaaaaaaaaaaaaaaaaaaaaaaaaaaaaaaaaaaaaaaaaaaaaaaaaaaaaaaaaaaaaaaaaaa

SEQ ID NO: 1339 - DNA, 340 bp, Homo Sapiens
  misc_feature (13)..(13): n is a, c, g, or t
  misc_feature (51)..(51): n is a, c, g, or t
  misc_feature (77)..(77): n is a, c, g, or t
  misc_feature (259)..(259): n is a, c, g, or t
  misc_feature (279)..(279): n is a, c, g, or t
tggggtaggggcngcgcgagtcgggggagggggctgtgcgccgggctggcnccgaccccagccaccgccctgcgccnagcgcagtcccccgactcgccgcccggagaccccgaggctccaacgagttcagaaatgtccagaaatgacaaagaaccgttttttgtgaagtttttaaagtcttcagacaattccaaatgtttttttaaaagctctcgagtccataaaagaattccaatcagaagattatcttcagattatnacagaagaagaggcattgangataaaggagaatgataggatcactttatatctggtgaccctttttagtggcgttgtcttt

SEQ ID NO: 1340 - DNA, 520 bp, Homo Sapiens
  misc_feature (507)..(507): n is a, c, g, or t
ttttttttttttaaaatttgtaaagtttattcacaatgcagttgttgaaaggaataaaacagttggcaatggcatctcgcttctgaatttgatttataaaaacattagggagctctttttttgtattttgctatttcactggggaatgatgaaaagagagtctttttttatacttataaatttcagactttgatgtcatttatcacagtatcgtctggaattctgaaaatgttgtgtcaggggtgatctgcgtatttctggagttgacatttgatagaagttgggtagccgaatatcatagtgatatctttttcctatatataccctgtcattcaaggcatagagtttatctgcaatgtcactgccaattagcactgaaaaaaggcgggagatgtagcgatgctgagcaaagagcagatataatttctttctcctccaagacacatatcgacaatcagtttctgcagtgagggttacctgaaaaatgccttcctctgtgggtctcantgaatcccactca

SEQ ID NO: 1341 - DNA, 238 bp, Homo Sapiens
  misc_feature (87)..(87): n is a, c, g, or t
  misc_feature (97)..(97): n is a, c, g, or t
  misc_feature (225)..(225): n is a, c, g, or t
  misc_feature (234)..(234): n is a, c, g, or t
gactaatcgaaccatctagtagctggttcccgccgctgcgcctgctgctcttcgccgtccgcgctgcagtgcgaagggctcgaaganggccggttgnagagctacgtggataacctgatgtgcgatggctgctgcaggaggccgccattgtcggctactgcgacgccaaatacgtctgggcagccacggccgggggcgtctttcagagcatttacgccaattagnaattggttnatga

SEQ ID NO: 1342 - DNA, 308 bp, Homo Sapiens
cgcttcgctttgcctatcttgaattattctatactattatgaggagaacacaggttcttccatcctggaacttcagttctttgccttgctgggccaatatatacattgagccagattgtgtgcacactggtagttccaaggtgcaacaatcttcaaaacatttgaggagtgtattagtccattctcatgctgctgtaaaggactgcccatgactgggtaatttataaaggaaagaggtttaattaactcacagttccacatagctgggaaggcctcaggaaacttacaatcgtggcagaagcaggaag

SEQ ID NO: 1343 - DNA, 242 bp, Homo Sapiens
  misc_feature (13)..(13): n is a, c, g, or t
  misc_feature (139)..(139): n is a, c, g, or t
gcgcatgctcgcnaggatacccctcgttaaaggcaaggcggcttctggctcttccgcagctcagttatgggttcctgtgtgcttagtcatcgggtccgacacaggctggactgatctggggagccgcgaagggcctgcnttcacaaagggacgtaacgcaagtactgcgggcagtgtttgaatatggccctgaacaatgtgtccctgtcctccggtgatcagaggagcagggtggcctaccg

SEQ ID NO: 1344 - DNA, 352 bp, Homo Sapiens
  misc_feature (100)..(100): n is a, c, g, or t
  misc_feature (157)..(157): n is a, c, g, or t
  misc_feature (159)..(159): n is a, c, g, or t
  misc_feature (162)..(162): n is a, c, g, or t
  misc_feature (240)..(240): n is a, c, g, or t
  misc_feature (337)..(337): n is a, c, g, or t
aagcaaccatgcaggtgctaaccaagcagttaccccaagaacttgcctgctgaccgtcatggaccggtatgcagccgaggtgcacaacatggagcaggtngtgatgatccccagccttctgcgggacgtgcagctgagtgggcctggggcaggcagngnctngaggcccctgatctctacacctacttcaccatgctcaaggccatctgtgtggatgtggaccatgggctgctgcgcggngaggagtggcaggccaaggtggcaggcagcgaagagaatggcaaccgcagagacagaggaagttcgaggacgagattgcctcaggagagtttggacntgggaagcccagttt

SEQ ID NO: 1345 - DNA, 598 bp, Homo Sapiens
caggagttcctccttggccgcggctgtagctgagagaagggacaggaggtcagccatgtcatctgagcctcccccaccaccacagccccccacccatcaagcttcagtcgggctgctggacacccctcggagccgtgagcgctcaccatcccctctgcgcggcaacgtggtcccaagcccactgcccactcgccggacgaggaccttctcggcgacggtgcgggcttcacagggccccgtctacaaaggagtctgcaaatgcttctgccggtccaagggccatggcttcattaccccagctgatggcggccccgacatcttcctgcacatctctgatgtggaaggggagtatgtcccattgaaaggcgacgaggtcacctataaaatgtgctccatcccacccaagaatgagaagctgcaggccgtggaggtcgtcatcactcacctggcaccaggcaccaagcatgagacctggtctggacatgtcatcagctcctaggagatggtggaagcaccccttgtcctgtgcttgtgggagactttgcggggaggaggcagcagacactggagatgacattcttccacacgagacggggct

SEQ ID NO: 1346 - DNA, 145 bp, Homo Sapiens
  misc_feature (3)..(3): n is a, c, g, or t
tcngagcatgttggcctatgggacctggccgccggccgctcctccgcgcgctgttccgcacttgctgccctcgcccggcccggagcgccgctgccatgcggctggcgctgctctgggccctggggctcctgggcgcgggcagccc

SEQ ID NO: 1347 - DNA, 1751 bp, Homo Sapiens
ttttgcatgcacttttcaaaatgattgacttaagcttcctgactgaagaggaacaagaggccatcatgaaggttttgcagcgggatgctgctctgaagagggccgaagaagagagagtcagacatttgcctgaaaaaattaaggatgaccagcagctgaagaatatgagtggccaatggttttatgaagccaaggcaaaaaggcacagggacaaaatccatggcgcagatatcatcagagcatctatgagaaagaagaggccccagatagcagctgagcagagtaaagacagagaaaatggggcaaaggaaagctgggtgaataatgtcaacaaagatgctttccttcctccagagctggctggcgttgtagaagagccagaagaagatgcagcaccagcaagcccgagttccagtgtggtaaatccagcttccagtgtgattgatatgtcccaggaaaacacaaggaaaccaaatgtgtctccagagaagaggaagaatccgtttaatagctccaagttgccagaaggtcactcatcacaacaaactaaaaatgaacagtcaaaaaatggaagaactggtttatttcagacttcaaaagaggatgaattgtcagagtcaaaagaaaagtcaactgtcgcagatacttcaatccaaaagttagagaaatcaaagcagactttgccaggcctttcaaatgggtcccaaatcaaggctccaatccccaaagccaggaagatgatctacaaatcaactgatttaaacaaagatgataaccagtcttttcctagacaaaggacagactccctgaaagcgagaggggctccgagagggatcctcaagcgcaactccagttccagtagcacagactcagaaacccttcgttataatcacaactttgaacccaaaagcaaaattgtgtcacctggcctaaccatccatgagagaatttctgagaaggagcattctttagaagacaactcttccccaaactccctggagccattaaagcatgtgagattctctgcagtgaaggatgagcttccacagagtcctgggctaatccatggtcgggaagtaggagaatttagtgttttagaatctgacagattgaaaaatggaatggaagatgcaggggacacagaagagtttcagagtgaccctaagccttctcaatacagaaagccttcgctttttcatcaatcaacctcaagcccatatgtatcaaaaagtgaaacacatcagccaatgacttctggttcttttccaattaatgggctgcattctcattcagaagttttaactgcaagaccacagtctatggagaattcaccaaccatcaatgaacccaaagataaatcatcagaattaacaaggcttgaatctgtattacccagaagccctgctggtaagagagttgtcactactagattataaaaacttggtggggccgggcgcggtggctcacgcctgtaatcccagcactttgggaggccgaggcgggtggatcatgaggtcaggagatcgagaccatcctggctaacaaggtgaaaccccgtctctactaaaaatacaaaaaattagccgggcgcggtggcgggcgcctgtagtcccagctactcgggaggctgaggcaggagaatggcgtgaacccgggaagcggagcttgcagtgagctgagattgcgccactgcagtccgcagtccggcctgggcgacagagcgagactccgtctcaaaaaaaaaaaaaaaa

SEQ ID NO: 1348 - DNA, 284 bp, Homo Sapiens
gcgaaactacccacgcaagaacatggttgaatcacatttgcttgacttagggcaaagtacgaaagagagacaaaagggttctcttggaaacaagaagagttactccagatgtggcctgaataattgccatgttaagttaatgcaaaagatcagaacagggctacatttgcacaggcagtttctttccgggccgtagttttcactgatgatcacctttcacagcattttccccaaccagcatttcacttagtcttctctatacccagcacctcccccggcacgac

SEQ ID NO: 1349 - DNA, 468 bp, Homo Sapiens
  misc_feature (339)..(339): n is a, c, g, or t
  misc_feature (442)..(442): n is a, c, g, or t
  misc_feature (460)..(460): n is a, c, g, or t
gcagtggaccggcccgtgtgagccgcacccacagcgccgggatcctaggaccttgccggatggggcaactccgcccttgaaagactgggaattatgctagaaggtcgtgggcactaaagaaagggagagaaagagaagctatatagagaaaaggaaaccactgaatcaaagagagagctcctttgatttcaaagggatgtcctcagtgtctgacatctttcactacaagtatttctaacagttgcaaggacacatacacaaacaaatgtttgactggatatgacattttaacattactataagcttgttattttttaagtttagcattgttaacatttnaaatgactgaaggatgtatatatatcgaaatgtccaattaattttattaaaagcagttgttagtaattttcacaacgtgtttttaaaggttagggttttaaantaaaggctgttatacagnggcggttt

SEQ ID NO: 1350 - DNA, 516 bp, Homo Sapiens
cctgtgagaggtggtatgggggctaagaggactggctttctaatagaagaagtgagcgcctgagaggacaatttggtcattggacacggattgcaggctttgagaagcgctcagaggcccagggcggcgggctcagccgttcggcttggggcaccaggctccccagagacaatgctcagtattcattcatacacagacgatggaagaagccacttcttccctgggcggtgtgggtttcccccagctcttcccacacgtgtgttaggaaatgcccgtgaacttgccctctgcgtttttaatgagaggcttggcgcatgggcacccagcggctgcttccctgcaagccagcgacttgccgagcagaatgagctctgctcctgagccccggtagctgcttcctcatctgcatttcatctggagcagggcaggtaaccacaggaggaggcatgcccgaggcagccaggactgggcgggaaggtgctccctggatatactctgtgaaccttctggaaggct

SEQ ID NO: 1351 - DNA, 669 bp, Homo Sapiens
cgatatcaatctggaatgattacatatttaaaagggcatggaatacagggacttagttttatagctgactcagcacttttggtggcatttaaccttcaaacacatcatgtgaaaatggggggctacctgaggaaagagtgccacctactgattataaacataactgtccgtggctacttcttccttgaagttttcatttcaaagtgtcaaaattagtctaatttgtgtgacagctttgagactgtcagattctaaggagattaaggaaggaagaggtggtggtcagaataacctatgttaatcaaaataaactccttagcattagttaaggttctttacctcaatctctcaaaattaatgttattctgaactaaaacttaaaaaaaaaaaaaaactaaatctctcagttctacttgtcttattacactttttctcatcttctttcccagaaaaaaatatttttcatgtcctaaacttagaaacctatcctgaagttgggaatcgggatattagggcagaaggaagtatagagggttacatcatacttagctctataaaagaccctataagtttttcatacctttaagcttagtataatagttggcctttttctgtagggacttcttaatatcagtctatttcttaaaagtacgtggtccttctcccgga

SEQ ID NO: 1352 - DNA, 563 bp, Homo Sapiens
aagcttgcggccgccggccccgggactgaccggcctcgccgcacctcccgcaccgactagcgctcccgggcgctcctgcgcccgactcgccctcgcccccactccccggcggggtggcggcggccgggcccccacggcggcggccggagcagcagcagcagcagcaggagcccgcctctatgatgaagttcaagcccaaccagacgcggacctacgaccgcgagggcttcaagaagcgggcggcgtgcctgtgcttccggagcgagcaggaggacaaggtgctgctggtgagtagcagccggtacccagaccagtggattgtcccaggaggaggaatggaacccgaggaggaacctggcggtgctgccgtgagggaagtttatgaggaggctggagtcaaaggaaaactaggcagacttctgggcatatttgagaaccaagaccgaaagcacagaacatatgtttatgttctaacagtcactgaaatattagaagattgggaagattctgttaatattggaaggaagagagagtggttaaaaagtaaagatgctatcaaagtt

SEQ ID NO: 1353 - DNA, 463 bp, Homo Sapiens
gagatggccgcgctcctggccgcctagagccggagcggcccgcggagctgcggaggcagccatggtcggggcgctgtgcggctgctggttccgcctgggcggggcccgcccgctcatcccgttgggcccgactgtggtacagacctccatgagccggtcccaggtagccctgctgggcctgagtctgctgctcatgctcctactgtatgtggggctgccaggcccccctgagcagacttcctgcctctggggagaccccaatgtcacagtcctggctggtctcacccctggcaactcgcccatcttttaccgcgaggtgctcccactcaaccaggcacacaagggtggaggggtgctgcttcatggaaaggcctttaactctcacacgtgggagcagctgggcacactgcagctactgtcacagaggggctaccgggccgtggcccttgaccttccagactcc

SEQ ID NO: 1354 - DNA, 163 bp, Homo Sapiens
ttcttcaggatggtgacaaattttgcagtggtcacgcccctcactttcccatgaagaaagttctcttgctgctctggaagacagtattgtgcacgctaggcggctttgaggagctgcagagcatgaaggctgagaagcgcagcatcctgggcctccccccgct

SEQ ID NO: 1355 - DNA, 823 bp, Homo Sapiens
aaacgcgggcgggcgggcccgcagtcctgcagttgcagtcgtgttctccgagttcctgtctctctgccaacgccgcccggatggcttcccaaaaccgcgacccagccgccactagcgtcgccgccgcccgtaaaggagctgagccgagcgggggcgccgcccggggtccggtgggcaaaaggctacagcaggagctgatgaccctcatgatgtctggcgataaagggatttctgccttccctgaatcagacaaccttttcaaatgggtagggaccatccatggagcagctggaacagtatatgaagacctgaggtataagctctcgctagagttccccagtggctacccttacaatgcgcccacagtgaagttcctcacgccctgctatcaccccaacgtggacacccagggtaacatatgcctggacatcctgaaggaaaagtggtctgccctgtatgatgtcaggaccattctgctctccatccagagccttctaggagaacccaacattgatagtcccttgaacacacatgctgccgagctctggaaaaaccccacagcttttaagaagtacctgcaagaaacctactcaaagcaggtcaccagccaggagccctgacccaggctgcccagcctgtccttgtgtcgtctttttaatttttccttagatggtctgtcctttttgtgatttctgtataggactctttatcttgagctgtggtatttttgttttgtttttgtcttttaaattaagcctcggttgagcccttgtatattaaataaatgcatttttgtccttttttagacaaaaaaaaaaaaaaa

SEQ ID NO: 1356 - DNA, 483 bp, Homo Sapiens
cacgaggagtctgcagtgtgtttagcattcccttgtcaaagtgcttgactgcatgctggaaactttgtatttttgaagcggcaaactctgttctctggaatgctctgaagttatggctgggacctatcccctcacatctaatgaatgaattataaaatgtatatgtctatgaagcttcggggtagtgcctgtaatcagaaaacaacttagaacccttttgtttgtttccaattgagtcattactgcctgccactaagaaacgtgcttgaatctaataagtatgtgtgtaccgtaaagaatatatcttatctggagctcagcctcaatcatgtcttaacaaaatgacaggtctcagaaagggggagctcaatagctcaaaagtgacaagtccttttcacagcaccgttctcagaacacctctgagtaacgtgtttgccagtagctattctcactgatgcactgatggccctgaagaagcggatc

SEQ ID NO: 1357 - DNA, 3484 bp, Homo Sapiens
cactctctgttgtccaatggacacacctgtcgtgttttgagccagcgagagatgcagtggaagtgaaaagcatggttacagactccccatgcgacagtacactcttctgaagtagcggacgcctggttagcttgacattctatgcaaagatccataatgtggttcctgcagatggcacagttatcaaccacaatatcccaggcccagagggctactgcattccactttttcacttcaaagcgcttcttgcccgcgccgctgttggtgccgctcggggtatccacatccatcgctgcgggctcacaaagcggccagacgctcggcggcggcgtgtggcaggagcgcaggggcgcgagccggcgatcagccttcccggcgaccgtgccgcgggagctcgagcaactcggactaggggacccgggccggcccccaagatgccggcgatcgcggtgttggcggcggccgccgcggcgtggtgcttcctccaagtcgagagccggcacctggacgcgctcgccggaggcgcgggccccaaccacggcaatttcctagacaatgaccagtggctgagcaccgtctcccagtacgaccgggacaagtactggaaccgctttcgagacgatgattatttcagaaactggaatcccaacaagccctttgaccaagccctggacccatccaaggacccctgcctgaaggtaaaatgcagccctcacaaagtgtgtgtgacccaggactaccagaccgccctgtgtgtcagccgcaagcacctgctccccaggcaaaagaaggggaacgtggcccagaaacactgggttggaccttcgaatttggtcaagtgcaagccctgtcccgtggcacagtcagccatggtctgcggctcagatggccactcctacacatccaagtgcaaattggagttccatgcttgttctactggcaaaagcctcgccaccctctgtgatgggccctgtccctgtctcccagagcctgagccaccaaagcacaaggcagaaaggagtgcctgcacagacaaggagttgcggaaccttgcctcccggctgaaggattggtttggagctctccacgaggatgcgaacagagtcatcaagcccaccagctccaacacagcccaaggcaggtttgacactagcatcctgcccatctgcaaggactccctgggctggatgttcaacaagttggacatgaactatgacctcctgcttgacccttcagagatcaatgccatctacctggataagtacgagccctgtatcaagcctcttttcaactcgtgtgactccttcaaggatggcaagctttctaacaatgagtggtgctactgcttccagaagcctggaggtctcccttgccagaatgaaatgaacagaattcagaagctgagtaaggggaaaagcctgttgggggccttcatacctcggtgtaatgaggagggctattacaaagccacacagtgccacggcagcacggggcagtgctggtgtgtggacaaatatgggaatgagttggctggctccaggaaacagggtgctgtgagctgtgaagaggagcaggaaacctcaggggattttggcagtggtgggtccgtggtcctgctggatgacctagaatatgaacgggagctgggaccaaaggacaaagaggggaagctgagggtgcacacccgagccgtgacagaggatgatgaggatgaggatgatgacaaagaggatgaggtcgggtacatatggtagtgcccacaagaaagaggacacaagttttgcacaaaattgcaagtcacttcctattcctgcatttgtatctaagactccaaggcaccaaggtctcttctccattgttgctctctatacccgacctaaggtttggaagacaactgcttgttcccagaggattctgattttgcatatgtttgtatgggagaaagggtgttgtgtttttttttttgttgttgtttattttttggatagggaagtcattggcttaattagagcctccttcctttctgtgagatttttccaacaagcatgtgatttacgtggaattctgacagtgcagggagcccccaccctcttaaatgtcaaagaccctttttgattacccacactggtggttattacagcatggttcccagccttacagtgtctaagtgcttctcttgtgtcctgtagatgttgtgaaaaagaaaaaaacaaaaaatacaccacactgtactttttccccctgcccccgttactgccggtgattattattaaaaattagtttttttcacatcattctatctggcttcctataaacaacagccttaattcagtcaagactccctttgggaattcattttattaaaaattggtgtctggatacttccctgtacatgcataaatatgcatgcatgtacagaaagactgtatgtgtgtgccttgcacacacacccatacctctcagaaaaagtgtttgggtatcttaaaaactcgaaaaacaatgataaatttctcagcttgtccagacctggaacaaaatttctggaataagaaatttgtattaaagtccttttttgcactaacagttggctcttgtagcctgcaggctgaggaagtctcttctctgtgcatcagcagagttactgaaagcctctgattgagaaaaaacctccgtctgcctaaatcacttttctcgcagaagccatgcgactcccacacgacacgggcagcttcacaagccatctctttcatttctgcttgaagccccttggctgcagcaatcctgtctgccataggtttcttccttccttacctactcaagggctttttctaaggcatgcacacatatctcctgttctctgagagtaccatggtgttccttaaaagaagaaaatttctaattctgaactcaatgttttgcttttactccctttctactgacaaatcatgataagggcacaaaagctgtacagatttttttttttaaccactcaatcccaaatggaggcctacaaagaacatcgtaataacacatggaagcaaaccccgggtttttaagagcaaattctgtccccccctcactcccccaagtgacaagatactaatgaagaaagttcttcaccatagtgtttgttttaactaaactcattggagtctagttccaaatttggtagggtcatcatctctacattccttaggatttctctccctatcaagctggcccagatacaagtaccaaacagtagtctctgaagttcccatttccttcagtaccagtctataagctactgtccgccactgattttcatctatcagggtgtcctaatcagaatcagccacccaagcaagcctctctggcccacatatctatctcttgccttcccccatgaacttcagcctgtccacacaaaagccacataaactcaagcaagaaatatgttcagccaaaacatgattatagtggcagctgaccaataccccacccc

SEQ ID NO: 1358 - DNA, 161 bp, Homo Sapiens
ctttttttccccctaaggaatgtgttatataaggtcaacatgtttttagtgcttcagtttgacttgtctacatctaaaggtaactctttaaggcttacatttatgattataattccttccatcgggggtttagtctccatattgtcatgttctggattttt

SEQ ID NO: 1359 - DNA, 412 bp, Homo Sapiens
tatcaggagaaagctccaaaagtgagccctgggtcctgaacaaaatctggaggcattattaaacccggcaaccttggtgttctataatagggaccaagaggaacaggcccaaaaggaaaagcgagatcagagaaaggctggagacttagtcctggatcccagacaaacaaaccttggtgattcagagaggacagaaaatggagcaggccaatcactcagcagggcttgttatcagtgtggtttacaaggacactttaaaaaagattgtccagtgagaaacaaactgccccctcatccatgtccactatgccaaggcaatcactggaaggtacactgctcaagaggacaaaggttctctgggccagaagccactaatcagatgatccaacaacaggactgagggtgcctgggg

SEQ ID NO: 1360 - DNA, 738 bp, Homo Sapiens
aaggctaggtagaggctgggtgttaatcggccgaggagtcagtagtaagatgtacactgtagccgccaccggcaaggggtgcgcgctggggagcggacgctgcatcccctttctgctgcaggaacctctcatcagaccgcctgagggaagcggcgcccggagacccgccccggcccggtccacattctccccaggaagccggactctatggggcgggaccctgggggagcctgagccgagcccggagccagccccgaacccctgaacctccagccaggggcgccccgggagcagccagccctgtgggcgagccgcccgcccgccgagcagccatgagcgagacggtcatctgttccagccgggccactgtgatgctttatgatgatggcaacaagcgatggctccctgctggcacgggtccccaggccttcagccgcgtccagatctaccacaaccccacggccaattcctttcgcgtcgtgggccggaagatgcagcccgaccagcaggtggtcatcaactgtgccatcgtccggggtgtcaagtataaccaggccacccccaacttccatcagtggcgcgacgctcgccaggtctggggcctcaacttcggcagcaaggaggatgcggcccagtttgccgccggcatggccagtgccctagaggcgttgggaggcggtgggcccctccacccagcacttcccacctggtcggccgaacggcctcccggggagtgcc

SEQ ID NO: 1361 - DNA, 492 bp, Homo Sapiens
  misc_feature (17)..(17): n is a, c, g, or t
  misc_feature (441)..(441): n is a, c, g, or t
  misc_feature (465)..(465): n is a, c, g, or t
  misc_feature (474)..(474): n is a, c, g, or t
acaggcgtgacatctgncgcccagcctctttaataaatatttttaagtgcatcttccccttcaggctttgtttggagtcccagtgctacaaacattgtatttttcacagcagatgtgttcctgaaaagtgtatagaaacctgttctgggaacctgaatgcttttggaatgcacggggagagtctgccagctaaaggactcctggcaacattctgtgaaatatgaaactggaaaactggatttgtcgaaaactaattgtgcccattttctcacatttttgatccattggggttttttttttgtttttgtttttttttttttttgagtcaaggtctcactctgtcaccctggctggagtgcaatggcactatcttggctcactgcagccttgacctcctggactcaagcagtcctcctactcagcctccctaatagccagggntacaggcatataccaccatgcccnactaatttnttaatttttgtagagatg

SEQ ID NO: 1362 - DNA, 478 bp, Homo Sapiens
  misc_feature (188)..(188): n is a, c, g, or t
  misc_feature (190)..(190): n is a, c, g, or t
caattttttaagtcacattatcccctaaattctcattgtgtaagattcaaacaacatagaacacaaagttctcctttggccagctccttctgttcccctccctgtttgaattctcatgaggcttgatctttaacattatcatttctgtttgtgtattccttaggaaggctaagattatgaaaatattntnaatggctttgtttttatgcataactctataaagagtttcttcctagtccatgaagaactttactttggaggtggtgttaaaaaggctgtgtaggccgggcatggtggctcatgcctgtaatcccaacactttgggagcccgaggcaggcagatcatgaggttaggagatcgagactgtcctggctaacacgatgaaaccctgtctctactaaaaatacgaaaaaaattagctgggtgtggtggcgggcgcctgtagtcccagctactcaggaggctgaggcaggagaa

SEQ ID NO: 1363 - DNA, 426 bp, Homo Sapiens
cacgaggtgaaaaaccaacccgatactggtggtaggaccatttgcaatcaatagttactgacagtattctgttgcttctagttccggtggtgaggagacctttccaaatataagaggaataaagaagtcacctccccagctgtcatcatcttccagcagattgagcaagaatattttgagcactacaggaaagacagtccatcaaacccgagatgatgatcagccacgtgattttttcaagaagaggaatagggtgaatgaatctcatcagaaaagcagcaatatgaatgctggcccatcttggaataaagtgcaacattcaaagaattcttcaggaaaaaggcagagtaaatcccaagtaccccacgcttcttcccagccgagaagcagcctcacagctgtcacccagcctactgaagaaaaact

SEQ ID NO: 1364 - DNA, 1509 bp, Homo Sapiens
ggcgaatctgctgctaccaatgtaaaggtcaggccgaggccggcgcggagaatctgctgtcgcctgcagctgctcgcctgtctccgtcggaagggagcccaagctttgcagagagacagggagtcgcccaggctggagagcggtggcgcgatctcggctcactgcagcgtcgacatttcgggtcaagcgatcctccagcctcggcctctcaaagtgctggtattacaggcgtgagccagcgcgtgcctggccaaaaattttctaaatttgtataataatttataattgtaatgcatttttatagacaccatatgatctaatcttcacaaaaacctagtgaagtgacatttagctacatttcacaataagaatcctgaagctcaaaatttactgacctcaaataatcccagcactttgggaggctgaggcaggcgggtcatctgacatcaggagtttgagaccagcttggccaacatggtgaaatcctgtctgtactaaaaatgcaaaaattagctgggcgtggtggtgtgtgtctgtaatcccagctactcggcctcccaaagtgctgggattacaggcgtgagccaccgcgtctggcctcagccaaggtttttaagtaacatatttcagcattggctctacagcgttgcagaacatgaacgattggatgcccatcgccaaggagtatgatccactcaaagcgggcagcattgatggcaccgatgaagacccacacgaccgcgcggtctggagggcaatgctggcacgatatgtccccaacaaaggtgtcataggagatcccctcctcaccctgtttgtggccagactaaacttgcagaccaaggaggacaaattaaaggaagtcttttcccgctatggtgacatccggcggcttcggctggtcagggacttggtcacaggtttttcaaagggctacgccttcatcgaatacaaggaggagcgtgccgtgatcaaagcttaccgagatgctgatggcctggttattgaccagcatgagatatttgtggactacgagctggaaaggactctcaaagggtggatccctcggcgacttggaggcggtcttgggggaaaaaaggagtctgggcaactgagatttgggggacgggaccggccttttcgaaaacctattaacttgccagttgttaaaaacgacctctatagagagggaaaacgggaaaggcgggagcgatctcgatcccgagaaagacactgggactcgaggacaagggatcgagaccatgacaggggccgggagaagagatggcaagaaagagagccgaccagggtgtggcccgacaatgactgggagagagagagggacttcagagatgacaggatcaaggggagggagaagaaggaaagaggcaagtagaggcccaacagcagaaccccaaagtgaagttacagtggaaatgagtggagggggattgtctttcaacgcagcgtgagtctaatggttgaataaaacttactgatgatcaaaaa

SEQ ID NO: 1365 - DNA, 304 bp, Homo Sapiens
  misc_feature (12)..(12): n is a, c, g, or t
  misc_feature (67)..(67): n is a, c, g, or t
  misc_feature (81)..(81): n is a, c, g, or t
  misc_feature (103)..(103): n is a, c, g, or t
ggcacgaggccnttaagccccgggacggcgaggcaggcgctcagagccccgcagcctggcccgtgancccgcagagacgcngaggaccgcgacgagtcgtgtntgaacccggcttttccaattggcctgctccatccgaacagcgtcaactccatggcgcggttcctgacactttgcacttggctgctgttgctcggccccgggctcctggcgaccgtgcgggccgaatgcagtcaggattgcgcgacgtgcagctaccgcctagtgcgcccggccgacatcaacttcctggcttgcgtaatgg

SEQ ID NO: 1366 - DNA, 1134 bp, Homo Sapiens
catgccatggacatgctggacccgggtctggatcccgctgcctcggccaccgctgctgccgccgccagccacgacaagggacccgaggcggaggagggcgtcgagctgcaggaaggcggggacggcccaggagcggaggagcagacagcggtggccatcaccagcgtccagcaggcggcgttcggcgaccacaacatccagtaccagttccgcacagagacaaatggaggacaggtgacataccgcgtagtccaggtgactgatggtcagctggacggccagggcgacacagctggcgccgtcagcgtcgtgtccaccgctgccttcgcgggggggcagcaggctgtgacccaggtgggtgtggacggggcagcccagcgcccgggccccgccgctgcctctgtgcccccaggtcctgcagcgcccttcccgctggctgtgatccaaaatcccttcagcaatggtggcagtccggcggccgaggctgtcagcggggaggcacgatttgcctatttcccagcgtccagtgtgggagatactacggctgtgtccgtacagaccacagaccagagcttgcaggctggaggccagttctacgtcatgatgacgccccaggatgtgcttcagacaggaacacagaggacgatcgccccccggacacacccttactctccaaaaattgatggaaccagaacaccccgagatgagaggagaagagcccagcacaacgaagtggagcggaggcggagggacaagatcaacaactggatcgtccagctttcgaaaatcattccagactgtaacgcagacaacagcaagacgggagcgagtaaaggagggatcctgtccaaggcctgcgattacatccgggagttgcgccagaccaaccagcgcatgcaggagaccttcaaagaggccgagcggctgcagatggacaacgagctcctgaggcagcagatcgaggagctgaagaatgagaacgccctgcttcgagcccagctgcagcagcacaacctggagatggtgggcgagggcacccggcagtgacgcccgccaccaccacgcagccgccgccgcccacgccggcctctgctgcccccttccccagcccttagcacagagagggacacatgc

SEQ ID NO: 1367 - DNA, 435 bp, Homo Sapiens
gttttgtgtatgaggttgttcacaatgtactttctaaaaacatttaatactgaaaagaatcacatgctcaagacttaccgaaaatcatccaaacttaggctacctctgcaataacaggtatgtgaaataatataaggagaggaaagaaagaaagcccagatattatataaacttcattttagaacacaaaacaaaatttaaaagcttcagaagttacacaggtgtataacattcatttttgcaaagggaagaaatcttcatgaataaggtgataaaggtaagataaacgcacatagctgtcttttgtgtttggatgaagtctacattactaaaaacggttcttaaaaattaaatatgttttctcttgggtgacatggaaaaaaattaaatatatcaggaaataactgacttttttctacataattaaaaaaggtt

SEQ ID NO: 1368 - DNA, 567 bp, Homo Sapiens
ttttggatttagttgattttatttacagcttttttttggtttttttttttttttttacatttcagagcattacacaattacattttctcattttctgacctgcaaacagataccttaaacggaaattattttgttttaattatcaaattaggtacatccaaaatgcaacaattacacatatgacaattaattcacaaagtataattttactgggacatatcctaagaatttaggaacagccagtcaggagaaatctgaccaaatttagcaatcactatttacaaatccaaaatcaaacctatctaaactcccaaaccagaagcttgaaagtatttattaaatccccactggacgaaagacagtgatgactaacacctatccagtcttgacagttttaatcccaaacactgggctatttccccagtctgtaactgaattgcaaccatctgtttgtcaaacacctaaccatctaacttttacaccattatgcgcatagaaaggctaagtgttcattatttaaaaaacaagtagtcattaaatatccactattcccccagctcaccaagc

SEQ ID NO: 1369 - DNA, 348 bp, Homo Sapiens
  misc_feature (24)..(24): n is a, c, g, or t
  misc_feature (46)..(46): n is a, c, g, or t
  misc_feature (51)..(51): n is a, c, g, or t
  misc_feature (198)..(198): n is a, c, g, or t
  misc_feature (232)..(232): n is a, c, g, or t
  misc_feature (285)..(285): n is a, c, g, or t
taaagaggtaatccaagtaaaatnaggtccttagagcaggccctgntccantaggactgtccttattagaagaggaaacttggacacagatacacacagagggagcaccgtgtgaagacacagagaggagatggccagctaccagccaagcagagagcccttactgtaaaccaaccctgccgcatcctgatctcaganttttggcttccagaactgtaaggaaacacatttntactgtttaagccacttggctgggagtacttggttatggcagcctgagcagantaaaccagcaccttcaaagagttgttatagggtatgcttagttggtaactgggttcctaaagg

SEQ ID NO: 1370 - DNA, 328 bp, Homo Sapiens
  misc_feature (190)..(190): n is a, c, g, or t
  misc_feature (320)..(320): n is a, c, g, or t
  misc_feature (325)..(325): n is a, c, g, or t
cgggagtgggggtctccgctggtgccagcccgcttctggagaccctccgcctcctgccaacccctgctcttccaggtcgggccccggggttctgcggctgttagggacagaggcaaagaagggcaggacggtccggtttccgtggatgttccgcccgagaaagacagcaagttgtgtgtgcgccgggacncgggagggaaggtagcgccgcccgccagccatggaccatcatctttagtgcagaggatggaaagttgatgcccagtaagactgaagatccattctgcattacggaactgtggattatctgtgggtccctngtganttc

SEQ ID NO: 1371 - DNA, 300 bp, Homo Sapiens
acaccgacctgagtcctttgaaatctccttctgacatctttcccttctgttgtgaaatatgttaagccacaggccaaactgctataagatcgaagttctgtttttttctcacctaataatagagaggtaatcagatggtctagggcagatttaactctacaaggttatcaggaactttgtttccttctgtcttattcagccattcccagtatgttttcttacccataagatcaaagcagactcatcagctccatatctgcattccactggggaaagagagagagaaaagagcagatttta

SEQ ID NO: 1372 - DNA, 454 bp, Homo Sapiens
  misc_feature (187)..(187): n is a, c, g, or t
  misc_feature (337)..(337): n is a, c, g, or t
gagaagacgacagaagggcaacagtacaggaagttgggtagatgtggggacaacagagagactgtggcagaggcaggactgcagatctatggaaattgcctggaagagtcagctgtaagggatgagaatcctgagggtaaaagagaaaagggaaagactcctctttgatcttatgaagctgaatacnaagatctaacatgagtgagattctgttgccccactttaagtgactttaatccaaaggtaaaacccgattggttttttagtttgataggggaaaatgaaacctctttttgagctcaaaaaaaaaaaaaaaaaaaaagcgttccccatggangcgacatgatgagaggaatgtgaccgggattcgggaacgtctgggggggggccacttcctttatggggaggcgattaattctgcgatcatggaccaacctgttccccgggggaaaaa

SEQ ID NO: 1373 - DNA, 170 bp, Homo Sapiens
ttttgggttcggaacatttccaactgtttctgctgctgtcgtcttaatgtattaacaatagctattgctagtctcagtgcttctctggggtacccatgagaacgtaatgcgtccactcttgcacaggctgtaggaacatgttcatgccagaggggccacccgcgggagtc

SEQ ID NO: 1374 - DNA, 2404 bp, Homo Sapiens
cgaggaacgagtgacagccggacagtccgccgggcggtgatccggggccgctcccgggcgcgccctcggctccaggtcctacccggagccgctgccatgggagagccagccttgggcgctggggaccagccgccgcgcccgcctcggagtcgcggcccgagtcccggcgccagcagccagcccgctgcgtccccttcccgggctgcagggctgcctccgccgcgccgccggcccggattgtgcctgtgatgagccgcagcccgcagcgagctctgcccccgggcgcgctccctcggctgctccaggctgcgcctgcagccgcgccgcgtgccctgctcccgcagtggccccggcgcccaggacgccgctggcccgcgtcccctctcggaatgaaggtgttccgtaggaaggcgctggtgttgtgcgcgggctatgcactgctgctggtgctcactatgctcaacctcctggactacaagtggcacaaggagccgctgcagcagtgcaaccccgatgggccgctgggtgccgcagcgggggcagccggaggcagctgggggcgcccagggccgcctccggccgggccgccccgtgctcatgcccgtttggacctccgcactccttaccgccctcccgctgccgccgtcggggcggctcctgcagccgcggcagggatggcgggggttgcggcccctccaggcaatggcactcggggcaccgggggcgtcggggacaagcggcagctggtgtacgtgttcaccacgtggcgctctggctcgtcgttcttcggcgagctattcaaccagaatcccgaggtgttctttctctacgagccagtgtggcatgtatggcaaaaactgtatccgggggacgccgtttccctgcagggggcagcgcgggacatgctgagcgctctttaccgctgcgacctctctgtcttccagttgtatagccccgcgggcagcggggggcgcaacctcaccacgctgggcatcttcggcgcagccaccaacaaggtggtgtgctcgtcaccactctgccccgcctaccgcaaggaggtcgtggggttggtggacgaccgcgtgtgcaagaagtgcccgccacagcgcctggcgcgtttcgaggaggagtgccgcaagtaccgcacactagtcataaagggtgtgcgcgtcttcgacgtggcggtcttggcgccactgctgcgagacccggccctggacctcaaggtcatccacttggtgcgtgatccccgcgcggtggcgagttcacggatccgctcgcgccacggcctcatccgtgagagcctacaggtggtgcgcagccgagacccgcgagctcaccgcatgcccttcttggaggccgcgggccacaagcttggcgccaagaaggagggcgtgggcggccccgcagactaccacgctctgggcgctatggaggtcatctgcaatagtatggctaagacgctgcagacagccctgcagccccctgactggctgcagggccactacctggtggtgcggtacgaggacctggtgggagaccccgtcaagacactacggagagtgtacgattttgtgggactgttggtgagccccgaaatggagcagtttgccctgaacatgaccagtggctcgggctcctcctccaagcctttcgtggtatctgcacgcaatgccacgcaggccgccaatgcctggcggaccgccctcaccttccagcagatcaaacaggtggaggagttttgctaccagcccatggccgtcctgggctatgagcgggtcaacagccctgaggaggtcaaagacctcagcaagaccctgcttcggaagccccgtctctaaaaggggttcccaggagacctgattccctgtggtgatacctataaagaggatcgtagtgtgtttaaataaacacagtccagactcaaacggaggaagcccacatattctattatagatatataaataatcacacacacacttgctgtcaatgttttgagtcagtgcatttcaaggaacagccacaaaatacacacccctaagaaaaggcaagacttgaacgttctgaccaggtgcccctcttcttctttgccttctcttgtcctctttctcctatttcttaccctgtcctccacctgccttccattttgaagtgggatgttaatgaaatcaagttccagtaacccaaatcttgtttacaaaatattcgtggtatctgtgaacatgttaagagtaatttggatgtgggggtgggggtggagaaaggggaagtggtccagaaacaaaaagccccattgggcatgataagccgaggaggcattcttctaaagcagacttttgtgtaaaaagcaaaggttacatgtgagtattaataaagaagataataaataaaaaaaaaaaaaaaa

SEQ ID NO: 1375 - DNA, 783 bp, Homo Sapiens
ctcggcacgagggggtcaacttcaacatggccgaagcaagtagcgccaatctaggcagcggctgtgaggaaaaaaggcatgaggggtcgtcttcggaatctgtgccacccggcactaccatttcgagggtgaagctcctcgacaccatggtggacacttttcttcagaagctggtcgccgccggcagctaccagagattcactgactgctataagtgcttctaccagttgcagcctgcgatgacacagtcaaatctatgacaagtttatagctcagttgcagacatctatccgggaggaaatctctgacatcaaagaggaggggaacctagaagctgtcttgaatgccttggataaaattgtggaagaaggcaaagtccgcaaagagccagcctggcgccccagcgggatcccagagaaggatctgcacagtgttatggcaccctacttcctgcagcaacgggacaccctgcggcgccatgtgcagaaacaggaggccgagaaccagcagctggcagatgccgtcctggcagggcggaggcaggtggaggagctgcagctacaggtccaggcccagcagcaggcctggcaggctctaacacagagaacagagggagctggtgctgtgctgagggagcctgagtgaggagaccgccaagcccagaagcagagggcagtcagggtcaagagcctgtggtccagcatggctggcctgggcgggtactcttgaaacggtgaaaaggggccagtcacagcgtgaggattggtgggggcaggaaaaaga

SEQ ID NO: 1376 - DNA, 1029 bp, Homo Sapiens
agactactggctgttatccatttgagcacaaggaaggggcgggccttggctttgaacacgcaggccccatcctccacatactggcccactcccctggtcccttccttctctgcccctgcacaccctgtaacagaccaccgccctccaagtggggcgccatcttgcccagtaggacggctccagccaacccagcctctactccttcctcaggccacgtgcaggctgaacaagagaaaaactctttttctgtccatggcagggcctgcccatggtgctggctgcctgggacgggggcccatgggggtgggtcacagtgaggagaggctggctggggaagcaaagacccataggtagctgccctggggcaagtccctggtgtaggggagggagtaatattgcttctctccctgcttactcccttctggtgatgcttagggcccaaggagcctggacccaagggacactgagaactggggccagtggcctgggcagccaatgaaggggagagagtgggcaggcatctcaggtcccactcccagcccccgaccaggcaaccccagcctccctctcacaagcccctaaggcttgatcttgcactacagccagccacaaagcccagtggagagagagcaccaggtcagagggccaagatgacccccagggtcatacaagtgccaatcaatacaatgagctcctagacagaaacacacagaactccatctgtgagcttagagatgagggctccagccaacacgagggaaccaaagtcaccagaaaccaaccagtgtggcttaacgcacaggggattcaacacccacatatcctacggtggtacctgacccaaccagtggcaagaattgtcgcagcatagaaggtgggcctgggcccgcaagaagaggggcagaacaccacacctcgcaccaggcaaggacaagtgcaagcaacccaaagaatgacgcagaggaaaggaaagctcccaacacaacagtacacacgctcacaagacagagaagcggataaagttatcaa

SEQ ID NO: 1377 - DNA, 1281 bp, Homo Sapiens
ctcccaaagtgctgggattacaggagtgtgccactgcgcctgaccagctttataaagtttatagggacagtgtcaccactttacagaagagggactgaggctctgaggaggaagttccttgccagggtccgagtgtcgccaccctgagaactccagcacccacctccctactctccctcatggcgtctcccccacctttccacagccagaagttgccaggtgaatacttccggtacaagggcgtccccttccccgtcggcctgtactcgctcgagagcatcagcttggcggagaacacccaagatgtgcgggacgacgacatctttatcatcacctaccccaagtcaggcacgacctggatgatcgagatcatctgcttaatcctgaaggaaggggatccatcctggatccgctccgtgcccatctgggagcgggcaccctggtgtgagaccattgtgggtgccttcagcctcccggaccagtacagcccccgcctcatgagctcccatcttcccatccagatcttcaccaaggccttcttcagctccaaggccaaggtgatctacatgggccgcaacccccgggacgttgtggtctccctctatcattactccaagatcgccgggcagttaaaggacccgggcacacccgaccagttcctgagggacttcctcaaaggcgaagtgcagtttggctcctggttcgaccacattaagggctggcttcggatgaagggcaaagacaacttcctatttatcacctacgaggagctgcagcaggacttacagggctccgtggagcgcatctgtgggttcctgggccgtccgctgggcaaggaggcactgggctccgtcgtggcacactcaaccttcagcgccatgaaggccaacaccatgtccaactacacgctgctgcctcccagcctgctggaccaccgtcgcggggccttcctccggaaaggggtctgcggcgactggaagaaccacttcacggtggcccagagcgaagccttcgatcgtgcctaccgcaagcagatgcgggggatgccgaccttcccctgggatgaagacccggaggaggacggcagcccagatcctgagcccagccctgagcctgagcccaagcccagccttgagcccaacaccagcctggagcgtgagcccagacccaactccagccccagccccagccccggccaggcctctgagaccccgcacccacgaccctcataataaacacgtcgattctgtccaaaaaaaaaaaaaaaaaaaaaaaaaaaaa

SEQ ID NO: 1378 - DNA, 2344 bp, Homo Sapiens
agcgggcggcggtcgtgggcggggttgcaggcgaggctcaacgaacgctggtctgaccgtcggcgctccctgttgccgggccctgagcaagtggcttcatgaaccccgtgacgttggccatggagataagaccactgggtgatggtttaaggaagataacgtgtaaagggctaaggactgtcggtggaaatcaggggtgcaggagaaatggataaacagccagaggtcaactcggactttgtacataggacatggtgccaggccctgccaggaagtgcagatcgaagctaggctcacgaggaggctggaggtggggggtggggaggcaacggatggacatggacttcctgggctgggctctgtgacagcagagtagactctgtcctgggacttggtggtgctacccttggcctcccacagtcctgccaccctgctgccgccaccatgctgccccctgggactgcgaccctcttgactctgctcctggcagctggctcgctgggccagaagcctcagaggccacgccggcccgcatcccccatcagcaccatccagcccaaggccaattttgatgcgcagcaggtagaagttggggggggtagagggaggcaggtagaagttgtgggaggggtagagggagacaggtagaagttgttgcgggggagagggaagcaggtgaagttgtggggggtgtagagggaagcaggtgaggggccctcccacagtgccctcgagttctcccatggtctgcccccagtttgcagggacctggctccttgtggctgtgggctccgcttgccgtttcctgcaggagcagggccaccgggccgaggccaccacactgcatgtggctccccagggcacagccatggctgtcagtaccttccgaaagctgtgagtcccagagcagccctgcaccctaaccccaaccctcctctcagcccccggacttcagccctgctctggcccctgaccccaccccggctgtggcctggactaggattcctggttggggtctcccagcctgtggtgcctcctccccgcccccccagggatgggatctgctggcaggtgcgccagctctatggagacacaggggtcctcggccgcttcctgcttcaaggtgaggcaggggctgcaggtcatgtgggtgggggatgacgcagccactgtggctctctgacatggctactgtggctctgcccagcccgaggcgcccgaggggctgtgcacgtggttgtcgctgagaccgactaccagagtttcgctgtcctgtacctggagcgggcggggcagctgtcagtgaagctctacggtatgtgggggccagcctctgtgaccaggcaggcgctcaagctctgcacactcactgggccaccccgaggggctgggtgagccatggggacacacttcctttctcccatcctgatcctcctgctaagcaggggcccagggagtagtgacagacaggcctggtgtgggagcagggaggagggccccgaggggcaggggacacacagaccccgttcccagagccctccacgccgcctggtgccaggaccccaggaaccctgtctgccctgcagcccgctcgctccctgtgagcgactcggtcctgagtgggtttgagcagcgggtccaggaggcccacctgactgaggaccagatcttctacttccccaagtacggtgagtgtccccagcaggtccccagctcagccacccccactctctggctgatgtccagcctgacccctgccttggcgccccaggcttctgcgaggctgcagaccagttccacgtcctggacggtgagtgcacagcgggggcaagcatggcggcgtggtgaggggggccactcgcaccggctgagtctcgtctctgctgcagaagtgaggaggtgaggccggcacacagctccagtgctgagaagtcagtgccccgagagacgaccccaccagtggggtgcccgctgcctgtcctccgtgaaaccagcctcagatcagggccctgccacccagggcaggggatcttctgccggctgccccagaggacagtgggtggagtggtacctacttattaaatgtctcagacccctctctgactcttctgtccactctggaccggcgccagtaccaccaaggccctctctgcccccaccccgcctctttaaaagcccggcgctccctgttggctggagtccacgcagggtcactgggccgatttcggctcttgggatttgggaggggagatcctctctggcatatgccatcttgtgccctgctggacctgggggcgtccacgtcactccaaggctgctcttgcctgggccatgcctgcagccc

SEQ ID NO: 1379 - DNA, 505 bp, Homo Sapiens
agcatcttatctagttttgatgtgaataagccaatttcattctttgcagtgatttatctttttaaaccaactcgttcctttgtgcatgtgctaaccttaaaacacctcttcatataagccctgaattttaagtggtgccatttcttcctacccccagcccactcctcagaattacagaaatatgtaaaataggttgtttaatcacacatgttcatatgaataaatatatttaaatgtttttccaaaccaatacaactatatctggattcactgcaaaaacattcccattcaatgcaaaataatttggtacaatccgaccaaaaaagacaaaagtaattagttgcctgagggaagctagttcctcattattactgagcccataattaaacctgatatgctagagaaatggcaaggcaataaacacagagtggggcaatatttaaatgaaaacaagagtgacagagctggaaagagcgaaaaccacatgaatgctaattgacagaga

SEQ ID NO: 1380 - DNA, 6011 bp, Homo Sapiens
atgatggagcgcgccatcatcgacacttttgtggggcacgacgtggtggagccaggcagctacgtgcagatgttcccctacccctgctacacacgcgatgacttcctgtttgtcattgagcacatgatgccgctgtgcatggtgatctcctgggtctactccgtggccatgaccatccagcacatcgtggcggagaaggagcaccggctcaaggaggtgatgaagaccatgggcctgaacaacgcggtgcactgggtggcctggttcatcaccggctttgtgcagctgtccatctccgtgacagcactcaccgccatcctgaagtacggccaggtgcttatgcacagccacgtggtcatcatctggctcttcctggcagtctacgcggtggccaccatcatgttctgcttcctggtgtctgtgctgtactccaaggccaagctggcctcggcctgcggtggcatcatctacttcctgagctacgtgccctacatgtacgtggcgatccgagaggaggtggcgcatgataagatcacggccttcgagaagtgcatcgcgtccctcatgtccacgacggcctttggtctgggctctaagtacttcgcgctgtatgaggtggccggcgtgggcatccagtggcacaccttcagccagtccccggtggagggggacgacttcaacttgctcctggctgtcaccatgctgatggtggacgccgtggtctatggcatcctcacgtggtacattgaggctgtgcacccaggcatgtacgggctgccccggccctggtacttcccactgcagaagtcctactggctgggcagtgggcggacagaagcctgggagtggagctggccgtgggcacgcaccccccgcctcagtgtcatggaggaggaccaggcctgtgccatggagagccggcgctttgaggagacccgtggcatggaggaggagcccacccacctgcctctggttgtctgcgtggacaaactcaccaaggtctacaaggacgacaagaagctggccctgaacaagctgagcctgaacctctacgagaaccaggtggtctccttcttgggccacaacggggcgggcaagaccaccaccatgtccatcctgaccggcctgttccctccaacgtcgggttccgccaccatctacgggcacgacatccgcacggagatggatgagatccgcaagaacctgggcatgtgcccgcagcacaatgtgctctttgaccggctcacggtggaggaacacctctggttctactcacggctcaagagcatggctcaggaggagatccgcagagagatggacaagatgatcgaggacctggagctctccaacaaacggcactcactggtgcagacattgtcgggtggcatgaagcgcaagctgtccgtggccatcgccttcgtgggcggctctcgcgccatcatcctggacgagcccacggcgggcgtggacccctacgcgcgccgcgccatctgggacctcatcctgaagtacaagccaggccgcaccatccttctgtccacccaccacatggatgaggctgacctgcttggggaccgcattgccatcatctcccatgggaagctcaagtgctgcggctccccgctcttcctcaagggcacctatggcgacgggtaccgcctcacgctggtcaagcggcccgccgagccggggggcccccaagagccagggctggcatccagccccccaggtcgggccccgctgagcagctgctccgagctccaggtgtcccagttcatccgcaagcatgtggcctcctgcctgctggtctcagacacaagcacggagctctcctacatcctgcccagcgaggccgccaagaagggggctttcgagcgcctcttccagcacctggagcgcagcctggatgcactgcacctcagcagcttcgggctgatggacacgaccctggaggaagtgttcctcaaggtgtcggaggaggatcagtcgctggagaacagtgaggccgatgtgaaggagtccaggaaggatgtgctccctggggcggagggcccggcgtctggggagggtcacgctggcaatctggcccggtgctcggagctgacccagtcgcaggcatcgctgcagtcggcgtcatctgtgggctctgcccgtggcgacgagggagctggctacaccgacgtctatggcgactaccgccccctctttgataacccacaggacccagacaatgtcagcctgcaagaggtggaggcagaggccctgtcgagggtcggccagggcagccgcaagctggacggcgggtggctgaaggtgcgccagttccacgggctgctggtcaaacgcttccactgcgcccgccgcaactccaaggcactcttctcccagatcttgctgccagccttcttcgtctgcgtggccatgaccgtggccctgtccgtcccggagattggtgatctgcccccgctggtcctgtcaccttcccagtaccacaactacacccagccccgtggcaatttcatcccctacgccaacgaggagcgccgcgagtaccggctgcggctatcgcccgacgccagcccccagcagctcgtgagcacgttccggctgccgtcgggggtgggtgccacctgcgtgctcaagtctcccgccaacggctcgctggggcccacgttgaacctgagcagcggggagtcgcgcctgctggcggctcggttcttcgacagcatgtgtctggagtccttcacacaggggctgccactgtccaatttcgtgccacccccaccctcgcccgccccatctgactcgccagcgtccccggatgaggacctgcaggcctggaacgtctccctgccgcccaccgctgggccagaaatgtggacgtcggcaccctccctgccgcgcctggtacgggagcccgtccgctgcacctgctctgcgcagggcaccggcttctcctgccccagcagtgtgggcgggcacccgccccagatgcgggtggtcacaggcgacatcctgaccgacatcaccggccacaatgtctctgagtacctgctcttcacctccgaccgcttccgactgcaccggtatggggccatcacctttggaaacgtcctgaagtccatcccagcctcatttggcaccagggccccacccatggtgcggaagatcgcggtgcgcagggctgcccaggttttctacaacaacaagggctatcacagcatgcccacctacctcaacagcctcaacaacgccatcctgcgtgccaacctgcccaagagcaagggcaacccggcggcttacggcatcaccgtcaccaaccaccccatgaataagaccagcgccagcctctccctggattacctgctgcagggcacggatgtcgtcatcgccatcttcatcatcgtggccatgtccttcgtgccggccagcttcgttgtcttcctcgtggccgagaagtccaccaaggccaagcatctgcagtttgtcagcggctgcaaccccatcatctactggctggcgaactacgtgtgggacatgctcaactacctggtccccgctacctgctgtgtcatcatcctgtttgtgttcgacctgccggcctacacgtcgcccaccaacttccctgccgtcctctccctcttcctgctctatgggtggtccatcacgcccatcatgtacccggcctccttctggttcgaggtccccagctccgcctacgtgttcctcattgtcatcaatctcttcatcggcatcaccgccaccgtggccaccttcctgctacagctcttcgagcacgacaaggacctgaaggttgtcaacagttacctgaaaagctgcttcctcattttccccaactacaacctgggccacgggctcatggagatggcctacaacgagtacatcaacgagtactacgccaagattggccagtttgacaagatgaagtccccgttcgagtgggacattgtcacccgcggactggtggccatggcggttgagggcgtcgtgggcttcctcctgaccatcatgtgccagtacaacttcctgcggcggccacagcgcatgcctgtgtctaccaagcctgtggaggatgatgtggacgtggccagtgagcggcagcgagtgctccggggagacgccgacaatgacatggtcaagattgagaacctgaccaaggtctacaagtcccggaagattggccgtatcctggccgttgaccgcctgtgcctgggtgtgcgtcctggcgagtgcttcgggctcctgggcgtcaacggtgcgggcaagaccagcaccttcaagatgctgaccggcgacgagagcacgacggggggcgaggccttcgtcaatggacacagcgtgctgaaggagctgctccaggtgcagcagagcctcggctactgcccgcagtgtgacgcgctgttcgacgagctcacggcccgggagcacctgcagctgtacacgcggctgcgtgggatctcctggaaggacgaggcccgggtggtgaagtgggctctggagaagctggagctgaccaagtacgcagacaagccggctggcacctacagcggcggcaacaagcggaagctctccacggccatcgccctcattgggtacccagccttcatcttcctggacgagcccaccacaggcatggaccccaaggcccggcgcttcctctggaacctcatcctcgacctcatcaagacagggcgttcagtggtgctgacatcacacagcatggaggagtgcgaggcgctgtgcacgcggctggccatcatggtgaacggtcgcctgcggtgcctgggcagcatccagcacctgaagaaccggtttggagatggctacatgatcacggtgcggaccaagagcagccagagtgtgaaggacgtggtgcggttcttcaaccgcaacttcccggaagccatgctcaaggagcggcaccacacaaaggtgcagtaccagctcaagtcggagcacatctcgctggcccaggtgttcagcaagatggagcaggtgtctggcgtgctgggcatcgaggactactcggtcagccagaccacactggacaatgtgttcgtgaactttgccaagaagcagagtgacaacctggagcagcaggagacggagccgccatccgcactgcagtcccctctcggctgcttgctcagcctgctccggccccggtctgcccccacggagctccgggcacttgtggcagacgagcccgaggacctggacacggaggacgagggcctcatcagcttcgaggaggagcgggcccagctgtccttcaacacggacacgctctgctgaccacccagagctgggccagggaggacacgctccactgaccacccagagctgggccagggactcaacaatggggacagaagtcccccagtgcctgccagggcctggagtggaggttcaggaccaaggggcttctggtcctccagcccctgtactcggccatgccctgcggtcactgcggttgccgcccctaattgtgccaaaggctgacccggcccgggctgcgtacacccttgccctgctttgccttaaagcctcggggtctgcccggcccctcgcccctgcctggcactgctcaccgcccaaggcgacgccggctggaccaggcactgctggcctttctcctgcccggcctcggaaccagcttttctctcttacgatgaaggctgatgccgagagcgggctgtgggcggagctgggtcagtcccgtatttattttgctttgagaagaggctcctctggccctgctctcctgcagggaggtggctgtcccgcgggaagccatcagcttgggccagctggcaggtggcaggaatggagaagctgaccctgctggccaggcaaggggccagaccccccccaacccccagctgccatcgctctcccacccagcttggccccctgcccgcccacctccctgggagccgggcctgtacatagcgcacagatgtttgttttaaataaataaacaaaatgtc

SEQ ID NO: 1381 - DNA, 532 bp, Homo Sapiens
tttttttcatataaatactatatatgcatgggttcattccattagaaaaattcacctatcagaatattaaagaccagtatcagcaaagcccaaggagagagtattttaacagtaggaacactaaaaatatcaactatgaggtttataaacaagtggggggaaagagaactttttacatttgctattgttatgacaggcacaatctgaaatacaattttagattagcagggtataaaaatacttttttaaaccataggtttggatgggtccagtagcatttaaacaaacagctgtgtggttattccttttgaggacctactaaaacaattcgacttactgcccccagctacacctgaaagtgcgaacctggaaagcaagtctcttacccaggtacacaccacacacacccacatactgaaaccacctccatctatgatgcatactgatgaggcggtgatctcaaacacggcgtgagacgagtgtttgaagcctgtttccatttccaggtttgggatgaatgaacaagaggcga

SEQ ID NO: 1382 - DNA, 289 bp, Homo Sapiens
tttttttttttttttttttttttgaatactggcataacagctttattcaagtgtgtgtgtgctctggcattgagaccaggctgagatcagcattacactgtaatacaataagaggtttagccattgaaccaagcctgcttggcatccctagttaacaatttacagtacctcgaaagaaaaaaaaaaaaaagccaaaggaaagaacctggtaagtttccttcaggactttttcatctttaaatattggtgacaacatacaataacttaaatcccaaagcaaaggggggaa

SEQ ID NO: 1383 - DNA, 420 bp, Homo Sapiens
gtgaccacggattcgccatcgtgagttccaggattttcaaaatggctgcagctcctcaagcaccggggcggggatctctccgtaagacgagacctcttggttgtgaagacgtcgttgaacaacccatacatcatccgctggagcgctctggagagcgaggatatgcacttcatacctacagacgcttgaggacaggcttaaagctattggacttcagaagattgaagataagaagaaaaagaacaaaacaccttttctgaaaaaagaaagcagagagaaatgcagcattcctgttgatattagtcagaatctgaaggacgaagaaaacagatgctaagcagcaagtgtcagggtggacgcctgcacacgtcaggaagcagcttgccatttgcgttaacgaagttaccagagccctggaaa

SEQ ID NO: 1384 - DNA, 292 bp, Homo Sapiens
  misc_feature (237)..(237): n is a, c, g, or t
  misc_feature (256)..(256): n is a, c, g, or t
  misc_feature (264)..(264): n is a, c, g, or t
tttcttggcactctgtaaggggccaccttaatcataccaaatattggggaaagtgggataaagggaggaggaggagctagcagacacatccagtatctccttctggagcacaggatgaaataagggagctgtattatttcatgtctttgtcacaaagaactttcctctcaaggaaaggtgacctttctcctgtcttcattttcctccttccagggcctcctcgctcacccacccctncctctcttccaaggagatngtcagctnagctcattcttggggcagatgttttggg

SEQ ID NO: 1385 - DNA, 570 bp, Homo Sapiens
tttttttttttttttttagggataatgcttttatattagtttttctataacaagaaaaatcagctttgagatttttatcatttttttccttagaaaagaataaaaaataaaggcacccggaacttcccccacaggcctgaagaacaaaggtgtctcctaggtgcagctgggtccttcctccctggctcagcccagccccatcacctctgcttcactcctgccccaaggccccagcagcacccagggggctctcccatcctgcctccactgggcttgcccattggaaaagtgcctgtgtcctgccagggcgtggcagggagggactcttagcagagtgactgcccagcacctggaggagcagggtgggccaggccaggccagcagtcctgaaggctcctgtccccataggatgggaaaggaataaaagccagcttttgtgagttccagagggtggcaggcacctggccacagagcatggatacccttgtgtcttctccagggaacggacggacagatggacagggcagacggcgagctgctatggctgattctggctggggcaagagctgt

SEQ ID NO: 1386 - DNA, 435 bp, Homo Sapiens
cttatcttttgggggcacctgggtacccatttctcatggtcacgtacctaggagtggcattgctgtgttagagggtacgttatagggtatgtgatttttgtaggttcttctttatcctatcacgattacatttttttacttttgttcaacctggtgtagactcaccttggtcacaatgcactgtcctttttatatattgctagattcaatttgaagaatattttgttaggattttagcaactctggttacaagagacgctggtctataatttttttttctttataatgtttttgtcaggttttcctgttaagatgatgctggacttagaaaagcagttggaaaatgcttttaaaatactctttggaagaatttatgtaatattcataatatttctgccttaaatgtttgggaaaaattaccggaaatgccagttg

SEQ ID NO: 1387 - DNA, 4695 bp, Homo Sapiens
gggggagggaaacggagcagtaacaagtatcccagagggtgctgctgaggcgacgatggccgaggggcccgaggaagcccgaggccaccctcccgggcaggacgatggcgggggggaccacgagcccgtcccttccctgagaggccctcctaccaccgccgtcccatgcccccgcgacgacccccaggccgaaccccaggccccgggccggcccacagccccgggcctcgcggctgccgccgcagccgacaaattggagccgccgcgcgagctcaggaagcgcggggaggcggcctccggctccggtgcagagctgcaggagcaggcgggctgcgaggcgcccgaagccgcggcgccacgagagagaccagctcggctgagcgcccgcgagtactcccggcaagtgcacgagtggctgtggcagtcctactgcggctacctcacctggcacagcggcctggccgccttcccagcctactgcagcccccagccctccccgcaaagcttcccttcgggcggcgctgcagtcccccaggccgcggcgccgccgcccccgcagctgggctattacaaccccttctacttcctgagccccggggccgcggggcctgacccgcggacagctgccggcatcagcacccctgctccagtcgcgggcctgggaccccgggctcctcacgtgcaggcgtcggtccgggccactccagtgacgagggtaggatccgcagccccttcgcgaagcccgagcgagaccgggcgacaggcaggcagagaatatgttattccatccttggcccacagatttatggcagagatggtggatttctttattctcttctttataaaagcaaccattgtcttaagcattatgcacctcagtgggataaaggatatctctaagtttgctatgcattatataatagaagaaatagatgaagacacatcaatggaagacttgcagaaaatgatggttgtggcacttatatacagattattagtttgtttctatgagataatttgcatttggggagcaggtggagctaccccagggaagttcctgctggggcttcgagttgtgacatgtgatacatcagtgcttattgcaccaagtcgggttttagtgattccttcctcaaatgttagcattacaacgtccactatccgagctttgatcaagaatttttcaattgcttcttttttccctgctttcatcacactgctgttttttcagcataatcgaacagcttatgacattgtagcaggaaccattgtggtaaaaagaaatggggtcagatgatgccccccaaaaccctgatttccacacactaagactaaattatgtatcaaggccatcagtatccctgggttacactaattgatgatttagaaattaaagcagtcactccagtgtgatgcaggtgactactctgaaagtattgattatacttgaatgccaaagaacttgtccagaagaaaaacctgttaaattcaagtattaaaatttttagatcaaaaaggcaaatgattttataaacaatggacaatatatactttcttaagatctaaggtactttcttaagatctaagaatttgctgaaagcattttcagctttgaaatctccaaatgaaactttaaaatttattttggtttatcccaaaataatggaaaatgtccagttgtgttttgtaaacacctatgtaactcatcttttagtttacacttcctggggaaattgtctttggtgtttagaggagggaatgagaacacaaattggataatccactgtctcccatcccaggaggtggtgagttggctacaagagaaagggacaagtgaggcaggcctagcagttcccttacctgaagttttcaaatccatactgcagttccctctcgtaatgatgtaactttacaactattcttaatgcttgaacatgtatttaggggcaagtttctcatgatgatgaaaaagtatcaagtcatattgctatgttaattggtttttttttttaaaaggtaagttagtgattactgttaatggtgggggagtaagttttcactgtaaattgaacttataatttatgtgcaagtgttttcagtgccctgaatcaaactataaatgtggggagaaatcacctccatcaaacagttgcatatttactgtaaaagtattcccagtatgtgtgcagcatgaagaaagtattagtgcttctcagtgttctcagtgtaaattctatttatatacagcatattcacatactactttccttatattttatatagttctatgactgttgaaacatcaaggagttaaaaaaatcttaatatttcatgattaactctaagtactattaatagcttgcgaaatattagcaattttcccattatggactatctctctaaagcaagagagactagcattcccagacatcattctagggtctttaagctcattttgggtctgctaaagtttggggggaaatgttacgcaaagtgatactgtgtatgttgccattttgctttattcttctgttgaagcaaaattgtggggttttattatgtgtgtgtgcttttcctagatgtcccagttagctgtgctgagatatacctgtactatttatggtttaagttttgattcttaggtattttctccagctctgacattgttttccaaagacacactaaactgcattgcacagttcaaaatttgattacttaagggatcaatctaggtggtgttcttggtcttaaatttaacagcaaacacagcacatatctattatcactatattaattttcaaaggtttttctgtgacgtttaaaactgtgacaacagatattcacatttgattatagaaacttaatgtctattaataattttagtacaaaatttcataaaccgtgtttttcaaaataagtttatgtcaaatccagcttcccagaaacactaataattaagtacatcaatgtactaaataaatcattcagttgcacccatggggaagattgtgttactgcccttcacagtgaaaaaaagaaaaatctttcatttttaaaattaggagatgttacgtaacttggcactttagtagtgtatacactagcattagtttatacaccacttttgccgctggggattcaagttgaaatgtccctcaatcatataggtctggaatacatctttcattcataatttctgctcagataattgaatagtttgccatcgagattattttcatttatactataaaacaaaagcaaactagtccagtttaattttttgtacttagaatattgcacattttctatatatgagttattcagattagtatctatgtaggttcagtcagatccaaccatggattcgaggtattatactgtataaccctacaaaatacatagaagtattatttgccttcataatagaacccaagagtctgtttcaatttatgaattcagtatttgcaccgagattttgattcccaaagtttggaaaaaaatgacaaaacaacgagggaagaaggaaccagaccttagtgccacatatttttctcttggggttgtaaggtagtctcctgctttccagaacactttattatatttcacttatagacctgattttctgtgtcaaagtataattctcatgctgaagctgtagcctaaaaagccaaaagaaagttgtcttcattgtacaaacatattcatcactttaacaataagggaacaaaatttagtattcaagctgagtgagaatactggttcaatggacatgtccctaagataaaccagaattggcagttaatttaggcgtctagaaaatctcagttcccaccagtaaaattatcctgagtagctaatgcaccttgagaaaaatctggcatactgaataagtaacattaacttgggagccaagagctgggtaagccttacctttagactactctgtgactacagaaataaagccagcacttttggaactaataagccttcacttgtcagtatcataaagagtattgcccaactgaactttgctcccactggtttaatagttacttatttctgcctaagcactcaccttccgattttacccaagtatatatataggatagaaaaaaatgcattatatttgagagctcacttcgcccgaattacaaaatgagtgtttttagattcaagtgacggtaaaaggatttgttcccttcagtgacttgagtgttttagttatgcataagtatttctagcaaaggaagggtagaaaggaattgaaaattaatttacactagttgctacttgggaataaagggctttttgaggggggtatggatattaaatgttttcgttatatacttatccctattaaaacaggcagttgtttctttgaatatgcctaaataacagtattcttaaaatctgacagacaagtaacatgtcaattacttgatattccttgtctccagtaccacaggccactcttgacatcccatgtttgcctggataaagttcctcatttcaaacagtatacatacttctttgcagttcattatagtaaggcttaacctgtaaacagtatctgatggcccacctataaataaaattcagcattctatttttaataatttgtatgccaccaatttgtattatttgtctcaataaatacttagtcatcgatgcaaaaaaaaaaaaaaaaaaaaaaaa

SEQ ID NO: 1388 - DNA, 3806 bp, Homo Sapiens
cttcttgtaagagagtgctaggcacatagtcccctcctattcctaatcctcccaccaaagaaagaggcacagagttcattacttagtgggggccagctgtgatcggccaactgccagctgccttaaaaaggaagaccagtgatgctaggatggagtgaaacccaagaggaagtgccatcatgaggaatcaatgagagatctgtgaagagagagggctgggtgggagcccagaaggatagaacctggaagatcaatatctcccgtgagggaaataacaatggagccaggttctaagtcagtgtctaggtcagactggcaacctgaaccacaccagaggcctataaccccgctagagcctgggccagaaaagacacccatagcccagccagaatcgaagactctgcagggatccaatacccaacagaagcctgcttcaaaccaaagacccctcacccagcaggagacccctgcacaacatgatgctgaatcccagaaggaacctagagcccaacaaaaatctgcttcacaagaggaatttcttgccccacagaagcccgcaccacagcaatcaccttacatccaaagggtgctgctcactcaacaggaagctgcctcccagcagggacctgggctaggaaaagaatctataactcaacaggagccagcattgagacaaagacatgtagcccagccagggcctgggccaggagagccacctccagctcaacaagaagctgaatcaacacctgcggcccaggctaaacctggagccaaaagggagccatctgccccgactgaatctacgtcccaagagacacctgaacagtcagacaagcaaacaacgccagtccagggagccaaatccaagcagggatctttgacagagctgggatttctaacaaaacttcaggaactatccatacagcgatcagccctagagtggaaggcactttctgagtgggtcacagattctgagtcagaatcagatgtgggatcatcttcagacacagattctccagccacgatgggtggaatggtggcccagggagtgaagctaggcttcaaaggaaaatctggttataaagtgatgtcaggatacagtgggacgtcgccacatgagaaaaccagtgctcggaatcacagacactaccaggatacagcctcaaggctcatccacaacatggacctgcgcacaatgacacagtcgctggtgactctggcggaggacaacatagccttcttctcgagccagggtcctggggaaacggcccagcggctgtcaggcgtttttgccggtgtacgggagcaggcgctggggctggagccggccctgggccgcctgctgggtgtggcgcacctctttgacctggacccagagacaccggccaacgggtaccgcagcctagtgcacacagcccgctgctgcctggcgcacctcctgcacaaatcccgctatgtggcctccaaccgccgcagcatcttcttccgcaccagccacaacctggccgagctggaggcctacctggctgccctcacccagctccgcgctctggtctactacgcccagcgcctgctggttaccaatcggccgggggtactcttctttgagggcgacgaggggctcaccgccgacttcctccgggagtatgtcacgctgcataagggatgcttctatggccgctgcctgggcttccagttcacgcctgccatccggccattcctgcagaccatctccattgggctggtgtccttcggggagcactacaaacgcaacgagacaggcctcagtgtggccgccagctctctcttcaccagcggccgctttgccatcgaccccgagctgcgtggggctgagtttgagcggatcacacagaacctggacgtgcacttctggaaagccttctggaacatcaccgagatggaagtgctatcgtctctggccaacatggcatcggccaccgtgagggtaagccgcctgctcagcctgccacccgaagcctttgagatgccactgactgccgaccccacgctcacggtcaccatctcacccccactggcccacacaggccctgggcccgtcctcgtcaggctcatctcctatgacctgcgtgaaggacaggacagtgaggagctcagcagcctgataaagtccaacggccaacggagcctggagctgtggccgcgcccccagcaggcaccccgctcgcggtccctgatagtgcacttccacggcggtggctttgtggcccagacctccagatcccacgagccctacctcaagagctgggcccaggagctgggcgcccccatcatctccatcgactactccctggcccctgaggcccccttcccccgtgcgctggaggagtgcttcttcgcctactgctgggccatcaagcactgcgccctccttggctcaacaggggaacgaatctgccttgcgggggacagtgcaggcgggaacctctgcttcaccgtggctcttcgggcagcagcctacggggtgcgggtgccagatggcatcatggcagcctacccggccacaatgctgcagcctgccgcctctccctcccgcctgctgagcctcatggaccccttgctgcccctcagtgtgctctccaagtgtgtcagcgcctatgctggtgcaaagacggaggaccactccaactcagaccagaaagccctcggcatgatggggctggtgcggcgggacacagccctgctcctccgagacttccgcctgggtgcctcctcatggctcaactccttcctggagttaagtgggcgcaagtcccagaagatgtcggagcccatagcagagccgatgcgccgcagtgtgtctgaagcagcactggcccagccccagggcccactgggcacggattccctcaagaacctgaccctgagggacttgagcctgaggggaaactccgagacgtcgtcggacacccccgagatgtcgctgtcagctgagacacttagcccctccacaccctccgatgtcaacttcttattaccacctgaggatgcaggggaagaggctgaggccaaaaatgagctgagccccatggacagaggcctgggcgtccgtgccgccttccccgagggtttccacccccgacgctccagccagggtgccacacagatgcccctctactcctcacccatagtcaagaaccccttcatgtcgccgctgctggcacccgacagcatgctcaagagcctgccacctgtgcacatcgtggcgtgcgcgctggaccccatgctggacgactcggtcatgctcgcgcggcgactgcgcaacctgggccagccggtgacgctgcgcgtggtggaggacctgccgcacggcttcctgaccctagcggcgctgtgccgcgagacgcgccaggccgcagagctgtgcgtggagcgcatccgcctcgtcctcactcctcccgccggagccgggccgagcggggagacgggggctgcgggggtagacgggggctgcggggggcgacactaaaagcctgttgttcccatctgcgccggcctccgtcatgaatgccttccgggccgggcggaaggggacgcgggctgtgccttacttaagtcgggggtggcaagggggcggggcgggggcccgaaagctgagaccctcgccacggggagggggacgcgcacacacaccggtcaccgagacggctggacctgcacgccaccgctgccttttgctgctgctgctgcggcgaccgccgcagggacggggactggccctcccttgcaggtcggtttggtttgttgtaaataaaagtatttaatta

SEQ ID NO: 1389 - DNA, 411 bp, Homo Sapiens
  misc_feature (243)..(243): n is a, c, g, or t
  misc_feature (300)..(300): n is a, c, g, or t
  misc_feature (378)..(378): n is a, c, g, or t
  misc_feature (405)..(405): n is a, c, g, or t
tttttttttttttttttaactttagaatttcattttattaaacatacttttaaaacaagcacctcttggcaataaaagcaaaaacaaaaaacaaacaaacaaaaacccaaccaaacaatagtactccttccactctatgctaacggaagacttctcacaccagccagttaaacaatgaaattcttaaacacgcagcctgctggggctgcattgcagagctaaaatgcaggtgtgctgacttcnttgggacgctggagcagaggaaaacatcaaaaaggcatatctgggaatctatcacangctttctttcttaaagccaataaaaatggcaatttagtttcataacccacaatttccattttatccaaacttttttcnggaagaattttccatttaaattaatgnatacct

SEQ ID NO: 1390 - DNA, 382 bp, Homo Sapiens
gagcggccgccctttttttttttttttttttttttttacatagaaaaaaatgtatatttatatccctaaaaggcaatacagaatttataaccaaaccatgtgtgagaactgttaaattacattccaaataccagcagtggaacaaacagaaacacagagatgttttaaaaaacatgcagcacgttacaaagaggccgtgtaataattcacaacttttgttagcagccgttaagtttgattagtattaagcagcaatggtttaagcaattttaaatcatgatatgatagttacatatatgcattttactgttccaattatagtttagtaataggtcaggggtttgagcaacattttaagcattataattttctcctaaattat

SEQ ID NO: 1391 - DNA, 482 bp, Homo Sapiens
ttttttttttttttttttcttggaataatgtttatttaaagttacatttcaaaggaaactatcttcaggagggcatgaagcctattttggctactgcaaaacaaccaaaagttttataaaatatttctgatttaaattactaaggcactataaataggcccctatattacatacaatcttcaaacatttttaaaagttgaaactatgtattagttgatatctaaaatattaaagcccctgacaaactgaacggctaaaaacttgacaaaatgagatgcctgtttcaatgattctgttgccagcatattaattaaaatacaatttgagattctaaattacacgatccagccttagtccagggaccttgtgatgatagttgtattaaacttcaaaacaccctttccgcaggaaagggcatttttcaagatggcaactgctgtgtcatcattttcccttttctggactgtatcagaaatccttca

SEQ ID NO: 1392 - DNA, 2227 bp, Homo Sapiens
ctcggctcccacccttgtgtacctgggccgaaccattcaccggagcgcgcagcgggtggagtgtggctcggaggaccgcggcgggtcaagcacctttctcccccatatctgaaagcatgccctttgtccacgtcgtttacgctcattaaaacttccagaatgcaacaggacggacttggagtagggacaaggaacggaagtgggaaggggaggagcgtgcacccctcctggccttggtgcgcgccgcgccccctaaggtactttggaagggacgcgcgggccagacgcgcccagacggccgcgatggcgctgttggccggcgggctctccagagggctgggctcccacccggccgccgcaggccgggacgcggtcgtcttcgtgtggcttctgcttagcacctggtgcacagctcctgccagggccatccaggtgaccgtgtccaacccctaccacgtggtgatcctcttccagcctgtgaccctgccctgtacctaccagatgacctcgacccccacgcaacccatcgtcatctggaagtacaagtctttctgccgggaccgcatcgccgatgccttctccccggccagcgtcgacaaccagctcaatgcccagctggcagccgggaacccaggctacaacccctacgttgagtgccaggacagcgtgcgcaccgtcagggtcgtggccaccaagcagggcaacgctgtgaccctgggagattactaccagggccggaggattaccatcaccggaaatgctgacctgacctttgaccagacggcgtggggggacagtggtgtgtattactgctccgtggtctcagcccaggacctccaggggaacaatgaggcctacgcagagctcatcgtccttgggaggacctcaggggtggctgagctcttacctggttttcaggcggggcccatagaagactggctcttcgtggttgtggtatgcctggctgccttcctcatcttcctcctcctgggcatctgctggtgccagtgctgcccgcacacttgctgctgctacgtcaggtgcccctgctgcccagacaagtgctgctgccccgaggccctgtatgccgccggcaaagcagccacctcaggtgttcccagcatttatgcccccagcacctatgcccacctgtctcccgccaagaccccacccccaccagctatgattcccatgggccctgcctacaacgggtaccctggaggataccctggagacgttgacaggagtagctcagctggtggccaaggctcctatgtacccctgcttcgggacacggacagcagtgtggcctctgaagtccgcagtggctacaggattcaggccagccagcaggacgactccatgcgggtcctgtactacatggagaaggagctggccaacttcgacccttctcgacctggcccccccagtggccgtgtggagcgggccatgagtgaagtcacctccctccacgaggacgactggcgatctcggccttcccggggccctgccctcaccccgatccgggatgaggagtggggtggccactccccccggagtcccaggggatgggaccaggagcccgccagggagcaggcaggcgggggctggcgggccaggcggccccgggcccgctccgtggacgccctggacgacctcaccccgccgagcaccgccgagtcagggagcaggtctcccacgagtaatggtgggagaagccgggcctacatgcccccgcggagccgcagccgggacgacctctatgaccaagacgactcgagggacttcccacgctcccgggacccccactacgacgacttcaggtctcgggagcgccctcctgccgaccccaggtcccaccaccaccgtacccgggaccctcgggacaacggctccaggtccggggacctcccctatgatgggcggctactggaggaggctgtgaggaagaaggggtcggaggagaggaggagaccccacaaggaggaggaggaagaggcctactacccgcccgcgccgcccccgtactcggagaccgactcgcaggcgtcccgagagcgcaggctcaagaagaacttggccctgagtcgggaaagtttagtcgtctgatctgacgttttctacgtagcttttgtattttttttttaatttgaaggaacactgatgaagccctgccatacccctcccgagtctaataaaacgtataatcacaaaaaaaaaaaaaaaa

SEQ ID NO: 1393 - DNA, 2432 bp, Homo Sapiens
gcgccagcaggaagtgggagaagaggcgacccaaggcgggctggcgggctggcggcagtcgctacttgcctagtagcctcagccgctgtgggctcctggggagatggaggggccggggctgggctcgcagtgcaggaatcacagccatggcccccaccctccaggatttggtcgatatggcatctgtgcacatgaaaacaaagaacttgccaatgcaagagaagctcttcctcttatagaggactctagtaactgtgacattgtcaaagctactcaatacggaatttttgaacgatgtaaagagttggtagaagcaggatatgatgtcaggcaaccagataaagaaaatgtgtcgcttcttcattgggctgctattaacaacagactggatcttgtaaggttttatatttcaaaaggtgctgttgtagatcagttgggtggagatttaaattcaactcctcttcactgggccatccgacaaggacatttacctatggtcatattattactccagcatggtgcagaccccactcttattgatggagagggattcagcagcatccacctggcagtattgtttcaacacatgcctattatagcatatctcatctcaaagggacagagtgtgaatatgacagatgtaaatgggcagacacctctcatgttatcagctcacaaagtaattgggccagaaccaactggatttcttttaaagtttaatccttctctcaatgtggttgataaaatacaccaaaacactccacttcactgggcagttgcagcaggaaatgttaatgcagttgataagcttttggaagctggttctagcctggatatccagaatgttaagggagaaacacctcttgatatggctctacaaaacaaaaatcagctcattattcatatgctaaaaacagaagccaaaatgagagccaaccaaaagttcagactttggaggtggctgcagaaatgcgagctcttcctgctgctgatgctttctgtgattaccatgtgggctattggatacatattggacttcaattcagattcttggcttttaaaaggatgtcttctagtaacactgttttttctgacatctttgtttccaaggttcttggttgggtataagaaccttgtatacttaccaacagcctttctgctaagttctgttttttggatatttatgacttggttcatcttattttttcctgatttagcaggagcccctttctatttcagtttcattttcagcatagtagcctttctatactttttctataagacttgggcaactgatccaggcttcactaaggcttctgaagaagaaaagaaagtgaatatcatcacccttgcagaaactggctctctggacttcagaacattttgtacatcatgtcttataaggaagccattaaggtcactccactgccatgtatgcaactgctgtgtggctcgatatgatcaacactgcctgtggactggacggtgcataggttttggcaaccatcactattacatattcttcttgtttttcctttccatggtatgaggctggattatatatggatctttcatctatttgtccagtcattgtgccacaacattcaaagaagatggattatggacttacctcaatcagattgtggcctgttccccttgggttttatatatcttgatgctagcaactttccatttctcatggtcaacatttttattattaaatcaactctttcagattgcctttctgggcctgacctcccatgagagaatcagcctgcagaagcagagcaagcatatgaaacagacgttgtccctcaggaagacaccatacaatcttggattcatgcaggacctggcagatttctttcagtgtggctgctttggcttggtgaagccctgtgtggtagattggacatcacagtacaccatggtctttcacccagccagggagaaggttcttcgctcagtatgaagaaaagcaacccaaaactctcaatctgatttgtttttgtttatgtcgatgccctgtagtttgaaagtgaagtaaagatttagaattcacctaagtccaaaggaaaacacgtggtttttaaagccattaggtaaaaaaagttctcaataaaggcattacaattttttaggtttagaaagatggacttttctgataaatcttggcagacatctaaaaaaaaaaccatatttttcacaagaaaatgcaagttactttttttggaaataatactcactgattatggataaaatggaatattttcagatactatattggctgtttcaaaatagtactattctttaaacttgtaatttttgctaagttatttgtctttgttgtatctataaatatgtaaaaaatatttaaatagatgtacctgttttgctttcacacttaataaaaaattttttttttgtagttg

SEQ ID NO: 1394 - DNA, 417 bp, Homo Sapiens
  misc_feature (383)..(383): n is a, c, g, or t
  misc_feature (401)..(401): n is a, c, g, or t
ggccagcggcggagtctccaactgggagagctgcagctgccgagaggaggagaacgctgaggtcggtcggaccaacggacgcgctgaccgctgccaactgcagctcgcgctgcctcctgctcgcgccgtgccactaaggtcactcccgcctccgagagcccagagccgagatggaaacggtccaggagctgatccccctggccaaggagatgatggcccagaagcgcaaggggaaaatggtggaagctgtacgtgctgggcagcgtgctggccctcttcggcgtggtgctcggcctgatggagactgtgtgcagccccttcacggccgccagacgtctgcgggaccaggaggcaagccgtggcggaactgcaagccgccctgngagcgacagggttttcangaaacaaagccctgca

SEQ ID NO: 1395 - DNA, 916 bp, Homo Sapiens
  misc_feature (489)..(489): n is a, c, g, or t
  misc_feature (580)..(580): n is a, c, g, or t
  misc_feature (620)..(620): n is a, c, g, or t
  misc_feature (626)..(626): n is a, c, g, or t
  misc_feature (638)..(638): n is a, c, g, or t
  misc_feature (641)..(641): n is a, c, g, or t
  misc_feature (651)..(651): n is a, c, g, or t
  misc_feature (666)..(666): n is a, c, g, or t
  misc_feature (668)..(668): n is a, c, g, or t
  misc_feature (677)..(677): n is a, c, g, or t
  misc_feature (681)..(681): n is a, c, g, or t
  misc_feature (686)..(686): n is a, c, g, or t
  misc_feature (690)..(690): n is a, c, g, or t
  misc_feature (699)..(699): n is a, c, g, or t
  misc_feature (706)..(707): n is a, c, g, or t
  misc_feature (709)..(709): n is a, c, g, or t
  misc_feature (723)..(723): n is a, c, g, or t
  misc_feature (726)..(726): n is a, c, g, or t
  misc_feature (728)..(728): n is a, c, g, or t
  misc_feature (756)..(756): n is a, c, g, or t
  misc_feature (765)..(765): n is a, c, g, or t
  misc_feature (775)..(775): n is a, c, g, or t
  misc_feature (783)..(783): n is a, c, g, or t
  misc_feature (801)..(801): n is a, c, g, or t
  misc_feature (811)..(811): n is a, c, g, or t
  misc_feature (815)..(815): n is a, c, g, or t
  misc_feature (830)..(830): n is a, c, g, or t
  misc_feature (845)..(845): n is a, c, g, or t
  misc_feature (859)..(859): n is a, c, g, or t
  misc_feature (871)..(871): n is a, c, g, or t
  misc_feature (876)..(876): n is a, c, g, or t
  misc_feature (880)..(881): n is a, c, g, or t
  misc_feature (892)..(892): n is a, c, g, or t
  misc_feature (894)..(894): n is a, c, g, or t
  misc_feature (900)..(900): n is a, c, g, or t
  misc_feature (910)..(910): n is a, c, g, or t
gtaaagtgctcagcaaatgttaattgttgctagatctattgtgggcaatgatatttacacttcttggacaaaattggtttgatggtgccttagaggttaggatgtttctagatcaacgctggaagaaccaggatcaaagtgtggtctgggagtcaaagtcatgaatgaaaatgaagcaagccagaacctcatcagtggtgtccatgaatctgaaggtacagatgagggttggacctggagtctcaaaagagaagggtcagaaaactgaaactcaacatgtgtccagcactattcagttttatctcatagtcaagcctccaaaatccaaacacattgtcagcatctgctttgaaggtaagcattgcaggtaggatgaggcaacccaaagatggcattgagaaagaggcagagcccttggacactgtgcctggtgagtgtgggttggtgggggaaaggcaggtgatcattctgatacagggccttggggtnactagttttagttgtcctgtgacacttttgggaaatctccaacctttgtgagattaaattccttatcaataaaatgtggggaataaaaatngcaccccatagggtttttgtaaagatcaaagtgaactagnctttgnaaacctatccanctntccataaaanttttaaaagggtccntnatttaaagnaggnaaganatanaaaaaaaanacccccnnangggggggggccccnggnanccccaaattcccgccccaaaaaaggggngggcccggntttaccaaantccccctngggcccggccgggttttnccaaacgggncggngcccttgggggaaanccccctgggggggtnccccaacctttaancccccgctttgnagggnaaannccccccctttntncccaancctggggggnaaattt

SEQ ID NO: 1396 - DNA, 8743 bp, Homo Sapiens
ggatcctctcgcctcggcctcctaaagtattgggattacaggcatgagcctctgtgcctggctgtaactgacatgttttaagcaggggaatgacatgctctagtgaaagccagtctgggcagctgggtagctaatgaggggattagagagattttgttgaatgaaaggcagattgagtcctgctactcgcccccttcattccccttcattcatgcctcattcttccgcctcccagccgcctcaactggccaaagggaagtggaggccctgccacctgtagggagggtcccctggggcttgcccacagcaaacaggaagtcacagcctggtgagatgggcctgggaatcagccactgagaaagtgggtctcttgggtccctgaattctttttctgagtccctgcagcagtgaaaaagacacagaggcacatagagagtgacagagaaagagagagacagagaggagaggcatggggcagaataagaacagatttaggagttagaactcctgggttcttttaaaacaatttttcttttagagacagggtcttgttgtgttgcccggactggagcacagtggctattcccaggcataatcatggtgcactgcagccttgaactcctgggctcaagcgatccttctacctcagcctcccaaggacctgggaccataggcgtgtaccactgtgcctggcttttgcctggttttaaactgaggcagtatgacttgagctcttaggcattaattgaagctgtatctcattaactgagggcttatgatgtgctggacactgggctaatagtgctgaacatattgtcatttttaatcttcacaaacaatatttgtataggactgttttcttttcttttttttttttgaaacagagtctcactctggtgcccaggctggagtgcagtggtgtgatctcggctcactgcaacctccgcctcctggtttccagtgattctcctgcctcagcctcctaagtagctgggattacaggtgtgcgccaccatgcccggctaatttttttttttttttttgagaaggagtctatgtgcccagcattgttctagagcacttgcaattagtggtgaacaacacggtctctactccaaggggctcacattcttgtgcagaaaacagaaatgaacaaataaacacacaagatcatttcccgtggtagtgagagctgggatgaaaataaaacagcgtggcagggaggaggcaagtgttgtgagtctggagggttcctggagaatggggcctgaggcgtgaccaccgccttcctctctggggggactgcctgccgcccccgcagacacccatggttgagtgccctccaggcccctgcctgccccagcatcccctgcgcgaagctgggtgccccggagagtctgaccaccatgccacctcctcgcctcctcttcttcctcctcttcctcacccccatggaagtcaggcccgaggaacctctagtggtgaaggtggaaggtatgtccaaagggcagaaagggaagggattgaggctggaaacttgagttgtggctgggtgtccttggctgagtaacttaccctctctgagcctccattttcttatttgtaaaattcaggaaagggttggaaggactctgccggctcctccactcccagcttttggagtcctctgctctataacctggtgtgaggagtcggggggcttggaggtcccccccacccatgcccacacctctctccctctctctccacagagggagataacgctgtgctgcagtgcctcaaggggacctcagatggccccactcagcagctgacctggtctcgggagtccccgcttaaacccttcttaaaactcagcctggggctgccaggcctgggaatccacatgaggcccctggcatcctggcttttcatcttcaacgtctctcaacagatggggggcttctacctgtgccagccggggcccccctctgagaaggcctggcagcctggctggacagtcaatgtggagggcagcggtgagggccgggctggggcaggggcaggaggagagaagggaggccaccatggacagaagaggtccgcggccacaatggagctggagagaggggctggagggattgagggcgaaactcggagctaggtgggcagactcctggggcttcgtggcttcagtatgagctgcttcctgtccctctacctctcactgtcttctctctctctgcgggtctttgtctctatttatctctgtctttgagtctctatctctctccctctcctgggtgtctctgcatttggttctgggtctcttcccaggggagctgttccggtggaatgtttcggacctaggtggcctgggctgtggcctgaagaacaggtcctcagagggccccagctccccttccgggaagctcatgagccccaagctgtatgtgtgggccaaagaccgccctgagatctgggagggagagcctccgtgtgtcccaccgagggacagcctgaaccagagcctcagccagggtatggtgatgactggggagatgccgggaagcgggggtccagagacagaggggaggggaaactgaagaggtgaaaccctgaggatcaggctttccttgtcttatctctccctgtcccagacctcaccatggcccctggctccacactctggctgtcctgtggggtaccccctgactctgtgtccaggggccccctctcctggacccatgtgcaccccaaggggcctaagtcattgctgagcctagagctgaaggacgatcgcccggccagagatatgtgggtaatggagacgggtctgttgttgccccgggccacagctcaagacgctggaaagtattattgtcaccgtggcaacctgaccatgtcattccacctggagatcactgctcggccaggtagagtttctctcaactgggaggcatctgtgtgggggtactgggaagaagtggaagccagtcaatcttagattcccccaacccgagggctactcccagcctcaccccaaaccccaacttccacacagaacactgactccaagtctttcttttttttgacagagtctcgctctgttgcctaggctggagtgcagtggtgccatcttgtcttggctcactgcaacctccgcctcccaggttcaagtgattcccctgcctcagcctcctgagtagctgggattacaggtgcccaccaccacgcctggctaattttttttttttttttgagacggagtcttgcactgtcacccaggctggagtgcagtggcacgatctcagctcactgcaacctccaccttccaggttcaagtgattctcctgcctcagcctcccgagtagctgggattaaagcctggctaattttttttgtatttttagtagagatggggtttcattatgttggccaggctggtctcaaactcctgacctcgtgatccacccgcctcggcctcccaaagtgctgggattacagacatgagccacagggccgggccaagcctaattttgtatttttagtagagatggggtttctccctgttggaccaggctggtcttgaactcctgacttcaggtgatctgcctgccttggcctcccaaagtactgggattacaggcataagccaccgcacctggcctagacttcaagtctttcttccctcgcttccaagacactacttttctgggtcttcacctaccattgcttgcgcctgcccaccagcttgggtggagtcttccttcctccccaactcctcactcttggagccctgggccctcttcttatccctgtctgcacactttcctatttgaacttgactctcaatggcttcttgggtcaccatgccttggtgactctattccaggctccatactcagccatctcctgtgccatttgatatcccatggacacctcaggctcaacagatacaaaatcaaactcaatgtcttccccaagtatagtcttcttggtggcccagtgtaagcagagggcaccaccacctgctccctcgcccaggctaagaacctgggcatccttctttttcctcaccccgtccaacaaactggtcacagtgttctgccaattctctctccatgcaatcctatcatgctatcctaactgcaattcacaaacccaaccccaactttcactccaaacttgatccaagcaatgtgctggatcccaactgtaaccttgcaaactcaactctgcccttcactttgaccgtgactatccttaattgcagcaggaaactgatcattatgctcccctcaatccacacattgcctctgagtacagccatggtttgtccacgatttgctcaaagacactgcccatgtcctgtgccagggtctgtgacaatccctgacctcctgggacatggctccttagagagaggagagcctttctcacagcttgggactttgagtctgtgtctttttttttttcttgagacggagttttgctgtggttgcccaggctggagtgcagtgatctcggctcactgaaacctccgcctcccgggttcaaacgattctcctgcctcagcctcccaagtagctgggattacaggcacccaccaccatgcccagctaatttttttgtatttttagtagagatggggtttcaccatgttggccaggctggtctcgaactcctgacctcaggtgatccacccgcctttgcctcccaaagtgctgggattacaggcgtcaaccaccgcgcccggccgagtctgtgtcttgcctctgtgcctcagacttgcggttccttgagatctcaggattgggacgtaagatgccagcctggggtcctcgtctcatagccccttccccctagtactatggcactggctgctgaggactggtggctggaaggtctcagctgtgactttggcttatctgatcttctgcctgtgttcccttgtgggcattcttcatcttcaaagaggtgagtcatgtccccagtgggtctgtccaaaccctactccatcttccccaggataagccggctctggccagtctgacaaccatctttctttcctcccatccctcccttcaagaccccagaatcctgttctccccagtcttcctctagcctccctcaaacttcccaagcctcttgcaattttttttttttttttgagacagggtctcattctgtcaccccagctggagtgcagtggcacaatctgagctcactgtaacctctgcctcccaggcttaagtgattcttgtgcttcagcctcccgagtacctgggactacaagtgtatgccaccacacccggccaattttttatatttttagtagagacgaggtttcaccatgttggccagactggtctcgaactcttgacctcaaatgatccgcccacctcggcctcccaaagtgctgggattacaggcacgagccaccgcgcccgtccgcctcgcaatttgaactcctgtctcctttgttgaaccaagtgacctccccagcacctggccccacaaatcctcaccctgccaagcagcccctcctctgatcacgccctttaactcccaccagccctggtcctgaggaggaaaagaaagcgaatgactgaccccaccaggaggtaatgcaaccagtgcaccccgcggtaacaccctccaccttcactttatgccttgcacttactgtttcctctgcccaggggttctttgctccgtctctactgtttcaaatactgcccaacctcaaagcccagctccaaagctacctcctctgtgaagaactccttggaaatgatcatctcagactcctctattggctgtcccagcacaagtgatcacgtttaacttctgaaggcctggacagaatcttgagtgggtccgccattccattccaagtcggccctcaccgtgcacttcctcttctcccgccagattcttcaaagtgacgcctcccccaggaagcgggccccagaaccagtacgggaacgtgctgtctctccccacacccacctcaggcctcggtaagaggcaccgcccctccagcctatagctccgccccagatccggggctccacccccactctcctcatccctccaatccgctgtgcgccaagccttctggagctcggaactccgcccccggggcggggagtcccgcccagctatgagccccgcctctagaaccagaccccgcctccagggctcagagccacgcccccaggacccagagcctgaagtcgtaatcaagagcagaacttcgccccagaactgaaggcctcggccctagatttagattccgccccagggttcaaggccgggttcctagacccagagtccattcgcagagcccaaaacatcctcttcccgtgccccgccgcgcggacccttagccttgaccgcccccatctcttctgaccccgtcttacaatgcccctctcaccaggacgcgcccagcgttgggccgcaggcctggggggcactgccccgtcttatggaaacccgagcagcgacgtccaggcggatggagccttggggtcccggagcccgccgggagtgggtgaatgactgggagagggaagggtcgttccccacatggagggggttggagcggtctgtggcccgaatagtggactgggccctggaggagagggggcatgactcggttccccatccccatccccaaacccccaggcccagaagaagaggaaggggagggctatgaggaacctgacagtgaggaggactccgagttctatgagaacgactccaaccttgggcaggaccagctctcccagggtaaggctgccctcccccgtggccccccacctctgcggtggcctgtggactcccatggacacccctccttctacaccagatggcagcggctacgagaaccctgaggatgagcccctgggtcctgaggatgaagactccttctccaacggtaacttggggcctttgtgggacctcagagacttaggtgtaattgcagcgctgtgacactcctagaaggggatccctggagttctctctcttctgccacagctgagtcttatgagaacgaggatgaagagctgacccagccggtcgccaggacaatgggtgtgtgtgaggatggcaacagtccaggggggaggcggaggacacctggaggccaggaggaatagtaacctccctcttccctttccagacttcctgagccctcatgggtcagcctgggaccccagccgggaagcaacctccctgggtgagagatgctttcaatcagactgccttgcccagcttgggtgacctggcctcagctctgacaccagatccaactttgacctgaccctgaccccaaacccgaacccaatcctgtgactcctctcacctcaacactgagccccatcccccatcctgagccccatcccccatcctgacccccaatatttaccccctccctaactgtgaatatcaacaccgatcccaatgcagtatcagcctggacttgatctccacctcacctcagccccagtgcagacctcaacttggaccccagcttactctgcagcttcttcatgactctgactccgactccctccagtttcttctttttctttttcttttttttgagacggagtctccctctgttgcccaggctggagtgcagttgccacctctgcctcctaggttcaagcgattctcatgcctcagcctcctgagtagctgggattatagacgtttgccaccacacctggctaatttttgtattttcagtagagacagggtttcgccatgttggccagactggtctccaactcctggcctctagtgatctgcccgcctttggcttcccaaagtgctgggattacaggcatgagccaccacgcccagcccagttctgttcttgaccccttccttagccataatctaacccatatctaaccctgaccctacagctaactggggccccaaactcaatgctaaccaaatcaccccttcccagcacagcatgggtaatgctcctcaccttcctctgcccctcagtcttcctccttaccgtaggctgtacttcccatgccctagcctccaattctccatcccccgcccaagcagggtcccagtcctatgaggatatgagaggaatcctgtatgcagccccccagctccgctccattcggggccagcctggacccaatcatgaggaaggtgggtgcttctgccgctgtcccctgctgtcccctgggctgactttgccttccagcctacttccagtgccacccatgttctcctcctccctggtcctatccagatgcagactcttatgagaacatggataatcccgatgggccagacccagcctggggaggagggggccgcatgggcacctggagcaccaggtgatcctcaggtggccaggtgagctgggactgcccctagggaaagcggggagggagggagataggcacggatggcagtggctgctggctttcagggagggagagggaacagggttcctagggcctggtgggcagggggaggactgctggacccctccccatcaccgtttcttctgcatagcctggatctcctcaagtccccaagattcacacctgactctgaaatctgaagacctcgagcagatgatgccaacctctggagcaatgttgcttaggatgtgtgcatgtgtgtaagtgtgtgtgtgtgtgtgtgtgtgtatacatgccagtgacacttccagtcccctttgtattccttaaataaactcaatgagctc

SEQ ID NO: 1397 - DNA, 460 bp, Homo Sapiens
  misc_feature (334)..(334): n is a, c, g, or t
  misc_feature (355)..(355): n is a, c, g, or t
  misc_feature (374)..(374): n is a, c, g, or t
tttcatttcttataaatttattacataataatattataataattattatcaataataataatataagaaacatagatctctgtggggcgtatcacaacgtcagggtcaggaggcctcaggactggagcagggggtgaaaccccccggatggaactccatacaaaaggaggtgaagcggaactgaccctgtaaagttaaaaacccaaattgaacggaaccaaaacccacaggtgagtgtgagaccgagtgtgtatgtggcagtctgttacagtgactgctgctgtgtgacctggactgttggcggaaggatgagtgggtgtgactctgtgcccanggagtggggccggtgggccanggcggggcgggcaggcacnaaaccgcctgcccggccccttgggtttgaaaacttctgttttcttttttttttttattttattaaaaaaagctagaaatataaaca

SEQ ID NO: 1398 - DNA, 104729 bp, Homo Sapiens
gatcttaagaccttaagcacataatacaatggtcatgaagaaaactctatttttagagcatgccatttcactaagctagatggttctggagaatgttagacctggagggaaccatttcctcccttatctcttttaacagcccccagatagctggctgatagatattattatcatcagttacagatggcaaaaccgatacttagaggattaacaagagtggatcaaatgcattagtcacaataacctgggttacctatgttgacaaacaatcctaaaatcccagtgcctcaacatacacgtgtgctcttgctcacatggtatccaacatgagttgcacaaaattctgctctacagccctgtttgggacctaggatggaggctctttcatcttacagccacagcatcaaagcacacggccttctcatctgggaggctggcgaacacgtgtctcctccgtctcacggtgagagaaaaggaggcgaccagcgatcaaagtgcttcacccacacagagcacaagtcatctccactcactgcctgttgggcagagttggccgcgtgactgtccccgagcagtggctgggaagtacacttctctttgtgggcagggcaggagagaggctggcgacgtccaccaagccagggcaggcagcagcagagctgggtccagagcccaagcatattagtctgttctcacactgttataaagaaatacctgagactaggcaatttataaagaaaagggatttaattggctcacagttctgcagactgtacaggaagcatggtgccagcatctgcttggcttctggagagtcctcaggaagcctacagacatggtggaaggcaaagggcaagcagacacctcacatggccagagcaggaggaagaaggagggggaaatgccatacactgttaaacaaccagacctcatgagaactcactcactatacagtaccaaatgctaaaccatgagaaaccagccctgtgatccaatcaccacccaccaggccccacctccaatattggggattacaattgagcatgagatttgggtggggacatagatccaaaccatatcaccaagtcctctggatttccttccaatgttcctattctgtggccagagtaaatggctcaagtgaaaattcaactaggctctaatccaaggaccttgggttggtcacttacctacctgagacaacgtttactcacttataaataggaataataaaagctaccccaaggcctattgtaaggattacatgagataatgaatattaagcacttactatagtatcttgcacataatcggccctcattaaattcttgttgctgttgagattgtagctgtaaagccaccgtggcctttgacgtcatgaacagtgtcggctaggtgatcgaaacatctgcctcttctctgcagatgtcagacgttgtcaaagtcaccctccaatgacccaactttacttctggcaccatcctgggactgacaatttgtcacgcagacacaaagaaaaaccttctcatggaccctccaaggagtctaggttcttattatgaaccctcgttttatctgttaattcagtacatatttatgaagcacctcttctgcatttattccctatgctgggaataaaattttagaaaaaacaaacataactcatggcatttatggtctttgtttttaattttttatcttattttatttttaattaattaatttttgtttttttagagaccaagtctcactctgtggcccaggctagagtatagtggtgcaagcatagctcaaggtagcctcaacctcctggactgggagcgatcctcccgcatcagcctcccaagtagccaggactacaggcgtgcaccaccaagcccggctcattttttttttttttttttcgagatggaatttcactcttgttgcccaggctggagtgcaatggcgtgatctcggctcactgcaacctccacctcccaggttcaagcaattctcctgcctcagcttcccgaatagctgggattacaggcgtgcaccaccacacccagctaattttgtatttttagcagagacggggtttcacatgttggtcaggttgctctcgaactcctgatttaaaaaattaaaaaaaaaattttgggtagatgggtcttgcttgttgcccaggctggtctcaaactcctgggctcaagtaatctgcccacctcagcctcccaaagtgttgggattagtgagccactgtgcctggcccactttagagtctttgaagaaacacaaagttaccttgcagtgtctttggaaataagtaggcatagaactcaccctttgccagtgaagtggactggcaaacactgctgtcacattttgtacccacgcagagcaccgcttcaggcacacttggtccaggcacacttggtccacgtgatctttgtaggtgaaccctgcacgctgagtcctgtggtggcccctggcccctgccaccctcccgggattgcacgctttcacagccacagcaagctcagccagcgttcactcttcttctagcccatcctacttaccacagtcacttaactccgaaaaatcctggcaccttctcactgcctgccaagttgtactccactggcacgtggatggtgtgactgcctttacacgtgactgggaatctaaaccccaccctgctcagcgccatggcggggtgtctgatgcagcagccgcagcaacagcttcccaagttgtcagagaagagccttaagcttccttgctacatgggactccaggagtcccctgggaagttcaggctagagcctgtttgttcaccttccccatgattccataaaccatttaatatcctgaaataaatccctttctgctctgctctgtaactgaaccctgaccaacaccgagactggaatcaggagaggtcgtaggactgagtcttaggaatcaaagtctcagctccctcggctgggtggttttcaaactcctgggtccaaatgtatacacataatttcaaagaaatcaatttccagatccttacctcctttatacactcttgcctcaaggcaagtgttcaaaagcacactttataaaagaaagcactagccctcagccttcccaaacttactccacgagggtttctaaaccctcaaatgccaaacacagggaaaggctgtcctgataaccaagcaaggccccaccaccctctgccgttccagctttccctgcctcatggtactttctgctaaggaaggggcctggcttttggcccatgttgggatgttctgaattcaggtatatgatagtgagctggtgagcagtgacaagcgctgagtaacgacctcatctctgacgtatctatctaccgtcaaaggaggcatcgttctgcaggaggagtcctgtggggacctgggtaaggaatgctaggtgatttgggggaagagaaagaggaaagaattgggagaattgactgatatttctataagaaaccttttccattcccatcagcttaattttgtgatcaggctttccagcaattatacctacgaagcacaaaaagtaggaaaagaatccaggcagaaccatctggcagtggtagattctggcggtggtagattcagtcatacatttttaaaataaggaaattccagctgggcgtagtagctcatgcctgtaatcccagcactttgggagcatctcctgaccccaggagtttgagaccagcctgggcaacatagggaggcctcatctctacaaaaaaactttaaaaattacctagacatggtggcacgcacctgtagtcccagctactcaggaggctgaggtgagaggatcgctcgagcccagaagtttgaggctgcagtgagccgagattacactactgcactccaggctgggcagcaaagtgagatcccgagagagagaaagacagagaaaattttaaaaactcatcatgtaagtgagacatttccaataaaatttcactctttgaattaacacaatttttttagcaacgtttataacatttatgttgttttcataagttgcatgataacaaccattgtaatcatgacccagaaaatactttaaattcctaaagtcttttggtggcaggaaataaagaacactttacaatttcgattcacatacatttttggttgcagaaaagggtgattaataaatgtttcaagcgtaagtataggatgaaccttgtaactgaaggaagccagtctcaaaggatagcatactgcatgattccatttacatataaatgcttggagtgagcaactccatagagacagaaagtgaattaatggtgacctagaactgggtggggttgagggagatggaacaattgccggggtgatagctgaggggtgtagggcttcttttgaaataaaaatgttctaacatatattgtggtcacgatgtaaaagtctgtgaatatattaaaagccattcaatagcacactttacttatgtgaattgtacaatagataaattatatcttaataaagctgttaaaaatatacattaggctgggcacagtggctcacacctataatcacagcactttgggaggctgagatgggaggactgtttgagaccaggagttcgagaccagcgtgggaaacacagtgagaccctctatctctacaaaagaaatgaaaaagcaattagctgggtgtggtggcacatgtctgtaaccccagctggtcaggaggctgaggtgggaggatggcttaagcccaggagttcaaagctgcagtgagctgtgattgcactacgtacttcagctggagcaacagagtgagaccctgtctaaaaatatatatatacatacacacacacacacacacacattacattatgaaggaatcctaagaagaaagtgaaatggaactttatatgttcaagagtaaaaagacaaattttcaaaattttgaaaaattttcgaaaattaaagagattgttcaaatatttcaaagtaaatgatgatggatagcatgtcattatagtgtttaggctccatggatacttttcacaaagttacatgacatttttatcataatgtccctattgacagtgcagcggtagattcaccccgtagctaacaaaccccaatcttcagaggctttcactagcacaggccacccccaaggcctagaaatggctcttctgggtcacatattttagtaaaatttacaagagtaagacctttcaaccttaaggattaatacctctttttacactcccctttgtctttcttctccccatgtgtggtggcattgcagtggccatgggtgcttttgaaagtccactaattgaattgggataaacaagttagttggggtttcagaggatgtatttactggtgcagtaacttccacatatgattatgttattgctagcccctctagtgtaaaaatgatttctagaaatactccctctgcccacggtcctgaggaccagaagtcatgctgtgatattcattttctgtggtgaccagcaccatgaatgtgtggacagtagagaagaaataaggttggaaatgtacacaaccagaagccagtctacgtaaaaacataatagagatgaatcaggcagatcttcaataaaaagatctctttcttaggttttgtcatgttagctttttttaaacttctaatgttctgtgatccatttcaactatttacacttatcaggaaaaggtgagatgtcaagttaaaaagtgggtgaaggtgaggtcaggagattgagatcatcctggccaacatggtgaaacgctgtctctactaaaaatacaaaaattagccaggagtggtggcgcatgcctgtagtcccagctacttgggaggctgaggcaggggaattgctcgaacccaggaggcagaggttgcagtaagccaagatcctgccactgcactctatcctggcaacaaagtgagactccatctcagaaaaaaaaaaagtgggtgaagggtacattatttttctaaattttttctaaattgtcttcaggagtgtatgcagaaaaaaatttgaagaccactaagttatctgacttggctgggcttgaagcacaggaggtctcattcacatcagaaggtgggaccctggtgctctgtagcaagaggtgacgcaacagttgcttgaactctgctttcagagttggggttataggagtcaagtgataagtggagttttggctcacgtgcttctcatgatgtaccttgtaggtctataaacttatcctgtagcatttcctgggtttctgaatgcagagcactctctatgcagaaactctatgaatgtatgcagaaacacccagctacagaatccccacactcatccctggcccaggaagtgaggactatttaggtaagaaggagcaagtggaaaaccctggaaccacttcttcctatcaagagttatcaaaagcaacatcacatccctgaatgaactgccaaagacttgaaagatgtagagatggccgggcgtggtggctcatgcctgtaatcccagcactttgggaggccgaggcaggtggatcatgaggtcaggagatcaagaccatcctggctaacacagtgaaaccctgtctctactaaaaatacaaaaaattagccgggcttggtggcgggcacttgtagttccagctactcgggaggctgaggaggagaatgggatgaacccaggaggcagagcttgtagtgagccaagatcacgccactgccccccagcctgggcgacagagtaagactctgtctaaaaaaaaaaacaaaacaaacaaacaaaaaagatgtagagatgacatttcctattacggccacttaactcccctgcttcacctatgtagaacacatatggctgttggaggataataagggttcactgttaatttagtcaatagatggcttccattgcagcttttgttctagacatagttttatgactgtagcaaatcaacacagcccccagcacccaatatgcagctatcagtttggtaaatgtgttgtctctttcccaataaaaccaccagaagcaatattattttacctggtagggacagcaatacacctccacagtcttaccctgtgtcaggactgtgccttctctcccaattacatctgcagggaactgtgttcatgtgaccattccagaggacaccacattagtaatacgattcttattgcacctagtgagcggaaacaagtacattatgtgcctacatgtgtgccaaagagtggaatgttgtgtcacaagaattcaagaacctgctctctcagcagaattgctgtgcccagtgatctggtgagcgatgggatatctctctgaatcttgcaccccctactgctaataaagagctatagcacttgatacgactctggattggggaaccaatatgtactgtgtgtgtgtgtgtgtgtgtgtgtgtgtgtatgtgggtgtgtgtgcagctctgacccatattctgaataacccattagtctgccagctttgagaaaatcccagggcaggccaggcatggtagctcatgcctataatcccagcactttgtgagggccaaggcagtaggatcgcttgaacccagaagttcaagacaagcctgggcaaaaaaaaaccatgactctgtctcaaaaaaaattttttttaattagctgggtgcatggtggcatacacctatagtcctagcttctcaggatgctgaggcaagaggatttcttgagccccaggagttgaaggctgcagtgaggtatggttgcaccactgtgccactccagcctgggtgacagagagagactgtcttaaaaaacaaaaacaaaaatttcaggccatgtgcaagcagctttaccaccacttggatccgtaacagatctaatagtgctggaagcatccatagccaatcaggatacgatggtgtcttattttaaaatgttaggtcttattttaaaaatgtaagactgaacataccactgccagaatatgccactgcagaacccctcaaggaaaatcataggcaaggctgtatgtccaatcacagagttggtggaagactacagcatctcaatacaagaaagaccacacagaaataggacctctcaggaaaaaagacttagattgctccactagataaagagcactaaccagcagaggcgccggatatggtgaaaggaaatacatgccaggataaagcaaggatgctcaacagtccaacctcagactcacaagccttggaaaaatgaggactgtaatagcattgttttccttcttttctctatcctagtcaatttatatttgtcctccccgtttcccttaacattttatattggatgtgttttatataagatgtgactttataattaggtctacgggttataagatatcaagggaggattatgactgaactcgaatgaacaccaggacagaatctagaacatagaacctccgtgacagcaggatgcagtggctcatggcacttccccattttgggaagaaagtgagttccatgttttactgcagggggaatcattgccatttggaagtgtacgtatgagaagagaggagtgcatgggagttgagtaaccaggtggaggactgtgatgggaactgcggattgagtcaccagcaaccatgctgacatcatcctagcatgccttcatgtattgtaggagctgggacgctggagtttttactatatttccccaactcccttgcatctagggttctacggtgatttagattccactattcaggagaattagtgcgagattaggaaggcatgtttctaatattctgctgacaagcaccattgtgaaggtacctggtttcgctctgaaagcgggaggagaggtctcagtgtctacttactggctttgtggagtattaaaaagcactgcccagggaacctatttgctggtgtgggttatgccaggggtgtcacggttttagagttggcagcactagcagtagctttcggcttgggggagtttcttgactatatcaattgcctgtcatggtggtttccgacccgggcaggtggcatggttctggggctagcagctgtggccaccgtttccctacgccactggtgtctgctgaattcgaggaggggcattagattctttagttcttcagggtggctttgggtcgtgttcttaaaagatcagtctggaatctgatccttcagtcttcccaaagagtctgtaaaccacttaatatcctgccgcaaatccctttctgcttaaactaactagattgaattccgttctctgcaagccagcctgggcgatagaccacagaaccctctgcgctgttcctctccctgtggattcttttttcccaaaccaagtcactacacgtggatctagaatatattatttattcttctcggccaaaccacaggctttcctttttacaaaatcaacttgaggtttaccctctgtgaagccgtttcaaatgaggtcgaacacgcttctcacttcctctgcaactgtgacccggacactttggtaacggcttactgggggctctaagaccattaatcggtttcagaaccggagtccctgtgcctcccttgggaagcacttttcacataaagtaaaaagttcggtgaccttagcagggcagacgaggccttaaacactgcagtttaaagctgggatggcaaaagacgtggccacctcttcctctagtctttccaactctctctcttccgcttccttctccctccccttctcacgacgcccggccattgcctctgaagctggatggtggctgggcacgccccgccaggacattcgttcaggggaggacgcccgaatctgtcagcaaagcatccctacctgcaggaggcctggagctcagcgcagccccccacgcctgcccgggtccccgaaacgcggctgctccagcgccgggggcgcacaccgccccctggaggcgggccctggccctgagccccgcgctcccgccggcgccgactccacttcgcggctgcgcactttgcacttggcgcccagccctggcagatcgggacgcaaacacacacgcacccacggtttacaagaaagactcttcaaaggaaaactaaatggggggtggtcgttctaataaatataacgtgcaaggctcaactatgtgagtaatcattagaaaatgcagaaaatgtgtttctctttatctgccattcccattccaattcactgcttttttaaaacccatttatgcccttctcagaagcctcctccgtgagcaatatcatccaacttcgacagcagcgtcaaccactttagaaaatgaaaagagataataattggcaattaacatcatctacgttttaatacattttacaaaattaaaataaaaatgcaaggcagccgggcgcggtggctcatgcctgtagtcccagaactttgggaggctgaggcgggcggatcgcctggggtcaggagttcgagaccagcctgaccagcgtggagaaaccccgtctttactaaaaatacaaaattggccgcgtgtggtggcgcatgcctgtaatcccagctactcgggaggctgaggcaagagaatcgcttgaaccagggaggcggaggttgcagtgagctgagatagtgccattgcactccagcctgggcaacaggagtgaaaaagtccgtctcaaaaaaaaaaaaaaaaaaaatgcaaggcaaactagttggtcaattgtcatttgtgtcatttgtgtctatgtgtcatttccaaaactcaatattctttgaataataaaaccaacgctttctctaacaacttgtgtgacatgtccccgaatcagcatttaagatttcgaactaaaacgtaatccgaagagattccttaatgggaaggttggcaaacttgccaaggacatagacctgttcctgttcttacttcagctgggctttcttttaatgagtggattgcattatacacttttttgttatgttttgcattcacatatgcataaaatgcttttcactaggaatcaaccagatattaaaagaacgtaaacatattctggccataaatgataaaagctgcatttgtagacatgctcagcatatctattattggccactgggtcaatgttgagaattcccaaaagaagtccccacctacatggcaaagctgatggagcctacaaaccgggaacatcgtaagtattaaccatcctgaagtatattctctcttacaagacgttggaaaaacaaacgatgggcatctagaatgacaatagcttcctactcctcctgcagttaagaaagacaaacgctgagaaccgttggaaaggcaaacaaaattgtatgcgaaggtcacattcagccagaagaggtgctcccaattacgtttacttaaagggagaggtccagacacatttttggtatcctcctttaaaaaatgttgcagtccttaaaatttggtaagcttctgtgactaaaagtatctttactgctacctaaagtatgtacatatgtgcatgtttaaaatcccttcttttcatcattttcagagacactatttcaatttcctgccctgaaacatgtggaatttcattttaaacaaaagtctcctttcagggacttgcaggcttggtgtggctgattggtgctggaggccgctcaggacgcagtttctcacctcgtcacacatgacctcagacatagcaagtgccgtgcagagtgagctcttgctcttcaactcagatgataaccagaagcctgggccgtgtcttccacattctctatagctgctgcatggtgcctgtattatcttttttttgtttgattgtttgtttgtttgtttgtttgtttgtttgtggcagggtctcactctgttgcccaggccggagtgcagtggcatcaatcctagctcactgcagcctcaacctcctgatctcaagctatcctcttgccttggcctcccaaagtcctggaattacaggcatgagccaccatacccagcccatattatcgttataatacacacagggatcccaggaatgaataagagctagtacatgtagagcatattctatgtgccaggaatgtattattacatggaatctctcacagctttgtggaaggtagggactgaaattgcctccattttccacctgagtacactgaggcttatagatgatagttactgggcccgaggtaaaggagcccaggggtccaacccggcaccattatgcttggcattatattgttttcttttaataactgcctttaattaattaatcaggcacattattcttcccttagacctgtatgtaatcgacagtcagtaaatgagaaataagaatgatggttgcaaagccaaataacaccaatgtgctcagataaaagagtttttaaaatttagttcatactgaagacctttctacagtgagttattcccagagttttacaattaacttatcaattgagactataggccaggtgcggtggctcacctgtaatcccagcactttgggaggcagaggtgggcggagcacttgaggtcaggagttcgagaccagcttggccaacatgggaaaccctgtatctactaaaaatacaaaaattagccaggtgtgatggtgcacgcccgtaatcccaactactcaggaggctgaggcaggagaattgcttgaacccaggaggcagaggttgcaatgagccaagatcacaccactgcactccagcctgggcgacagagcaagactctgtctcaaaaacaacaacaaaaaaaattaaaattaaaattaatgaatataaaaaataaatttagactatatttcaacttaactcataatgaaacatttcagcatttatttatgtcaggttaaattaagtctaaatggatcatgaagtctttatgcttcccctgaaaatgaaaaacgagggctacataatttttacatgtgaaagatttaagctttacaatgccatataacaaaaagatttcccattccaagacagtgttcccaaggaaattaagctttcttttctccaccatgatagtttactcaaacaaacaaacaaacaaataaactaaactttgaaagaataataagtttaagagagtgggagaatgaatgagttcaggcttttatgtaattgtcattccaccaagggggttcaggcagcgtcaagacagttagactaggtagtctttattgcctctgtttgggtggtttggatctgtgtccccgcccaaatctcatgttgaaatgtgatcctcattgttggaggtggggcctgagtcacgggagaggatatctcatgcgtggtttagcaccattcctttggtgctattctcgtgacggtgagtgagttctctcaagatccggtcgtttaaaagtgcgtgtggcacctccccgccccctgctcctgctcccaccgtgtgagacatctgctccctctttaccttctaccatgactggaagcttcctgaggcctccccagaagcagatacctgtgtatcttcctctgcagcctgcagaaccatgagccaattaaacatcttttctttattcatagcaatgcaagaacagcctgatatacctctccaatttttctagctttttattgaaaaaaaaatatatatatatttgagatagagtcttgcttttttgcccaggctgaagtgcagtgatgtgattttggctcaccacaacctccacctcccaggttcaaggagttcttcttcctctgcctccctagtagctggaattacagatgcaagccaccacacccagctaatttttgtatttgtagtagagatggggtttcaccatgttgctcaggctggtttcaaactcctgacctcaggtgatccgcccacctgggcctcccgaagtgctgggattacaggtgtgagccaccatgcccagctgaaaaatatataaaaagtagagagaatattataataattcctcccatagccttcacataattcaacagttaccaatacattgtcatgtattatttatatatacgtttatctaattcctccctccctcagttaccttgaagtaaaacaagatatatcatttcatgcaaaatatttcagtaggtatttctaaaatataatgactctttaaaaaaaagcacaactatattataattatcacacctaaaacaaagtaacagcaatttattaacatcatcaaatttcctgtcagtgtttaaatcaatcatttcatcatttctttttatgttctgttcaaatcaggccaaaagcccatgcataatagttggcttacatgtttcttagcacattttaaatctatagtttctctctctttctttttccttgtaatgcatttgttgaagaaatcaggtcatttgtcctacagtgttttctatgatctgaatttcctgattgcatgctggtgatttcattgaaaagtcccctgtactttgtgtaagctgataattgtatctaggtccttcataagattcactgtaacctcttctgaggttgttcagctttatgatttgctcttccccttgaaaaggtgtctcagttatgccatttctaactactatgaataaggatgtcttttttctgtgcaatttcttagtagggaggatacacaaagtcttgcatggtctaacggaaagagcacaaaatttacagcctaacagatttctgtggaagacccactgcctgtgaactatgtgatcttgggcaagctatttataccataattatatcatttattaaataggaacaataatgactgacttatgaagttattgtaaagagtggcaagagaagcacatataaagcatcaatcacatcatacttttttatatgaagtacagaaatctatttcttacaattctggaggctggaaagtcctaagtcatgaggcttgcttctggcaaggggcttcttgctgtgttgtcccatggtgtgaaagatggaagggaaagagagtgcatgtgtgcatgagaaagataggggagaaagaaatgaaaatatgaaacttttcattcatttaagcatgaaatagtgatgggcatagaactaaaacatcactagggcccaattattaaacctattactcacatgatgttgacattaatccattcacgagtgcagaactctcatgacccaatcacctcttgaaggtcctgctgttgcattgaagatttagtttccaacacaggaactttggggaacacattcaaaccacagtacctgccatatcttgctgtaacttaacctgagttctcagttctgcatgttcatgtgcatacatcatctttttatccacacagtcatgctcttcctgcacccatattgctactttcctttcctacacacaatttgagaactatatttttaaaatcaccacagataggaagattgtttcctgaaaacagtcttttttcaaatgacatccccagaatttggaccatttttgaccctaacaagcctgcccctgatttgaatgacatggcttctgagtgcagtgcttgtcctggaagctggtcttgtcctgggaatagcatgtcagtaggcagagcctcaggtgggcaggatggcaagctgtaagacaggaggcaggagagggcgtggggcaggcatgggatggggttcaggcatgagcagctcaagagccggggcagatggagtcaaggcagaaagggcttgctggaaattgggagccaggcattgaatgaacagtcagggctgagggtttttgtagctgggttgaatccagaaggcgagggcctggaaccaaggcagctaagctcaatgctgtattgagagcccaggcaatgtaatatctcaggacccaggagagagaccttctggggaccttgcatgagactgtaaagccagactgtctgggtttaaatcttggctctgccccttatagctgagtatctgggagcaaattatttcacttctctgtgcctcagtttccccatctgtaaattggatgactataatagtaccttcctcagggggctgtttaagtgagtcaaaacaggtaaagttcttagaagtggtagttggcccatagtgccatcagattcagctattttcttttagaagttaaccattagaccactttgcatatggaggattcttctccaagggtatgtcacaggccctgagcagcctctgatgctgctgaaaggggagcttatcttatctccaacccaggggagtcttggccttggttagcaagataaatttttagtaatgtgtgttattattctaccattatggagatatcaacaatggctctgttctcttcctgggatgttcctctccaacctgtcctcctaactccatgcggcttttcaacatttcagtcaaccattacctcttccaacaggtcctcccaagcccccaggcggagctgccagcagctgccctgtcttttgtgttatcagcatttatcaaaccactcttagtttgcttgtttctcttcctcactaaaatgtgagctattatactcacagataatgcctctgtgttttttatttaaatgttgttttcatgttaaaatatttcatgcagaaaaaaatatataactgacacttaagtacccaccaccaaaattaagcaaaaattgatagtttgtctatttggcttcatctttcttctttaaaaaaagtaatgttaccgaccagataaagcctcacccccatacttccctcatgctttccttttcagaggaaatgcccatcttacagcatgtttttgtaattttatttcacacatacaaattcctgatcaagatatactattgcatgtattggatctttaaggtctatgtaaatggtatcaggctgggtggatactttagctactttcttttttttagaactgatgtttttgagatttattcatggtataatatgtaccttttttcatgattttaacagctgtattatattcccttctgtgaataagttaccatttatttagccattttcctactcagggaaagttgaattggttccttttgctgcttcaaacagtgctccaacggacaactgtgagcatccatctttgtgcacacatgtctgtgagctaatacttgtcagcgtttctctgggggaagagatgactccacattgcttactcccaacacagtgcctgaaatagcaaatgaccagtcaatgtttgttgaaggaagaaatgaaaatatgaaacttttcattcatttaagcatgaaatactgatgggcataaaactaaaacattgctagggcccaattattaaagatataattatagctatgcaggagcatttacaaatgtgaatgggctgctatttcttggcttaagccacagaaattcctgttcaaatgaattatgggggaaatgaagatataatgccagagaaaagcagtcactccctgggttgactttagctatgtatccagttcagttctgaagacagagcttcaattgttattgcagatgaaactgaagggccaagtcaaccacagggctctgatttatggcactatgagttgcaaagggatctaataccttgcattacaatgaggccttattcgctttcatgcgaatgatcagggactggatcacacataaacagatacactttgccttaagaggctacttggggcatatgatgccacatgttggaacaacattgagatcactgagctgcttaagctaaacattattcagcttctgatgctgctttagaaactaaattataaaacctcataactttgttgttttccacctttcccaggtgagaatctcccacatgcaaaggtagtgtcaaaaatccatccatcccaaaccatgggaatacctatgctttccttaactaaatcattagcaatagagatgagattatacttataccaattagatccactccataaagctaagtagagaattagctttcccataagtcatatgaaagcgaataccacatgggaaggtagatgcctgaactttcctcttaagaggaaagaagcaagggataaatcctgagaagacaatcaactgtgtcaactatagtccacccctttagcttcctgatatccgtactcttcttgctcatgcctacatgaaatgtactcaatgaaactccagttctctgtgtaatgtacagtcatcttcatcaagtggtttctcatgttcaaacaacacacgaaacccaagagagttgtaattaaaaatcaaaaaatttgagtacaatataggagatcaggaaaggcagcatttctgctgcaatttgaaaagctaaattggaatgatcatgtttctaaaggcactggagagacgcaaaagcaacaataattagatgaaataaatttcaaataagaaagaagtcctttcaaggtaatccaagggtcactggccatttttttttttcctgggagcatttgccaactctgaccccaaaaagaggtgctaggctcaggtaaggagatgccataagagcttttggcagttgcatcaaaccagcccaaagaattggaagtgagagagggccaaatgcaaagctggctttcctcattagtcattggctgaatgcaggggtggtgtagaagactgcggagtctggccagaaagacagagtaaaatcttccacagtctcagagtgctgtgaagataatgtcctgctagagagaaggagcctagaataaggaaacaacaggtcttcattacaacatgtttgtcagattttgaagctacatctagcagcagagggtaaaaaactaagctaaaaccttggaatgacaaaaagtctaaggctgaagagagaaagaatagctaggctcaattcaaagcctaaaaggaccacagccaaggaatagggattaaccagagctgaaccaagttttactaaaactgcaacctagtcccagcccagctcagatccccttttcatttaggtaatcataggatgctacacagaagaaaatgaagactggccaggtgcggtggctcatgcctgtaatcccagcactttgggaggccgaggcaggcggatcacgaagtcaggagatcgagaccatcctggctaacacggtgaaaccctgtctctactaaaaatacaaaaaaaaaaaaaaattagccaggcgtggtggcgggcacctatagtcccagctactcagaggctgaggcaggagaatggcatgaacccgggaggtggagcttgcagtgagccaagatcatgccactgcactccagcctgggcgacagagtgagactctatctcaaaagaaaaaagaaaaagaaaaaaagaaaagaaaagaaaatgaagaccattcctgattttaaaaaatcatatggagctggtgtagttattttgtgtgtaagcacacaacaacaaagagacaggaaggtatgatcaaaaatcaagacaaaaatgaacaatagaggcaaacttaccaaaaatacagggtttggaattagaagggaaggatattcaaatacataacattatattaaagaaagtagaggaaaagatgaacagaaatcaacagaaagtagaggaaaagatgaatggaaatcaacagagaattggaatctatacaaaacaatcaagtcaacatgataaaactgaaaaactatctttaattaagaatcttaatttcttaatttcaggtgggtatcataaaaggctggaaacaaaagaagtcaagttagagacaaatagaaaatatatacactgaagcacagagaagaaaaagaaggcatgttgaggatataattttaaaacacaatatatacgtaaccaaagtcctagaagaggaagagcaagagaccagagaagaagcaatacatggggcagaagatataatggccaagaatattccaaaatttatgagaagacatcaacgcacagattttaaaatctcagaaacccaaagcaggataaatcaaaggaaacacgcctaccatcctatagtcaaactactgaaaaacctgagaaaagtgacaatcacaggaagagaagacacattaccttcaaaggagcagcaataaaactgatggctgacttttcaacagaaactggaaaccaaaagacaatagaatgacatctttacagtgctgaaggaaacggccaaccttgaattttatacccagtaaaaatgttatttgcaaattaaggtgaaatatggttggacatgatggctcatgccttgtaatctgagcactttgagaggctgaggcaggaggattgcttgaggctaggagtttgagaccagcctgggcaatactccatctctccaaaaatagaacataaacttagcagggcatggtggcatgtgcctgtagtcccaactactcaagaggctgaggtggaagatcacttgagtcctggagttcaaggttacagtgagctatgatcccaccactgcactgcagcctgggtgacatgagcaagaccctgactaaggaaaaaaaaaaaagaaaagaaaagaaaagaaagaaaataaattaaaagtgaaataaagacactttactgaaaaacaaaagctgagagaatttatcatcagcacactggcagtataaaaaatgctaaaggaagttcttgggttgaagaaaaattgtcacagacagaaacataaaactgcagcagagaattgaagagcactagaaaggagaagaactatctgctcaaggccagctttgaaggaatggatcctggtgcataaggcacaagctctgtaataagttttgaattcaggaagtgtgggtccttcaattttgtttttctttttcaagaacgctttggttatcctggatcctttgaatttccatatgaatttgagaaccagtttgtcaatttctacaaacaagtcagctgggattaggatacaaatcactttgagttggtaggtcagtttgggaggaggtattagcattttaaaatattaaatcttctgatccataaacacaggatgtcattccatttattcaggtctttttcaacaacattttgtagtttcaatatatgtattttatttcttttgtaagtttattcctaagcatttcattcttttgcagctatttagatttcagaaagtgtgagtcctggcctggctctgtggctcacacctgtaatcccagcactttgggaggccgagacgagtgcatcacctgaggtcaggagtttgagaccagcctggccaatatttctactaaaaatacaaaaaatttctactaaaaatatacaaaattagccaggcacagtggcttacacctgtaatcccagcactttgagaagccaaggcaggcagatcacctgaggtcaggagttcgagaccagcctgaccaacatggagaaacctcatctctactaaaaatacaaaattagctgggcatggtggcacaggcctgtaatcccagctgctcggaaggctgaggcaggagaatcacttgaacccgggaggcggaggttgcggtgagtcaggatcgtgccattacactccaacctgggcgacaagagcaagactccatctcaaaagaaaaaagaaaagaaagtgtgaatccttctagtttgttcttctttgtaactggaattgtttcttttcttgctccttatttttatgtaccagttgtatgtttttagatttgagattaccatagacttgcaaataatatcttataatccattattttaaactgatgacaacaccgattgcataaacaaacaagtaaaaagaaaactaataaaaactctatacttcaactttgtctcccttctttttacctttttctttttgtgagacagtatctcactctgttgccctggctggagtgcagacaatcacagctcactgcagctttgacttcctgggctcaagtgattctcgcacctcagcctcccgagtagctgagactacaggcacacatcaccacacccagctaaatttttttataattttttgtagaaacagagtttcaccatgttgcccaggctggtcttgaactcctgggctcaagcgatttgcctgctttggcctcccaaagtgctgtgattatagacgtaagccactacacccagactttttaactttttgttgtttttatttatatcttattgcactatgtcttgaaaagttgatgtagttattttttctgatcagtttatcttatcatctttctacttaaaatatgagtaatttacacaccacaattacagttttataatattctgtgtttttctgtgtgctattactagtgagttctgtaccttcagatgacatcttattgctcattaatgttattttctttcagattaaagaactccctttggcattatttgtaggacagatctggtattgagatccctctgcttttgtttgtctgggaaagcctttacttctccttcgtgtctgaaagatattttcactggatatactaatctagggtaaaagtttttttccttaggcactttcaatatgttatgtcactctctcctggcctgtaaggttttcagtgaaaagtctgctgccagatgtattggagctccattgtatgttgtttgtttcttatcccttgctgctttttggaaactttctttatcctttaccttcatgattgaattattagatgccttgaggtcgtcttcttcgggttaaatctgctaggtggtctagaaccttcttttacttggatattaatatctttctctaggtttggaaagtcctccgttattatcactttgaataaacgttctgctcctgtctctctaccacctcttcaaggccaacaacacttggatttgcccttttaaggctatttcctatttttttttcctttcttttatgatgtctttgtttggttttggtatctgggtaatactgacctcaaagaataccttggtaactgttccctcctattctttttctttaaaaaaaaaaataatttgtattaactctattttaaatgtttggagaattaaaaagtgaaggcttttgggcctaggccattttcgtgggaagttttcaaactgctaattcaacctcttcattttcacgggtctatttaggttatctatttcttcttgattcagttttagtagtttgagtttcctagaaacatgttcatttcgtctaagttttttgaatttattagcatataaatgtttatagtattcccttataatccttcttatgtctgtgaggtcaatagaattgtcatcttttttattcctgatgttagtaatttgagtcttctttttcttggtcagtctagctaattgtcaattttgatgatcttttcacagaaacaacttttggttttgttcactttctctgttgtttttcttctggttcgttaatagccgacctaatctctattactttcttccttttgcttgttttagattgaatttactctccttttttcagtgtcttaaggtggaaaactaggctagtgatttaaaatctttcttcttttttaacagaggtattaacagctattgaataccctctagacaccgcgttagctgcatcccgtaagtttcaacatcttatatcttcattttcactcgcctctaagtgttttgtaatttcccctgtgatttctttattgatgtattggttacatagggatgtgtttttaatttccacatatttgtaaatttcccaaactttctgttattgagttctagtttcattctattgtagtcagagaacatactttataggattttagttttttaaaaaaatttcttgaggcttgttttactgcctggcatatggtctcttatggcaaatgttccatgtgcattcgagaagaacgtgtatcttgctcttgggtgaaatgtgtatttcaaagacctagttgatttatggtgttgctcaagtcttctacttccttgcttcttctacttccttctgctttgttgttctagccattactgaaagtgggatattgaagtctccaactattattgttgaattgtctatttttcctttcatttctgtttttgcttcatgtttttaggaggctctattattaggtacatatgtgtttataattattacatttttctgataaatttgatcaatttaaatgtttgtatttgcctttagtaacattttttgttttacagtgtctgatatcagcagagctgccacttctttcttatggttactgttcgcatgataaatgttttttcatctttttactttttacttatttgtattgttagttctaaagtgtgtctcctacacacagcttatagttaggtcttatttttttattcagtctgaaaatatcaacctttttgttggattgtttaatccatttacatttaatgttattttttaaagttggacaaatgggtgcagcacaccaacatggcgcatgtatacatatgtaacaaacctgcacgtggtgcacatgtaccctagaacttaaagtataattaaaaaaacaaataaataaataaagttggacttatgtctgtcattttgctctttgttttctacatatcacatatctcatgtcttttttgttcatctatttctcctttactgcttcttttgcattaagtaaatattttcttgtgtaatattttaattgctttaataatttttcactgtatttctgagttattttcttagtggcttttacatggtttatcatatacaccttaacttagaatcaacttcagatttatagtaacttaatttcaataagatatagaagtgttgcttctacatagctctatacctttccatccttttttatgctattatatatatatatataacaataatagcacatatacatatatatatataacaaacccaatggtacagttatacttattgcattacataattttatgtcttttaaagaagagaagaaaggagaacaagtttataattatgaagtttgttacattaaccttattatttaccatttatagccctcttcatttgttcctgtacattccagttgccatctggtgttattgtcttacacaaatacagctttgttcacattcacatccttgatactgttcttgtcaaatatattacatttctatatgttttggctcaacaatacaattaaatacatattgttttataccactgcttttcaaataggttaagagaagaaagaataaatatccatttattttataattacatccacgtcttttataattacatgcttacctttactgatgccctttgttttttatgtaaactcaaaattccatctggggtcacttgtcaacctgaaaatttttcccttgagtattcttgtgagataggtcttccagcaataaaatctcttagtttttgtttatctgggaatatttttattataccctcttttttgaaggattgattttctggatataagattcttggttggattttttcttttagcactttgaatatggaatcccattgccttctggatggcactatttctgatgagaagtcaactgttaatgttttggagggttaacatttttaatatgatgtgtctgggcatggatttgtttgcattaatcctacttggagtttgttggggttcttggatatgtatattaattttttatcaaatgtgatacatttcagccattacttattcaaatattttttctgctctttcctctccctcttcttcttatataatcatcatgtatatctgtacactttatggtgtcccacatttctttgaggttttgttcatttttcttcattttttatctctctgttttttatttcacagtctctattaatatatcttcatgtttgctgattctttttttctggcagttcaaaccttctgttgaactcctctagtgaattttctactttggttattatacttttcaactccagaatttccattcgaatctttttaatcatttctgtctctttattgatattctctatttaatgagacagcatcatcatctcttctcttacttccttaagcatggttgccttcagttttttggatatatttgtgatgattatctttgttaagtcttgtgtttgggccctctgacagtttgtgttatctgcttttacctcccatgtatgagtttccctgtcatgtttatttgtgtgcctcatgattttttgtcgaaaatttgacattttagataatatactatagccactcagaatactgattttccctgaagcccctgtctctggagattgttgttctttgttgtttatctgtttagtaatttgactggcccatctgggtgaagtccacttttcctgcagtgtaaaggcactgatgttgctccttagaaagcacagccttgagcacgtacatagtcatcatgggataacagtggttttagcaggattctctttcactgtttgtttacctgatctgtctgtaagctgtctatctctatgtctcttgatatctcatccagctattagactctactaattgcctgttggttgctctattgtttgtgatagtgtcctggtgcatacattgctccacggtctcagtcaatcaagttcaagcccctttgcaaggatagtttttgagctagctttgagattttttgtttttgtttttgagcctcaagaaggcccttcttagatgtctctttccatggttatttttttataatctagctgatccacagtttcacttgttgctctcatggagcttccagcctcttcttcagtgcttaccaccagaatgtctattgtttttgagagctcccttaggcgtgaacttcccccacattctgttctaaataaagtcagctcatttacggaaagcttcagaggtctctgttcttaaggcccactttctgccaggcaaaaatctctccccactgctgagcaacaccccatctttaagagcagcatcctgggcagggaaagtagcctctctgatctttttgccttgcccctcccagcatggaacttctacccaatgagtgagctgggcaaaagcaactggggtcacagtattcctagcctgccacatctggggtagagcttccactctatgaaaaagagctgaatggaggaagggagcccctgacctcagccacactcacatggaatttaacctattcaacacagaacttgggaagatgtgaaatgctggtggcctgccccttctgaataggtacagtagcccctgactgagagctggtgggagaggaagccccatgtcttgagcacacacacctggagtgtgactgccatcatgatgagctggtggggagagcaggttgcggcttaagttccacagacccttgctcttcttacagagatttaatagagtttcttgaaaaaactatttgttaattcatttaatgctcttaagacaacatccacaagttttaaatggttgagctttaacaaaataattctaattagctatggttgtttggctagggaacatgtccgtggaactcctcacaccaccattccagaagtgagttcatcatatgtgcttatttacgcaaaatcatgcttaggggagaatatttaagaaattgttaatggaaggatggagggggagataaaattactttcatttaaaaccaatctgtattggaatatgtttttccttttaaaaataaaaaaataagcaatttcaaagctagatcataaaatatcatgcagattctgccctgtctgatgaagacttgctgtaggaatcctcagctctcttgtgagatgtctggctatcctgagcctgccatactataaggaagcctaagccacatggagaaacccagctaagccaagccatcaagtcatctcagcccacatgccagccccaaacatttaaatcgtccccagctgttcagctaaggaccagacattgtgcaacagatacaagctgtccttgccaagtcccaaccaaaatctgacccacagaacctgtcagacaaagagaatgactgttttaggccctgcagtttggggtggcttattacacagcaaaagataactggaactgggggtaacattcagaatgtgttccagtgatagttctgttctcagatttgcttccttctcttatacctcctgatcagcaggtggaaattaaaagagcattgtgagatgctggagagatccagaaccacttgccatcaacggctggggaatcctagccagtgagctcgcaggagttagagcagctttttcagttagagcagttagagcctctggccaggcccctcgattccgtacagatgccagttcctacagttgtcgatgctaaaaaggaagggatacaatgaggtagggggttgaagtgttgcacaaggtagagtttacttggttgcattcaccacagtccagagatctggtgccttctcttattcagggtggtcagtactgaagccaaattataatagggaagttgtttggtgagcaaagaatcaaagggaggggtattcacaaaaatgcaaatattgaacggggattagattcaaataggctggcagatccagctgcacaaagaggcacaggtgagcagagcaggagcaggcatccgtgtgctgccctttctcatggtctgctttctgattgaggatcatccgcagatgtgttcatagcctccccaggttcacagggcttcccgtcaccaattgtcatgtggaatgcaggtacagtattgccagatggtctgacttttgaaacagaagctagagatccagactttaaatattcctgatttttaaaataatgattcagaatgtttggaaacactatgtggatccaacaaaacacatttgcagaatgaatccaacctgtgagctgccaggttgcaacctctgggtgaaaagtcgggtctcctcatcatgtgtgggcatggccaggcctgctcacggaaagcccctagcaggcatcagagggaaactcctgggcccagagaaagggaggcagcccagcaatcactctgcataaacctcagcgcccctcacgccagccttgggggacatgcctcaccaaggagaagcgttgccttctatggttgtctctgctgtttctggggctgatgtggctagaaatataaaaggcagtgagcacacggttcaacattcccccacactggcagtcgacccacgccgtgcagcctgccaagagcagggagcttgggcacagagctgagaaactcacagggacaaggggagccacagctgccatccacaccccatctcctttatattctttgcactgctgtttcctacttcaagggcaaacaacttaaagcaagattgcaccaactaggcccagttcttgcccatctgcaatcctgggccagacttgacggcctggaacaggaacgggcaactttgaataatcctcactcagcgatttctctcccaccccaggtttcccagcttgcacaattgcccccaaggcatccactctcagctgaatgagctccaggccttgcacccacaatgggccccatccggaccagcagccttggcaaatgacccaggcggtatcctttccccatataatgacctgatggccacagctctgattttccagaacagtttaaattatgaatgatgagttcctttatcagatcatgatcagattttttggctctgaaaatttcttcgatggccctagaaaggcagttcccacaggggaaaggcacggtccctgactcaacctttgtgaaccctgtgtccctgagctccacgctcaccctcctggagtctcagctttctcatctgtgaaaaaaacagcagagccttctcagccttgcatcttctaagtgtctggagaatgcagggagggctgccttggcgtttgctcactaggtctctccttcccgcgccttgaagtgttaatcactgtcccagctagcaactcaataaacctgagctcccttcctcctaatcccccgcactgattttatcttcacacaacccccctccaccccccaacaagggcagagttctgttaaggccctgggcttgccctgtggtgtcagggccatgaccacccacccacacaggagcctggagccttcccccagtgcctgccctggccaggcctcctctgtaggtgtgggtaggcctgggaaccccggccctgaacagcctcagagggcttcggtgttggagtgagctgggaccataaaactcacaagctccaagttcccaggctctttgtcagcccacagagccctgtcacctcacagctaatgcaggcagtggccagcgatcccctgggagcggtttaaaagcgcaagtctggtttttagaaaaagcagctgaggttatagtaagcagctgacagttcccccacagcttcaagctgtaagcagcaaagtgaaagaggggaaggagcgtcctgagtggcgttctcataggagagtcatgtccacctgggaagcagggagatttgggcaatcatcccactcttccaggaagacagccaaaacccccactgccccacagcctccccacgccagaagccagccccactccagcctcagcccaggcgtaacactgactcccccacgggccacagaggctgtggtctcagggcttcagactgcatttgctcctgttcacaaagaaaaggattccagtaacaccagaagttctctctccaaaaccggcggacccggaagccctattttgaaacgtttcttcacacccagacctcagccaaagcaggaaagacggcactcagtggggaatgaaaggctggccttgttctgatgggaaagcagcactgtggctccccacaatccgaaaatgcagttttgatgattaaagtgcacatttcaacaggctttgtgacagacactcctggcggcaaggtctgggaaaaggaggctgccagtaaaccccctgctagccttgttttctctgaacttctggccccagtgggaaaggaaattaaaacttcatttttaatttttagttatgacccattgtgctgcagggtcatggccgggggtttagaacacctagcctcgaaaagggtctgagacactgtctttgaggtcagttcacaagcccagaagcacccgaggcacagctggcggggtcggggggcgcagaatgtttgcataggacagagacctctgcagagatcccataaacatccctgagaccgggaatgcacttacatttgcaattgacctaatggtgcctacaggactttctcacttgttctcacaacccagcttgatggacttcggctctcaaattctatcatgctattttactacgtatttcttagaggtcagtttatgaaataacatgcagaacaactagtcctggcaataatgaaagaggaggagttggaaaaagacacagccagggcccacactccagcattgctcagtggataacctaacttaatgggtacgttaactcccaggaagttaagacaaagctctttaggaaagaccacctagtgtctcttcttgacttcacggaggaagtctagaaaatactagtgaccatgggaaagcaaacagacccaaaatggtcgtgtttggccttcagggaattttgttggttctttgaaaaaggtgaattagtcgccaccattgaaagtcccggtttcctgctcctctccgtggattggaaaatgaggcttcgtgaggcccaccgtcccgtgtggcatcatctgtggggctgacagcacctgccccctaggtcggttgtcccactcccactcagcacagccgccacgccaggctgctgggagtgtctgagcttcagaaccctgttctggagtgaatggaacatactcgacacccttggagccaagcaactgagatggaccattttcaatagacttcagggccctatcagaaaatgccatcaaatgattctgttatgtgtaacaaatacatagacagagagcaaatggaaagggcccggccagggggcccccagcctagacagcctccacacgccccctcagaggtaccacttcccaccactgctttggcctgaataccccctcactcagccactccttctggctgcggcccctccagcttctgctagcaaatgtcccatagagggtcaagggacactcctccttctcccaggacactggctgcccagatctccccctgcctgcagccggggacctgaattgggagaggtgagatattagcatcccctggtccatttcaggcttcaggagccccgcaagctgcaggccaactttggaagacatttgtggtgtggagacaaagccgagccccggctggtcatccccacccgtcggggcagctgtgcctgccagccctgcctgcccctgccatgcctgccacactcctacctggcccaggctggaaggcatccaggacagatcaaaagtcccaaatgaggatgaatatctgaaaatgggcactgaaagggggcggaatacacgcacactaaactgcatgtagctgtcaaagcatttggaaacaacagcggcctcaaagctcaatgttatatttccacactgtgatcattaaacggtaagaaacaaccgtcccaagaaggacgaagagaaccttggatgccatctgtgtcaagctgtccctggaaagaaggaacactgagtcctgagggcaaaggcgagaataaacaccgcgcaccctcagccggggccccgtgttcctccgtgatgttccacttttggaaaggaagctggcacttgggtatgcaacaacctgccttcaaacgccagtggcgggatttgtttttacatttacattttattattttgtgtagaaaatcctgcttttgaacacctcaaaaatgaaactgcaaggaaaagccagtgagacgcaggaggggtgagagggactgcgcggcagccggcgctctcggggagaaggcctgccgctctgctttctgcatttctttgctggaatttattgctcatccaagcacaactgataattgagtgggttactccaccagctctccaaaaacaataatgccacatgtccaaaattccacggttgcaagaaccttgtatccaacaaattataaagagtccctctatggtaaccatctcataccaaataaatcctcctgttgtcacagactggccacggttctttccatttcttacgtgggctttgaacagaccataaattcattgatgaattagtcagattttgaccacagtcctttccacagaggctaggctaggtatgatgaattcaagcctagtggccacgcacaggaaaaatcatacaaattccctcctcataaattgaggatgaggcattgtggggaaacgcccggtgagttctcgcttatatcagatttattgatcatttattagctgtttgaacaaatggtccggaaaacatcctgcatgggttctggtccagtgcaccagcagctaaccacgactgtggtcaggtcacatgtgtcccctctgatgctcagatgccccggctctaaaattagtccctaataggcttctggcctgaaactccatgatcttaccttgtaatttgcaagaaaaaaatcaggtaatatcttggaagaaatgagcaagaaagaccgaagaggaactgatgatgggaataacattgaccctatctcccctaacaggagggaaaagggatccctccagattctgaaatcagagttcatcctttctgatttctagagagattctgcagcctgagtttagcaccccagtaggcaaagagacctgggctgagatgcaccccattccccaggctgaaaagagaccacggatgggacttttctttacctgggaagaacatactcatcaccacatcaaagccctccaaaggcagagaggccacatttttattagttcatgtctgctccagtggcagatatagagaaacagtgggaagatgatgggggaaagcaaggttccaggaatggtctgggtgtatcagtgaacagcagagtcattataaatacataatgtaatgtagtcacagaaaggaattttttttaaagacatgatacactgggtgcatacaaagaggcaaacactgcaggcttcggtgagaacaagacgtcctttattctgcagatcccaaccttagctcagccccaaaagaagaccgcagacagtttggagcaccccaagttcagaggaacattgagacactggaaaccttccagaaaggagccacaaagctgagttgcaggctgcgagggctgagcagtggagagagggtcaacagcattaaacactgagtaagtgctgtggctgtaagtcaaccggggcaagaatgacctacaaataatcccagggcctccccgatgaagaaggtttccattctgcccaggatggagacctgggcagctgtagaccacacccaggctcagggccaaggagcccatgatatatttatacacttgcagcttccagggcccgtggttgctggcctgcctgtgctacgaatagcaaggtcaactgtcagggacattgtcctacagggggtaacaagctccaaaagaagcagcccccagggacaggggagtgagcccaggttagtgtcaggtgcgttcccccctcatttcacccctcctcacttccagcccttcccccctttcctgtgcgctccttcctcccccctactccttgcaaggacccttctgttacaccagcttccctagtccaggaggacaatgagatgatgaagaggtttccctgaaggtgcgagtagctctgaaaattcacctccgagagggaagcacctgtgcagatagtgaagccagtggacttggtggctggggacggtcctgggccactgtcctcccctgtgtgagctcctcgcttagcctggagccaccgcagcatcaggggcagagaccaaggtctgctatcttccggaacgagccgtctatcctccccttcccacaaccatcccaagcctatctttccctgaaacacacaaccgcttgctctaaatttttaaaaaaagatacacaaagatgtgagagagttacctgctgttttccagctttgaaatcaatggtctgagagaaagcagctttctggtccactaacaggattgttacttggagcagcttagggatggattactcatgccccagctggggaacactctcatgagtctactttaaaaaaaatattactactgcattggctaaaaacaaccaaggtccaattttatatgaagtgataaaatcagcgtagagaaaaatccatgagccagcaaacctggacgagaggtcgtggatgacttacctgggagcccagcttgcagggtggccggaaagcaccccatgctttgctggtggaactgggggccacaaagggaggggaaagccagaactctgggatcagaatcttcagaacctgtgtctactcttctgccttagaaagaagcctttagaagcaaaagaattatcttataattcaggcttggtcaggggcacaggtccatcccgcggtggtctcccaccatggaaaggcacaggatgggacgtcggctgacccgagccatgagtgggctgaggaggggaaagcagtgcagccggcttgggggcaagctggggcatgtgagtgtgtgtttcgcaacatttccagctacctcggttccccctggcatcctcctgccttcctgcagcccctggccctccttcttctacctgagcctttgtcttgcaggctctgggatggtggggatcctctacaccagggtctcctgctcgtccttgtactaaagcagcagctgggcattgtcagaatggctgaaggagggactcagagaggctgcaggagggagtcaggcctggggcgggtgagggctactgtcctatgagaccaggagagcagatgaaggactcctgagcccagagaggacttggcctgcccagagttacccaagatgcctggggaggtgaggcttggagagctcatggagtgagtcccaaagaccccagcagagacagtgggcagaaagactcccgggccctctctgtggggctgattcacccacgcgacagccacagggtggggaggggctggccacagcggaggggtgcactgacctgagagcccagtgctgggaggctggctccgggcacgtcaccgcccccgtcatgtgctctccttgtgccgccgtcccagcagcgccccatctcaccaactcccaccttcatgtgtggccgcccacctagagccatgcctgaagccactgtccctgaccacaaagcttttggctgataggaagcatgacagcactggggccctacactggaagcgggaccgtccagagaagaagactgcgcacagggatcgggagctgggacacacgttagtcaaggtgtacgagggaggaatcaccgccatgtggagccactactcggggaggacgtgggccacccggagctcagtgacagtactcccgggagtgtacatcgttggtaatgtccacgacagtgtccctgcctgtgacccaataatttcccatccagggacacacttcacagaaatgcacgcacaggcacaacagcatcgaatgggagagctgcacagagcctcttcatagcatccccaaactggaagcaacccaaacacctagcggacacaaatgagtagaaaatgaacaaaggagcattataagcaatgaaaacagtgaaccagagagacgcacatgagacaggctccatctcacaagcctgaggtttaggaagagaagcaaccaagaccccacgttggccaggcacggtggctcatgcctgtaatcccaatactttgggacgccaaggcaggtggatcacctgaggtcaggagttcgagaccagtctgaccaatgtggtgaaaccccatctctactaaatacaaacaaattagccaggtgtggtagcacatgtctgtaatttcagctacttgggagactgaggcaggacaatcgtttgaatccgggaggcggaggttgcagtgagctgagattgcaccactgcgctccagcctgggcaatacgagcgaaactccatctaaaaaaaaaaaaaaaaagcccaggcaatatgacgccacttccagaaaactctaagacaggcacaagaaagaccactaccctgtatggtttaggggttacatctaggcggcaaagcaaacatctacagagaagggagacaaagatgcgactgggaatggcccatggcagctgccttcctggggcgggacacagttctgggggggttcataaggtctcatttcccatatctcgggtggtttcactcagccattcatacacaggaaaaacataacaagaaatgtgtagacctttaggatgaaacttcaaaatgctcctgaagaacacagggtacagctgtgtggatggaaggacagaccttactcatctcttgttaggaagactcagcattaaagggcatcaatggccaggcacagtggctcacacctgtaatcccagcactccgggaggccgaggcaggtggatcacctgaggtcaggagtttgagactagcctggccaacatggtaaaaccctgtgtctactaaaaaatacaaaaattagccaggcctggtggtgggcacctgtaatcccagctacttgggaggctgaggcaggagaatcgcttgaactcgggaggcagaggttgcagtgagccaagattgcaccactgcactccagcctgggggacggagcaagactccatctcaaaaaaaaaaaaaaaaaaaggcatcaattatctctaaggtcacttatatatgaacatcatctccatttttaaaagaggatttttctggaactagacatgtagttttaaagttaatatggagaaaaaaaggaagaagcaagacaattctgaaaagaaagaaaaatgaagaaggaccagccctcagaggtattaaaacatattctaaaggtgttaattaaataattaaaactgaaaggcagacctgtggaaaagagtcaaaaactcagaaggagggtcaaatgaatatgtgaaaccaatatatgatcaagactacatcttagcttggtggcagtaaagatggacttttaaataaaggaggccggtgccatcaggcagccatctggaaaaaggtaaagtggacccgcccttcccagaatgtgccggagtaactccaaatgtatcacagatctaaacattagaaagtagaagcacaaaaagtagcagaaaaattcaaggtcagatatctacctttaaagccttgaagagggaggtctttttaactgtaacgcaaaacttcagtagccatttaaaaaaagattgagagatattggctaatctaaacataaaaatcaaaaacttctatgtggaaaacaccatagatagtatggatgtgagatgatattaaggaattattgtaaattctcttggatgtgataatggtatgatgagtgtataataaaacgtccttatttttagaaggtacacacagaagtccttggtgtctagaagcacacaaacacacacacacatgcccacacatgagcacacacacgtgcgcacacacagagataaggcagaagcggtacccgatgtcaattcaaattgttgaatttagagggtggacatacagctgaccattgtactattctttccattatttatttatgcataagagaaaactgaaaaatacaccatcaacgaagtcaaaaggcaaatgacaaactggggaaaaaatgtttgtaactcatatcatagacaagggttaatcttcctaatacataaagaacttctataaatcaggaagaaaaagtccaataacccaataggaaggtggacaaatgaataaatagttcacaggaaaagaaatagaatgtatgaaaagaactcaaaggaaattctaattcaactacattgagataacatttctcacttatcagactggcaaaatccaaaaactggtcagcatgttcggttggtaaggctgtgaggaaacagtccatctccttgtggctggtaggagggcagggaggtaagacactggtgaagagggattttctgtttatcagagctgtcagtgcgtggccccatgacctagcaatctgactttggagattgaccctgtggatgctcccacttccatacttaatgacatatggccaaggcgctctgttgaatccgtgtttgttatggtcaaggctggcaacagcacaagtatccatctataggggccgtgttaaatcaactgaggcctctccaccccatagaataccaggcaattctaaaaggggaggccctgtgtacaaaggggagaccaacaggatgccatattaagtgaaaaaaagcaaggttgtattggtcatgaaagaatgaaaaataagaattttcaaaattatgaatatatttccataagggatggacgtactcccacctgccctcccacaaaactaatcgaagttatatttgcttagtagttatatttggcggtgggatttggacctgaatgggagaaaggcttctcaatgcctatcttcttaggtcttttttctatttaaatcatgctcatggtttgctattcgaacaataaaatttgatttaaaataaaaacagagaactgtcagaaaaactcaaggctttcttttgatttttgaaaaaagtttcttaaatgttggtaatacttattttgaagggtattctatgagttgtcaggtcaaaacctttactctcaacattttccataaccttggttgtctcttaaattgcgcaaaataaagagccaatgtttcagcgggtgagtttagtgcttatagggagctcactgtaccaattcagagcatgaaaaccctctcttcggtggcaaggaacaggggctttcctctgcgtgtcccactggccctcccacatggctttgcttgtggagacattgcccggcttcccccaggggcccctggaactctgtctcggtaagctcatacaatcacctttccagataattcataaacaaatacggaggtgagaagatcaacagcacaagagtgttggctgtcattcaacagagagggaattagaattgctccactgggtcttgtccaaaaaaccaactctaagcacctctcctcccctctgagccaccccagtgcccgaaggccacatgtacggactccatttgttctagttcttttcataagagagaagaaccgagtgtttcacatgcctgtaacacgggcaggaaatgctaggatccatgtgaaacccaccaccctcccccagaagctcctggctttagcatggaatactctgcagaacgtagctgccgtgaagatgatggccctgaactgccacactccccagcgaggtgacaggctagggactgaggctcgggcaatcccgccaagtatccccccactctccccacattctgacaccctactgggggctttcatgcaggtgaaatctggttaaaagaaacagttgggaagagactaaaacactcaccagaaagcccctgcagccaggaggaaagtgtctgtagaaggaggtggtgcatttccttggccaccgtgggttccccgactagctcaaggagaaagggtctttcatggatgcagcagcaaaggtaactctgccgacccggcaggggaccatggctactgctcagcgcccacagggcagggcctctcgtgcagccgattgagccattctctgcatcctcagtccccacccggaggacaggtcgggcactggctccctggagggtcggcacagcctctgaattcccgatgaacacccggttgttccagccaggttctccctggaacaagccaagccaacctcagcattttattttcttcttcaattcatcctcttaaattctttgcccttttccattctgtgacttttgcctttttctgttttccttttgcagaataaaagaacaaggcaatataatttttcaatatggaaaattagagaattcagttttttcccaaatcaggtcatgttagtgtccagttatttttcagagcccttgtgaagagagtttcgggttgtaaaaaggtctgttaagtaaaaaactattagttatgattgttgctctcccagaaccatacctctgacggactagaagtcacttcattcatcaagccagcacttttccctccagacagctggagctagtaattgctactgactatagctcttgacaagtggcatccactcaactgagtatggaaggcatggaggaaacggaggacgacacagaggcaggctggtgctcacctccatagccggggtgtagccacagtgccttcctccttcctcttgttttcaagggttactatttcctaccaatataaaaatgtaggtccggggggttgcccctctccccctcttatgtggtaacaggcattgagtgaatgtgcccaggactcagcgttcactgctgttcccattcaagttcacgctcctgctttttttttttttttcttttttttttttagagacagggtctcactgtgtggtccaggctggagtgaagtggtgtgatctcagctcactgcagcctccaattcccaagctcaagccatcctcccacctcagcctcccaagtagctgggactacaggtgtgcaccatcacacctggctaattttttttctaattttgtgtagagacgggtctccctttgttgctcaggctggtctctaacacctgtcctcaaacgatcttgcctcggccctgcaaagtgctgggattgcaggtgtgagccaccgcacccaggccacactcctgcttttgaagcagcaggcaaatgagtgcatttgtttgttgctgagaaagaatggagggcatgatctgatgagtctgtctgctcctccagcctccctttcccacaggaccaggtgcgagagcctgcagtgcccccaagggaaaaatgaccctgtggttcaggtttgcatggtctagaccaagagtgtaggccctgcatgtgtgtgtgtgtgttcatgtgtggtgtgtgcgtctgtgtgtgtggtatagtgaatgtactgggtgtatgagagtgtgcatgagggtgtgtgttgggtgtgtgtgcatatgagtatgtggtgtgtgagagtatgggtgtatgtgagtgtgcatgtgtgtaagttgtgtgcaagtgtattgggtgtgtgtctgcttatgtgtgtgggttgggtgtgcatgtgtgtattcaagtattggtgtgtgtgtgtatgtgtgagagagagagatcttctgggtgactgggctaagtgctgaattaccagagaaccgacgccaacaaattcaaatgaagaatttcttttttcattgattcaagaaaggcttaatagctctggcagaaactctccagaaaaatttacctttgggcagtcatggcccagcaccagacaagaaagctttcagcctcaaagaatttggcagaaagttatgaacaagtgaataaaggagctggaaatgagactccatagatcactgccacgaacctgtttgctcctgttaacaccaggcagcgccggttctagtcttgactccggcacaattccccaggcagtgagacttggctcacctggcttggcagctgcagcgttacaacccatgaaggcttttgtgcgcttatgttaagtgacctttatggaaatatcatgtgctgtcgacatcacaggaaaacccatatacttatcctaaagccatctccatgcagaaccttgcctgctcagaatcaatcccatggtaacccttcctgcaaaatatagacccacatctaagagcaagttgtcctgagttcatggtaagcgtttgtaatgttcccgaacttccgccaatccacaatgtggaaattcacgtgaaagtaaggacattttccaaagaatatgtggccccaaactatctgtgcctgaattatcaagataatgcgtgctaatacccggcactgccttgatttatctgatgactcgactcaagtctccacgtcagtcacacgtcattagttctccaaatgagcaaaataaacaagtctaaaagttaaaagtatgaaagtgactgtctatctactctattttgccgagtagttaattgttatttcttacttgagtcatcatcatcgatttttgtttgttggttggtttttttgttttttgaaacgaggtcttgctctgttgcctaggctgcaatgcagtggcacaatcccggctcactgcgacctctgcctcctgggttcaagcaattctcctgcctcagcctcctgagtagccaggattacaggcgtacaccacaacacctggttaacttttgtatttttagtacagacggtgtttcaccatgttggccaatctggtctggaacccctgatctcaagtgatctgcctgcctgggcctcccaaagtgctgggattataggcgtgagccaccacgcccagcccatcattcattgttaacaaacatttatcaagtgtgtgttctgggccaggtactgagaagacaaagatgaataagaaacagatgttgcccggcattataattacaatgggcagtgaaggctattttccttcactcttaccacaaggccaatgctgtacaaggtgctttgcaatttcatttattccccaacaattatagtcaattccattcaaaaaatctttgtatgaaacattgccagcaatatgagagtgattgttcagagcaaaccttcagtcttcaagcagtgtttggtacagagtgggtatttgataaacggcagctgtaattgttactgtttacttctttcaattgggacagaaattacatctcacgggctgtctcctagtactcagcacagtgactggcacataagaggcctttaactacaatgccatcatgttttctcatggacagagatgactgatatgaagtctcaaattgcgcaaagtaaaagaggcacattgagaattcatgactcccttgattgattggttgattgattgactccccttccaaaagcccattttagagcaatcttttaaacatactattatgatctggtggctgggcatgtgacactgtccacacaagacatatgaacagggaaggaaaagccacagcatttcaacaatagtcattacaagactgggattggccggcagtgaacttcggccaaggcactcctgaaatctttgtgtttggtaactgaggtggagatgattatcaacgcacccagaaaagcaagatcaaagggaagtcactacgagtttctttcttctcttggcaactccaggtctcattcacctgtgcactgcccacaccaggcagcgtctgctcctcatcatggttaataaatgcttcttacacaatcaggcatgagagaggagcgtgtccatttcagtgcctgaaaaccaggcaatgatcccctaatacctacttaaagagaaaagagagcaaccatcacttcacttacgcaagacaacgggagggaatctttcatttcattgtggccgccaccctgcctgccctctatccatgagggaaacaacaccagaaaccaagcactggggcagcacctcagcctcggacactccctgtgtattctgtgcaccatccatccagtccttatcggggtgtttcccaaaataagcctagagaacacaaatccaggagatcatcccatggtcaactctgtgagacgccttccataccttgtgatttcaaaaggtacattagctgctgaaggctctggaaaggtctgcagcaggaaacaattcaacgtcgctcataattcccaagtttatacaattgcataacccgtgttgctggttctctacggcactcagcttagggaatggtgccctacgggggcagcgtcataatctcacttaggaaaaagttgataaacctcccttttcatgaaaatgtgaaaaggccacatgaaagagatcctttacgtgaaatatttttccctaatatagcccaagagggcaaaaacgccatccctaagtgaaattatcctctcccccaatttgttgaacatgctcatattcctagttcaacgatgatgaaatgctggtctttaggacatcccagaactctgttattgttggcaggtaaatgaggcttaacaccaggtccttctgcacacccagggatgcagaaggtgtttggtgggtgatttccttgatggatgtagaaagacaacctggagagacaagcttgaaagacttcaaggggcaagaaaagtaaagagttatttcccaagtcatgtcttcaccaacaaaacactgtataaatgcaattaatttttttaatggtttgacattagataagacccaaaactcacttcctaggagttaaccattatccacaatcaacagatcttaaaaatgcacattggctgcatcaatatatgatcagccctcatgacccacagattccatatatgtaaattgttctcctaactaaaacttattcgtaactcccaaatcaaccctggtgctgctttcccagttattcgtggacatgtgctgagcggcaaaacgttggagtttcctgatgtgcatgatcctggctgaccatgccacgctccagctcatgtggtaaacacgcaccctgtccacagctgattgagtgccccattttcacgcttgtgttggtggtttcaagtccagggtagccccaaacacagtgctgagctatgtagtgtttctgagcacagaaggcgagaagccaggtgtgtcggtgaaactccattcaggcacaagtgctggtggtgtcactctgagtttaatgttcatgaatcaaaatcatatattaaatatagtgaccttaaacaagaacacacataaaacaaagtgtaggtcaggcatggtggctcacgcctataatcccagcattttgggaggtcgaggcaggaggattgcatgagcccaggagtttgagaccagcctaggcaatatagtgagccatcatctctatgaaaaaaattttttttttattagccaggcatggtggtgtgtgcctgtagtcccagctactcgggaggctgaggtgggaggatcacctgagcttgggagacagaggctgtagtgagccatgatagtgccactgcactacaatctgggcagcatagtgagtccctgtctcaagaaaaacaacaacagaaaaaaaactaacaaacaaaaacaaagtgtagtggtcagtggacaaaaatgtgaccagaggcttgcaggaacccaaccctgtgcttctcctaggagcaatggctcatgatgtgctgagtcagtgttcgtggtgactttgcagaacgtaactaccgcgatcatgagaatcaggtgttgtatttggatagcaatgaacaaagtttctgtcaagaaaatgtcttacagaagttgaacaggatggtttcaagaaagtgaacagactatgggtgagcctgggtgctgtgagatgccaaacctggggaagaaaacagaagccgtcatccggctgccaggcattcttcctcgggccctttctgatagggcatgcaggtaaatgtgctatttgcactcaatctgcagccagtctgtcaaccctgtgtgtgacgctgtcttctttctaattctttctcattctaccctcagcagttttttttttcaattcctaacagaaacaaccaaatgatgccccagatgcaaaacagtattcccagcagggtggctgccatgctaaaatattgttcttttctcggctaatttgtggtcaagatctactacattcgaaacatcatgacaataaagtacggctgtaatcgcaagcagctttaggaaggtctgcaggcatcagcagacatttttcacacagcagtctcccccttttctctaaagaattttggagatcatttctgaatgaggccaggctcacctaacagtggctgcatcacctgcagctgcgccaggccaggccatgcagcttccactgacttcaaggagaactgggcaacatggcagagggtcgagtccacacagacaaagctcctggcaacatcagtcatcacagctcagccatcatggaactccacaaacaccagcgtggcccacattcaattctggaggacaaaaagctcaacatctacagtcctacttccttccggtatactctacctacccctctccacacacacacacacacacacacacacacacacacacacacacacacacagacaaaacatcctcagcaacatggatcttgcttaatctttaataaaatacaagcttcttcccatgcagccatagaaaagaatgaaatcatgtcctctgcagcaacatggatggagctgggggccattaccctaagaagcagaaaatcaaatatcttatgttctcacttatgaatgggagctaaacaatgggcacacgtggacataaagatggaaataatagacatgggagactccaaaagcggagaggatgagaggagggggaggggcaaaaatacctattgggtaccatgttcaatatttgggtgttgggtacattggaagcccagttcccaccatgacacaacagacccatgtaacaaacatgcatgtgtaccccggaatttaaaataatttttaaatgtttaaccctaatataattgtgaggaaataatttaacaaatccagatggtggcacattctactagacagctgatctggactcttcaaaaatatcaataacatgaaagaccacaaaaagcaggggctcattctaatcgatttaaacaaaacttaaataacatgacaactgaaaaaagcatatgcatgcccctagactcagcccatgagcagaaggttgcagccaggtaagtctgattttgaggtatattcagtggaaaagacactacaaggaaagcgctttctgatcatcccccgcccccaggtgcggcatgcacagtgcgtgatgtgatgattctgcggctagaaaggggtacattcatggactgaaagagcacatttttcctttgaactaaggaaaagatccttgggtgatgttgaaggctgtgcggagtgtttgtgaggagtgaggcaattcccagggatttttcttctacaaacacacaacgggggtgagaaaatcagacacaaagtcaggcttcatgaggctaaggaagaacttttcctcctttagcgaattttctggaagccctgccgaggctacccccaccccatgaacgcatccaatgcttttgggaacctgtgctaatctgtcgggtttctgcatatctctttgcccaaccaaagggaccccagaccctgccacctttgtccggaagagctggcctcggagggacagagactctgagcctgcgtcccaggaagaaagtcacaggtaggagcttcgggccccctcgctctccccagcagcaccacccactggcaaaggacccaggtctctttctccaagggacaggggggtcgggaaaaagaaaagacaagactctcctgtgggaaagaaacacatgtgagggtgctggagggtttccttccttcttctggagttttaacaaaaatagactctgggatgaggttgtaggacaaggaagtgctcccttgcttgactggtgttctttctgccctcactggaatctgcttggcagccgagggcggtgacgttcctgtagcttccgtggggaattcaggtgcgtgtgtgtgcgcgtgtgtgtgcgtgtgtgtgataagctgttttcattttaccatcctaaaaaaagaaaaagtcagacgaaggcacagaaaacggctgaggaattcctggcaagggcagactcacccacttactagctttccgcttagcttgccaccgggacacttcgatagtccaggagacaaatctgcttcctctctggggctctcccggttgagaggtcggcggagttagccgtcatctttccctgtaggttctgagtctatcaaggtgcagcccaaatgcagaggaagctcccgcacccagggtttcccctggcgagtgaccgagcccctctgaccaaacgcgcgctcaggcgccttatggatcacacggttccaatggcccgggagacaagcaaacgtgccaagcgtgggcttcgatagaatactcgcctcaccaccgtggcacggagagaaagccctgatttctctttcattcctaaagggctagaattctgtcgtctaaaacctgcctcatggaagcccgtggaaaaaactgcctgcggaagagacgaggttgtgagcgcttatagcacagatggagcagagtgaccacagctgagggaaaacaatgaactttatgttcttccagaacaaattacacactccccccagcccataaaggctttttatgtaactgcagtcaggcaatacctgggcagggagcgactgcgggggatcccacatccctgcgcggctcttgcctcgggcagccccaccacgcccctcccagcacccagggtgtctcggccctgcccagccgggacccacctcgcaggccctttttcccaccgggattcaggcgtttcatgctgacttgggccctcgggggccacgggccaagggaggagggaggggcaggcacctcgccatggaagctggtctctggaggagcccccagcctggcagggcgctgggtgagacaggtggctggccaccagccgtggtggcgaggaacagcgtgggctgcagcgccctcaccataaccgatggcgacaactgaggcaggcccaggacttagaaattagcattcaaaatgtacagcctaaacaccctgcaccaaaagcccagcctgctctctaggcgttccatcagccgtccatgctgaaatgtccttcaacctcaccgccccctgcaagccctcccgctctccagccgtgcgcaggcaggccacggtcccccccacctgtgtctcgtgtgacaacaaagcagaggaggaaagggaggggctgagcttgtcacgggggggtgggggcctgcgacacaatagcgcgcagtcctagctgctttattgaggatactgtgttgaataaaccaatgactaagagagacgaaggtgagctttctgtaattcccgggaatcgtcggaggcagttacaaacattttgttttatcagttaatttcacccatcatgccccctcgtgggaaccacaattgaggtctctccacaggctgtatttttaggtgacgcacccacatctaaggcagccaggatggtcggaaagtgtctgccagcagactggggatccccaggggccccatcagcccagggctgctcctcaggatggccgcggggccgtgccggccggggcacaccaggccagggtgggcggctgttcctggaccccagcgggcgtctgcctcccctacagcgggtccgggcaccccgggtctacttccagttcagaagcgcagcactgagtagggtgaggtggtcatggccccttcttctctcagtgagcatctggaccctgggggccacgtgcctcacacagactctccagcagctgcctaggtgtggatcgctttaggaaactcagctcctagctccctaacttctgcacacactcttccctgaaatcactgggcctgagattgctcctcggggctctccttcccacctccctccgcgggtgccagcctgcactttgcaaaccacggggggcttgcacctcccctggccctcctccgccttcccaccctcttctctccccgcctccactacccaagtttaccgtggagcaccaaaagaacagcttggtttagggggtcttctttgaggaggggtaacaacggggtcaatattaattttggagataatgtgagccacgctggccaagcacagccctcagccctttcagcagagccgtgtgctgcacacacatcttcagcttttctgggcctccgttgcctctgggtacatttggatttgaagctggagagaaccgagcagaaagcaaggaaaacgaagttcatcgagggctttttggcccgcggtaggggaacaggcccaccgaagcacaccccggtttcccacagtgacgttcagctgctctctctccctcatgagctggagtcacgctacggacccagccgtaaagcccttgcggtgtatttccactccaaatgtggtaggaaggtccttggcttgcaaatgctttgtcctaaggctcaaggacttcacctggcaaacacatctcaccaccttgctggtgcgaaaccgcctgggctttcactccagccgaggcgaggcatctaagtgcgcttctccgggttgccactagatggcatcagagctccatcacggtccctgcccaccggcgcctcaactcagactggattcctgctggggaaaccgaaaacaaaaggaggggagggggcgcgggtgggaaataatttgccaatactttcttatgaagttgagaaataactaaagccaccggttccagtcttgaaaaccaaggcccattggcagtgggttatcagaacttactaactttagagtcactgaagttggtatacaatgccccactgttaaattggtaaataatccaaacaaacaaacacaaaaaacaaggtccaattctagcttatttggaatcataagagaacaccatgcattaaacccatagcaactaagtttgcaacaaataagtacaaaagatggaagctctctttaatttgtagccccaaataaaatgccactgatcgcatccagcatgtctgaaacaggctagtaaataacggatttttaaaagcaatttcttttctgtagacgctgatggacaagaaagctcatcttggctggagttgaacatggggaacttcttggttcctctcactctttcctattctcagagcctctcttctgtttaagacatcacctaagatcccaggctcctcctccccctgttacaatgtgcagagtgaagttccaatagtcaacttgccaagagacaaggcttcatgaaaattctccccctgggaaagccagagtcatttgccctggaggctcacagggacacacacacacacacaaccagcccagaaaaaacaaaagaacagccctcaaccctccttaccagccccctccccccagctccagttctggccccttccctgcctctgcacctccccacgataagccccagagataagattatgccaggtgacaagggaaatccacactcccgaagactgtgcccctaactatcccccccatcctcatgttaattctcagtgccttcattttgtgaatcagcaaatgttatataaatgatttaccatttaaaggtgcgataacatcagaccagagggagataaggggctttgtgtgacacttgaagccatggtgttgggagtcacggaggctttccttctctggcttcccagggctttaggccccttgtttatctcttcctctcaccaaattacttcgggccatttacacgtctccttcccccaccagctcagcttccttctcttcccacgccttctgtgaggctctctgcctgtcccaccgctggtcccatgcttattggtggggatttctcagaggcttctctggatgtgttctgagctctcaaatggcaaacagtgtttttccaaattctgttttcccactgtgtaattttaaaacctacacaatcatacaagcatcaccccctgacctcggccatcatttttattttgcattttctttaacattctccatccaaatgaatccatctgcagctcgccattccaggctttgcaaagtcctcattcttcttttttggtgtgatcccattaagttgatgtttttagtagtggacatctagttggcttaaaatatttcactgttgaaagcctcacttgtgtttaacatcgaactcacactggagtaaactagtatgatatgcatgttagtcatttatgcatatttacaaatctaaatatctgttgcgacatataaaggatgacttttcctagacttcatagctccctttgtttcaaactatgatgcaattttttctgaagctcattgagacggcttatacacaaactatgatgggggagaggcacaggcaggtgctctgaggggaagacttccttggccctgcaggcatctgagcctctcccagccatgctgcccgcctctgtctgcggcttctttccttagcagagtgagacgcgaacacacggctcccggcagcatggggacccttcgactctcgcgacagaaccataacttcagagccccaccacactctctcacttgcggtttatcctcgtgttttaatttcctgtatttacagtttttctcaaaggcattccgaaggttctccattgaatcatctcactaaaacccctcttaaaagacagctcaaacgtctaagttataagagatagatatgattcattcctttgagaaaaaataaactgaggcacagctaagcccgtcgtgcccctgggcctgatgggccggcggggccttgcactgcctggtctaacctgtggctgctggtgaccaggctgtgtcccccggacctcctcggccttcaatggaggaaggtcagatttctcagtcagattttgcttggagagcccagctatttcgttccattgaaataattggagaagttcttttttccacaggcatcctgcctgcacttcatcgtgtgtattattttggatttgcttcagaaagaaaaatggcctttcacggcgtttacggaatgtgggcagaaattggaccgggcagacatagagctccgcacagagatggaaaatattcagggtgaacacgcacactcgacacccacgctcccgcagagaagcgagccccagcgctggccccacacctgagtgcctcctccgccggagacccgccagcggccaggcagcctctgctccccaggccggcctccgcacctgctttatccgcccttgggtggctgcgataggaaggtccagaagtttcctgcccgtgtgcactaaagtgctccgtgtgcctgcgccccgggacccacctgcggaggcctggagaggcccagccagcccagtctcctctgcacctgaggaaaggaagcggctgcccctagaacggaggagctggctgagaagctcaaatcctgggaccgccccctgcccccctccaagttctggatgccagtgggtgcgggtttcccctgctgtcttcaccagaggggccttctctacgccacctcctccctctgtcccttctcctccccagggcccagggtctctaatgaaggaaacgattacgtcaaagcaatcagcaccgaagtttcagagaggtcctgtatcttttaaaacagaaaggacagaaggcgtctcaagctgcagccagaaggtccgcaatccagccagcagacgccaagggacgctctgtgcatggccatcccgggggtttcagaggcatcaccaaacaggggaaggggagcttccctgcgacgtctctccctgtcacacagtttgctccctatggtcatcaatgagcccttccaaatatgagggaatttgcaccacagtcctcgtgcttcctcagagaaggtcgtcgcagtaaaaggcccatcacactctttcttcacagttctggactctgatctcttttctgatgccacccccattctgtcttctatccctccacatccacctaatgtcaaactttaaaaataatgcatattaaatggccagcaattggtcacctgggggaagatgaattgaggccatccagggacacaccagagtgaaccctcaaaattccagaaactcttcctaagagaaagaaattatgcatccatcattttctttttgccccaaatgtagacacaacatttgtttgcctggtggataaaactgaaagttatgctaatattggaaacccagatctgggcatatcagagaaatttgtttttaaagggacattgctaaggactttgaatccagcacttgacctgtatttcatattactctgatctagtcggggatgccttctaggttctaaatgcttaattggaaaatgtctggcacagccagaaaataaagcccaactctccttttatgagatttacagcagactgtcaacaccatctgataattgaatctccttgaaatcggcagagctatagagatatcatcaggaaagctgatgtacaaacaagcaagaagaaaaaaaaagaattagaaaaactgattttactccatttaatgcataatcaagggaaatgcaaaatttgcccaactaaggagaaagagaaatacgaggtatagttttctcaagctttgtttagaagcaaaaggatccctccactacactccagcctgggtcactaagacacacacacacacacacacacacacacacacactctctctctctctctctctatatatatatacacacacacacacacatatatgtatttccatatatatatggaaatattattgtcatgcattagctcttttaaaatatccaaagacaacctgaaatgaacaaagcaggaggacctgggtgagtctgagcccattccagaaaaaaacagttggcagcagtaagagtggtgtttactagaaaattaacctacttccagcagacagtagacaatgtgactgatattaaacaaaatgcgtggatgtgtttgccttgatgttcgaagggtggagctgcatctgttttcctattatgtaaaacccctgccccgctcctgccaaaacattctcccagtgacacgtctgcccgcctctggatgcgttccttactaaaacaaatacgcctaacaccgcatctttgatagcaaatgctcacaaaggcaaacaatgaaaactcctagggtgcgtttcttgggatggcaccgggcaccatgcggaattgccacacacaaaagcaaaacagtgctcctggctgactgggccaggccccagaggtcagcaacttttagtaacttgctctttctcggcgagtaactaatttcccccgctctgggcatcccgcagtccttccctaagaagtcactctgtgtgtagatgttgtctctttgaggagagtgataactactcaagcaaaccattcttataagcgcacactctcacgaataaaaggagagtgtctcatggacgatactggcaccctataaaagtgcaattcagccttatctaatctggtgcgtgtttcatcacagggacatgcaataatggcagcctttgtgctgaaggaagaaggaaaagctctcacgcgcgggcgaggtggcgggggtctgtgacccggcccggactttgtgcccagctctcagtgaggacttcgcggtcctggggccagtaggtgagaaaatgatggatgggccgggtgggcgacggcaggaacggcctggagaaggcttcctcctcccatctgctcaggaaggacctcagcgccagactaaacacaggccggcgcggctgcggtgtgcgagctcgcgcgccggccgccggcctttaaaagcaccttcctgcgcacgacggggagacaccgggagaccaggcgccccgacccatcggctggtcttgaggagaagcaggaccgccccagactgtcgccgcggccggcagggccgggcgctccgcggggaatctgggccgcggtgccctgtgccccactccggcaggactgggcttccccggctcttcgagggaagaccgcacagagaagaccctgggcacccctgtggcgggccggaccccgggaaagtagggcccctgctgccccgcgcacttggtggccaaacacctccggagcctgaggtcttgggcctcctctggctctgcgtccggggttctcttctctcccccaagggttggcctttgggtcaatcgtccagacccaagccaagcttgtgttgggcaagggaggaattcctggaaaaggaaaaagcccctgccaccctccgcccttcattcatcttccctgccacccactctctccttttccctgctcctaccccaaccctgaccctcaaggcctacctggccaaagacaacagctgcgttagtcgctaggccttggtgggactgaaggcggaggagcctgggcatctgctgggggaaggccgcactagactgcaagtcctgggtagaagccctccccatcttgggccagctctcttctgagagcctcagtttccctctctatgatgccaagggcttgactttggtgacttctggacagccccggcatggtgtcctggaggtgagctacaacctgaaacccacctcctgctgcccatccctcctccagcctcctctggctgacgtctgccatgggtccgagaggaactgctcctgcttcctcagtgttctgaggctcctggcctgcctgcctgcctgcccatctgtctggagctgtgggtaagagcgggcccaccattgaggcaggggcagaaaagagcctctctgctttatttgctgtgttttctggagaatcttccttggggaaactaaatgaagggaaaagcaggagaggagccaccagatagcatccaggaggagagaacaatgcattcaccagcaggtcctttattcgtttatacagaatgtctgtgtccaaatatataccatttttctgtgcatgcgcgtataccagtttctcctcatagcactggcgtgagcatctctagaagagtatggaagtgtgcagataaaccagaccagtgcaagtcagtatgtgtacacatatataatagattcaacggttgctgtgggtaaacatccttcccataataattagtatttagcttcatggatgtctgcaaagggtgctctgttacacacccagctgctagaagaaagccaaacacggagcaggcctctatgtgtttgttgattacatggattagtaaacgtatcatcgatctgaaatgcacattttttttttcattttagcaactgaaacggagatgagatttaccactgatgatatttaataatttagttttttcccctcttagtggctcataagcactgtaccttatcataagtggcgtcttagatccagtgagcctgtgcagagtgcaactgcgagggctgtgtaatcttgggaaagctctctcttttctttaagctcagtttcctcatgtgtaagatgtagatcataatatccatgtcagcgtccttgtgaggattaggtgaaaggagtgtttaaagcacacagcaggatgaccgcatactaagtgttctgtgcatcctaccagtctttataattgtggttatgagtgtccgtgtttaagattggagaaacatggaataaatttgcctctcattagcgtgcacactctgccccaaacccctttttttgtggggggaggtgctgctccatctagtgagtggggagattttctaattcccactggggtccttgtgaccccaagccaaagcggacctttagtaaatgtaaattctgcatttctctgctgccttcatttatagtcaacccggtcggactaaaaagaactaccagggcgaccataactaaacactacagagcaagtgcctcctttcctcgcagacatttatttctgtggaaattcgcctgtttgccatagtttgtcttttcttatttcttcacttccaaactaaacagccctaatccgagcgcatacctctctgtgtgccaacgtttcgcctgtgtctgtgtctgctgcgtatgtaaatacgggcgagcctctctgtgggcaaagccataggtgtgcatggtccttgttcccataggcgacatcggggtgtgtgattgcacgtgggggtgtgaggcctcgccagcaccgccactcactggtcctgttctcgaaaccggttctttggaggctcagtttttggtaattaagactaaggagtgtttaaaaaacagaagtacattttcctggaaaccagcagtctttatttgcaacttttattggcaaacctggctgccagtaaatacattccttggcatctcccacaatgtaattcactggatggagcggccttgctttttctgtaacgtgtacgtcaattaaaagggccgcctggaaggaatgcgtagcggtggctgaaagccccagtctcgggtcacctccctccactccaggaacaaaagcgtccgtggtctgtgcctggaagtctgagagggtctccccgatggggctgttcccgcccggaccctgagggatgagagttgcagcctagaaaaccaggtgccaggccctgcggggtcccacgcgggcggcgcggtcttccccaggcctccttctctggagacccggttcccaggggacgctgtgcggggacaggcggagccggcccttggagcccggcgcgggcagaggcgccgcggagacaacgcctccgacggcagggggcgctcgtagcacgcgcagtgcgcggtgcgggcgcccaggacggctgcctggccccgggttcccgaggcgcgggacctgccggggtgaggtgcccccagcctgagagccccagcctgggtcggccaaggggcctccgggcttccacatcgtccctttttctgctgacgctcgcggggaagcggcgggaagcctgtgaggggcggcctgggagcagacggaccaccaggtcaccggcgcgcgctgccaggcgccgacccactcgcgaggaccagcggttcccggaggcgtcggccctcaggtcctcgggggaggccggctgcaccgagccgggtgtcggccttgtccctgtcctgagaggtgcaaacaccggccccggcccaggcccccggggctcctgcccagaaggctcagagctgggggccgaccgcgccttacccgcaggaggcccggcggtgcgtccgcgttggtgccactccccggccggggtgagggacgtcggaaggaaggtcccagggcgcagggttccgcgaagggagcactcggaaggaaggctggctgcggccccggcgcctgggtccgctgcggcgccgggccggagacctgggaacagccagccacctgcaaggttgcagcccacctcaccccgccggcggctccggggctgtctgtgggtctgtctcacggggcaaagcctttcttcccacacccacagccaaggcgcgtccgtgcaggggcacacgccttctgctccagccccaggaaggcgctttcgccctgcagtcctccgacggccggctcccgccgcaccgcgcaccctggctccggcagactctggggcctggggactcgcccaccctgcgcggcgcgccccccacatgagccgaggttgggaggctgcggggcctctgtcctcccaggccgtggagtgcggcggccgctctgagtccgctggggacctggatggagagaaactggggctcgttcgcgcacacatgcaccatttgttctttccgatcatctatccctttacgaattttatttttattccggattgttaatgcaagacgacagtttgaatctccatttacctctgcctgaacacaagaagccctgagtcttttgaagccgggcaccaaagttaaagattcacttcccgcattccccatggccccctcttgcagcttagctcggctctgagcccccgaaacgcccttcgaggcgggggctttcctgccaaggggcgataggtgggccatcccgaggcgggaacgatcaggtaggtgttggctggctttctcctgggtgagtagttaggggaaccgcccctccaggggacttagatgacattaaattatcccatcacacaaacttcccgtggaggtctgcccccaggagggcaactatcggattaatccaaccatgtagacaggcaatatggatcactttgtctttaaaacaatcgaaaaccaaacgctcttttcgtttattgtagaaatttttctactaaggacggggctgaattggagggactgtgctgacaaatcctctacttgaaaatcccccagctaaggagtatctgcccaaggtcgcggccacccagatgttcggtccccactccttcctccgctgaaaagtcgcaccgatgactaacgttgcctgccggcctggtggtttgaaaacgaatgccgggcattgatgcaaggatatcctcccctacccctgggattctggtctaagcaaaggaggccgaatggagaactaagacaattatctaagtaatctaaaaagctcaaagacatccccaagcggaccttgctccagtggtctgtgatggcagcctagtggacagttttctagtggccctctggggttaattgccttaatcttccactctgtctgccccagcaaagggaaagatgctaaagcagctgtggacttgcagcctccctcctgtgtgtgcagagcccccaggaatcactgccccagtgcagcaggagaagcgccttccctcatgccctaagcctgccttttctgttgtcccccagctcctgggccaggtggagccccccctgaagctggtttctacctgccctcgcctccccactgcagcccacagttcggctttcagggctgaacccagagcccagaggatggagaagccagaaagcggggaggtaagggagagggcgtctaggcacaccacagaggtgattgggctgtgacggggacaatccgcacaacacgagctaagctcacacccctagggagtgatttttccggactgcccccatcccaatctccacctcctctgctttacttgaaaaagaaaaagaaaaaagagagctccttctggctcctggtgacccatatttaggacaccatcccatcccccagcacacacattcctacagtgtcacctggtccccaatccgagcatttcctggagtgctcgccacattccccttcctggtgcttttctatggtggggccaggggaggccttgttttgaacatcgctgtgacgtcactccccctcctccgagctaagcacccctcggtgggccctgggaattgttgcccggcctgctggggaggggcggagtgtgggcccagggagggttccaccaaacatccattaccgctgtcgcctgcggggccttcaggctgcaagtacgtgaggtgtcagaaaagaagccgaagggttcccgtgggggctcttctgccaaatgagtcaagagatgtgcggaagcggatgattgaagtaccccgtggagtagcagaaaggggcatcaaaaactgtaacctgaaaataaaagctttaacctgttccccaaaagacttcatgcctgcgtcttaatgttcaaataacaccactaacaacaaaaatgaaataagaaaagtgcttgaaatacaatcaagccgcttactggaggcttgcttccgagtaagtttataaaacacaaatgcaaatatcttttcctggcgaatatccagagctaaaccagtggaaagttgatcttgataaaactacgtccctccattttttctcgcacgccagacactaatttcacaacggcgacttttatacccaaaacggagagctgagaacaccgctgcaggtcgatttgcaatttacataacaagctgtttacacttcactgggccgatggagggaggaggcagggaagagcaggaggcgacaggctggtgggggagggggcagcggggcaccattgcctgttgcaaaactcggggccgaaggcgtttcccgcattcggaaaacaaagcatccgtaatcgctgcgttcatctccgcgcaccgctagcagtgtaaaaggcagcttcaagaccgaactcaccacttgctgaggtgttcagggagaccacttaaatctcctccaggctgaagccacagcactccttaaagcctcgaccaggcgggctgataagaccttcagggtgccgggctgggggctgaacaggaattaagtgttcaggtcctggggcttcaccaccaccctcgcccctgtctagtgtccttggcaaccagcaagtgctgagcctcctgttggtgcttctccaacccaccagtgacttggcccgcaaaccacctggaaaaggagtctccagagaccccggcgcacagcaggccaggaggcagctgccccgggattcagagcaacctcggggcaaccctccctcctccaaaggctaattctagaagaggcaggtcctctttccttcgatgtcaatgtccattatgaaacagtaatttttaaatattcaggtgacacggagatgcgcctgctacacgtcagcgtccttcacatgtaacagccgaagctgcaatttgaattttcctgccaacgtgaggaagccgggattcgaaccggggagacaaaaggggtcccgaacatgtccttggatttaatagatggtcggaaatcaggggcagcggagctgttaaatgcgtcacgcacgcttcttcgcagtctcctgagctcgccacttcccccagcttctagtgaacgacttgggattcagcctccgggagggtctctcctcaagtcgctaaaatgcagaatcgccgtgccgggggagggaggcctggctctttcccgctccttcgtttctttccctcatttctcttcttcctgtcccattccaaccacccagcgacggcgaatctcaggcgtgtgcacaacgagcgggggcccttccgtgcgtgtccccccagaatccttgaaccgccctctaggtgcgaccctggacgttcccccagacacacccgttgtctctgcgagccggcagccccgcgcatgtggagatggagactggcctggggaagcgttaagctcttagacatatttatttgcttcttgtcatcacacctgctaatgtcaccgagcccgcagcctgacccctcatctgagccgaaacgggcctgacgggatcagagggggcggcggcgcggcgagccggtgggaccctcgcgggcgggcaggggagcgcggggcagcagccgggctccggcagccctcgccgcccgcaccctcaggccgccaagggccggccccccggggaggggggcgagaagcagggcggcccgcagcggggcgggctcatccttcgcgggtgaacggccgtcggaaactcccagcagggccccgcaccccttgccttcatttcggctggggaggggtcatggaggggggccagatgggcgacgaaccttcttccccaccgcgagcagggcctggctgtgaccgagccctcaaaatcatgtcctttgtagccgagttcaggacaggagaacctccaagtggagaaaagccggagacgtcagtgacccgagtgagactggcgttggagaagggagggaaggggctgcgggaggggagaggcggcggggaggagaggctggggcaaccccagcgctggcgtcggcggggctggcgaaggaatgagagcgagccagcacgaggcggggcggagacgccagggccactcgggagccgtgggcgaaggaagggtctgcacggggtcccgggaggacccaggaagtctgcgcgaacggcgggcgtgggtccggagggcccggggtgggaggtctgccgggcgccggcggcaggcaggtggactgcggggggcgaaccgacggcgggccgggcgccggcgcgggcgcagggccggggcccgggccagggcggccggcgcgcgtgtggtcagccccgcggtcctccggcctccgggagcgggccggcagggctcggcctccggctcattcggaggcggttctcacctcccattggctgccgccgctggcggggcggggctccgctgcccggaaaaaagtgtaactgcgtaaaaaagtcctcgcctgggtgacggatgctcaaaagttcagaagttttcccaatgcttccttaagcggctggcgcgcgagagaccgagaaaaggtgacgcggggcccgggcaggcggccggcgcgcggccccccccccccccgccctggttatttggccgccttcgccggcagctcagggcagagtctcctggaaggcgcaggcagtgtggcgagaagggcgcctgcttgttctttctttttgtctgctttcccccgtttgcgcctggaagctgcgccgcgagttcctgcaaggcggtctgccgcggccgggcccggccttctcccctcgcagcgaccccgcctcgcggccgcgcgggccccgaggtagcccgaggcgccggaggagccagccccagcgagcgccgggagaggcggcagcgcagccggacgcacagcgcagcgggccggcaccagctcggccgggcccggactcggactcggcggccggcgcggcgcggcccggcccgagcgagggtggggggcggcgggcggcgcggggcggcggcgagcgggggccatgcaggcgcgctactccgtgtccagccccaactccctgggagtggtgccctacctcggcggcgagcagagctactaccgcgcggcggccgcggcggccgggggcggctacaccgccatgccggcccccatgagcgtgtactcgcaccctgcgcacgccgagcagtacccgggcggcatggcccgcgcctacgggccctacacgccgcagccgcagcccaaggacatggtgaagccgccctatagctacatcgcgctcatcaccatggccatccagaacgccccggacaagaagatcaccctgaacggcatctaccagttcatcatggaccgcttccccttctaccgggacaacaagcagggctggcagaacagcatccgccacaacctctcgctcaacgagtgcttcgtcaaggtgccgcgcgacgacaagaagccgggcaagggcagctactggacgctggacccggactcctacaacatgttcgagaacggcagcttcctgcggcggcggcggcgcttcaagaagaaggacgcggtgaaggacaaggaggagaaggacaggctgcacctcaaggagccgcccccgcccggccgccagcccccgcccgcgccgccggagcaggccgacggcaacgcgcccggtccgcagccgccgcccgtgcgcatccaggacatcaagaccgagaacggtacgtgcccctcgccgccccagcccctgtccccggccgccgccctgggcagcggcagcgccgccgcggtgcccaagatcgagagccccgacagcagcagcagcagcctgtccagcgggagcagccccccgggcagcctgccgtcggcgcggccgctcagcctggacggtgcggattccgcgccgccgccgcccgcgccctccgccccgccgccgcaccatagccagggcttcagcgtggacaacatcatgacgtcgctgcgggggtcgccgcagagcgcggccgcggagctcagctccggccttctggcctcggcggccgcgtcctcgcgcgcggggatcgcacccccgctggcgctcggcgcctactcgcccggccagagctccctctacagctccccctgcagccagacctccagcgcgggcagctcgggcggcggcggcggcggcgcgggggccgcggggggcgcgggcggcgccgggacctaccactgcaacctgcaagccatgagcctgtacgcggccggcgagcgcgggggccacttgcagggcgcgcccgggggcgcgggcggctcggccgtggacgaccccctgcccgactactctctgcctccggtcaccagcagcagctcgtcgtccctgagtcacggcggcggcggcggcggcggcgggggaggccaggaggccggccaccaccctgcggcccaccaaggccgcctcacctcgtggtacctgaaccaggcgggcggagacctgggccacttggcgagcgcggcggcggcggcggcggccgcaggctacccgggccagcagcagaacttccactcggtgcgggagatgttcgagtcacagaggatcggcttgaacaactctccagtgaacgggaatagtagctgtcaaatggccttcccttccagccagtctctgtaccgcacgtccggagctttcgtctacgactgtagcaagttttgacacaccctcaaagccgaactaaatcgaaccccaaagcaggaaaagctaaaggaacccatcaaggcaaaatcgaaactaaaaaaaaaaaatccaattaaaaaaaacccctgagaatattcaccacaccagcgaacagaatatccctccaaaaattcagctcaccagcaccagcacgaagaaaactctattttcttaaccgattaattcagagccacctccactttgccttgtctaaataaacaaacccgtaaactgttttatacagagacagcaaaatcttggtttattaaaggacagtgttactccagataacacgtaagtttcttcttgcttttcagagacctgctttcccctcctcccgtctcccctctcttgccttcttccttgcctctcacctgtaagatattattttatcctatgttgaagggagggggaaagtccccgtttatgaaagtcgctttctttttattcatggacttgttttaaaatgtaaattgcaacatagtaatttatttttaatttgtagttggatgtcgtggaccaaacgccagaaagtgttcccaaaacctgacgttaaattgcctgaaactttaaattgtgctttttttctcattataaaaagggaaactgtattaatcttattctatcctcttttctttctttttgttgaacatattcattgtttgtttattaataaattaccattcagtttgaatgagacctatatgtctggatactttaatagagctttaattattacgaaaaaagatttcagagataaaacactagaagttacctattctccacctaaatctctgaaaaatggagaaaccctctgactagtccatgtcaaattttactaaaagtctttttgtttagatttattttcctgcagcatcttctgcaaaatgtactatatagtcagcttgctttgaggctagtaaaaagatatttttctaaacagattggagttggcatataaacaaatacgttttctcactaatgacagtccatgattcggaaattttaagcccatgaatcagccgcggtcttaccacggtgatgcctgtgtgccgagagatgggactgtgcggccagatatgcacagataaatatttggcttgtgtattccatataaaattgcagtgcatattatacatccctgtgagccagatgctgaatagatattttcctattatttcagtcctttataaaaggaaaaataaaccagtttttaaatgtatgtatataattctcccccatttacaatccttcatgtattacatagaaggattgcttttttaaaaatatactgcgggttggaaagggatatttaatctttgagaaactattttagaaaatatgtttgtagaacaattatttttgaaaaagatttaaagcaataacaagaaggaaggcgagaggagcagaacattttggtctagggtggtttctttttaaaccattttttcttgttaatttacagttaaacctaggggacaatccggattggccctcccccttttgtaaataacccaggaaatgtaataaattcattatcttagggtgatctgccctgccaatcagactttggggagatggcgatttgattacagacgttcgggggggtggggggcttgcagtttgttttggagataatacagtttcctgctatctgccgctcctatctagaggcaacacttaagcagtaattgctgttgcttgttgtcaaaatttgatcattgttaaaggattgctgcaaataaatacactttaatttcagtcaaaaactgctctacgtggcctgtgattcgctcggtcccctcccccagggtcgtaacctaatcgccgggaagatcgcagcggcgctggcgcgggtgtctcctcggggcaggcgggctgggggtggcctcacggccccgtttaaatctcgctgggctgtcgcggcgctaggtcccggggctgcctccagcttcctcgggttacagcctctttcggggcgggggaaggggagggggtgacggtagagactccaccgccagtctccaggagtttggtgtgatcgctccactttggggagcccggcgaggagctgggatttgcggacaaagggcccgcggccggagctggggtgtcgaggcccggaaggggagctgcagcaggtgactcacggccctgtccccacgggcgggctggcccagcccgaggcggagcagctcggccgccggagacggtaccgttctcgacgtgtccggtcggactctgtggagtagggggtggcgggtggagacccgcgcggcccacgcctggctttccggctggggcgtttctcgcaggcccggtcccttccgagtcgcgcccgccccgacgccggcctcctggacgccgctcgcgacggcaacgctctccagctaatgagctgtaattacccgcggcggcgcggggcccggcttcggtttgcgtttggagctccttcctccccacacccccctccccagattagccccggcctccgcggcctcctcctgaaattagtcgttggagaaaagcgagtcaaagggagacccctgttagtttcgctgggttcctcgcgggctgggtcggggtgccgggaagcgcgcgctgagggagggtggcaggcgcgcggtgccggggacggggacggggcggggggcgccgagccgggagaagcgccctcggggctccggccgagaagctcggaggagcccgctccctcgcccggtcaccccgcgtctccgcctggcgccgcagggccccgccgagctctcacttcctcctcgctggcctcctttgttgtgaagacgcacgtgtgtttaggagcgcagctggggtggaaaggtcagaggcacttcattgctcacgggtgacagctcgccccgcgccggcccgcagcctccaggcgcgggacccggagctgcgcgtttgcagggccacccccggcccacccgcctcggcctggccgcaccagacctgcccgggccggcgctgcggccccaggcggcctccccggcagggctgcgtcctcgcgcggtgtgtgaggtttgcagaggccaccagtcgcttggcagtggccgtgcggggagtcgctcggcctcaaggatgccagaagccctcgggcgagctgcaggctcagcgtgttccgagcccacgtgcctgcgactctccactctccttgggtctcggctttgcggcccggaggaggtggcggccgcagtcagccccggcctaggcccaggtcggcagtggaaagctcggcgggcttttctgcaccgttcccagcggcgggagcgagctgggaaagagtcgacccgctcccggctgggggccctgccgagtctggcctgccgaggagtgggccgagagcagcccctgtccttccttgcggggctccagtcccagctgcaggagaggaagcgggtacggggcgaagcgcggtgcttcggtttccgtggccagcgaggagcccctggcccacaggtcgagagtgtttataggcgtgcgcgagcaaagcttcttagcaacttgctttaccctcttctattcgaatgtttgaaaattaggcatgaaacacacatgtgtctaagaaggtgtttgtgttaaacatacatgacgtagtcatttctgcactcgttgcctgtgcaagtttagaagctatgttgagtggaaggagagaagttctgctcattattcggattttaaaaaccacatctaggtaatgtctcctactatcagtacattaccttttcgattctcacacccgatttaagaaaaccaacttctgccaaccttatttaacgtggcactacttattccttagaggtttgcacgtttggtttgtactgttttaggaataaggataattttcctgtgaaatattctaagaaaaactccttgatagtttaactaatagccagtacattttgaaattagcctgtgacagcagtccagatccatggcggggaatcagctaatttttaaaatagcctctgtaaaaagctttaggagagtaagtattttgtcctttatgcagaaatgggcacatttattttaatagcaatttatgccacgactacacaaatgccagcatgccacatgccataggcagtcttgcatttggcatgttgcacgtgtgggagggaccggtgctgacttctccagggttgtgtagttagcagacctttttctccagactgagtgcaaacaagcatgcattttacaatttattattccacaaaatttgtgtcattaataatcgatgcttgcaaaggaatagggctcgattgtactggtggcctgtaagctcctggctgtttcctgccgggtcagaaacaagggtcaggaaacaagagtgccttatagtcctattgggctctccctaactttgataggcgaggaaaggacatagggcaggggtctccgtttctaaggcggaatgtcattagttttgttcttaatggtgcaaaacccaagagactctgaaccctctgcaggtggaggctgcctggacagattgcccaggagggacaagaggtatccatacttgatcaggcctcaggcacccacaccagtgttctctgaggctgttagtggcacccaaagcaaggccagttggagtgacagtttccctctactcctgccccacctctgagagctctgtgagaggggctctcatttgcgaggccacccccccctcccccaaccccggccatttgcttcagagcttagctccgagtcccctgctccttgggcctgcctggtattgcagggccttctccactacaggcatttcatggacagttcatgaagccattagcccttcccacccgtcataaacaaatgtcgtgttaggggcaagattgatggtggccaagtcataaagctggccaggcaggacagaatatgattgtgtgcgggcagccattcttcagccaagcagagagattggggtgtaggaccaagagactgtgtcagtcttccccccacccatctgaggggggagctcaggagagctcccgacagggaagtttaatttattctgacaacgtccacttaggcaggaagagaaacccactgagatttgccatggggccctaaatgccagcttcagaaagcccactttctgaaatcttctatttccatttataacaaagccaaaagtttccctgcaaagagcttttattattgatgctttccctcccaccttaaccgaatgtcttcctttgcagctggggctctgtcttcttgtctgaagcttccgaggccttgatttcccaccctcttttatcccatctcccccttttcggtgggaatgcatcataaccattaggctctgtgcgtctttgtgtctgtctcttcgtctctgtcacttttccccatccttttcccttcctgcccccacagaaggctgtggggccccaaagtttctctgggatgtccccactccgagcccagctcaggggcctgcatgcctgccctccactgcaccatctgggggatgggccggatgcagccctgatgcggagcttgcgcccaggcctcaacagacttggggccacactgcagccggacaggcaggttccaggtcctagtcggctgggaaagaaacaatacttaagtaaatgaattccagctccaaaacccatttaggaaaatgaaagcagcttctccacgaaccttctcaacgtgattacgactggaaaattgagcaaaatgtaccatatctaccttattggaaaccaaagtacgacgcggggagcgtacggctcaatttaagacctttgttgtgctcctttcccatcttaccctggccccaaagagaccctctggtttatattacttttttggttgtttacttgattttttccctcactgatttcaaatttgcagcatattgagcgtattacgggagatgcagtaggatctggaatttccttgcacatagacctggccctgtcttggagaaggctggagctcacacagggagacacagccagagagaagaggctgggtctgtgtggtcctcggggagggcttggaattgctcccagctcagaatctccctgcctggggttgggagggtgacctggcaagcctcaatggggcttctcccgggccccctcctggtccagaggatgcctccctttctccaaagagcatcttctttctctggcgtgtccgtgggcccctccaagcccactggtccccatgggtgtcattaggacttgacgggcccaccctctcctgcagctgccactgcaggccgctcctactgaggggactcagtgggctgctccttggccccctaagtcaacacagcttggtgctacttgggtgggcatgggagagcaatttgtgagcccagcaagtgagcatcagagcgggagccaggaccaggcagtgaggcctctggcttgacccaagtggtgggaccccaggcagggcctagagaggcggaggaggctccagggaggggctccagcggggtggttatgtggttccctgtactcaaggttgggaaaggaaggagttttttggagagctttgaggacgacttagatcccgagatgggggagagggagatggaaagagagggggagggaagacgtggagagagggacatcccccctcccattacctaccccggggaaaaagcaggaaaaccaacacatttagcgccattaactcttaaggcctccacatttccttcggtataaaagcaggtcattggtcccggaggctgtgccggggctcgtcaaaggctacaaacaaaccggacgggtgggaagcacgtttcagcggcgactggatttttaaaaatctgctggtagagtgaaaacaaaaattgtcctccaagttggcaaaatcggcgtcccagacggtgcgcaggagggccctgcgaggcctgtccccggagccccgcgccagtcctgtaggcccggctgggtccgcagcccggtgttccactcgtgggtcgggcccggctgcggggtctttccgcagccgggacacccaggacagcagcggctggggagccggggccaggggcttccttgcaattccaatgatttttattattatcactcgcaaaggacaaacgcggccaaggccgggcctcacagtggctgtgctggtcatcgcgtggaggagtgtgcgctaacccaggggcgaggggggcgcgcccggtgtcccggggagagcttagaaggaagacgccccaccgtggtccctacagtcagggacagtctgggtgctagaaattcccagagagaactcgaggggctgatgtcctgggtcaccagtccctggtgcctgtggggcttcctgcgcgcccacccccatccccctcccccctctcaggttcgacggattctcccggaggcttaggacagtgatttacagtaagtggtgacagtggaataacgtgacagtccgctgcatttgccagctggctcctgggcaggcctacccgccgggcccgaccccagagtcgagtcctcggagccgccgggtaaagccccctcccccgccccggtgcagccccgcgttccccgcgcccggcgctgccggggaaaagtggcacaacaggaaagcctcgccagagggcccttcccagtcggcttcctcgccataaaaagccagactccagccgaggtcctgaccccttccaaatatacgttcccttgcccgcggcccgccactcccgcccgggcctcgggctgtgcagcttcctcctaggcctgcccgggcccatgcctcccccgaagcggcgggagtcggtgcagcctcaacttctactgcgtgtcccaggtcgccaaccagctttgctcgcgtgccgttggcccggaggctgccgcgccagtctctgcgtgcgcctgagcgcgctggagcatttgcgaggccagggctgccgacggcgagaggatactttgaggaacacggtgcttcagtcccgcccccgctctccgcccgagctggaggttggggcgcgctgagccgcagcgcctggacaagtgcgcgggccggagccgcccaggcctgcacccgggggctcgcggccgacgcatgcgcacgcgcggtggcgggtctgcaggcccgaaggcccggcccctccctcaaacccggagcggggaagcccaggggctgagagcctcggcccgggtcgcaggagctggggagcggggacgcgggcaggctaggtcttcccacctgccgtcggggctcctccccgcagcagcaaaggggtcccagtgcccgtggcagtgcatgccccagcggacacgctggctcccaaattcagagatcagaggggcggctgagaacggggcgtccgctgtgtgtgacccctgaccgtggaggaagggcgggagccgggagtaggcggtggggcccggggtcaggccgcggtcgtcggctcccggcaaaggcgctctggccggggaagggggcgagggtgggcggccggcctctgccgtcgtagtcatacctgggacgttgaaatgggctttggggatagagctcactcccagcgcgccccacaggagaagcccgcagctcaggcctgggccgtgcagaccgctgggcgggctcggggcccgaggagagcaacacggcgcgaggtccagtcgcgagtaataaccccgacagcacggcccctcgaagacgtgttccgggcaccggggttgtgagcgggggagcctcgggccttgggcccgcttggcacggggcgggggcgcctcctccaactcctggagatcaggcccagaccccgggtgttctcaggggacacactgtggacggtggaccagttcctagcgccgttttgtcccccattgcccctgctgcttgttaaaagtattagcgacccccgtgatggcaatccacaatttttggagggtgcgggtggcatgtacggacgtgaaggtctctttgtgaggcacgtccacgcacacacagggacactcattttgtaaaacctagatgggcgctgccaccacccctccatgccacccgcgtaccaatcaaggatgcaggttgtagaaaacacctggacgtgtgtgggctgcaccttaaaacagaattcacccagtaggcactcccaaatccaaataaagtgcgtagggtgctttgagacttggggggaggggtgttaaaaagttacttgtaaacaatacatttaaggttattttcaagtgaatgtttaaagtgctgcctgctccaagctctaataacacattagtgcgataataacactccttgcatctgccaggagccctccaactggctgccagaggttccacgaggttcgcggtggttggtgtaggcgaaggctactaaaaggggcgaaaaagaacccaaagccatgcctgtggggtttgccagcgccgacccgctcctcgccagcgcccgcggccaagcggacccggccttccgaaggagccatcttgcgcgcagcagcagcagcggctgagcctgagcccctaaacagctgcagaggtgtgacaggtttattatgctgggcctagctcgctcgcaattccttaaagacaaagggcagcagagagagcccgcgacggggcctggcctacccgggttccacgcacctcctgcacaaactcgggcaagattgctttgccatggtatgtgagtttaactgaaggtttaactttctcagtttttccttaaaaatatcaaggtggaagatgttttgtaacatttgaaaccaacagccaaagtctggcagagcaggaaaaaataagtttactgaaatttaattgagatttaagatagaagaaaccctgtaataagaattgtcttgaaggatgtccaaatgaatttctctcatagcacagaaatagataaaaaatgccgaagtaaatcgattctccttttctccttttaaaccacatacaccaggaagccaaatgaactcccgctccttccattactcagggtgcaggagcagtgagaaggttgcaaccaaaaatactttttagtttccttcaaacatggatgctgccatccgtttggagaagtagaattcaacatcatggctcaactggagctgcataaacccctgcctagaatctctcctgattctaggtgtccaaacaagcaacactgaattaaacagggccatggcaagcctgagggcccctggaatagtctctcctgggtgtgggaagggaggttccggtggtcagaggagagggggtgcctgcccatcagggtcaaggctaagaggaatgtgactctttgtgagatttgttggaggatgtgtgtgacagtgggtttgggagttgggtttgcaagtgtttgtgagaatgtgtgactgtgagatggcatgtttgtggagtgtatgtgcacttgtgaatggatgtgcatggatgtttgtgttcgagccaatgtgtgagtatgtatctgtgtgtgtgcccactatcccgcccaggctgaggcccggcctcccagcaaccatgtgtttccaattagcagcatcccgcctgggagtgcagagaaggcgagtcctgggacagcttctgaggagcgggtgggctagctcaggccccccagttctgctccatcgagggcgaggccgcccggccagcaagctttcacagcaactgggcagccacacaaagagccctctctcctgcgccagtcgttggagactcggtcctcccccagatcataaacctgcctgtgaagacgttcagaaatagtttacccgcactcacacacacatgtgcaaaggctggaattccatttgctataaagttttattttattttgcttggaaggggagtgagggggagaagtgtcctgacctaatttgttctagggcaaaatactgtatttcatgtggaggtatacacctgtacatgaatccttgcttgctgcctgtgggtgtcctgcacatgtgtgcgtcagcctacctgtagctgtacaccatacacagctcaggagcacacacctgtggtcttacccaggccacctaaatgatgcatgcaaacaaaccagatccagagatctgaggctgagccttaaacctttttattatagcttcaaattaacgctgatgtcgttcaagtgcatagcacaatgtctggcatgtattaggcacttaacataaatggctgaatgaatacattaaactgagatttaaaaagtgacctagtagtcataagaagaggctgcaaataagcactgtgtaaaagattctagaccacaaggaaaggcacaggctcagagacctctaggtaacttggtggctttgccatggaatgttccaacagtatttgcttaccttcaagtttcttcttctgacccccctctatttctcaagacttctttttcagatgggtgagagcccttgggttctaattatagtcagcagagaccagccagggtgtgaattcctcccttctgcaggaactaggtttccagagtgacttgtcaccaggagggggaaagaaatgtcccaggcaaagactaaggaggaggctcgccggagcacccccgccccccttagccttgcaggagtcctcccaccaagggctttctcaaaacagggcaaggcctgaccacagcgatctcattccaaggcctggattgtggggttgtttggggacccctatagccgtgttcataacttgggagaaaacatccacactgaccctgtgaatgctagttcacagaaagaccatttttaatatgaaaagagaaaaacaatttgaaggccccacaatttgttgtgtaacaacataatttcaagtaaagtgaatgtgattaaaacatcttgatttcacaaagccattcagaggaggcttcgacaaacgcaaagcgacccaaaccctggagggtcacatcccggctgctacaaacctcggcggggcggccccgctcttgcggccgggacagcgcagcggcagcaggggccgcaggggacccgcagattggcacgccgctccccatccccgcagcgcgtctgcaccggagactctgcggggattgtagccggagggcgggccgggctccgaggcgctgctcaggcattggggtttgtcctcatgagctccacgtcggcgtgcaccatctccctcaccagctcctgcaacacaggggtgggcgtgagggaggagcttctgccactctctcctggtgacaccccaccccgggtgtcggccccagagaggcctccgcgtccctcgttccagctcccctcacttctcccgcaccccgccttccgggctttgggcatcgcaggcgcctcaggcgcccgaccctgagagctgccgccctgcagcccggggccccgcagcgggcggcgtgcgccctaagagatactcacatcgaaagcgacccggggcttccagttcagcttctgtttcgctttggtgcagtcgccctgcagaaagtcctagggaagaagagggggagacgaagcaggcgtgggtcgtgggggtgggggcagcaggtcccgagccccgggaactcccaccgttccgctccctctgggcgcacaaggctccgggtttccctgctttcggtccctgctgtgcgcgttcagttgcggctctcggcgccgtaaatcactaggtcgcggttaagaatgtgctgtgcggacccgtgaggaccgtgaccgcgatccacccccagctacctccacacctcttctccccaaggcgtcccttgggctcttaatgctttttttttttttttttttttttttttataacatgaagttgtcagggacgctcctatgagaactgtttggaattgctgcacttctctggctaggagggaagtgagtaaatcaccaggcgcccctcccagctgcccgtgtccctgcgccgctcagctcctgccgcagggctggccgcgccaagcgcgcgtcctacccaaagccaccagccccgcggggaagggactcgggctgtggggcgcgaggccccaggactcggggacccctctacctcggcggcagcgtgcgaccctctttctaacgcggccgtggatgtttcttcccgggccgcagccaagcgcggttcttcctgggcggtggctttgggcttttcgtacccacagtcaagtcagttcacgtcgcctcccgcacacacgcgttcataaaacgaaactggagtttcacgaagcaattcttaggcttagcgtccaggaacgctgtagacggtctattctattctacccctattctactcggttcgattctgttcctaagaaaatgccgatctcgacccacttgtacttccacgagcggagctgcagccagcagctctgcaggaccccgcactgcccgccaccgtcccctctggcagtgccttcctcctcccgctttccccaactgctccactcgaggaaacaagggcatttcatctccatcgacttaagaggcttccctggaaggaaggctggctaaaagaaaaccagcggagaagaacttaatcctgctctcagcccctactcaccaatgtctttcttacagctctgtgaagactgactgacatgaaggttgagatgagaatttcaagatgaattacaaaataggaaagaaggaagaaaggaggaaaggagaaagggaggaaagaaaggagggaagaaagaaaaaagactttgagatacataattgctagaagtgagataaatatttagcttttgcatacacaaatgtactcgtcaaataacacatcagatgtgattcctcgaaataaaccgaacgcaaaggccgtacgaaaatagccgatctttaaaggtgagaaatactcgatcattctatttcagctacatacaaattaaagaacagcctaaaaggagtttcatcgtgtgaaagtaacagccagtcaagctgccactgaaagcctttcctgcttattttcttcagacttccctgaaacttggcaggtggggaatttgttctagattcatgatggtcgagagggcaggggtgggacctgctttgccctgggtttggagctcaccttctctgctgagccttctagagcagaggctgtctggatcctgctgaatgtctgcaccgtgggcttgcaatggggctgcagcagtacacgcagcgactctcgctgtcgttctcatcatccatcactactttttcaaacgctttgcatttcgcaatacactgaagtaccagtttcctccccagagtgttaatagtactaaaacaagttatttctgctggccctaaaagtccatatacagattcttcaggaaaagtagaatacaaaaagtagtaattagcaatttaacatagcgctacaaggaaatagcaatataagcagaaaaacgaagtaatttatttttctttcccctccctaaataaacttgtatatatttctacaggcttctattttgctataagcgtcacacaaagatactcattctttttccccagaggaagctgtgcaatgtggagtcatgcagcccatccctcccctctctcaatcctatagcggctagacggtgtggagaaacatggttattgtttaatcacatcacactggctgtaaatcaaccagcacgacataggatgcatttcatggctgtgaactcatagtcagcaaaaccctaaaacccagtttggcttcaaataatcttggtaggcttgggaaatggagctttgtattgtaattatgtttcctgtagttttctacaagtagctcacaatataaaaacaaccagggaactacaattaaggaaaaagaaaaatgtttttcaaaggcttagaaacagaccttgctaccatacactgtaaaagtatttcattgaaaccagagacgcacccagttaaacttctcaatttagttttgagcctagctccaatactgcagtctagctgcttcctttaaccttctgccaaggctctgtctccctgaaatttaattagaccaagagaccttgggaagaaaaaggatgaggtcccctcagaacaaaacattggctctctatgccagctgttcctaggctgacatctggactgggcagtaagcttatgttccaatcaacttttaaggaaagactacgagcatcccagcttgttttacacttaactgttcctgaaggaatttcttacttcttcccattgtgtcatttatagaaaagatatagtcaatggttcatcctgcaaggttctaggcacaggacatacttaaagggtggcgtggggagggcctgtgtgggaaagcgcacacagctctagaaggagagcaaggatgtggattcccttccttaaataaggcttcctctgggctgagaaggaattaggtggtggcaaatgctcatacaacggggtccaaactgctgtgctcagatacagaactgtgaggagtgagaggggagcgtgggccatgatacacgtccctttaatctttacctccctcttaaagatttttgaacttccacaaatcccctccaatagggtataatcagctcctaaggacaagagagaagaatgagcttatctactgtgctcttttcttcttttttgacagttcgtttccttcattatacatatgcttacagccttagtatgacaatgggggcaaaagctgaattaaagtgatgattttatgtacagcttcccaaaaggacttccaccagtgcaactgggtggtctggagcttttcttgaaaaaagagaaaataaagctttgagaaaaatttaaagtatttctatgtgaatatgacatttcctgaactctggcttctggtgtcttcactgttttcattgctattccttaggtgaactatacggtttcaatatgtaatttataattgtcaaattcaattaggtttcactgagcatttcacagcagcaaaacagcaggagcaatgtctccgtccacacagccctccagatttctgactcacggactgtgtgtattcatttgaccttcgggagttgtcctttagctgtaccatccaggcatacatttacagagctgcaaacagcagcatggaggagggcatgtttggctgcagccattttttaggctttcctggcttacgttcttgttaaagtgaactgataaagcgccagaccaaatgctggaaaagtcattaagcctgtttctgagcccacagtagttaacgcaaactccagaaaaggagagaccatagtgtgccattatcttctaccctaacgacaggtccctttcctcagatctctcccatctagataacaacgcagctttaaaatcacactggttagttttcattccttcccccgatgttattttgatccttctttaacacatttattgcctgggatcctcccacctccatatcactttctctaaaaccattgtggggaatgctattcaacagactgtatcacataggatgattttttgaggttcacagtctcatttcattttctccccttttcactgagtttgctttgggaaaactttaatatttagttcaaactaggtgttggatgccacatttcctcaacaggtctgcttataaggtttgcaaagaacatctgtttaggtggagaaatattctaagagtatgagatcttttggcagattattgttaaatttctaatgtacatcttggaagaaattgactcttgatgccctaaataggagaagatgtatggacagggatgttaataaggaaagccgagactgatgaaagccttggcgaaatatcttcaggaatttaagatacagagctgtgaggggcgcttaatattctttttttcccttctacttttcttagaaaagcaaaattgaggaatagctcaggttccaagggaataaaagaatgccagtgaatttggttcttgatccaactttctgctagtgtagagtgaataggaaagcttgactcttggggcaatgtttctttttcagaaaggcagagctgctaaacaacaacaaaaagcctcaggaaaaagctctcaagtctcacagagtatcctagtcaagattccagatagttgagaataagactgggaaataacaaaaaatgaattctgaaagatcccccagaaaatttgcaatatacgacatctcttcttgggtgtagcttgaagccttacatgctcacgaatttatcctttggtttaatccttcccaaagagggagcgaatgtccgagcagtaagaaatgctgtggtgttaacagcggtaatgaacatttcccctctgttcccttactgctgtctatccacacaaactgaagtggaagtcagacctctcctttcatgacaaggggcaataagagaggagaagaaaacagcaggcggtcctgtctgctcaggaagcgggactcggtgggactgtccgtaggcagagctcaaacaatgctcaggcagcctcagggaaatggagtcagtcagcactggcccgaggagggtgcaggcagtggagaggaagtggcagagggaggagcaggccctgcaccatggcctcgtccgtggccacccttatggaggctgccgtgtggcaatcagcgacggtgtagacttggaataaaaccaccactggacactcccactgtcgccactgtcacctctgctgggagcctccttagatgactccggacgtgcggtccagtcctcctgcatggtgcctaatgggcactttaaaatcctctgaccacccctctcgccgatcccacttttctgatgggatctcggtagaatttgtcatttgggatcagcggctgttaagcactactaaacaaatggaaagaaatgcatccatccgtatgcatgccccagaaaccagcgacaaagtccggctagtacagtagagctttcgtggaaagtaaatgagaacgtggtcttcattatatgcctacttgtcaataaagcttagggtggtaaaaaaagttacaggtgttcacttcaggaaaggagaacttaatggcatgtatagtgcaacctacatataaatggatcttttttcatttatattttaaaaatatggttgacatagttgacataaaacaagaattgtagttaagcaaaaagggctcataagctacacagacaacataattatttaggagaaatacaggatttaagcaagttaacttccttttaaacaaagttttaaaacatattctggagaaagccctttctagcagacatgctggagatgtgtggagatgagtgcggcggtcctctttcctccatgggacgaaccgcatgtggcctatgcagtttatgccaccccaaagcttgttcctttccccagaccaggcggttgccctggctgtgtccgcctgcccattggctgcctggcctttgactgggacagaggagcatgctccccacctcctgagtggggcccagcccaggaacatgcccactgtctgccctgtccagccctgtgcaactttgaggccttccccgttcaaccaggcagcagtctgagccagctgagcagaggaaagcacttctcagaggctgcgctgggaagcttttggggagctgcctactcataggtaggtgtctaacaggtttctttaaatgaaataaccatataagactttggggatgtcatcttgcatcatacctatttacaaggtgctgcgtctgtctgtacctgttctacatctgaattgcaatcgtggagttaattttttgtcagctttatttcttgatccggtgcttacagtagcatcagcctggggaaagctagattaatgactgtaactagagccctcttggttccggttagttcactgatctccactctgacgagctgagatggggggtggctgactcatagttgtgatgcgggggccatttaatgaaaaggagataaggttgtcagtgacctcagcattccaggcttcaaagccagcaccatgttggtcggaaattactggttactgttaataactggatctagggtgtaaagatttacccatgctggaaggaggtggcaaaaccccgaggacaggagataaagcgcctttgagtggaccgattagggactcttgtgacatcgctggcaagtggcaccctggatacaagaggaaggccgctgtgctcttgccacttagggctttctaccctcaaagcgctttatagacatcagctaattaaaccacaaaacaatcacatccaaaatgcaacttaagagattttgtatctgttgcaggtggcctctttcctagagatgaaagttctgtgcaaagcaaagtatctcggaggtaaaagctaaagtacttgtcatctggcttatctttaccccgcaccttctcatctaggaatgcctacctaggccacaggggatcctgaattgcataagaggaaggtaattttccttaagcttgtttccttctagtttgttaggaaatctacccacctcttagaaatgtccccccctccgccccaccaccactgcttcggacatgagtactacacagtacaatgtagatggggtttttttcctttgtggtttttctcaatgtatacagtatattaagtcctccaattcaacacacctcacttcaataatccttccttcctccctccctccctcactccccttcctccttctccccaatccaaatataaataacgtaacagggtcattcaaacagggtctatcaaacatatacccacaggctcctccaaatattcattccctcagccacttcttaagcaactcaaggcctagccaaacacctgaccacatccagattcttgctttttggccatttctctggggacttttatattggagaaaagattaagacaattactgtgatatctgttagcaaatttttggagaggtatggagaggagatgagcatgatgacaactctttaggtttactataattctgttatcactcatttggccacccatcatcacaggaaggctcagagggttttgtcaggtgtctatactacatggtcacctggcattccttctttacatcttcatgagaggaacaaagtcctataccgaaatgtatctgcagaggtatttcagccaagtacttgagaatgtcacaaagtcatctagtggtcaggttctgccattcctagtccagcagtcacaacactcaataggacaaaaccctctgtagaatgtgttgtaaacaatacactttacacacattaatttgagtggcaaagaggtctctaagtaatagatggtatcaacacacagaaatatcaacttaatgctggatggaaactgacacagaagagtccatattgtacatattgtatgatttgctgtatgtgaggtcccagaagaggcatccatggttatagaaacgagactggaggacaggggaggagtactgactgggaaggttcaccaaggaactttctggagtgaggaaatgctccttatatgaataggagtgtcggttacaagagtgtgtgcgtttgtcagaacagatcaaactgcagttcaacatttgtgcatttcacagtatatagattttatctcaacacaaaaacgtggccaggcatgatagctcatgcctgtaatcccagtgctttgagaggctgaggtaggaggactgcttgaggccagaagtttgagaccagcctgggcagtatggcaggaccctgtctctacaaaaaactttaaaaaattagctgggtgtggtggcacttgcctgtggtcccagctacttgggaggctgaggtgggaggactgcttgagcccaggagtttgaggctgcagtgagctatgattacaccactgtactccagcctaggtgacagaatgagacttcgcctctaaaggaagaaaaattcgtggacacaaccaacatggcggcattgctggagagacctggaatcacaacgtggctcaaccacttaactctttcttaataactctgagattcaggttttaaatctgtaaaacggggacagcaaggcttgcaaagttgtgtgagaattcaaaattgcacagctgcttttaacagctagaaccatttctaattcatcctatacaggctttccattgaggctattatttatcactaaaatgtaggaaaaacgattcttttcatttcttgcagtaacatcatggatgaagatgtaatatttttaagtgggctgttttatagtttttctttgatacttacatgcaacttttaccctgcaccccaacccttcctctaattttagataatcattttctgaatagctgtaacagagtgtagaagattttgtactctgctgtccctcaatttctgcaaacatttcacagtctcttgcttgcttgttgccacatatttactgctttaagccttggagaagcaaacgtggacaagagaaggccgtggctgtcatgaagcccatgttctagggtctggcagcacaagagttggcggagacctgagtttcggctgatgggagtgcgagggagcgactgcagagggggctggcttgttggagggcgggagggcactctgtactggctgggcggggaaggccttccacagaggtcactggatcagagatctgcacaatgtgcacgggccggtcacagaaagatctggggtgtgagggtctcttggggacactgcaggtaaaaaggccttaagggaaccccggagagaaggctgctgtgactgggcatggggagtgacggggagaggagcccatgaccacgaggctgggagggacacagaggcaggcactgttggcctcccgggtggtttctgccatggagcccaggcctttcccagcaaagccacgtggtcacaaggctctgctgtctggtcacagtgactgccttggagtatctaccgcctgcaggctgtggctggaggttggaaagctggctacctcaacctgatggagcttacaattctgactttctggtgccaatttttgaaagtatggaactgactataaactgtcatttagctgtgtgtctttttaaaaaggtggacgagtcgttcttgccctgcatggcccaactctaatacataatccctcttcccctggaaaatctgccactctttgatgtgcttggtccacctaacctaaaagcacctggcgactcaggtgctggccactgcagcgggactgcacccagctggccctgaaagacatggagactagggatcaccagaggcagtaacctggccatcctattccagcacctgctagggtgtgctgtgatagggctgtccctcttctggccaaatgaggacacgctcagcctctgaaggctactgagatgccgctccacccttcatttcctcctgcctgaagtgaagctgtgaccctgagctccccttgctggttaaaggccttctcctttcccagtagctctcaagaggatgaggcacagcactgaaacctgtctgtgttttgaaaacatttttaccatactcttgtgtgtatgtgtttttctctgtctctctctgggtgtgtctctctgtgtccatgtgcactatgtaaaagtccactcgtttacagtgagaacccgctcactttgaactccatcctttaccggcccagcacatccaatatggagtctgggctttgcttagagccacagtggggttttaagtgctgggggcatatgctgcgatgcatgagttcaaagatgcctgcagatgctgcctgtgggttagaaagaggggcaagagcaggggagagaccagctaagagactccagtcacagatgtggtgagagacgatggtggcctggacacgaggggtggggaggggacatagcgacggaaaggcgtgggtgaacttgagatgatcttggagaaagagcagaaaaggcctccctggggttggaggcggtggtgggggaaagaggactgacagagaactcctaggattttcatctgaatgagaacgtttttattgctttcaaagacattctacgaatcaacaatgccagaagcgaagttctcctagtggagtctgcgtgtgcctctcaccacagccctgccagcattacgtgtcatctcctttttcacgatttcaagattagagaacagggactcttccaaaagattacttctagagaatcacctgtgatctctcatatcattccatggagcacgccttcttgttttgatcctgatttgaggccaaagcctctctgctgagcaagtctgcttagctctgggaaaggggctccgtttcacatgtcctggctatgctcctgtgaaaggcaggctgaggggaaacagcttgtcttcttccgtgaccctggtccacgggacaggcgaggaaagggttaaggcaagctgtgtccactgcgcaaccaacatggcccactttcatcctccggctgcagcaggaggaagtccgagagggggcctttcacatgacatcataaaagcctgatttatcgccggccaccaaacatctagaaaatcataacatcctttcaggaaaatgcagtggaaaataatcaggctgactttgatgggagctttggtggggactccgagggcgacactgtgcggcgacccttggcaggtgctttgtttgccgtcggggccagcctcactgacaaggctgagggtctgtgctgtgcaaagcccaccggggggtgtggccctcaagtctgcagatgcaaacgagagcctggttcatactctgccaacttgcctaaaatgatactgcggtggatgtgaaggcgctttggaaaagacagctctatccaaatgtgagaaattactgattacagccttgtacataacccacagccactccaggcaagcagggcccagcctcggcacctccagcactgcgtctgggagctgctcttctctgctctcagctggggctatctttaggacactactgtttggttagagccctttcctcacaaggcacttttcctacgtcgcatttccagagtaacctgccaccgtggcagccctcctcatcacaaagaggactaggagacgacagaaaagagacattcccagaatgtcagcggaaatagaaataaagggatgagatccgcgtgccacgaggaatctgttccaggaatgtctgcatctcttcggtgcttctcttgctcagtaatttgatgaaaccaccagcaggaacctcttctttgatgtgcacaacatgctctccaaataaacacaggaaagagggacaagggtggcctagagtgtgggatagttctagaaatctggccacatcaattctaaaaagcctgttggcgtagaaagtaggcccatctttgcaaagtaatgcccactctgaaggtcttgggattcctgagtttggagaagacagacaatataaagattgagccagggctgacaaagggctagcctgaggctgaagttgggcaaaaatcaacccttggactcaatcaaagttactttcacttcatttaactgttatacaaggaagcgtgcagcatgaagatcactcacaagatgatcaagagactcatgtgagaacacagccaccaacacctctctggccgtcctgaaggtgcctggaaggttggtgctgatgcggcccccatggaggaacgggctcccatggagggatgagcccccaggatggagagctcagggcctagcctgacaccatgagcctaggattgggggcactggctgccacacaggcagcccttaccacgctacggttatgtccttgcaagtttgattcttacccgtaccagtgggccccggaaggtctgcccatgcctcacctgcccaaggttctgtgcaggaatgggaatggcgtggaaggcagcagggaggagaggtgaggcctaggcctggccctgtagcacaagctctgaacctgggcttgcctcacctgcacacgggggatcgctgggaccggaagaactctaacggcccctctccaagctactgcttgccattctgccaggcctgctggtgctcgcataacaccttgagactgcttcttgccttggggaccccgcactgtgcctcctagcccagcgccaggcatggctccaggcagctgtggcagcagagtggtaggactgaaggtgtcccagctgggctccatctggctcgttgtctgcactgagtctgagtcaagccaggtgtctgggggagctgggtgactcagcagattgtcaggtggcaaagggtggagaggcctcccttggccctggtctccctgcacctctgcccagtaaggcctttccaggcatctctccaggcccaggagccccgcagctgggcatgtgcttcccggccggccccgcagacagcacttgtgaggaggcaggtggcctggagggcagaggtctgactcagttctggtgtgctgaacaaggccccgaggaaactactgcttcaaactctcccccgtgaaggcacggctggacttccggggagctgtcacctgtgccaagtcaggctctctgggtgcttatgctctctcgtggctataaagcggacacttgtggcaccttattgccctgggtggagcaggtcactgaagcacttgcatcacacataaataatggcacaaggggaagcacgttccgcaccagcacagatcataaccaaatgcctgacctactgcagactgttgtggggacagaggcctccatgcagaaggctcccaaggggagttccctctgcagtgggccagtcagtccctgcactggctgttcagaatgggttttttaccagtttagacaagggttccccgagggcccttagaccagcagcaacatgccccctgtccttcagccttctaacagtcctacgaggtaggcaaggaaacggcggtgctggtaagtgggtaacttgccgtgtgccactcgaggtggatcctggattcaaacccaggcttatctgactccaaagactaggttactagcccattaacctagaccacctcccctgagggtcttctctctttagttatgtgtgctgacacttggtaacaataaatgcaaagccatgcgttcaccaccaggtagaggctgaggtgtgtaaagaaagcatttgccaacaacacggacagaagagagagaatgtgcttctgcgctacaggggtccagattagattagagcagagacaggaatggaacctaagagttagaaacaaaggtggggggcatgagagacaccaggcagaaatgagcatggtctcttcatgtcaaagccccacactaaaaaagcctgatgccgccctgggtttagagcaaaacaaaaattccactgcttttctccagctggagatgaatggtttcacagagggaaccctggctgaagaaaaagcatctttgatttggttaattaacgtagctttctcgaaaacactgatcagctcctcgagtgccagcaggatggccatgatcctgaactttatacttatgagcagcttaaacacaggccactggctgtgtgcccatggattcattctatgccccacccccccaacccccgacactatgaggccgtgagactcccagacttcctcaggcaggactgggctctggggggcattattcaaggaagtattgcctttgaggatggcaaggaacactcagagccacctgacatgggaactctggggtttgggatactaccaagggacctttgcttggtatctgttcccttcagagcactcttttctatgaaaggaacccaagtcacagaattagaaagaactctctgggtcttattaatgctaccaccatgactactaacagaaacacaaatattccttagggtgtggagactgagggagaccatgttttcaggtcaatgggacctgcatgagtagagtgagtctggaggtacataaagactttatctacaactacttagctcatgagtctggatagtgagagtgcagaaagaaagagacaccttgaaatcttcttattccatcctggccaacattcgttcatacatgcagtcagcccagaagctcaaggtcagtgatggagactgacatagatggtgatctccgacaggtacctgtgtctgcggcaggcaacaagggcaggctagcagataaggaggtgggtgcctgtggatacggggagagggctcaggcttgaagaggagcaggagcggaggagagagggctgtgtggtggcctccacaacgcaccatgttaaggatgccactgaggcacttgcagaaacagatactgggtgacgtgcctagcattttcccactgggggaagtggaaggattaagctaccttcacagtgggacgcaggaggcgctcacaggccagtgaagtgagggctcttgggaaatacttcccagagaagatattccctgagctgggttgtgaggaacgagcagaaggtagggagacgaagtgcaaggctaacagtccagatgcagacagctgttcaaggacccagtggtgttagagaacctcccagaactgccccgtttagtacggctgggggccaagtggaactctctcgtttgctgaatgtggaccccccaggtgcaaagcagtcatcgccagctgagcatgagctttggagtcagatccaagctgaggccgggcacggtggctcatgcctgtaatcccagcacctgggaggccaaggcaggtggattgcttgagctcacaagttcgagattagcctgggcaatatggtgaaagcccatctctacaaaaaccagccgggtgtggtggtgcatgcctgtaggctcagctacttgggaagctgaggtaggaggatggcttgagtccgggagacagaggctgcagtgagccaagatcataccactgcactccagcctgggtgatagagccagaccttgtctcaaaacaaaacaaaacaaaatgaaaacacagatccaagctgaattccagttctgccacttacttcctggatgccctgaacctcactgggcctaggttccatgatgtataagcctgttgaatgatatcgaccaatgctaaagatcagagataaaatcagtgcctgatgttgggtaagtgcccgacagacagcagctcctgccactgcacagtcagtgacggctctactggggcccaggggatgcagttagaccccagaaggatgtaccagtccatggcaccagctcggcagcactgttgcccaaggctcccccacatcactcttcagttctagcaatctgctgccctcctcatgcagttggttcccgacagcctggaatatgcttcctcttcttcactgaaactgtgcccgtggagaagcacatgggatttagggtcacagagacttaggttgacactagattcaccacgtttgaggtggcttggtgtcctcatcctcaggcatgccacacctgcaggtgtgttatgcacctgtcacggggtaaggccttccacgtatgctcgctctcctcctgcctcaggtccctctttaagtgttggccactccccagccttgaacctccctgacctctctgctgagcggctctctgaggctatcccatgcccgtggaacatgctggatgtggctgtgccttctaggtgcccgttttggagagaatacatttcttataaacagcagggcaggctgtctcaggtgtggttccagagcacatggaatgtgcccttgcatccccacagcgcaggcccagggctgccgacacagcagccaaccagacacacggggagctcatgttctactgtgggggcactgtcagtaaacaggcaatcaaggaaacaatcaggtggttacaaggcctctgataaaaagaaaattgggtaatggggggggtcacgaatgccaacacggtactgtttaggcagagttatgattgacagtgggggctgccctgggtaaagcttgaggtggagggagcaggctgggctagggccctgaagggccggctggttagaaaccctgaagtccagagtgaccccatggggctggggtcagggaagctgttacaggtggcgttggctccacagctgtgagaattatttctggcttcctcaggaaagatccctgtatatatttcttcctctgggtgctcattagaccctttgcctgcagatggtcttaggagttcccttggggaaactggtggctactcacatgctggagattggactggactcattttgggacatcctgagacatgctgtcattcaggggcttctggggctcagtgaggtcctcatccattcctgtgcaccctggaggtcctgaaggatgtaattcaggggctagtcttgtgttcctcagggacaatctatgtcactgtcacgttagtgaagataaatggagagaaatatgccctgccagctggtggcactcagaaagtgccatggagcagcacagcctgcgtctcagaatggacaggaaaaaagctttatcttcttcctgtcaaaggagggaaataccttgtggaaggtcagggtgccgtgcacctggcaagtgcctgcctgaccccagcctgtggcagaacctgaagggccactgcgatctttatcaggtgactcagtgcttagcactggggaagggcggagcatggagcaggcacagaaggtcccgtggagaggccctgagcagcccagacaggagcgctccattctgctgctcaaggcattacctccagcagtcaggcgcgtacagctcgcgtctctcggatgatttctctctctctctctctctctctctctcttttctatccctcttctctctccctttccttcttcaggatttaattaattgaaagtcaggtttttaaatattggtcagcctcctgttggatatttggggtctgccctggggctcccccacgcatctctctgacttaccttcatgaaaggtgaagcggaaataccccaacaactcggcacacttcttttgtcccaaacagtggaagcacactaggaagttctcagaaccccgaagaaggccctcgtttcacctgctccttcaggatgcccctgtcctttcctactggcccctggctcagaaagatcgccctgcgtagcactctccttttcatcctgtcctcgctcacttggaaccctgctcttcagaaactaaggggagcgcagcaagcctcaattctcttgaaatctgggcagtttccatctttttttttttttttttttttttttaagaaaaaaatagagtctcactctatcgcccaggctggagtgcagtggtgtgatctcggctcactgcaacctccacctcccaggttcaagagattctcctgcctcaggttcccaagcagctgggactacaggaatgtgccaccacgcccggctaatatttttgtgtctttagtagagacagggtttcaccatgttggtcaggctagtctcaaactcctgacctcaaatgatcggcccacctcggcctcccaaaatgctgggattacaggcgtgagccaccacacccggccagtttccgtctttaaacctaccccaaaggttctataactgttgctcagatttgtctgaaaattttggttttgtcagggagaaaataaatttctccttcaaaatctccaccttccccctaaggtgaaggtcaacctggtctttgtcctctaggttggagaacggggttccatggtgaccatcgtcctgagtccttatgcataacagacgtggagtaatattttgactttataaagcctgcttcatgatggcttcttgtgtctttgtgaatagcacaggtgggcagctgtgctggtcccatgtgggcgacaggcaagctgggcctggacggtctgtctctccaagtccaacaggaagatcaggatgggcctcggatctctgctcctaaagccgggccccacgaagccccttccctttactccttatggagtccccttcctcactgagttttttcccctattttaaaatagctcttcacagagaatctttgggggcttttaaacagccctggtcttagcagagttaacacaaccacatcatgagggatctgctgacgaggggggcatcctgcagagccggtccatacttccttttattttcttatcctgagtctcttcccctgagtctccccagagaaactggtgattctcaacacatcctgtggagtttgtgaaaagtggagcttggtgaggtcctcagccaggtgagatgtgccggaatctccaagggtgccctcatagaaggtgtctgaggattgattcaccagaccagacaagtgtggggggcagggacagcatctcactcagcttggtgtccctgagacccagcccatttggcaggacacacaggcattgtaaggaaatgcaatttccttacgccttcctgaaaacgaaccctgactgcccacggggcagctgagcccccgaggctctgttgctgcaactgtgctcatctccaggtggctgtcaaggtgctcatgccttcctcggctcccatggcataaatgaggcaaggagagccttcgagagtccttttagtagagtaggatgtggttaccagggccttaggcagttgtggggatgctggtcaaaggatacacacctatagctaggtggggacagcggaagttcagaatcagcagatgcatagagacaggggtggagaggtgaccacctgggccacggtgggggggacactggggactgctaatggttatggagtttttgcctccggtgatgaaaatgccctagagttgattgtggtgatggctgcacactgagcagactaaaacccattgatcatatactttaagtgggtgaactgtatgatgtgtgaattatacctcaataaaattgtttaaaaattaaaaaaagttgaaagtctcttcccagctcccctcccctctaaaaaaaaagtccttttaaaaaccctgagaggaaacaaaggagcaaagcaccctgcaggtgggccctctctagaggccaagcctgactcctcagctgacaaggctcccagggcggacggcccttacccagcccccgttgtccccagacacctcccctctgagccccagggcccagcgctgtgactgacattgccccgtgtcctcggcctgctcttctggcaaggaacccccggtctgaggtaggtcagcacggcacctcagcctgcagatactagtagcctgcagccaccagtatgaggatccactcttcctccagggacccacgcggggagggccctccaccgccaggggagacccctgattccacccgagcgaacgtgtgaacgatagcggatggcactgcagctgtgactagggcctgtcaggtggactgcagattgccacctggaagccctctgctgggcatccaaacctgccctcaacacagccagagccttcctgccttcctgttggcgtctcaccattgccataaataggctgcatatgagccgctaggctgcactccccacaggctcaaaactttgctgctgcctgcactttgctcctgcctttctcaccaccttgcactttttcctcccttcccaagttccccagctgaaattctctccactttagaagaccaaatttgtgctctaagtcagccaacatttctcagcatctcctgtcgggaggagccaggtaccgtcccacagggagctgctctaatccctgctgcccgcccaggaaggagatcccaaggtccctgatttatggcgaagaggagggactgtgaggttttctggtgaccacagagccagggttcacggccacccccactgccgtttcttgcacctgtactgtgagccttgcacccactgcaagctctgacagctttggctctcagggcctggccagcacctacattctgcagatgaggaagctgaggcttagtgagtaacttgcccagagtcacgaggttaggaagtggggtgtatcaggatgagattcagactctggtcctttttttttttttttttttaaacgagacggagtcttgctttgtcgcccagcctggagtgcagtggcgtgatcctggctcactgcaacctccacctcccaggttcaagcgattctcttgcctcagcctcatgagtagctgggattacaggcatgtgccaccacgcccagctaatttttgtatttttagtagagacggcgtttcaccatgctggtcaggctggtctcgaactcctgacctcgtaattcacccacctcggcctcccaaagtgctgggattacaggcatgagccaccgcgcccagcctgcttgattcttataccctgtcatccagcacacttccttccccaaactgaatgcaagccccccatgggcagagaatctatggtgcccattttcagtcacccgtgctgtgcctagcatagcttcctgcacccatcagcgctaaaatatcccacggatgctgtcttgatggcagaaggcacttttcaatcactgtgcaaatggcgccttctacccccatgatggcatgtgcacggcatgctcgagtgcccggggacgctcaccctgtcctcctggaggtccggagccctcgcctggtgttccctgtgctgtccttgccttgcctcacttgctcttttcctcccactctccgggtccaaccttggctttagtgtctctgctttctgcaggctctcctggggcgggcccctttctgcagacaacttcaactatggcctctatgtgaggacatcactctatcttcagcctttgcctttctcctggattccagggctgcattcttctttccagcctgacaactgcagccagtgcccatggccaccgcagcgtcaccctgtctacagcaagcatctcctgtgagaagtctccacatgcaacttcgcttctctctagcacagtgtccctctcatttctctgaggacttgttaacaatctgtggttattttgccaatccacccactaccctgtcgtctgcctccctagaacatcagtgctgagtgcactatatggacctctgtcttcaggacctggcactgtgcctggcacgcagaggcactcgatcggtatttgcagaatgcctcaagggatgtttaaaactgaagtcaatgtatctccccccaactaaatgcaattgttcttttcctgttgcactgttaccattcctctcactcactcccatccttgagatttaaaatcttagccacctttagctccttcttctctattttgccacttccagtacctctggcacccaggctttccttgcacctcttctgcatcactgctgtggcccaagccctcagttcccgtgtccttggaggatgacagcatcctcccgcttcacagaccagccctcccctgctctggggtccgtgctcattccacctagggcttttctgtgacagtcccttagtcaggaccctccattacttgccaaataaaagccaaactctcaccctgacctccaatatctgaccactgtgttttgagacagggtctggctctgtcacctaggctggagtgcagtggcacgatcatggctcactgcagcctcccaagcagccgggactacaggttcatgccacggcacgtagctaaattgtgttatgttttttttagagatggatttttgccatgttgcccgggctggtctcaaactcctgggctcaagcaatccacccactttggcctcccaaagtgctgaaattacagtcatgagccactatgcccagcccagtatctttcaatatgatcccaacctccttttccaggtttatttcccatttttttccacctatatcctgcattcaggaaaagtcagattaaccaggaatcaggcataggctgaagactccccacttctgcacatttagaaaactccctgaagaggaattcattgaatgcctgggtcctgggcaccccatgtggtggggggtggggtggggaggttagttcaaaagccaggtcagagggggcctactgggctcactcagtctcttacaaaaagaccaccttgatggctcctgtgggcacgggtggtagccaggcctcttgccccttccttgccctggctagggaggaaggatggcggaaagggctggactgctttgcataaaggtgacaagggctgctcagggcagctgggcaggtgcagagggagaagaactccatcccctcccagaggaaccagtgttctgcaagaaacaatgaccaggaagcttcgagaacaggcctgtccacgatgtggctttaaagtggtttcttaaccaagacataacccctccgctgaacacctgcagttatagaacatcttatttgctgtggaacgtaggaaatggaggctgcagggcattcggagtttcactggagccaggtgattctcagagctactggggagacatggggtttcctgctggatgggaacaggaatttaagcagcttctccccacccccaaatcctaaaaaaagagtgtccccagcaggctgaagggtctggaagctgatacctgggatactgaaataagaattaataccttcagctataccagaggatatggtcactctctcaagagatatattttgagtactcactacaggcaaataggtactagactctgaacagggtggctaatgaacaaggtcaaggggacacagacacatatgccagtaactgccatgtagtgtgacaagacactgacttagttcctgggcacagtggaaggaaagtaggaaagggtgtgagtcctcactcttgtgtggaacggaatgctctggagagaaggagtcatctgggctgagtcctgaggaatctcggacacattctcaggccggagtgggggaaggacaagcccttccttcctcctggaatgtccttctcagcatccggacctaccgacactgtactgatccctccagtgccagccgaatgccacctcctctcagagtacaacgatgctagcggtctggtcttcccttgaaccacagctgttctcatctcagggaccagcacagttcccacatccctgatgctcgggtgctctgtacctgcaggggcttctcgacggtaaaggaactcggtcttgttcattagccaccctgttcagagcccatacctatttgcctatagtgaggactcaaaatatatctcttgagagagtgaggacatcctcgcctaaagctctttctcctgattagatggaataggcctggggctctgtaatttgggcaatggcttatcatatcctctctcctcaggatctcctcactattactcttcagaagtgacaatataaacagtgtggttgttctgtgtggcagatagcagtggaagttacgctggatacatttcatgtttccaatatatctggacatttcaggttctaccttggtcggaaggaaacctttctctccagcgtcatgctttctgatgtagctgcccacttatttgaagctgcctatgatctgtactcagtaacacaagagactctaaagattattttacatcaccactaagggcagctccataaagtatggcttaatttcacaactagcctcacaatgctactgtaatttatgtggggaaaacttagaacaagtatcaatagcaaggaatcattttgaacacgtaaagaatatgcgatgaagtcttcctctgcacacaaaaaagcatggctcttgcctccttctttgcaaagagaactgtcagatccgttagtttcataatactttaatcatacattgtctagctaattaccactcccaaataatgaaacgtaactttcaacgatttagaatgccacagttttttgtaaaatagctccgttttactggtctaagtttaaactattacggcgatcactggcctgctgcctccctgtttgatttctccactagctgtcccagagatcttgctgataaaagatctaaaacatacagtcttccgagagctcttatttgacttttttgctccacatttccagatataatggttctcaaggcaacactatacagaatcagagagagaacatgagcttacgtttaaggcagtcattcacatttacacacatataattacaactcttatttttaaaaagtgtaaatttatgacactgtccttcaaatattattcatacatcaggttttgggttatgctgcaaatcacttgccagtaagtctagggttcatggggcaggaatgacacgttaaccctgtctagccactgggggtcctggtttggaataatactgtgatgtactgtcaggaagtaagcttgggtactaggaagacattagccgattactcttttggggttttatacagtcttgctgtgattcacctcaacccgtgtttcaagtgtatgtcattaactcttcacagacaggaaaactcagtctcagaggtcaatgacttgcctttagttcaaattgaggtcagaatatctgataatttcccaactctaaatttaactcatgatacttatgccatgaacattaaaactgactgtacactgtgcatccagcctatttcaggacacatttaataatacactttaattttgctcataatacgccattaaagcaagagtcctagaggaattgaaatctgctatctttgcaccttgtaacatgaaggcacgttatccaaggcacagatgcactagatccaaatgctcctgccctaattactgcatctttatgtgcaggccaaagggcatctttttccctttgctacattccaactcattctcaaacacaaggccaatgaccccaggttctttccaaactgtctcttctttagttttaaagaaagtttattgcctccttctccaatcaagacatttttactgcacttcgaagacaccccttagatatcatgctcctgacagctctgcaggaaaacagttttaggtgacttgtcactttatgagggtggccagtgcctggcttcacagttttctaaatccctctgtcaagagaggccttgaaagagcagactggaactttccagcagtctcctggccagtgaatgtgcaccttgccttctgaaagtaacttccgaagtgatgatc

SEQ ID NO: 1399 - DNA, 461 bp, Homo Sapiens
cacgagggttgcgggaggggtcacaggtcagtgccggagcctccgcgagtgaaggaagacgaagtgcgtgacccgaccggctgtggtgttccagtccccactgaccagtaggagcagcagggcgtcggcttgtgaggtggcttttcctcggggcaaccgaggaaggccccaagaggacaatggattctggaactcgcccagttggtagctgctgtagcagccccgctgggctctcacgggagtacaaactagtgatgctgggtgctggtggtgtagggaagagtgccatgaccatgcagttcatcagccaccgattcccagaagatcatgatcccaccattgaagatgcttataagatcaggatccgtattgatgatgagcctgccaatctggacattttggatacagctggacaggcagagtttacagccatgccggaccagtatatgagggcaggagaa

SEQ ID NO: 1400 - DNA, 5725 bp, Homo Sapiens
cctggaggagggctctggaagtcacgtcaggttggctcttcaggttcatttccatagttccctgcggcctctgccttggggagttatgttttgttaccgagatccgcgctaccagattgcaccggggctgatttgggggctgggaatttgccattctgctgtacagacactgatttttttttcttctttttaaaaagcaaggtttgttttcattttggattttaggtgatgggcaagtcagaaagtcagatggatataactgatatcaacactccaaagccaaagaagaaacagcgatggactcgactggagatcagcctctcggtccttgtcctgctcctcaccatcatagctgtgagaatgatcgcactctatgcaacctacgatgatggtatttgcaagtcatcagactgcataaaatcagctgctcgactgatccaaaacatggatgccaccactgagccttgtagagactttttcaaatatgcttgcggaggctggttgaaacgtaatgtcattcccgagaccagctcccgttacggcaactttgacattttaagagatgaactagaagtcgttttgaaagatgtccttcaagaacccaaaactgaagatatagtagcagtgcagaaagcaaaagcattgtacaggtcttgtataaatgaatctgctattgatagcagaggtggagaacctctactcaaactgttaccagacatatatgggtggccagtagcaacagaaaactgggagcaaaaatatggtgcttcttggacagctgaaaaagctattgcacaactgaattctaaatatgggaaaaaagtccttattaatttgtttgttggcactgatgataagaattctgtgaatcatgtaattcatattgaccaacctcgacttggcctcccttctagagattactatgaatgcactggaatctataaagaggcttgtacagcatatgtggattttatgatttctgtggccagattgattcgtcaggaagaaagattgcccatcgatgaaaaccagcttgctttggaaatgaataaagttatggaattggaaaaagaaattgccaatgctacggctaaacctgaagatcgaaatgatccaatgcttctgtataacaagatgagattggcccagatccaaaataacttttcactagagatcaatgggaagccattcagctggttgaatttcacaaatgaaatcatgtcaactgtgaatattagtattacaaatgaggaagatgtggttgtttatgctccagaatatttaaccaaacttaagcccattcttaccaaatattctgccagagatcttcaaaatttaatgtcctggagattcataatggatcttgtaagcagcctcagccgaacctacaaggagtccagaaatgctttccgcaaggccctttatggtacaacctcagaaacagcaacttggagacgttgtgcaaactatgtcaatgggaatatggaaaatgctgtggggaggctttatgtggaagcagcatttgctggagagagtaaacatgtggtcgaggatttgattgcacagatccgagaagtttttattcagactttagatgacctcacttggatggatgccgagacaaaaaagagagctgaagaaaaggccttagcaattaaagaaaggatcggctatcctgatgacattgtttcaaatgataacaaactgaataatgagtacctcgagttgaactacaaagaagatgaatacttcgagaacataattcaaaatttgaaattcagccaaagtaaacaactgaagaagctccgagaaaaggtggacaaagatgagtggataagtggagcagctgtagtcaatgcattttactcttcaggaagaaatcagatagtcttcccagccggcattctgcagccccccttctttagtgcccagcagtccaactcattgaactatgggggcatcggcatggtcataggacacgaaatcacccatggcttcgatgacaatggcagaaactttaacaaagatggagacctcgttgactggtggactcaacagtctgcaagtaactttaaggagcaatcccagtgcatggtgtatcagtatggaaacttttcctgggacctggcaggtggacagcaccttaatggaattaatacactgggagaaaacattgctgataatggaggtcttggtcaagcatacagagcctatcagaattatattaaaaagaatggcgaagaaaaattacttcctggacttgacctaaatcacaaacaactatttttcttgaactttgcacaggtgtggtgtggaacctataggccagagtatgcggttaactccattaaaacagatgtgcacagtccaggcaatttcaggattattgggactttgcagaactctgcagagttttcagaagcctttcactgccgcaagaattcatacatgaatccagaaaagaagtgccgggtttggtgatcttcaaaagaagcattgcagcccttggctagacttgccaacaccacagaaatggggaattctctaatcgaaagaaaatgggccctaggggtcactgtactgacttgagggtgattaacagagagggcaccatcacaatacagataacattaggttgtcctagaaagggtgtggagggaggaagggggtctaaggtctatcaagtcaatcatttctcactgtgtacataatgcttaatttctaaagataatattactgtttatttctgtttctcatatggtctaccagtttgctgatgtccctagaaaacaatgcaaaacctttgaggtagaccaggatttctaatcaaaagggaaaagaagatgttgaagaatagagttaggcaccagaagaagagtaggtgacactatagtttaaaacacattgcctaactactagtttttacttttatttgcaacatttacagtccttcaaaatccttccaaagaattcttatacacattggggccttggagcttacatagttttaaactcatttttgccatacatcagttattcattctgtgatcatttattttaagcactcttaaagcaaaaaatgaatgtctaaaattgttttttgttgtacctgctttgactgatgctgagattcttcaggcttcctgcaattttctaagcaatttcttgctctatctctcaaaacttggtatttttcagagatttatataaatgtaaaaataataatttttatatttaattattaactacatttatgagtaactattattataggtaatcaatgaatattgaagtttcagcttaaaataaacagttgtgaaccaagatctataaagcgatatacagatgaaaatttgagactatttaaacttataaatcatattgatgaaaagatttaagcacaaactttagggtaaaaattgcgattggacagttgtctagagatatatatacttgtggttttcaaattggactttcaaaattaaatctgtccctgagagtgtctctgataaaagggcaaatctgcacctatgtagctctgcatctcctgtcttttcaggtttgtcatcagatggaaatattttgataataaattgaaattgtgaactcattgctccctaagactgtgacaactgtctaactttagaagtgcatttctgaatagaaatgggaggcctctgatggaccttctagaattataagtcacaaagagttctggaaaagaactgtttactgcttgataggaattcatcttttgaggcttctgttcctctcttttcctgttgtattgactattttcgttcattacttgattaagattttacaaaagaggagcacttccaaaattcttatttttcctaacaaaagatgaaagcagggaatttctatctaaatgatgagtattagttccctgtctcttgaaaaatgcccatttgcctttaaaaaaaaaagttacagaaatactataacatatgtacataaattgcataaagcataagtatacagttcaataaacttaactttaactgaacaatggccctgtagccagcacctgtaagaaacagagcagtaccagcgctctaaaagcacctccttgtcactttattactcccagaacaacaactatcctgacttctaatatcattcactagctttgcctggttttgtcttttatgcagatagaatcaatcagtatgtattcttttgtgcctggcttctttctctcagccttacatttgtgagattcctctgtattgtgctgattgtggatcttttcattctcattgcagaataatgttctattgtgggacttattacaatttgttcatcctattgttgatgggcacttgagaactttccattttggcgctattacaaatagtgcaactatgaatgtactgcatgttaccatcttacttgagcctttaatggacttatttcttcaaatccttccaaaaattattataagcattgaaattatagtttcaagccaactgtggatacccttaccctttcctcctttatcacaaccaccgttacaagtatacttatatttccctaaaatacatttaaaacttacctaagtgacatttgtagttggagtaataggagcttccagctctaataaaacagctgtctctaacttattttatttccatcatgtcagagcaggtgaagagccagaagtgaagagtgactagtacaaattataaaaagccactagactcttcactgttagctttttaaaacattaggctcccatccctatggaggaacaactctccagtgcctggatcccctctgtctacaaatataagattttctgggcctaaaggatagatcaaagtcaaaaatagcaatgcctccctatccctcacacatccagacatcatgaattttacatggtactcttgttgagttctatagagccttctgatgtctctaaagcactaccgattctttggagttgtcacatcagataagacatatctctaattccatccataaatccagttctactatggctgagttctggtcaaagaaagaaagtttagaagctgagacacaaagggttgggagctgatgaaactcacaaatgatggtaggaagaagctctcgacaatacccgttggcaaggagtctgcctccatgctgcagtgttcgagtggattgtaggtgcaagatggaaaggattgtaggtgcaagctgtccagagaaaagagtccttgttccagccctattctgccactcctgacagggtgaccttgggtatttgcaatattcctttgggcctctgcttctctcacctaaaaaaagagaattagattatattggtggttctcagcaagagaaggagtatgtgtccaatgctgccttcccatgaatctgtctcccagttatgaatcagtgggcaggataaactgaaaactcccatttaagtgtctgaatcgagtgagacaaaattttagtccaaataacaagtaccaaagttttatcaagtttgggtctgtgctgctgttactgttaaccatttaagtggggcaaaaccttgctaattttctcaaaagcatttatcattcttgttgccacagctggagctctcaaactaaaagacatttgttattttggaaagaagaaagactctattctcaaagtttcctaatcagaaatttttatcagtttccagtctcaaaaatacaaaataaaaacaaacgtttttaatact

SEQ ID NO: 1401 - DNA, 2549 bp, Homo Sapiens
ggacggttcggctgacaggtccacagagctccactcacgctcagccctggacggacaggcagtccaacggaacagaaacatccctcagcccacaggcacgatctgttcctcctgggaagatgcagaggctcatgatgctcctcgccacatcgggcgcctgcctgggcctgctggcagtggcagcagtggcagcagcaggtgctaaccctgcccaacgggacacccacagcctgctgcccacccaccggcgccaaaagagagattggatttggaaccagatgcacattgatgaagagaaaaacacctcacttccccatcatgtaggcaagatcaagtcaagcgtgagtcgcaagaatgccaagtacctgctcaaaggagaatatgtgggcaaggtcttccgggtcgatgcagagacaggagacgtgttcgccattgagaggctggaccgggagaatatctcagagtaccacctcactgctgtcattgtggacaaggacactggtgaaaacctggagactccttccagcttcaccatcaaagttcatgacgtgaacgacaactggcctgtgttcacgcatcggttgttcaatgcgtccgtgcctgagtcgtcggctgtggggacctcagtcatctctgtgacagcagtggatgcagacgaccccactgtgggagaccacgcctctgtcatgtaccaaatcctgaaggggaaagagtattttgccatcgataattctggacgtattatcacaataacgaaaagcttggaccgagagaagcaggccaggtatgagatcgtggtggaagcgcgagatgcccagggcctccggggggactcgggcacggccaccgtgctggtcactctgcaagacatcaatgacaacttccccttcttcacccagaccaagtacacatttgtcgtgcctgaagacacccgtgtgggcacctctgtgggctctctgtttgttgaggacccagatgagccccagaaccggatgaccaagtacagcatcttgcggggcgactaccaggacgctttcaccattgagacaaaccccgcccacaacgagggcatcatcaagcccatgaagcctctggattatgaatacatccagcaatacagcttcatcgtcgaggccacagaccccaccatcgacctccgatacatgagccctcccgcgggaaacagagcccaggtcattatcaacatcacagatgtggacgagccccccattttccagcagcctttctaccacttccagctgaaggaaaaccagaagaagcctctgattggcacagtgctggccatggaccctgatgcggctaggcatagcattggatactccatccgcaggaccagtgacaagggccagttcttccgagtcacaaaaaagggggacatttacaatgagaaagaactggacagagaagtctacccctggtataacctgactgtggaggccaaagaactggattccactggaacccccacaggaaaagaatccattgtgcaagtccacattgaagttttggatgagaatgacaatgccccggagtttgccaagccctaccagcccaaagtgtgtgagaacgctgtccatggccagctggtcctgcagatctccgcaatagacaaggacataacaccacgaaacgtgaagttcaaattcatcttgaatactgagaacaactttaccctcacggataatcacgataacacggccaacatcacagtcaagtatgggcagtttgaccgggagcataccaaggtccacttcctacccgtggtcatctcagacaatgggatgccaagtcgcacgggcaccagcacgctgaccgtggccgtgtgcaagtgcaacgagcagggcgagttcaccttctgcgaggatatggccgcccaggtgggcgtgagcatccaggcagtggtagccatcttactctgcatcctcaccatcacagtgatcaccctgctcatcttcctgcggcggcggctccggaagcaggcccgcgcgcacggcaagagcgtgccggagatccacgagcagctggtcacctacgacgaggagggcggcggcgagatggacaccaccagctacgatgtgtcggtgctcaactcggtgcgccgcggcggggccaagcccccgcggcccgcgctggacgcccggccttccctctatgcgcaggtgcagaagccaccgaggcacgcgcctggggcacacggagggcccggggagatggcagccatgatcgaggtgaagaaggacgaggcggaccacgacggcgacggccccccctacgacacgctgcacatctacggctacgagggctccgagtccatagccgagtccctcagctccctgggcaccgactcatccgactctgacgtggattacgacttccttaacgactggggacccaggtttaagatgctggctgagctgtacggctcggacccccgggaggagctgctgtattaggcggccgaggtcactctgggcctggggacccaaaccccctgcagcccaggccagtcagactccaggcaccacagc

SEQ ID NO: 1402 - DNA, 7808 bp, Homo Sapiens
gatgtcccgagctgctatccccggctcggcccgggcagccgccttctgagcccccgacccgaggcgccgagccgccgccgcccgatgggctgggccgtggagcgtctccgcagtcgtagctccagccgccgcgctcccagccccggcagcctcagcatcagcggcggcggcggcggcggcggcgtcttccgcatcgttcgccgcagcgtaacccggagccctttgctctttgcagaatggcccgcttcggagacgagatgccggcccgctacgggggaggaggctccggggcagccgccggggtggtcgtgggcagcggaggcgggcgaggagccgggggcagccggcagggcgggcagcccggggcgcaaaggatgtacaagcagtcaatggcgcagagagcgcggaccatggcactctacaaccccatccccgtccgacagaactgcctcacggttaaccggtctctcttcctcttcagcgaagacaacgtggtgagaaaatacgccaaaaagatcaccgaatggcctccctttgaatatatgattttagccaccatcatagcgaattgcatcgtcctcgcactggagcagcatctgcctgatgatgacaagaccccgatgtctgaacggctggatgacacagaaccatacttcattggaattttttgtttcgaggctggaattaaaatcattgcccttgggtttgccttccacaaaggctcctacttgaggaatggctggaatgtcatggactttgtggtggtgctaacgggcatcttggcgacagttgggacggagtttgacctacggacgctgagggcagttcgagtgctgcggccgctcaagctggtgtctggaatcccaagtttacaagtcgtcctgaagtcgatcatgaaggcgatgatccctttgctgcagatcggcctcctcctattttttgcaatccttatttttgcaatcatagggttagaattttatatgggaaaatttcataccacctgctttgaagaggggacagatgacattcagggtgagtctccggctccatgtgggacagaagagcccgcccgcacctgccccaatgggaccaaatgtcagccctactgggaagggcccaacaacgggatcactcagttcgacaacatcctgtttgcagtgctgactgttttccagtgcataaccatggaagggtggactgatctcctctacaatagcaacgatgcctcagggaacacttggaactggttgtacttcatccccctcatcatcatcggctccttttttatgctgaaccttgtgctgggtgtgctgtcaggggagtttgccaaagaaagggaacgggtggagaaccggcgggcttttctgaagctgaggcggcaacaacagattgaacgtgagctcaatgggtacatggaatggatctcaaaagcagaagaggtgatcctcgccgaggatgaaactgacggggagcagaggcatccctttgatggagctctgcggagaaccaccataaagaaaagcaagacagatttgctcaaccccgaagaggctgaggatcagctggctgatatagcctctgtgggttctcccttcgcccgagccagcattaaaagtgccaagctggagaactcgaccttttttcacaaaaaggagaggaggatgcgtttctacatccgccgcatggtcaaaactcaggccttctactggactgtactcagtttggtagctctcaacacgctgtgtgttgctattgttcactacaaccagcccgagtggctctccgacttcctttactatgcagaattcattttcttaggactctttatgtccgaaatgtttataaaaatgtacgggcttgggacgcggccttacttccactcttccttcaactgctttgactgtggggttatcattgggagcatcttcgaggtcatctgggctgtcataaaacctggcacatcctttggaatcagcgtgttacgagccctcaggttattgcgtattttcaaagtcacaaagtactgggcatctctcagaaacctggtcgtctctctcctcaactccatgaagtccatcatcagcctgttgtttctccttttcctgttcattgtcgtcttcgcccttttgggaatgcaactcttcggcggccagtttaatttcgatgaagggactcctcccaccaacttcgatacttttccagcagcaataatgacggtgtttcagatcctgacgggcgaagactggaacgaggtcatgtacgacgggatcaagtctcaggggggcgtgcagggcggcatggtgttctccatctatttcattgtactgacgctctttgggaactacaccctcctgaatgtgttcttggccatcgctgtggacaatctggccaacgcccaggagctcaccaaggtggaggcggacgagcaagaggaagaagaagcagcgaaccagaaacttgccctacagaaagccaaggaggtggcagaagtgagtcctctgtccgcggccaacatgtctatagctgtgaaagagcaacagaagaatcaaaagccagccaagtccgtgtgggagcagcggaccagtgagatgcgaaagcagaacttgctggccagccgggaggccctgtataacgaaatggacccggacgagcgctggaaggctgcctacacgcggcacctgcggccagacatgaagacgcacttggaccggccgctggtggtggacccgcaggagaaccgcaacaacaacaccaacaagagccgggcggccgagcccaccgtggaccagcgcctcggccagcagcgcgccgaggacttcctcaggaaacaggcccgctaccacgatcgggcccgggaccccagcggctcggcgggcctggacgcacggaggccctgggcgggaagccaggaggccgagctgagccgggagggaccctacggccgcgagtcggaccaccacgcccgggagggcagcctggagcaacccgggttctgggagggcgaggccgagcgaggcaaggccggggacccccaccggaggcacgtgcaccggcaggggggcagcagggagagccgcagcgggtccccgcgcacgggcgcggacggggagcatcgacgtcatcgcgcgcaccgcaggcccggggaggagggtccggaggacaaggcggagcggagggcgcggcaccgcgagggcagccggccggcccggggcggcgagggcgagggcgagggccccgacgggggcgagcgcaggagaaggcaccggcatggcgctccagccacgtacgagggggacgcgcggagggaggacaaggagcggaggcatcggaggaggaaagagaaccagggctccggggtccctgtgtcgggccccaacctgtcaaccacccggccaatccagcaggacctgggccgccaagacccacccctggcagaggatattgacaacatgaagaacaacaagctggccaccgcggagtcggccgctccccacggcagccttggccacgccggcctgccccagagcccagccaagatgggaaacagcaccgaccccggccccatgctggccatccctgccatggccaccaacccccagaacgccgccagccgccggacgcccaacaacccggggaacccatccaatcccggcccccccaagacccccgagaatagccttatcgtcaccaaccccagcggcacccagaccaattcagctaagactgccaggaaacccgaccacaccacagtggacatccccccagcctgcccaccccccctcaaccacaccgtcgtacaagtgaacaaaaacgccaacccagacccactgccaaaaaaagaggaagagaagaaggaggaggaggaagacgaccgtggggaagacggccctaagccaatgcctccctatagctccatgttcatcctgtccacgaccaacccccttcgccgcctgtgccattacatcctgaacctgcgctactttgagatgtgcatcctcatggtcattgccatgagcagcatcgccctggccgccgaggaccctgtgcagcccaacgcacctcggaacaacgtgctgcgatactttgactacgtttttacaggcgtcttcacctttgagatggtgatcaagatgattgacctggggctcgtcctgcatcagggtgcctacttccgtgacctctggaatattctcgacttcatagtggtcagtggggccctggtagcctttgccttcactggcaatagcaaaggaaaagacatcaacacgattaaatccctccgagtcctccgggtgctacgacctcttaaaaccatcaagcggctgccaaagctcaaggctgtgtttgactgtgtggtgaactcacttaaaaacgtcttcaacatcctcatcgtctacatgctattcatgttcatcttcgccgtggtggctgtgcagctcttcaaggggaaattcttccactgcactgacgagtccaaagagtttgagaaagattgtcgaggcaaatacctcctctacgagaagaatgaggtgaaggcgcgagaccgggagtggaagaagtatgaattccattacgacaatgtgctgtgggctctgctgaccctcttcaccgtgtccacgggagaaggctggccacaggtcctcaagcattcggtggacgccacctttgagaaccagggccccagccccgggtaccgcatggagatgtccattttctacgtcgtctactttgtggtgttccccttcttctttgtcaatatctttgtggccttgatcatcatcaccttccaggagcaaggggacaagatgatggaggaatacagcctggagaaaaatgagagggcctgcattgatttcgccatcagcgccaagccgctgacccgacacatgccgcagaacaagcagagcttccagtaccgcatgtggcagttcgtggtgtctccgcctttcgagtacacgatcatggccatgatcgccctcaacaccatcgtgcttatgatgaagttctatggggcttctgttgcttatgaaaatgccctgcgggtgttcaacatcgtcttcacctccctcttctctctggaatgtgtgctgaaagtcatggcttttgggattctgaattatttccgcgatgcctggaacatcttcgactttgtgactgttctgggcagcatcaccgatatcctcgtgactgagtttgggaatccgaataacttcatcaacctgagctttctccgcctcttccgagctgcccggctcatcaaacttctccgtcagggttacaccatccgcattcttctctggacctttgtgcagtccttcaaggccctgccttatgtctgtctgctgatcgccatgctcttcttcatctatgccatcattgggatgcaggtgtttggtaacattggcatcgacgtggaggacgaggacagtgatgaagatgagttccaaatcactgagcacaataacttccggaccttcttccaggccctcatgcttctcttccggagtgccaccggggaagcttggcacaacatcatgctttcctgcctcagcgggaaaccgtgtgataagaactctggcatcctgactcgagagtgtggcaatgaatttgcttatttttactttgtttccttcatcttcctctgctcgtttctgatgctgaatctctttgtcgccgtcatcatggacaactttgagtacctcacccgagactcctccatcctgggcccccaccacctggatgagtacgtgcgtgtctgggccgagtatgaccccgcagcttggggccgcatgccttacctggacatgtatcagatgctgagacacatgtctccgcccctgggtctggggaagaagtgtccggccagagtggcttacaagcggcttctgcggatggacctgcccgtcgcagatgacaacaccgtccacttcaattccaccctcatggctctgatccgcacagccctggacatcaagattgccaagggaggagccgacaaacagcagatggacgctgagctgcggaaggagatgatggcgatttggcccaatctgtcccagaagacgctagacctgctggtcacacctcacaagtccacggacctcaccgtggggaagatctacgcagccatgatgatcatggagtactaccggcagagcaaggccaagaagctgcaggccatgcgcgaggagcaggaccggacacccctcatgttccagcgcatggagcccccgtccccaacgcaggaagggggacctggccagaacgccctcccctccacccagctggacccaggaggagccctgatggctcacgaaagcggcctcaaggagagcccgtcctgggtgacccagcgtgcccaggagatgttccagaagacgggcacatggagtccggaacaaggcccccctaccgacatgcccaacagccagcctaactctcagtccgtggagatgcgagagatgggcagagatggctactccgacagcgagcactacctccccatggaaggccagggccgggctgcctccatgccccgcctccctgcagagaaccagaggagaaggggccggccacgtgggaataacctcagtaccatctcagacaccagccccatgaagcgttcagcctccgtgctgggccccaaggcccgacgcctggacgattactcgctggagcgggtcccgcccgaggagaaccagcggcaccaccagcggcgccgcgaccgcagccaccgcgcctctgagcgctccctgggccgctacaccgatgtggacacaggcttggggacagacctgagcatgaccacccaatccggggacctgccgtcgaaggagcgggaccaggagcggggccggcccaaggatcggaagcatcgacagcaccaccaccaccaccaccaccaccaccatcccccgccccccgacaaggaccgctatgcccaggaacggccggaccacggccgggcacgggctcgggaccagcgctggtcccgctcgcccagcgagggccgagagcacatggcgcaccggcagggcagtagttccgtaagtggaagcccagccccctcaacatctggtaccagcactccgcggcggggccgccgccagctcccccagaccccctccaccccccggccacacgtgtcctattcccctgtgatccgtaaggccggcggctcggggcccccgcagcagcagcagcagcagcagcagcagcagcaggcggtggccaggccgggccgggcggccaccagcggccctcggaggtacccaggccccacggccgagcctctggccggagatcggccgcccacggggggccacagcagcggccgctcgcccaggatggagaggcgggtcccaggcccggcccggagcgagtcccccagggcctgtcgacacggcggggcccggtggccggcatctggcccgcacgtgtccgaggggcccccgggtccccggcaccatggctactaccggggctccgactacgacgaggccgatggcccgggcagcgggggcggcgaggaggccatggccggggcctacgacgcgccaccccccgtacgacacgcgtcctcgggcgccaccgggcgctcgcccaggactccccgggcctcgggcccggcctgcgcctcgccttctcggcacggccggcgactccccaacggctactacccggcgcacggactggccaggccccgcgggccgggctccaggaagggcctgcacgaaccctacagcgagagtgacgatgattggtgctaagcccgggcgaggtggcgcccgcccggccccccacgcacc

SEQ ID NO: 1403 - DNA, 574 bp, Homo Sapiens
cccccgatgccatgtgggaggactacgagttcaagtgcaagccaggtgaccccagcagacggccctgcctcatctccccgtaccactaccgcctggactggctgatgtggttcgcggccttccagacctacgagcacaacgactggatcatccacctggctggcaagctcctggccagcgacgccgaggccttgtccctgctggcacacaaccccttcgcgggcaggcccccgcccaggtgggtccgaggagagcactacaggtacaagttcagccgtcctgggggcaggcacgccgccgagggcaagtggtgggtgcggaagaggatcggagcctacttccctccgctcagcctggaggagctgaggccctacttcagggaccgtgggtggcctctgcccgggcccctctagacgtgcaccagaaataaaggcgaagacccagccaaaaaaaaaaaaaaaaaaaaaaaaaacatgtctcgagggggggcccggtacccaattcgccctatatgagtcgtatacaattactggccgcgtttaaactcggactggaaacctgcgttaccactatc

SEQ ID NO: 1404 - DNA, 524 bp, Homo Sapiens
gaaaccttccagaagctgccctggcctgtagccttcaccacagaacttgggtctggggtagacacagggtctggggcacatagtttcagttaaacaaagcagtcatctccttcgtgtaagcagaaattgaaatctctttccagtgacctcagagggaagggcggaggagattgggtgctgcccaacctgtgccccacttgctgcctgaccacagacatttgtagggcctccctggacaggaacaagcatcctccagcagtttctgatgaggaatcctttcattttccagcagcttgcagaggaggccaggggaaaatatggtgaccacagaaggcctggatcatgagggttgggagtaaagctctcagatgaagttgtcaaagatggcaccatggccttcgttgttggagatgggatatgcctcagtgtgttactagatcctgattgttatttgggaactccgggatgtgatcattcctgaggtttcttccagctctcaaatcccaagaaagcatttgtgacag

SEQ ID NO: 1405 - DNA, 364 bp, Homo Sapiens
caggaaagaaaaattcattatgtcagtatttgattaaatgtaacataaaaaattgggattctttcactgcatatcaccaaaagttgggtagtcacttaatcaaaataaaacactgagaaccatggactatttacaaatgtactaaaatttttaaaggagagaaactttaacaaaaatcttgataattaaaaattcaaattgtgctagatagaatgtattccaaaatttctgctaaaaacttttgcttttagtttgtaagacataattcaggagaacctcaaagaaaaatttagcaattaagttgggaaaagctataaaagagacctttactttttgaacagacatttttccctttcccaaaatg

SEQ ID NO: 1406 - DNA, 350 bp, Homo Sapiens
ttttttttttttttttccctgggcacttcaaagctcatgttttttttaatgttttatttttattttttacagagatgagttctcactgggttgcctaggttggcccttgaacacccggactcaatcagtcctcccgcctgagcctcccaaagtgctgaaattaccggcatgagctgccaccccttgatggaggctgaaactttttggaatccctccctctctccatgtcctgccaagaacagaagtaaagttttccatcttaaaacatgtgtgtgagtcaatagacctgtgttatcttttcactcaaagctcaaccagtgaacagactgagtcagcttccaggaaacatc

SEQ ID NO: 1407 - DNA, 377 bp, Homo Sapiens
tttttttttttttttttttaagaagcatttttttttttcaatccgttggagacagatcatctcccactttcaaaggcaattcaattgtggtttttgttgttggtttttttgtatttttttgtatttctttttttttttacaagtaagcgtctatgcaggcatcacaaactttggcggatacagtagatatgtatttctttgatgctgaaaggtcagtccctaagacaaaatcaaatgtctcaaagaattaaaagcaaaatgcatgtgtcttcctggcaaaggtttccatttgcaatgtaatctgcatttctacaaatactcaatgtccaaggccactagagggtgaaaaaccagggcagcgtcttccagcaggagtc

SEQ ID NO: 1408 - DNA, 457 bp, Homo Sapiens
tttttttggttagaagtgatgagatatattttaaaagtccatacaacaaaattacaataaacatttattaagctgtaattttcacaatattttaattctgttctgagatctacaaatatctctacataacaccaaagccagtgatttaataaataagaggaatgtatatatcgctttgcaaaaaaatgcctgatacatttatctctatataagatatttgtagaatcagtttcccaaggctcacgaaactaaagtgcacacacacacacacaccatgtacacacacacactattcaaatcaaatggatttatattaagtgccaaattaaatgctatacaaaatttataaccagatacacaaaatatgaagtcaatcatgaatccactgttgataatggataccatacctcacaagtgtgatttccagttaagaagagggagacaattgcttcattgg

SEQ ID NO: 1409 - DNA, 290 bp, Homo Sapiens
tttttttttttttttttaaaaagtgaaacaccaatagtttaattgaaatttcagaaaattgaacatatgaacaaggcaaataaatactaagtaagttaaaaacacaaaatatgtccaggaagtatcgatgagaatgttcaagttaaagttctccaatgccattgctacagcaacctcaaaccctaggttctctctgcactattaacacagacatctcaggacatggtttgcttttttttaagacttaaataggaaactaatttttctttctttaaagcaattgcgttctt

SEQ ID NO: 1410 - DNA, 435 bp, Homo Sapiens
cacgaggagcgcgccgccgccagtgctgcgggctccgggcaatggatgcccccggggccctggcccagaccgccgcccccggtccgggcaggaaggagctgaagatcgtgatcgtgggcgacggcggctgcggcaagacctcgctgctcatggtgtacagccagggctccttccccgagcactacgccccatcggtgttcgagaagtacacggccagcgtgaccgttggcagcaaggaggtgaccctgaacctctacgacacggccgggcaagaagactatgaccggctgcggcccctgtcctaccagaacacccacctcgtgctcatctgctatgacgtcatgaatcccaccagctacgacaacgtcctcatcaagtggttccctgaggtcacgcatttctgccgcgggatccccattgggctcatcggctgca

SEQ ID NO: 1411 - DNA, 4642 bp, Homo Sapiens
gggagccctgtgctctgaccccagggcccagccacctggccctcacgttcctgcccagcaagccgggtgcccggccccagcccgagggagccagctgggatgcagggcctggtggggcaccctcggcctgggcggacccaggggagggcggcccaagccccatgctcctccctgagggcctgtcttcccaggctctgtccacggaggctcctctcccggccaccctggagccccggattgtgatgggagaggagacgtgccaggccctcctgtcacccagagctgcccggacagcgctcagggaccaggagggtgggcacgcaagcccagacccaccccccgagctgtgttctcagggtgatctttctgtgccttcccctcccccagaccctgattccttcttcacgcctccctccacccccaccaagaccacctatgccctgcttcctgcctgtgggccccacggggacgccagggactcagaggctgagctgcgggatgagctgctggactcgccccccgcctcaccctcgggctcctacattacggccgatggggacagctgggcctcttcaccctcctgttccctcagcctgctggctccggctgaagggctggacttcccctcaggctggggcctgtccccgcaggggtccatggtggatgaacgagagctgcacccagcagggaccccagagcccccgtcctctgagtccagcctctctgcagacagcagctcctcctggggccaggagggccacttcttcgacctggacttcctggccaatgacccaatgatccccgcagccctcctacccttccagggcagcctcatctttcaggtggaggcagtggaggtgacaccgctatccccagaggaagaagaagaggaggctgtggcggatcccgacccaggtggggacctggctggggagggtgaggaggacagcacgtctgcctccttcctgcagtcactgtctgacctgtccatcacggagggcatggacgaggcttttgccttccgggacgacacctctgcagcctcctctgattcagactcagcctcctacgcagaggcagatgatgagaggctgtacagcggggagccccatgcccaggccactttgctccaggacagtgtccagaagacagaggaggagagcggaggtggggccaaggggctgcaggctcaggatgggactgtgtcctgggccgtggaggctgctcctcagacctcagacagaggggcctatctgtcccagagacaggaattgatctcagaagtaacagaagagggccttgctttaggccaggagtccactgccactgtgacccctcacactctgcaggtagccccaggcctccaggtggaggtggctaccagagtgaccccacaggctggggaggaagaaacagactccaccgctggacaagaatctgctgccatggcaatgcctcagccctcccaggagggcatcagcgagatcttaggccaagagtctgtcactgcagaaaaacttccaactccacaggaagaaacaagcctcacattgtgtccagactctcctcagaacttgaaggaagaaggagggctggacctcccctctggcagaaagcctgtagctgcagccacgattgtccccaggcaggctaaagaggacctcaccttaccccaggactccgctatgacaccgcctctgcccctacaagacacagatctctcatcagccccaaagcctgtggctgcagccacgattgtgtcccagcaggctgaagagggcctcaccttaccccaggactccgttatgacaccgcctctgcccctacaagacacagaactctcgtcagccccaaagcctgtggctgcagccacgcttgtgtcccagcaggctgaagagggcctcaccttaccccaggactccgctatgacaccgcctctgcccctacaagacacagatctctcgtcagccccaaagcctgtggctgcagccacgcttgtgtcccagcaggctgaagagggcctcaccttaccccaggactccgctatgacaccgcctctgcccctacaagacacagatctctcgtcagccccaaagcctgtggctgcagccacgcttgtgtcccagcaggctgaagagggcctcaccttaccccaggactccgctatgacaccgcctctgcccctacaagacacagatctctcgtcagccccaaagcctgtggctgcagccacgattgtgtcccagcaggctgaagagggcctcaccttaccccaggactccgctatgacaccgcctctgcccctacaagacacagatctctcgtcagccccaaagcctgtggctgcagccacgattgtgtcccagcaggctgaagagggcctcaccttaccccaggactccgctatgacaccgcctctgcccctacaagacacagatctctcgtcagccccaaagcctgtggctgcagccacgcctgtgtcccagcaggctgaagagggcctcaccttaccccaggactccgctatgacaccgcctctgcccctacaagacacagatctctcgtcagccccaaagcctgtggctgcagccacgcctgtgtcccagcaggctgaagagggcctcaccttaccccaggactccgctatgacagcacctctgcctctgcaagacacaggccccacctcaggtccagagcctctggctgtggccacccctcaaaccttgcaggcagaagcaggctgtgccccagggacagagcctgtggccaccatggctcagcaggaagtaggtgaggccttaggccccaggccagcacctgaggagaagaatgcagccctccctacagtcccggagcctgcagccttggaccaggtccaacaggatgacccacagccagctgcagaagctgggacaccttgggccgcacaggaagatgcggattccactttgggcatggaggccctcagtctccctgagccggcctctggtgctggggaggaaatagcagaagccctttctaggcctggacgggaagcatgtctggaagcgcgagcgcacacaggtgatggggctaagcctgactcaccccaaaaggagaccctggaggttgagaaccagcaggaaggaggcctgaagctactggcacaggaacatggacccaggtcagcacttggaggtgcaagggaggtccccgatgcgcctcctgctgcctgccctgaggtcagccaggcccggctcctgagcccagccagggaggaaagaggcctgagtggcaagtccaccccggagcccacgcttccctcagctgtggccacagaggccagtctggactcctgcccagagtcttcagtaggggctgtgtccagtctggacagaggctgccctgacgcgcctgcccccacgtctgcaccaacctcccagcagccggagcctgtactgggtctgggcagtgttgagcaaccccacgaagtacccagtgtccttggcacccccttgctgcagcccccagaaaaccttgccaagggtcagcccagcacgcccgtggacaggcccctgggccctgacccttctgctcctggtacccttgctggggcagccctacccccactggagcccccagccccctgcctgtgccaggacccccaggaagactctgtggaagacgaggagcccccaggctctctgggcctcccaccgccccaggcaggagtccagcctgccgctgctgctgtctcaggaaccacacagcctctggggactgggccgcgagtcagcctctcgcctcactccccactcctcagccccaaggtggcctccatggatgccaaagacctggccttgcagatcttgccgccttgccaagtgcctcctccctctgggccccagagcccagctggccctcaagggctctcagcccccgagcagcaagaggatgaggacagcctggaggaagactcgcctcgggccctgggctcgggccagcattcggatagccacggggagtcatcagccgagctggacgagcaggacatcttggctcctcagaccgtgcagtgtccagcccaggccccagcaggcggcagtgaggagaccatcgccaaagccaagcagagtcgcagtgagaagaaggcccgaaaggcaatgtcaaagctgggcttgcggcagattcagggagtcaccaggatcaccatccagaagtccaagaacatcctctttgtcatcgccaagcctgatgtcttcaagagcccagcctcagacacttatgtggtctttggcgaggccaagattgaggacctgtcccagcaagtgcacaaagccgcagctgagaagtttaaggtgccctcagagccctcagccttggtccctgagtcagcacccaggccccgggtgaggctggagtgcaaggaagaggaagaggaggaggaggaagaggtggacgaggcggggctggaactgcgtgacattgagctggtgatggcgcaggccaatgtgtccagggccaaggccgtgcgggctctgagagacaaccacagtgacatcgtcaacgccatcatggaactgaccatgtagccactgaccggaagctggagccatcctacgccttccctcagctctgctactcaataaatcggtgtcccttc

SEQ ID NO: 1412 - DNA, 2346 bp, Homo Sapiens
acggcccgggctggtctgattaatgtttgataattaagcatttttatgtgattcatctcaataagagcccaagcaaggtaatgtaaacaatgaaggcataaaaaggtggaaggagatgtgaatactacaccaagtgggccacatggacctaaggaaaaagaggagctgagttgaagtcaggagctgattcagataaagcagcttcaactctactacttcttactcttagatgggctccagaccaccttgagggatgggattatatttattttatagatgcactcctttctcccactaatacagtcagttaggaatgtatagctaagaatgagccaaccattactattcgtgtctatggctacagaaactcaataaatcaactcactattctgggtcaataaatgaactcattatactgtttcttcatgaagtaaatgtgtttctaaaggaatgtattaaaattacatttttaaaaatctatgtattttgcatatatttgattgatacagaaaaggagtctactttggttacttttctttctttctacaaacttcattcattggtgtgatctgaaaggggataatatttcagaaagcaaaaatatttttaacaacaaaactttgtatttccagtgtgatctaaacacaaaattatgcaaaacacaactaatatttctctcctactggctaaatcatgccagttgtttaggtgcaatcaaaaataagccactaatgttatttttataggaattggcaagtaattgccaactatagctattaaaagtttatatttgccacaggagcctgtgattttaaatactgttcaaatgatttatgcttgagagttatacatagcacaaatacatacatttgtatctacaggtctaaagaggaaaaattagacaaaaagcaacttgaaaaggaacccctttatttttaatgacctacctttgtgctgtattgagaaaaagtataaaaattatttgggaggaagaaaaatatttctaagcactaatttcataggcaaaagccctattattttttatgataggctaggggaaatcaataatgatttaaaagcaaacagtaaactgctcacatttaccagtctatactcagtattaattctaccctgcagtgtatgctatagaaggtaatgaaatgctgatgttttctggttttccacttcaatctgctccagctttatcctaaaccttgtcagcaacagaagttaccccccagcaatcatacaaacctaataacggcttccctggcttaatttgatctgctccaatcacaaattccaatccacatactttcttctgttatggttgtgtctgtatgtgtttaatgtactttttataaggcttttttacaacaagcgcatggtttttcattcagccctctaccacataaacagaaccactgaagagcatttttgttcatataaaaatgttttagttattcatagtgtatgtcttcaattggctgcagattacagtgaacaaaagtattgctgccatcattttacatttctcctgttactgtgccctatctgctgtgtacccctgtccccaaagcatttattataatatttgctgcttgctctcagttttggactgagatgcttgggggtgggaaaacttaaaacttgcctgactcaagtactctctaagctttgatcccagcatcctgctttaacctgctcctgttggacctctgccactttactgaccccataaaacaaacagagctagcaaatgcatcaaacagcctccttcaaaatgcagcttgaccgtgattcatggcacaaagctggaataaccctgccagttcttagaagctttaagattcatcgtcttgaacttgatacacatagtatagcaccttaaaaacgaatcatctgctagttcagtattttctacttacaatcactccctcccagggcatgtaattaatttactgagcttaaaaaaaaatatcaggattactcacacagtcttgaagatgcaatgtcagctatttaggacagaaacatccaaggccgtgtcagaactcaattacgactacatatgcattaaggcaggaactggcaggcctcagggtacgccaactataggactcgtgcttctcgtacgctgggctataatctatgaaactgagctccagagccagccaatcacttagctcctcataacaagtctaactggctctggaaagctgaaagggctgcactggaacaacacagatgagatattctacacattaatctacttatctggaatcactttgcctctaaaggccagagaaaaatcacagcttccttgtcggaggggaaaagaagggc

SEQ ID NO: 1413 - DNA, 411 bp, Homo Sapiens
ttagagatgggatctcactctatccccaggctggtgtgcagtggtgtgatcgtagcgcactgcagcctccaactcctgggctcaagtgatgttcccacctcacctccaggtagctaggactcacaggctctcacaccaccatacccagcttgggtctcttcttgaactaaacatttttattttataagcgctaatttaaagtcagtaagagcccccatttaattacaaacttcaatagttacccagaaaaagaaatagtctttaaaatcattttgataacaactgtttaatttactattcagatggaaagcctggtaggatatttgggtaatggtctgtaattaggtagcataactttgtacacatgaatcaactgggacccgatacaatctaaaacagaaattcaaatat

SEQ ID NO: 1414 - DNA, 490 bp, Homo Sapiens
tttttttttttttttttgaatatcaaagaagtttaatacgctgccataaaataagcgccttgaaaaagctcatggaatagaagtcagtgttagagaaacccctcccacacatcctctggctccacaccgcatccttcaaaaccaaacaagagaatctgaaacaacacaggacatccttccaagcttggatttcagtgagggcccctctaccaataacaagaacacagtttcctacatggcctgataggaaagcaaaacacagaagcacaagaagtctacaagatttcaatatttaagagacttggtacatattcaaagttaaaataactccaacttttatagctatacatattgttttaaagcaacttaatatattttaaaattttatatatacactctcaaaggttcttcaggtgaggtatgtaaacattgtctaatgaaaaatttcaatgtttcaaaccaacaaattcacagcatacattgaattttc

SEQ ID NO: 1415 - DNA, 393 bp, Homo Sapiens
cctggtctggagccggctgagccacagcagggtcgccgcggggtcccggggccgtgctcccctgcccctcccgggagcgcgcggggcggggcggggcggggcgggaccaggcgggcgagctgggccctcgcccctccctcgggcggtcacctgggcacgggcgctgcaggtgtcggggcctcaaccttgcggagccgacagccatcgatcctcgggtggcctcaaggtggtggcagggccgccccctgcagtccggagacgaacgcacggaccgggcctccggaggcaggttcggctggaaggaaccgctctcgcttcgtcctacacttgcgcaaatgtctccgagcttactcacatagcatattggtatatcaaaatgaaatgcaaggaacc

SEQ ID NO: 1416 - DNA, 743 bp, Homo Sapiens
tggcacgaggagaacctggttgtagaattagccaagcatgtagcccagtctaacaatgtcacttcatgttatgtatgtggagaagctgtaataagagatcaaggccatgggaagcctgagaattagtacctacagtacctgatgaattcctggctcaaaagaatcaccctgataatttctgatcctaaaagcctcaattattaaacaatattgcatagctagagaaggaaaagaattctttcaccgcgtaggatgacttagttgtcggagacagaaactgtataatggtaccacaaaaacaatcactggtggagttcaaatcacacagagagaaaatttagtaaattctcaaagttgcaaactggacccacctggagtcccaccgggactggacagcccccactggattatactggatatgtaggcatagagcttatgacagattactgaccagtaggcaggtagttgtgttattggcactattaaaccatctttcttcctactgcccataaaaacaggcaaactccttggcttccctgtctacgcttcccgcgaaaagagaatcatagctataagaaattgaaaaaatgataaatggccccctgagagaatcatacaatattataggctgctacttaggcacaagatggctcatggggatacggaccccattactgatcaacgatcaatggttacagctgtctaaaatatcctataaacaggagctgatatctgctggagaa

SEQ ID NO: 1417 - DNA, 4714 bp, Homo Sapiens
cagcatcaataaggccattaatacgcaggaagtggctgtaaaggaaaaacacgccagaacgtgcatactgggcacccaccatgagaaaggggcacagaccttctggtctgttgtcaaccgcctgcctctgtctagcaacgcagtgctctgctggaagttctgccatgtgttccacaaactcctccgagatggacacccgaacgtcctgaaggactctctgagatacagaaatgaattgagtgacatgagcaggatgtggggccacctgagcgaggggtatggccagctgtgcagcatctacctgaaactgctaagaaccaagatggagtaccacaccaaaaatcccaggttcccaggcaacctgcagatgagtgaccgccagctggacgaggctggagaaagtgacgtgaacaactttttccagttaacagtggagatgtttgactacctggagtgtgaactcaacctcttccaaacagtattcaactccctggacatgtcccgctctgtgtccgtgacggcagcagggcagtgccgcctcgccccgctgatccaggtcatcttggactgcagccacctttatgactacactgtcaagcttctcttcaaactccactcctgcctcccagctgacaccctgcaaggccaccgggaccgcttcatggagcagtttacaaagttgaaagatctgttctaccgctccagcaacctgcagtacttcaagcggctcattcagatcccccagctgcctgagaacccacccaacttcctgcgagcctcagccctgtcagaacatatcagccctgtggtggtgatccctgcagaggcctcatcccccgacagcgagccagtcctagagaaggatgacctcatggacatggatgcctctcagcagaatttatttgacaacaagtttgatgacatctttggcagttcattcagcagtgatcccttcaatttcaacagtcaaaatggtgtgaacaaggatgagaaggaccacttaattgagcgactatacagagagatcagtggattgaaggcacagctagaaaacatgaagactgagagccagcgggttgtgctgcagctgaagggccacgtcagcgagctggaagcagatctggccgagcagcagcacctgcggcagcaggcggccgacgactgtgaattcctgcgggcagaactggacgagctcaggaggcagcgggaggacaccgagaaggctcagcggagcctgtctgagatagaaaggaaagctcaagccaatgaacagcgatatagcaagctaaaggagaagtacagcgagctggttcagaaccacgctgacctgctgcggaagaatgcagaggtgaccaaacaggtgtccatggccagacaagcccaggtagatttggaacgagagaaaaaagagctggaggattcgttggagcgcatcagtgaccagggccagcggaagactcaagaacagctggaagttctagagagcttgaagcaggaacttgccacaagccaacgggagcttcaggttctgcaaggcagcctggaaacttctgcccagtcagaagcaaactgggcagccgagttcgccgagctagagaaggagcgggacagcctggtgagtggcgcagctcatagggaggaggaattatctgctcttcggaaagaactgcaggacactcagctcaaactggccagcacagaggaatctatgtgccagcttgccaaagaccaacgaaaaatgcttctggtggggtccaggaaggctgcggagcaggtgatacaagacgccctgaaccagcttgaagaacctcctctcatcagctgcgctgggtctgcagatcacctcctctccacggtcacatccatttccagctgcatcgagcaactggagaaaagctggagccagtatctggcctgcccagaagacatcagtggacttctccattccataaccctgctggcccacttgaccagcgacgccattgctcatggtgccaccacctgcctcagagccccacctgagcctgccgactcactgaccgaggcctgtaagcagtatggcagggaaaccctcgcctacctggcctccctggaggaagagggaagccttgagaatgccgacagcacagccatgaggaactgcctgagcaagatcaaggccatcggcgaggagctcctgcccaggggactggacatcaagcaggaggagctgggggacctggtggacaaggagatggcggccacttcagctgctattgaaactgccacggccagaatagaggagatgctcagcaaatcccgagcaggagacacaggagtcaaattggaggtgaatgaaaggatccttggttgctgtaccagcctcatgcaagctattcaggtgctcatcgtggcctctaaggacctccagagagagattgtggagagcggcaggggtacagcatcccctaaagagttttatgccaagaactctcgatggacagaaggacttatctcagcctccaaggctgtgggctggggagccactgtcatggtggatgcagctgatctggtggtacaaggcagagggaaatttgaggagctaatggtgtgttctcatgaaattgctgctagcacagcccagcttgtggctgcatccaaggtgaaagctgataaggacagccccaacctagcccagctgcagcaggcctctcggggagtgaaccaggccactgccggcgttgtggcctcaaccatttccggcaaatcacagatcgaagagacagacaacatggacttctcaagcatgacgctgacacagatcaaacgccaagagatggattctcaggttagggtgctagagctagaaaatgaattgcagaaggagcgtcaaaaactgggagagcttcggaaaaagcactacgagcttgctggtgttgctgagggctgggaagaaggaacagaggcatctccacctacactgcaagaagtggtaaccgaaaaagaatagagccaaaccaacaccccatatgtcagtgtaaatccttgttacctatctcgtgtgtgttatttccccagccacaggccaaatccttggagtcccaggggcagccacaccactgccattacccagtgccgaggacatgcatgacacttcccaaagactccctccatagcgacaccctttctgtttggacccatggtcatctctgttcttttcccgcctccctagttagcatccaggctggccagtgctgcccatgagcaagcctaggtacgaagaggggtggtggggggcagggccactcaacagagaggaccaacatccagtcctgctgactatttgacccccacaacaatgggtatccttaatagaggagctgcttgttgtttgttgacagcttggaaagggaagatcttatgccttttcttttctgttttcttctcagtcttttcagtttcatcatttgcacaaacttgtgagcatcagagggctgatggattccaaaccaggacactaccctgagatctgcacagtcagaaggacggcaggagtgtcctggctgtgaatgccaaagccattctccccctctttgggcagtgccatggatttccactgcttcttatggtggttggttgggttttttggttttgttttttttttttaagtttcactcacatagccaactctcccaaagggcacacccctggggctgagtctccagggccccccaactgtggtagctccagcgatggtgctgcccaggcctctcggtgctccatctccgcctccacactgaccaagtgctggcccacccagtccatgctccagggtcaggcggagctgctgagtgacagctttcctcaaaaagcagaaggagagtgagtgcctttccctcctaaagctgaatcccggcggaaagcctctgtccgcctttacaagggagaagacaacagaaagagggacaagagggttcacacagcccagttcccgtgacgaggctcaaaaacttgatcacatgcttgaatggagctggtgagatcaacaacactacttccctgccggaatgaactgtccgtgaatggtctctgtcaagcgggccgtctcccttggcccagagacggagtgtgggagtgattcccaactcctttctgcagacgtctgccttggcatcctcttgaataggaagatcgttccactttctacgcaattgacaaacccggaagatcagatgcaattgctcccatcagggaagaaccctatacttggtttgctacccttagtatttattactaacctcccttaagcagcaacagcctacaaagagatgcttggagcaatcagaacttcaggtgtgactctagcaaagctcatctttctgcccggctacatcagccttcaagaatcagaagaaagccaaggtgctggactgttactgacttggatcccaaagcaaggagatcatttggagctcttgggtcagagaaaatgagaaaggacagagccagcggctccaactcctttcagccacatgccccaggctctcgctgccctgtggacaggatgaggacagagggcacatgaacagcttgccagggatgggcagcccaacagcacttttcctcttctagatggaccccagcatttaagtgaccttctgatcttgggaaaacagcgtcttccttctttatctatagcaactcattggtggtagccatcaagcacttcggaatt

SEQ ID NO: 1418 - DNA, 316 bp, Homo Sapiens
  misc_feature (29)..(29): n is a, c, g, or t
  misc_feature (65)..(65): n is a, c, g, or t
  misc_feature (144)..(144): n is a, c, g, or t
cacaaaccctgttgtgaactgcacatgtnagggatctaggttgcaggctcctcaatgcctgaggntctgaggcggaacagtttcatcccaaagccatcctaccacccactaccccgcacttcctgggtccctgcaaaaattgtnttccatgaaaccagtccctggtgccagaaaagttggggactgctggtatagataacagaccattagcattttctcctttatatgaaacatttattatttgatttatttgtgtctattttgctctgtggcttggacccagaaacacttgtataataggtgaaatgaacaaaga

SEQ ID NO: 1419 - DNA, 428 bp, Homo Sapiens
  misc_feature (7)..(7): n is a, c, g, or t
  misc_feature (66)..(66): n is a, c, g, or t
  misc_feature (270)..(270): n is a, c, g, or t
gattganagattactagaagctgagggtagcctggctagaacattaaaaactccttgaagaccagnctaagagggaatctcacacatttccaagtgttactacaatgatctcaaccaggttctcatgatgaagttcagaaaaactccctgaggtttggcactaccaacttcaggacttacattaagctacagtaacccaaatagtgtgaagttggtgaaaagagaaaacacacacatatagatgcatggaaaagaatacggagcccagangcaggcctacatacagtccactgatcttccatggaggtttagagacaatttaaaacagcaaagatagcctttccaactagtggtgctagaacagctggacaaccacatgcaaaaaaaataaataaatccaggtatgcatgttatataccctttataaa

SEQ ID NO: 1420 - DNA, 437 bp, Homo Sapiens
gaacatgctagattgctgctctctgaacactatagtcgtcgaatctcacaagcgtacggtctgatgaatgaactgttatctgagtcagtacagctaccaactctaccacagaaaccattgcctaacaaacccagccctactcagtcttccagttgtcaacactgcccttctccaagaggagagaatcaacatggtcacagttttctaataaatcgacctggaaaagtcaaatatatgtccaaaccgagttatatccataagaggaagtcttttgggcaacctcaaggctcaccttggccacatggaactgccactttcaccatacagaaaaaagctggtggagccaaagcagcagtaagaaaggctaccagtctccagttaccttccaaaaaggctctaatgctccgtgtcatagtctgcagcatacaaaaaaacat

SEQ ID NO: 1421 - DNA, 539 bp, Homo Sapiens
  misc_feature (523)..(523): n is a, c, g, or t
ttaaataggaggacttttatttaattttttgctgacatactatgaggcaaaacaaaattgacaccatacaaaataactttataaaatatcattcacatcatattttatcagatttacagcattctgtgcatgttaggggttatgtaaggaaggtgaaaaaacactatgccaaacttttagtattagtttatatacacacagtaagaaacaaaacaagtaactgttaggttttccatgaatttattgcaaaaatagtgcaaactacttcacctagtaagctgtaaaaacaaactagaaaggacccagctaagcttaaacacgacaatagatgctcagtttctcagcatttagctttcttcaccagttttatcttgacaatcaagaccactccccatctgttcagtttcgggtgagtgctgaggaatagagaaatgtgaagacgggctctctggagagaccagaggctcgggctgcctgatttcagcaacacatttaggatcatgctacttcctcaatcgcaatntttctgaggtctgtgt

SEQ ID NO: 1422 - DNA, 517 bp, Homo Sapiens
cctccacagcaacttccttgatccctgccacgcacgactgaacacagacagcagccgcctcgccatgaagctgctgatggtcctcatgctggcggccctcctcctgcactgctatgcagattctggctgcaaactcctggaggacatggttgaaaagaccatcaattccgacatatctatacctgaatacaaagagcttcttcaagagttcatagacagtgatgccgctgcagaggctatggggaaattcaagcagtgtttcctcaaccagtcacatagaactctgaaaaactttggactgatgatgcatacagtgtacgacagcatttggtgtaatatgaagagtaattaactttacccaaggcgtttggctcagagggctacagactatggccagaactcatctgttgattgctagaaaccacttttctttcttgtgttgtctttttatgtggaaactgctagacaactgttgaaacctcaaattcatttccatttcaataactaactgcaaatc

SEQ ID NO: 1423 - DNA, 180 bp, Homo Sapiens
gagaaattacaacatatcaggttccctactactgaagtagccttccgtgagaacacaccacatgttaggactagaagaaaatgcacaatttgtaggggtttggatgaagcagctgtaactgccctagtgtagtttgaccaggacattgtcgtgctccttccaattgtgtaagattagtta

SEQ ID NO: 1424 - DNA, 1511 bp, Homo Sapiens
cacatttcatccttttacatggttcccatctaccctcacaacacatgtcatcaccaaagacacacatacaagctccaatggcttttgccaggcaattcttcctccaggaccccatctggcccctccctcatccctccccttggactttgcccttcttactggccaggcaggggggccagagtccaggcttgactcattcccaccttgtcctgggctgagatcccaggtttgtaacagaaaacaccactaaagccccagcacaggagagaaccacccagcccagaagttccagggaaggaactctccggtccaccatggagtacctctcagctctgaaccccagtgacttactcaggtcagtatctaatataagctcggagtttggacggagggtctggacctcagctccaccaccccagcgacctttccgtgtctgtgatcacaagcggaccatccggaaaggcctgacagctgccacccgccaggagctgctagccaaagcattggagaccctactgctgaatggagtgctaaccctggtgctagaggaggatggaactgcagtggacagtgaggacttcttccagctgctggaggatgacacgtgcctgatggtgttgcagtctggtcagagctggagccctacaaggagtggagtgctgtcatatggcctgggacgggagaggcccaagcacagcaaggacatcgcccgattcacctttgacgtgtacaagcaaaaccctcgagacctctttggcagcctgaatgtcaaagccacattctacgggctctactctatgagttgtgactttcaaggacttggcccaaagaaagtactcagggagctccttcgttggacctccacactgctgcaaggcctgggccatatgttgctgggaatttcctccacccttcgtcatgcagtggagggggctgagcagtggcagcagaagggccgcctccattcctactaaggggctctgagcttctgcccccagaatcattccaaccgacccactgcaaagactatgacagcatcaaatttcaggacctgcagacagtacaggctagataacccacccaatttccccactgtcctctgatcccctcgtgacagaacctttcagcataacgcctcacatcccaagtctatacccttacctgaagaatgctgttctttcctagccacctttctggcctcccacttgccctgaaaggccaagatcaagatgtcccccaggcatcttgatcccagcctgactgctgctacatctaatcccctaccaatgcctcctgtccctaaactccccagcatactgatgacagccctctctgactttaccttgagatctgtcttcatacccttcccctcaaactaacaaaaacatttccaataaaaatatcaaatatttaccactaagacttctgactccaatttaaaccaggaaagggatggggtggataccccattttgccctcccccatcaacacccagtcccagatccaaagcc

SEQ ID NO: 1425 - DNA, 6443 bp, Homo Sapiens
cggacgagggccagagccatggcttggcagcgtccagggccagaggagccttctggagcatcacccaggaaaaaaacagatgggctacatgggagaaatggaggtgcaaggtcccaccagggagagtggacagtccctcccgcctcagaagaaagcctacctttcccacctcagtacaggcagtggacacatcgagggagactgggccggaagaaacaggaaacttctgaagccccggtccatccagaagtcgtggtttgtgcagtttccgtggctgatcatgaatgaggagcagacggctctgttctgctctgcttgccgagaatacccctccatcagggacaaacggtcaagactaatagaaggttatacaggaccattcaaggtggagactctcaaataccacgcgaagagcaaggcccacatgttctgtgtcaatgccttggcagcgagggaccccatctgggcagcccggttccggagcatcagagacccacctggagatgttctggccagcccggagccgctcttcactgcagattgccccatattctaccccccagggcctctgggaggatttgatagcatggctgagctcctgccaagttcaagagctgaactagaggaccctgggggggatggagcaattcctgcaatgtatctagactgcatttcagatttgaggcaaaaagaaatcactgatggcatccacagctcctcagacattaatattttatataatgatgcagtagaatcctgcattcaggacccttctgcagaggggctgtcggaggaggttcctgtggtgtttgaggagctgccggtggtgttcgaggatgtggcagtgtatttcacccgggaggagtggggcatgctagacaagcggcagaaggagctgtacagagacgtgatgcggatgaactacgagctgttggcatccttgggacctgctgctgccaagccagacttgatctccaaactggagcggagggctgcaccctggatcaaggacccaaatgggccaaagtgggggaaaggtcgtcctccagggaacaagaagatggtggcagtgagagaggcagacacacaggcctcggctgcagactccgcgttgcttccaggctctcccgtggaggcccgtgcctcctgctgcagttccagcatttgtgaggaaggagatggacctaggagaatcaagaggacatacaggccccgttccattcagaggtcatggtttgggcagttcccatggttagtaattgaccccaaagagaccaaactcttctgctcagcctgcatagaaagacctaatctccatgataaatcatctcggttagtcagaggttacacggggccttttaaagtggagactttaaaataccatgaagtcagcaaagcgcacaggctctgtgtcaacacggttgaaatcaaggaagacacccctcacactgccctcgttccagagatctccagcgacctcatggccaacatggagcactttttcaatgccgcctactccattgcataccactcaaggcccctgaatgactttgagaagatcctgcagctcctccaaagcacggggaccgtgatattaggcaagtaccgcaatcgcacggcgtgcactcagttcatcaagtacatctcagagaccctgaagagggagatcctggaggacgtgcggaactcgccctgtgtgagcgtgctgctggacagctccaccgacgcctccgagcaggcctgcgtggggatttacatccgctacttcaagcagatggaggtgaaagagtcctacatcactctggcccctctctacagtgagacagcagatgggtacttcgagaccatcgtttctgccctggatgagctggacatccccttccggaagcctggctgggtggtggggctggggacggatggctcagccatgttgagctgcagaggaggccttgtggaaaagttccaggaggtcatcccgcagctgctccctgtccactgcgtggcccaccggctgcacctggctgtggtggacgcctgcgggagcatcgatctggtgaagaagtgtgaccggcacatccgcaccgtcttcaagttttatcagtcctcaaacaagaggctgaacgagctgcaggaaggtgcggcgcctctggagcaggagatcatccgcctgaaggatctgaatgcggtccgctgggtggccagcaggaggcgcacgctgcacgcgctgctcgtgagctggcccgccctggccaggcacctccagagggtggcagaggctgggggccagattgggcaccgggccaaagggatgctgaagctcatgcgcggcttccactttgtcaagttctgccacttcctgttggacttcctgagcatctacaggcctctgtccgaggtgtgccagaaggagatcgtgctgattacagaggtgaacgccacgctgggccgcgcctacgtggcactggagagcctccgtcaccaggcagggcccaaagaggaagaattcaacgccagcttcaaggatgggcggctccacggcatctgcttggacaaactggaggtagcggaacagcggttccaggcggatagggagaggacagtcctgacggggattgagtacctccagcagaggtttgacgcagaccgacccccacagctgaagaacatggaggtgtttgacaccatggcctggccaagtgggattgaacttgccagttttgggaatgatgacattctcaacctggccaggtatttcgagtgctccctcccaacaggatacagtgaggaagctctgctggaggagtggctgggcctgaaaaccattgcccagcacctcccgttctccatgctttgcaaaaacgccctggcccagcactgccgcttccccctgctaagcaagctcatggccgtggtggtctgtgtgcccatctccacctcttgctgtgagcgggggttcaaggccatgaaccgaatcaggaccgatgagaggaccaagctctccaacgaggtgctcaacatgctcatgatgacagctgtgaacggtgtggccgtcacggagtacgacccccagcccgccatccagcactggtacctgacctcctcaggccggcgtttcagccatgtctacacctgtgcccaggtgccagcccgctcccctgcaagcgccaggctcaggaaggaggagatgggagccctctatgtggaggagcccaggacccagaagccacccatcctgccctccagggaagcagcggaggttctgaaggactgcatcatggagcctcccgagagactcctgtatccccacaccagccaggaggcccccgggatgtcctgagggacagggagtccttgggactgccttggagacgcctctgtgatcactgggacaggctctgcagattctaggctgccctaggatcttctgctggtggcgatggtctctaagcaccaggaagtgggcagtggcatcccagagcagcaggggtatcaggaggtgcatgacctgtttcctgaggccccactcagcacagccatgcctcacagcacacaaatgtgccagaaggttctatatctcaagttcatttttaaggtgctgcagaaaataaccccatcatgaaaggtttcagcccctgagttttggtggcaagaggagtgtcctggtaggggagactgttggacatccctggggaatgttccagggaggctgcccacagtctaagtgggaatgggaaagaccaccttgttagagggggaggttgcccctgctctagggacagctggcctggctgcaagagcccccagaggcattgttctgggacttcctaccctggctcccacagcagaagcagtgaggccgtggtctcgtgcggaactctacctcttcccagggcttcctttagggcgaaacaatcacaagccctttgcacagagcacccaagaaagttctcttcctgcagctccagatggtggagctgggctcttctggcagggggtctggtgcttcccggagagccgagccgcgtttaacccgtggcatgcccggcccggtttacccaggagaggatgggacgaagttggagttgggaggcttgggatgcagccccagctctgctgcaggcagtggtctgattaatcccttcctctttgtgcctcagtttccctctccatgaagtggcagcagagatccaagtgcctgctgactccccatctgccctaggattagtgaatgagagcctcgagctccctgaaagacctctggctgcagtgtggacttagctgccatctgccccatcctcgtccttagtgggacaggtaggaatttgtctccaaagtccttgttgtaggagttgctctctgaatgcaccatctgcacgacaggctagtccactcttctctgagctgccctggggactctgcaccaggatctccagggcccactgagacatccccgaatgggcgctcagtgacaagggctttgaacaacctcctccagggactttgggcctgctctagcttcagaaccacagaaccaccgccctagaggcacagaggggcttctggcactgctaggttcacaccctcctcgcccatcttccttccacctaaagtgaagcacttttccttccaagggcagctccgtcttggcaggctcaggaggccgcttatcaggaggaggatgattttgtctaggttctgccttccttaaccatgggcaggaaatgaggcaagtcagcaggcagggtttctctgccctgcctgatacttgttttaaacaggcaggaagtgggcgccatccatcccagcttgcttgctgcctggctcaggcaggtcctgtgctgtgctgcaggcccctgtgggtgggccctttctccatagtctgccgcttcccattcccagggtagatgctggcatctgagcacctgagtacccttcctattcccagggtagaagctgctgtctgagtacccttcccattcccagggtagatgctggcgtccgagcccctccccggtaccgcaggtaccctggtaccccacctgccctttcatccccaccccagtacttagccttagcactgttgctttcgtgtcattttcagttctagtcaggaattcctttcttgctttctgcctttgacctgtggaaatgtctcccagccctgtgggtctggcggtcagagggaccccacaggcctgtggtgcgggagctctgggaggtgttactatctgcgtggctaaggcacacacaggcctccttctccccatcaccgtctccatgggcgttcaggaacttgcccaggtcaggcactgtggatgtgaactcgtggaaagggagggagaaaggcttttttaggtggggctatagcctctgccctacccacagggattccacatcaaggtgctgttccagcacacatgcttcctgcggcctcttcatccttgaagaatccctcagagcaggaggccatcctgtgagcagccgtgagtgggtctctgtgggagtagttctggagctgaggtggaagctaggggaagcaactcgccctctccacgtcagcatcagcgtgctccgaggacaccggccagtgccttccttaggtggtgggaaaggggtgtccctgtgcagcggggccactgagaatgctgtttgtcataaaatttgcactacccgatttctcaaggggcacaggcctgctccgttcccctttgtcagccaatggccaagaaggaagaagatgactgccatcttattcctgaacttcctcattcaggacccccgtggaaacacagtgagcatccttatcagaggccctggcccaggctggcccctttgctttgtttggagaggctggctgagtttcagcccctagtgctggagacccccttgttggagaggcttcctgtttatgcctcacaagaagaaaaaccacagggctctgggaggggaagaagcatgcactcccgctttggctggagtcccagcgcttgtcgccaccctcctccttgcctgtagtcttgacagcatccgtatgtacgtgtcctggcatttcccctccctctccctgatgactgatacccaccgggtctgacattccaagtaaccagtatgtaactggtagtttgatcccaatagccatagcgactccaggtgggagtgagggagcccagccccctgtcctggaagataccttagagtatgtgaccgcgctccagacccttgcttctctctcctgcagaggatgagtttctagggtgctaagtacctatcagaacagtgtggaggggcgggtccctcatacaggtgtgtgcttagccaaatacagtaactgtgactggcccagggatgttctctcctctattttcaaagatgaaaggaggttttaaaaaccatgtttaattcctaaccttttgctacctgaataaagcagagtctatttcaac

SEQ ID NO: 1426 - DNA, 2605 bp, Homo Sapiens
atacctttgagtcttgcagaagagaaactaccaacaggcattaatcctctcactctacacatcatgagaaggacaaaagaatatgtaagtaatgacgcggcacagtcagatgatgaagagaagttacagtctcagccaacagatactgatggtggaaggttaaaacagaaaacgactcaactaaagaagtttcttggaaaatcagtaaagagagcaaagcaccttgctgaggaatatggtgaacgtgctataaataaagttaaaagtgttagagatgaagtgtttcatactgatcaagatgatccttcatcaagtgatgatgaaggaatgccatacacaagaccagttaaattcaaagcagcacacggtttcaaaggaccttatgattttgatcagatcaaagtggtgcaagatcttagtggtgaacatatgggagctgtttggaccatgaaattttctcactgtggccgattacttgcctcagctggacaagacaatgtagtgagaatatgggctttaaaaaatgcttttgactatttcaacaatatgcgaatgaaatacaatactgaaggacgtgtgtccccatcaccctctcaggaaagtctaagttcatcaaaatcggatacagatacaggggtatgcagtggaactgatgaagaccctgatgataaaaacgcaccctttcggcaacggccattttgcaaatataaaggacatactgctgatctccttgatctttcatggtctaaaaactactttcttctttcttcttcaatggataaaacagtcagattatggcacatttctcgaagagaatgcctttgctgttttcaacatatagatactgccatagcttttcatccaagagatgacaggtattttctaagtgggtctttggatggaaagctccgcctttggaacatacctgacaaaaaagtggctttgtggaatgaagtagatggtcagacaaaattgatcacagctgcaaatttctgtcagaatggcaaatatgcagtgattgggacatatgatggcagatgtattttctatgatacagagcatttgaaataccatacacaaatacatgtccgatctactagagggcgcaacaaggttggaagaaaaattactggcattgagcctttacctggagaaaataagatattggtaacctcaaatgactccagaatcagactatatgatttgagagatttgtcactatccatgaagtataagggttacgtcaatagcagcagccagatcaagcaagtttcagccatgattttacttacctcgttagtggttcagaagataagtatgtttatatctggagtacctaccatgacctaagcaagtttacttcagtcaggagagatcgtaatgacttctgggaaggtattaaagcccacaatgcagttgttacatcagccatctttgcaccaaacccaagtttgatgttatctttggatgtgcaatctgaaaaatcagaagggaacgagaaaagtgaagatgctgaagttttggatgccacaccttctggtattatgaagacagataacacagaagttcttctctctgctgacttcactggagcaatcaaagtgtttgttaataaaagaaaaaatgtatcttaatttgaaatggcatttaaaataaacatatcagtaagtttctatatgtatcaaaactgaaaaaatagtgttccaggctaacatacttttttaatttttattgaaagttgttcaaatataatatattctttgagaggcagtgttaatgatctaggaaaccctgggctgatagagtagaaaggaatatggctagaataacattgccaaacattaggctttatgttttgttatgtttgtgttttcgttgtataattatgaacatgcacaagtttctgcatgaaaagatattaatatattaatcacatgtatgtgccttttggttacatgcattaaatctaacagagttaaattatttcagtggctcttttggcctcttactaggggggatagtcttgtttctagcttaaacaattttttttttgcacaaaatttcatttttaataaaagtggtatcttttgactgagttattgttttgaaaatggtatataggtttccagtaggtcaacaaccatatgtaaatggtttttataaatttctcaatttggggacaagatttttttgtggtctaaattgtgggcttaagattcttttctttatatgtgtacatataatttttttttctttgccacactggagcacaatgtttctatgtaaagaattattttcattctttatccatgagcaccaggctttgctcacttaaaaaaaaattaagccacattaaggagtgagtcttcttttttacaataatgtaaaaattaaactgtttacatttttttaaagcattgtagtttttaaaaattaagctgttttgttttgtgttgttgaatttgaaagcctttgtaaatatcaatataatgtaccaatgaaataacatctggggcaatgaaaccctgatcatgttgttgatggttagcatatgtttctgaaaattaaatatgtattattaaaagttggtctccaacacttgttt

SEQ ID NO: 1427 - DNA, 796 bp, Homo Sapiens
  misc_feature (796)..(796): n is a, c, g, or t
tggcacgaggaggtccagcgggtgctgtgatcttcaagtatggggtctgctggcttgtcgcggctgcatgggcttttcgcggtctataagcccccggggctaaaatggaagcacctgcgggatacagtggagctacaacttctgaagggtctcaatgccaggaagcctcccgctcctaaacagcgtgttcgcttcttgctgggccccatggaaggcagcgaagagaaggagctgaccctcacagccaccagcgtaccctctttcatcaaccatccactggtatgtggaccagcattcgcccatctcaaggttggcgtgggacatcggttggatgcccaggcttctggagtacttgtgctcggcgtgggacatggatgcaggctcctcaccgatatgtacaatgctcatcttaccaaggattacacagtgcgtggcctcctgggcaaagctacagatgacttccgtgaggacgggaggctggtagagaagacaacctatgaccacgtgaccagagagaagctggaccgcattctggccgttatccaaggctcccatcagaaggccctggtgatgtactccaacctcgacctgaagacccaggaggcctatgagatggccgtgagaggcctgatccggcccatgaacaagtccccgatgctgataactggcatccgatgcctctactttgcacctccggaattcctcttagaggtgcagtgcatgcatgagacgcagaaagagctgcggaagttggttcatgaaatcggcctggaactaaagaccactgctgtctgcn

SEQ ID NO: 1428 - DNA, 2048 bp, Homo Sapiens
ctattgatctggactcctggataggcagctggaccaacggacggacgccatgagggctctgctgctcctggggttcctgctggtgagcttggagtcaacactttcgattccaccttgggaagcccccaaggagcataagtacaaagctgaagagcacacagtcgttctcactgtcaccggggagccctgccacttccccttccagtaccaccggcagctgtaccacaaatgtacccacaagggccggccaggccctcagccctggtgtgctaccacccccaactttgatcaggaccagcgatggggatactgtttggagcccaagaaagtgaaagaccactgcagcaaacacagcccctgccagaaaggagggacctgtgtgaacatgccaagcggcccccactgtctctgtccacaacacctcactggaaaccactgccagaaagagaagtgctttgagcctcagcttctccggtttttccacaagaatgagatatggtatagaactgagcaagcagctgtggccagatgccagtgcaagggtcctgatgcccactgccagcggctggccagccaggcctgccgcaccaacccgtgcctccatgggggtcgctgcctagaggtggagggccaccgcctgtgccactgcccggtgggctacaccggacccttctgcgacgtggacaccaaggcaagctgctatgatggccgcgggctcagctaccgcggcctggccaggaccacgctctcgggtgcgccctgtcagccgtgggcctcggaggccacctaccggaacgtgactgccgagcaagcgcggaactggggactgggcggccacgccttctgccggaacccggacaacgacatccgcccgtggtgcttcgtgctgaaccgcgaccggctgagctgggagtactgcgacctggcacagtgccagaccccaacccaggcggcgcctccgaccccggtgtcccctaggcttcatgtcccactcatgcccgcgcagccggcaccgccgaagcctcagcccacgacccggaccccgcctcagtcccagaccccgggagccttgccggcgaagcgggagcagccgccttccctgaccaggaacggcccactgagctgcgggcagcggctccgcaagagtctgtcttcgatgacccgcgtcgttggcgggctggtggcgctacgcggggcgcacccctacatcgccgcgctgtactggggccacagtttctgcgccggcagcctcatcgccccctgctgggtgctgacggccgctcactgcctgcaggaccggcccgcacccgaggatctgacggtggtgctcggccaggaacgccgtaaccacagctgtgagccgtgccagacgttggccgtgcgctcctaccgcttgcacgaggccttctcgcccgtcagctaccagcacgacctggctctgttgcgccttcaggaggatgcggacggcagctgcgcgctcctgtcgccttacgttcagccggtgtgcctgccaagcggcgccgcgcgaccctccgagaccacgctctgccaggtggccggctggggccaccagttcgagggggcggaggaatatgccagcttcctgcaggaggcgcaggtaccgttcctctccctggagcgctgctcagccccggacgtgcacggatcctccatcctccccggcatgctctgcgcagggttcctcgagggcggcaccgatgcgtgccagggtgattccggaggcccgctggtgtgtgaggaccaagctgcagagcgccggctcaccctgcaaggcatcatcagctggggatcgggctgtggtgaccgcaacaagccaggcgtctacaccgatgtggcctactacctggcctggatccgggagcacaccgtttcctgattgctcagggactcatctttccctccttggtgattccgcagtgagagagtggctggggcatggaaggcaagattgtgtcccattcccccagtgcggccagctccgcgccaggatggcgaggaactcaataaagtgctttgaaaatgctgag

SEQ ID NO: 1429 - DNA, 513 bp, Homo Sapiens
acttgcgttattgagtgctcacctgcggaaattctaaagatacagaggacttggaggaagcagagcaactgaatttaatttaaaagaaggaaaacattggaatcatggcactcctgatactttcccaaatcaacactctcaatgccccaccctcgtcctcaccatagtggggagactaaagtggccagggatttgccttaggtgtgcagtgcgttctgagttcactgccgattacatctgaccagtctcctttttccgaagttccttccgttcaatcttgccagtgatggtttttggcagctctgagacaaactccaccttccttgggtacttgtatggggctgtcactgacttgacatgctgctgcagttccttggtcagctgatccttgtcatgggacaggaactgtggggtcaggacaataaaggccttcacaacctcccctcgaatcgggtctgggctgcccaccacggctgactccgccaccgctgggtgctccaccaaagcgctttc

SEQ ID NO: 1430 - DNA, 2021 bp, Homo Sapiens
aaatgcagagaagaatgggcaaagaccaaagacccaactgctgccctcagaaaactacctgtcaaaaggtgtgtggaagggcagctgcttcgaggactttcaaaatatggaatgaagaatatagtctctgcatttggcataatacccagaaataatcgcttaatgtatattcatagctaccaaagctatgtgtggaataacatggtaagcaagaggatagaagactatggactaaaacctgttccaggggacctcgttctcaaaggagccacagccacctatattgaggaagatgatgttaataattactctatccatgatgtggtaatgcccttgcctggtttcgatgttatctacccaaagcataaaattcaagaagcctacagggaaatgctcacagctgacaatcttgatattgacaacatgagacacaaaattcgagattattccttgtcaggggcctaccgaaagatcattattcgtcctcagaatgttagctgggaagtcgttgcatatgatgatcccaaaattccacttttcaacacagatgtggacaacctagaagggaagacaccaccagtttttgcttctgaaggcaaatacagggctctgaaaatggatttttctctacccccttctacttacgccaccatggccattcgagaagtgctaaaaatggataccagtatcaagaaccagacgcagctgaatacaacctggcttcgctgagcagtaccttgtccacagattagaaaacgtacacaagtgtttgcttcctggctccctgtgcatttttgtcttagttcagactcatatatggatttcaaatctttgtaataaaaattatttgtatttttaagtttttattagcttaaagaaataatttgcaatatttgtacatgtacacaaatcctgaggttcttaattttagctcagaatataaattagtcaaaatacacttcaggtgcttaaatcagagtaaaatgtcagctttacaataataaaaaaaggactttggtttaaagtagcaggtttaggttttgctacattctcaaaagacagcaggagtatttgacacatctgtgatggagtatacaacaatgcattttaagagcaaatgcaacaaaacaaatctggactatggataaataatttgagagctgccacccacaaatataaatacagtactcatgctgactgaaataataagacatctacaaatttataaacaaaaagtgattgtcattatcctgcttatgtactagattcaggcaagcattatagactttttggttgcggtggcttttgcatttatattatcaatgccttgcaggaacgttgcattgataggcccattttatttttttattttttttttcgagacaggatctcactctgtagcacaggctggattgcagtgcaatcctgcaattctcaatcttgcactgcagcctcgacctcccaggctccagtgactctcccacctcagcctcctaagtagctgggagtacaggcgcgcaccaccacgcctagctgatttttgtatttttttgtagagacgggggtttggccatgttgccgaggctaactcctgggattacaggcatgagctgtgctggccgggtttttttttcttgatgtaaacgtgtacagctgttttattagttaaggtctaatttttactctaggtgccttttatgttcagaactctttccactggactggtatttgctcaaaaataaataatggtagagaagaaaactataaaaatggacaaggctttcttctatcagtagcgtttaccctttgtcaccagtggctttggtatttccatgtctggcattgcataaacttctctggtgtgaaaggataaatatgcctttctaaagttgtatatcaaaattgtatcaatttttattttctatgatttctagaaacaaatgtaataaatatttttaaaatctcctttctactggttatgtaaataaatcaaataaatatatcaaaaaaaaaaaaaaaaa

SEQ ID NO: 1431 - DNA, 5900 bp, Homo Sapiens
gatctctcccatgaagtgaccaggatagagaagcaccagaaccgccaaaagtatgggctgtgcgtcatcttcctttcctgtaccatgatgcccaactttaaagagctgatccatttcgaggtcagcatcggtcactatgggaacaagatggacctgaattacaagcctctagtctcaagcacaccgtacagcccagtgatatatgatgggaacatctaccattatgtgccctggtacaacaccaagcctgtcgtggccgtgacctccaactgggaggacgtcagcttccgcatgaactgcctcaacctcctccacttcactcgggaccgcctgaaagccaacctggacaccctgaaatccacgcggaatccgaaggatccagctctcctctaccagtgggagaaactgctgagggagctggcagaggactgcaagcgccctctgccctgcatgacctatcagcccaaagccaccagcctggacaggaagaggtggcagctccgcagcctcctcctgcaggaactggcccaaaaggccaagcaagccaagcccaaggacatggtggccacagcggaggactggctgtaccgcctcaacgccgtgctccctgagccccagatgggcctccctgacgtgatgatttggctggtggccaaggagcagcgagtggcctatgcacagtacccagagggtgaaggacagaaggatgtgctcccagctcacctccgggtctgcatgtggcttggcaatgtcacagacagcaaggacctgcagctgctccgccagggtgacacagcggtgtacgccgagatggtgagtgtatgagaatcaggccaagtataaagaccagtgggggcagcaggggctgtatcactgccccaacttctcggatgtcatggggaacaagaccctccccatgacggatttccaaccacccctgggatggcactggcaggacagctggacagtggaacctcagagaaggctcctcctggacatagacatcaacaagagccaggtgctggaggaggtatatgagaaccagggccgtgacaccagaggggcctgggggcctgccgccatcccaaacacagacgtgaatggacagcccatggaggcccgggagaacgtgaagtgcccccaaggctggcactttaagaaggactgggtggtggagctgaaccacgcagtggacagtaagggctgggagtatggagtggggatcccaccgtcgggcctgccccaggtctggagcccggtggagaagacctaccactcgtgccgccgccggcgctgggcgcgtgtgcgcttcaggaaccatggggagctgagccacgagcaggagaccctctccttcctgcagctgggcctggccaagggcgaggaggagggctgggagtatgacaccttcggctccaagttccacctcaaccctcagccccagagccggttccgccgccgctgctggcgccgcaggctggcccccaacaaggacaagggcatcgcgcccatattcctcctggaggggtccttggctatggatctgaaataccacgctgggaaggaagaggacagcaagacatggccatggggtctggacagacagttcagggacccccagaggcaggacacccggccccccaacttgcccttcatctactgcaccttcaataagccccactactaccagctcttctgctacatctaccaggcccggaacctggtgtccaatcagatcctgacattccaagggcccttcattcgggtggtcttcctgaaccacagccagtgcacccaaaccctgaggagctctgcaggccccacatgggcccagacactcatcttccagcacctccttctgtacgagaacccgcaggacaccaaagagagcccaccgcttgtggtgctggagctgtggcagcgtgacttctggggcaaggagagcttgtggggacggagcgtgtggcccccaatggtctggctggatctccaggaccggatcctgccccccatgaggtggcatccccttgtaaaggagttggggaaggaagagggcgagatcttggcatcctgtgagctgatcctccagactgagaagcttggagagaagcagctgcctatcttaagcgttccctggaagaatggggcatacacactccccaagagcatccagcccacgataaagaggatggccattgaggtgctggcgatgtgggatggggacggtgggcaggacaggcgggggtggtctggagtgcgctgcagccttctgctggtcctccctgactactggatccaaagctcacaccccgaaaaagactacctgggaggtggagggagacaggagagaaacgaagaggttctggtgtaacactggaaatcattttaccacaaacctctgcagtgaggagtaggcaaagggctgtagcatgcatgatcacttgtgggactcacgctgcccctgcgcagtagcaactactttgcagagaaggaaatagaggctccaagagataacacattccacgcacagtgatgcagggactaactgacagggccatttaggcccagccctgtctgactgcagatgccaggatgttgctcacctctcttctgagagtagcatgagggtcctcattcagaagctgtgtgccctgccgcaaatgtggcaaagagcacaagacggtcaggcctctgggactgaaggcttccccaagatcaggcaacttggctggttcccgctttaggccccgaggaggcccaaagtcagggtgcagctatttcctggcaggatgccaggtcactgaatggccatggggtcctcaatgagctagacggcacaggggccctgagaaatccaggcacttcctgcttcttcaggcctcagaggcagtcggcttcaggaactcctacctgagaactgatgaggccagacaaggcagcgggtgaggaggggcaatgcctgcgggctatggaggtcagtggaggatgcagccagtggccagaggtcacctccctcatgggttgggggacagcgtcccagccccgagggcaagcactgatccctcacaggacggggaagcctgtccttgtgcgccttcagacactggctcctctgcagccccattccctggccctgcaggctcctgctgcaccgctattgcccctcagcccccttctctggccaggaccccattacagaggcgctgcctgccccttgtcctgccctccttctttgttctggtagatcctggcctggggccttcggaacatgaagaaggcgagctccccccagctcctggtggaattcggggaagagtccctgaggacagaacccatcagggactttcagaccaaccccaacttccccgagtctgagtctgtcctagtcctcacagtgctcatgccgacggaggaggcctatgcactgcccctcgtggtgaaggtggtagacaactgggccttcggccagcagaccgtgacgggccaggccaacatcgacttcctccagccctacttctgtgacccctgggctcaagactatatgcacccaaagcttccaacgctgtctgagaagaagcaccaagacttcctaggctacctctacagaaagttctggttcaagtccagtaaagcagaggatgagtatgagcatgaggtggactggtggagcaagctgttctgggccacagatgagcacaagtccctgaagtacaagtacaaagactaccacaccctcaaggtgtatgagtgtgagctggaggccgtgccagccttccagggcctgcaggacttctgccagaccttcaaactctaccaggagcagcccaagttggacagccccgtggtaggggagttcaagggccttttccgcatctacccctttcctgagaatccagaagccccaaagcccccgctgcagttcttggtttggccagagagagaggacttcccccagccgtgcttggtgcgggtgtacatggtacgagccatcaacctgcagccccaggactacaatggcctgtgtgacccttatgtgatcctgaaactgggcaagacagagcttggcaaccgggacatgtaccagcccaacactctggatcccatctttggcatgatgtttgaactcacctgcaacatacccctggagaaggacctagagatccagctctatgacttcgacctattttcacctgatgataagataggaaccacagtcatcgaccttgaaaaccgactcctatctggctttggagctcattgtgggctctccaaatcctactgccagtcagggccctttagatggcgggatcagatgcccccaagctacctcctagaacgctatgccaagcggaaagggctacctccgcctctgttcagtcctgaggaagatgctgttttctataatgggaaaaagttcaagctgcaaagctttgagcccaaaacccctactgtccatggtttgggacccaagaaggaacgccttgcactgtacctcctgcacacccaggggctggtacctgagcacgtggagacccgcacactgtacagccacagccagccaggcatcgaccagggaaaggtgcaaatgtgggtggacatcttccccaagaagctggggcctcctggcccccaagtcaacatcaaccccagaaagcctaaacggtatgagctgcgatgcatcatctggaagactgccaatgtggacctggtggatgacaatttaagtagagagaagacgagcgacatctacatcaaagggtggttatacgggctggagaaggacatgcagaagacagacatccactaccactcgctgactggggaggccgacttcaactggcggttcatctttaccatggactacctggcggcggagcgcacgtgtgtccagagccagaaggattacatatggagcctggatgccacgtccatgaagttcccagcccgacttatcatccaggtctgggacaatgacatcttctcccccgacgacttcctaggggtcctggagctggatttgtctgacatgcccctcccggctcggcacgccaagcagtgctccatcaggatgatggacgccgaccccaagtggccctatttcatccaatacaagcacttctccctctttaagaagaagactgtgactggctggtggccttgccaggtcctcgatggtggcaaatggcgcttgtcgggcaaggtgaagatgagcctggagattctgtcagagaaggaagccttaatcaagccagccgggcgaggccagtcggaacccaaccagtaccccacacttcatcctcccctacgcaccaacacctctttcacgtggctgcggtcaccagttcaaaacttctgctatattttctggaaacgctatcgcttcaaactcatagcctttatggtcatatcgattatagcacttatgctgtttaacttcatctattcagctccgcactatttggccatgagctggatcaaacctcaacttcagctgtatcctcccattaaaatattcaatatcatcaattcactaaacaccagcaacgccagctcttccatccttcccacccaggatccaaacctaaagcctacaatagaccatgagtggaaactccacccaggacccacaaatcacctgagtgatattttcccagaacttccagccccaggagactaattagtccatgctgcctggctttcctcctgctaccaacagccctccccttgggctggctaccagttctttgtttctatcttctagaatatatgcaagatgctaggaatattctggctattgtgttcagaaatcactttcaacaagacgagcagagctgtaattttccactgaaataaacaagttctataacagaaaaaaaaaaaaaaaaaaaaaaaaaaaaaaa

SEQ ID NO: 1432 - DNA, 358 bp, Homo Sapiens
ttttgttttttttttttttttcacataccaacaaaggactttattagtgcaaattcatttgaatatttacaagcatatatgatagtgcatttcgatgcaatctaagaaggaatacattacatgggaaactgtcttaatattttcattataccgtgcagatttctagaaaaatcaacaagcaatagtcctgtctgaagcacagaatttaaaataaagtttacctccattacagacaagaaaacaaaaaattatcggccttataaattttagtatgagtacttaaattaggtacttcacagatttattttcattaattaatgaacgaaagtaactggtatttataagaaatataacattg

SEQ ID NO: 1433 - DNA, 514 bp, Homo Sapiens
ctactccagcaatgaggctgaagttaccagagtgacatcatggtatctggtgcaagctatagcatccacctattcttggagcacacgtggtcagacactgattggcatgtgaccaagttgatggtggtcaaaacagaactcctttcatgcccacaagcttcagtattactatgttccctgccacttccgttgaagttttgcaggattgggatgatcctttggtgtgaacgaagccccaaagaggaccacgtggagagtgcctgactgttcctgtgatgtcttctagtacatgaacaggaatgaaacccactatgtcctccatgtgaactacatgctgagcgtgggtccagatgggaaaccattctcctaccctgcagaaatggtatatagtttcaaggatgtgggtaagtacaccaagtgaggtgctggtcctggactcatggatggtcttggtacccaacaagttacactggctctgtccaaacaacagctgtggaagcccctcccatgggag

SEQ ID NO: 1434 - DNA, 437 bp, Homo Sapiens
atcagcaaatgccatctgttgttccttttttctgttctgaaacttatgttttctgtacgctctaatacacagtcacatggggaaatgtttcatggatactttgaagtgtagttaccacttttagggtaaagtctaatatgcatcaactagatcttctgtatcttatttaaatcatcccatgtcctagttttttatccacttgatctgtcatgaattgacagaattgaattaaaatatccaactaacattgtatttgtttcttcctgtgtctcctatggtttccaatacataaatggttttccattatttggtacacagatatctagaaacattatctcgtgagtcacaccctttagcattatggtcgggttttttggttttttttttccgttccttttccctaattcaaccttgcctgatatgcagactacaactca

SEQ ID NO: 1435 - DNA, 1690 bp, Homo Sapiens
gccaaatcgcaaatatggcgccggagcggctgcggagccgggcgctctccgccttcaagttgcggggcttgctgctccgtggtgaagctattaagtacctcacagaagctcttcagtctatcagtgaattagagcttgaagataaactggaaaagataattaatgcagttgagaagcaacccttgtcatcaaacatgattgaacgatctgtggtggaagcagcagtccaggaatgcagtcagtctgttgatgaaactatagagcacgttttcaatatcataggagcatttgatattccacgctttgtgtacaattcagaaagaaaaaaatttcttcctctgttaatgaccaaccaccctgcaccaaatttatttggaacaccaagagataaagcagagatgtttcgtgagcgatataccattttgcaccagaggacccacaggcatgaattatttactcctccggtgataggttctcaccctgatgaaagcggaagcaaattccagcttaaaacaatagaaaccttattgggtagtacaaccaaaatcggagatgcgattgttcttggaatgataacgcagttaaaagagggaaaattttttctggaagatcctactggaacagtccaactagaccttagtaaagctcagttccatagtggtttatacacagaggcatgctttgtcttagcagaaggttggtttgaagatcaagtgtttcatgtcaatgcctttggatttccacccactgagccctctagtactactagggcatactatggaaatattaatttttttggaggtccttctaatacatctgtgaagacttctgcaaaactaaaacagctagaagaggagaataaagatgctatgtttgtgtttttatctgatgtttggttggaccaggtggaagtattggaaaaacttcgcataatgtttgctggttattcaccagcacctccaacctgctttattctgtgtggtaatttttcatctgcaccatatggaaaaaatcaagttcaagctttgaaagattccctaaaaactttggcagatataatatgtgaatacccagatattcaccaaagtagtcgttttgtgtttgtacctggtccagaggatcctggatttggttccatcttaccaaggccaccacttgctgaaagcatcactaatgaattcagacaaagggtaccattttcagtttttactactaatccttgcagaattcagtactgtacacaggaaattactgtcttccgtgaagacttagtaaataaaatgtgcagaaactgcgtccgttttcctagcagcaatttggctattcctaatcactttgtaaagactatcttatcccaaggacatctgactcccctacctctttatgtctgcccagtgtattgggcatatgactatgctttgagagtgtatcctgtgcccgatctacttgtcattgcagacaaatatgatcctttcactacgacaaataccgaatgcctctgcataaaccctggctcttttccaagaagtggattttcattcaaagttttttatccttctaataagacagtagaagatagcaaacttcaaggcttttgagattcttaaagatcatctgaagaaaattcatcagttttctgcttaactctatatcttatgtgattctgatattacaataaaattatggtaaa

SEQ ID NO: 1436 - DNA, 617 bp, Homo Sapiens
tttcattactgaatagatatagccaaattccttcccccaaaagattataaagtgtcctagtcctaccagcaaaatcattaagttcattaaggcaagatcccctccagcgctggatgtgatgctgtctttaattttgtatttttctgactacttgtgcaatgaggatgttttggtctattggccatttggcttttctctttcgcaaatgttcatatcctttgtccagttttctttagggtgatttttccttttcgtatcaatttgtaaacagtgtacaaattacattgtacattagggatattaacagtctgtcagttacactgtacattagggatattacattagagatattaacatcttcgtccattaaggatattaaccatctgtcagttacattgcagtatttttccctaaactctttgtgtcttttgcattttcatgttctttttaaatgtgcaattagaaaaatttctatatgggctgggcacagtaatcccagcacccatctctactaaaaataaccaccaaaaaatagccaggcgtggtatctcaagtagaaaacacaagacaaaattggccgggcatgggtatgggcgctagtaatcccagtaactcgg

SEQ ID NO: 1437 - DNA, 500 bp, Homo Sapiens
  misc_feature (255)..(255): n is a, c, g, or t
cgcctcctccttctctcctcctcctcttcctcctcctccctcgctcccacagccatgtctgcttagaccagagcagccccacagccaactagggcagctgccgccgccacaacagcaaggacagccgctgccgccgcccgtgagcgatgacaggagtgtttgacagaagggtccccagcatccgatccggcgacttccaagctccgttccagacgtccgcagctatgcaccatccgtctcaggaatcgccaactntgcccgagtcttcagctaccgattctgactactacagccctacggggggagccccgcacggctactgctctcctacctcggcttcctatggcaaagctctcaacccctaccagtatcagtatcacggcgtgaacggctccgccgggagctacccagccaaagcttatgccgactatagctacgctagctcctaccaccagtacggcggcgcctaccaccgcgtcccaagcgccaccaaccagcca

SEQ ID NO: 1438 - DNA, 500 bp, Homo Sapiens
  misc_feature (96)..(96): n is a, c, g, or t
  misc_feature (111)..(111): n is a, c, g, or t
  misc_feature (159)..(159): n is a, c, g, or t
  misc_feature (168)..(168): n is a, c, g, or t
  misc_feature (175)..(175): n is a, c, g, or t
  misc_feature (181)..(181): n is a, c, g, or t
  misc_feature (183)..(183): n is a, c, g, or t
  misc_feature (195)..(195): n is a, c, g, or t
  misc_feature (359)..(359): n is a, c, g, or t
  misc_feature (432)..(432): n is a, c, g, or t
gctgtatatccatgagcgccgctggcagccggggagctgcaggaaccagactgggggcgagctgagcacctgtagtcaatcacacgcagcttttangtttgtttgaataanagatctgacctgaccggcccaactgtacaactcttcaaggaaaattcntatttgcantgggaanaataantnacattgatcaanatgaatgccatgctggagactcccgaactcccagccgtgtttgatggagtgaagctggctgcagtggctgctgtgctgtacgtgatcgtccggtgtttgaacctgaagagccccacagccccacctgacctctacttccaggactcggggctctcacgctttcngctcaagtcctgtcctcttctgaccaaagaatacattccaccgttgatctgggggaaaagtggacacatccangacagccttgtatgggaagatgggaagggtgaggtcgccacatccttatgggcaccggaagttcatca

SEQ ID NO: 1439 - DNA, 2416 bp, Homo Sapiens
cgatttcattcctcgctccccacaggtccctctccccaaaatattcccatcttgtcctagcccatcccccagactatctcaaggaccagctgtccccacgcccccgacctccactaggcctgtgccacccgctgcctgcaggaagacgcccggtcccgggccgggttagccccatgggaacgcagcgcctgtgtggccgcgggactcaaggctggcctggctcaagtgaacagcacgtccaggaggcgacctcgtccgcgggtttgcattctggggtggacgagctgggggttcggtccgagcccggtgggaggctcccggagcgcagcctgggcccagcccaccccgcgccggcggccatggcaggcaccctggacctggacaagggctgcacggtggaggagctgctccgcgggtgcatcgaagccttcgatgactccgggaaggtgcgggacccgcagctggtgcgcatgttcctcatgatgcacccctggtacatcccctcctctcagctggcggccaagctgctccacatctaccaacaatcccggaaggacaactccaattccctgcaggtgaaaacgtgccacctggtcaggtactggatctccgccttcccagcggagtttgacttgaacccggagttggctgagcagatcaaggagctgaaggctctgctagaccaagaagggaaccgacggcacagcagcctaatcgacatagacagcgtccctacctacaagtggaagcggcaggtgactcagcggaaccctgtgggacagaaaaagcgcaagatgtccctgttgtttgaccacctggagcccatggagctggcggagcatctcacctacttggagtatcgctccttctgcaagatcctgtttcaggactatcacagtttcgtgactcatggctgcactgtggacaaccccgtcctggagcggttcatctccctcttcaacagcgtctcacagtgggtgcagctcatgatcctcagcaaacccacagccccgcagcgggccctggtcatcacacactttgtccacgtggcggagaagctgctacagctgcagaacttcaacacgctgatggcagtggtcgggggcctgagccacagctccatctcccgcctcaaggagacccacagccacgttagccctgagaccatcaagctctgggagggtctcacggaactagtgacggcgacaggcaactatggcaactaccggcgtcggctggcagcctgtgtgggcttccgcttcccgatcctgggtgtgcacctcaaggacctggtggccctgcagctggcactgcctgactggctggacccagcccggacccggctcaacggggccaagatgaagcagctctttagcatcctggaggagctggccatggtgaccagcctgcggccaccagtacaggccaaccccgacctgctgagcctgctcacggtgtctctggatcagtatcagacggaggatgagctgtaccagctgtccctgcagcgggagccgcgctccaagtcctcgccaaccagccccacgagttgcaccccaccaccccggcccccggtactggaggagtggacctcggctgccaaacccaagctggatcaggccctcgtggtggagcacatcgagaagatggtggagtctgtgttccggaactttgacgtcgatggggatggccacatctcacaggaagaattccagatcatccgtgggaacttcccttacctcagcgcctttggggacctcgaccagaaccaggatggctgcatcagcagggaggagatggtttcctatttcctgcgctccagctctgtgttgggggggcgcatgggcttcgtacacaacttccaggagagcaactccttgcgccccgtcgcctgccgccactgcaaagccctgatcctgggcatctacaagcagggcctcaaatgccgagcctgtggagtgaactgccacaagcagtgcaaggatcgcctgtcagttgagtgtcggcgcagggcccagagtgtgagcctggaggggtctgcaccctcaccctcacccatgcacagccaccatcaccgcgccttcagcttctctctgccccgccctggcaggcgaggctccaggcctccagagatccgtgaggaggaggtacagacggtggaggatggggtgtttgacatccacttgtaatagatgctgtggttggatcaaggactcattcctgccttggagaaaatacttcaaccagagcagggagcctgggggtgtcggggcaggaggctggggatgggggtgggatatgagggtggcatgcagctgagggcagggccagggctggtgtccctaaggttgtacagactcttgtgaatatttgtattttccagatggaataaaaaggcccgtgtaattaaccttca

SEQ ID NO: 1440 - DNA, 424 bp, Homo Sapiens
ttttttttgagacagtcttgctcagttgcccaggctggagtgcagtggcacaatctcggctcactgcaacctccgcctcccgggttcacgccattctcctgcctcagcctcccaagtagctaggactacagatgcccgccatgacacccagcaaattttttttatatttttagtagagacggggtttcaccatgttagccaggatggtctcgatctcctgaccttctgatccacccgcctcggcctcccaaagtgctgggattacaggagtgagccaccgtgcccagcctcaagtccaaagtcttgaagtcaaattttattgagctttgtaacgatcagtactctcaccgtttggtcaaatgaactacagacgcagagaccccttttatctggactccaatccaaacttgaaatgggctgggtg

SEQ ID NO: 1441 - DNA, 529 bp, Homo Sapiens
  misc_feature (10)..(10): n is a, c, g, or t
gggcggccgntagctgttgctgttgggggaccgctcattcctgccgctgccgtccctgctgcctcatgcggccatcggagttcacctgggctgcacctcagcatgtgaggccgtctataaggatggccgggctggtgtggttgcaaatgatgccggtgaccgagttactccagctgttgttgcttactcagaaaatgaagagattgttggattggcagcaaaacaaagtagaataagaaatatttcaaatacagtaatgaaagtaaagcagatcctgggcagaagctccagtgatccacaagctcagaaatacatcgcggaaagtaaatgtttagtcattgaaaaaaatgggaaattacgatatgaaatagatactggagaagaaacaaaatttgttaacccagaagatgttgccagactgatatttagtaaaatgaaagaaacggcacattctgtattgggctcagatgcaaatgatgtagttattactgtcccgtttgattttggagaaaagccaaaaatgcccttg

SEQ ID NO: 1442 - DNA, 435 bp, Homo Sapiens
  misc_feature (356)..(356): n is a, c, g, or t
  misc_feature (409)..(409): n is a, c, g, or t
  misc_feature (422)..(422): n is a, c, g, or t
  misc_feature (432)..(432): n is a, c, g, or t
tttattttctttcctccctttgcccagtagccacatctggtttactcaggcagcatctactaagaaattcagcacctgcatatctctgtgacatggtcacttagagcttatcttccctatgaatctccagatctgtgagtcgagcagatttcatgttgcagattcacctttaatgcaaagactgtattatcctcacatgactttttttcttgtcttactgtaccttaaaaggtgatagagtaattctgtattttctaacgggaagattcaaaggagctgaatgtgttatgcttccaaacaactgaatgtaaaacactcctagccagttgttgcattcccctatatttatttacttnccaatatttttactgtaaaagtaggggggggaaatattatggttgataggtgntttcaaaatcttntccgggggcntta

SEQ ID NO: 1443 - DNA, 933 bp, Homo Sapiens
  misc_feature (658)..(658): n is a, c, g, or t
  misc_feature (700)..(700): n is a, c, g, or t
  misc_feature (741)..(741): n is a, c, g, or t
  misc_feature (745)..(745): n is a, c, g, or t
  misc_feature (773)..(773): n is a, c, g, or t
  misc_feature (780)..(780): n is a, c, g, or t
  misc_feature (785)..(785): n is a, c, g, or t
  misc_feature (816)..(816): n is a, c, g, or t
  misc_feature (827)..(827): n is a, c, g, or t
  misc_feature (831)..(831): n is a, c, g, or t
  misc_feature (871)..(871): n is a, c, g, or t
  misc_feature (906)..(906): n is a, c, g, or t
  misc_feature (926)..(926): n is a, c, g, or t
ttttttttttttttttttttttttttttttttttttttttttttttttggagaaaaaaactcaggtttatttgcaagtaaaaaccatggtctgaaaaaaacccattggcaaatgtacagtttgggtccatttggggttcccgccagctgggggggcccccaaatccctgacccaaatgcatggggctcccacatgttcacagttaatttcaggcccctgcagtttaaccccctgcaggggacaccccgtttcctggtgaaaaccattggactcccaggctgcacccagcccttcaaccctcttggcttagtggggtgcaaaaaccaaaccaaacacaatttttaaaacaaagaaacacaaaacaaaaaaattcacaaaaaccagggttttaaattattttttctcaggggccttcgggaacatgaggacttatttggcaacaaactaaaatatacatcattttcttgctttataaaatctcttattattcacagatatataacgggagatttggatgaaataattacaaacttttttccccttaaaaaacaaacaagccaaacaaaacacaaacaaaacaaagaccccaaaaccaaaacacaagacctttctgacgacagtaaacacaggggctggtggcttcctccccgccatcctncgcgcctgctgggccgaagtcggaaagggcttggtgtacccngaacgggaggccccagggtgttttttcaaaggtgactctangttnccctgcccctgcctcactccctcatttnccaggcnttttntcagggcccttttcccccctgcggtcccatnccatgactctnccgnctttttctacacccagaggatacagccaaagggccaggcncacctaaaggaagcctagtcccacgcccccaaganggaccaatttcccaacccanctggcgg

SEQ ID NO: 1444 - DNA, 485 bp, Homo Sapiens
  misc_feature (448)..(448): n is a, c, g, or t
  misc_feature (453)..(453): n is a, c, g, or t
  misc_feature (468)..(468): n is a, c, g, or t
  misc_feature (478)..(478): n is a, c, g, or t
cctactctattctttccccccatgaacttatcaaagggagaactggttgtgtatttaagagaaatgagagtgcattgcaaagtagtttcccaaggcatttcccctattgtttacatggtcaaaaggaaaatcaaaatcacttctaattacaaaatgtgctgttttggtggggtgggcaatcagattattatagttgatgactgtaccaaagatctggaatgggggccacctttatattttaatactcaagtcctgtgctccttttggccactttaaaaagtcttccctcaccttgggataaatagggattcagaaagctaacagttttcattctgaaggaggcaggaaacattaatcaatccctccctggggattaaaatgtgggggcatggcacattggctttggggagttcagtatttcagctgttaagtgttagtattgttttangggcnggaattaggaaggcntattgagggnggcccac

SEQ ID NO: 1445 - DNA, 1278 bp, Homo Sapiens
cgtgcgtgtctcgagtcgcacggacggcaaccgtcgacgggcttagcgcctcaactgtcgttggtgtatttttctggtgtcacttctgtgccttccttcaaaggtggtgctttgtccctgtgggtcatctgtactgattgcgccaagaaagcatttgttctccaaatgtcaactgtcaaggagcagctaattgagaagctaattgaggatgatgaaaactcccagtgtaaaattactattgttggaactggtgccgtaggcatggcttgtgctattagtatcttactgaaggatttggctgatgaacttgcccttgttgatgttgcattggacaaactgaagggagaaatgatggatcttcagcatggcagtcttttctttagtacttcaaagattacttctggaaaagattacagtgtatctgcaaactccagaatagttattgtcacagcaggtgcaaggcagcaggagggagaaactcgccttgccctggtccaacgtaatgtggctataatgaaatcaatcattcctgccatagtccattatagtcctgattgtaaaattcttgttgtttcaaatccagtggatattttgacatatatagtctggaagataagtggcttacctgtaactcgtgtaattggaagtggttgtaatctagactctgcccgtttccgttacctaattggagaaaagttgggtgtccaccccacaagctgccatggttggattattggagaacatggtgattctagtgtgcccttatggagtggggtgaatgttgctggtgttgctctgaagactctggaccctaaattaggaacggattcagataaggaacactggaaaaatatccataaacaagttattcaaagtgcctatgaaattatcaagctgaaggggtatacctcttgggctattggactgtctgtgatggatctggtaggatccattttgaaaaatcttaggagagtgcacccagtttccaccatggttaagggattatatggaataaaagaagaactctttctcagtatcccttgtgtcttggggcggaatggtgtctcagatgttgtgaaaattaacttgaattctgaggaggaggcccttttcaagaagagtgcagaaacactttggaatattcaaaaggatctaatattttaaattaaagccttctaatgttccactgtttggagaacagaagatagcaggctgtgtattttaaattttgaaagtattttcattgatcttaaaaaataaaaacaaattggagacctg

SEQ ID NO: 1446 - DNA, 437 bp, Homo Sapiens
  misc_feature (336)..(336): n is a, c, g, or t
  misc_feature (403)..(404): n is a, c, g, or t
tttttttttttttttttaatcttattaactttttattctctgtttcttactttgaccaaaattggaacaacatatttacttcgccaacatttcaggtcttaggtagaagaatattcacacatcaaaggatttttatgacttgttcaagagctagatagccacttcttacaatacaaattatttttaagaatttaaacatcaatttctgagacagaatgttcagagaaatattatttaaatgcaaaaaaaaagcaaaaataaaacttgcttagcatatgaataagggacatgtgaagatgtattgcccatggattccaataattcaagcatttttanaagtagtaattaaattgtaatttatctggaataaggaattattatgataattctagaatgttcttannaagcagacagccagaagcctaaagcagttaaaa

SEQ ID NO: 1447 - DNA, 417 bp, Homo Sapiens
  misc_feature (346)..(347): n is a, c, g, or t
ttgaatttaggtgacactatagaagagctatgacgtcgcatgcacgcgtacgtaagcttggatcctctagagcggccgcctactactactaaattcgcggccgcgtcgactttttttttttttttttcattctgaaggttcaagatacaggcacaagaagcatcagggatgggaactgggtgtgtggggatggacatcattaacatgacaaacacagaaacagtttggttctttttccctcctaagcctttgtctgtgaaatggggttatggcaagaagtgtccagagtaactggtaaattcaagaaggttaagaagacttcgtgtgtggggggtgtgtgtgtgtnnctaaaaacgatttcagacctagagtcttggtcttgggcataaaaggaagagaagcaatcgtgccgtctac

SEQ ID NO: 1448 - DNA, 674 bp, Homo Sapiens
gggacgtgcggctcccctcggcctcctcgccatggactgcggacgactcccgggcccccaaggtgctccttgcggcagttcctggagcacctctccgtgggcctggcaatggccatctgtgcgtgctgaccatgcggctggggatgctcaaggtatgaacgctgccgtcctgtgcctgtggtgcgcatgtggtatctactgtgggtggccaatggtgtacttcatctacgagggctaccagtggcatggtggactggaggctcaaacatcgcagagtgcctgactgggagagtgtctccagcatcctgcaatgtgtgtgcgggacgatcattggcatgtgcgcggtgccaggccttccgcacgcgggaatggccgcctgaacggctgcttgcaacctgctgcagcgctggcatcaccaacctgtgtgtgatcggcggggactgggagcctcaccggggccaacctcttccggaagggacgtggagtgggctgctggaggagctggccagtgaacggccagatcgataagtgaggcccgtgcagaagtacgcctacctcaacgtggtgggcaatggtgtgctccatcgacaatgatttctgctggaactgacaatgaaccatcggcacggactccagcctgcacaggatcatcgaggtcgcgacgccaatcatga

SEQ ID NO: 1449 - DNA, 729 bp, Homo Sapiens
ttttttttttttttttttttggagggattgttttgggtactttattaagaatttattttaccatctagccattcaaaacatttttacattaacaaacacagcagtttgactattgaaatcataagcgatttatcttgaaaaggttatatttgtaggtggatgcaagtatattggagaaatatttctatcaaaatcactggttttgttaggagtattttgatttttctatttttacgctgggaaaaaaattaaaacaagtatgtcagtgttcattttatgggatagttggcttcactgtgtttgtcatgtttgcccgaattacagctgtttattttgccactttaaagataaattaattggcaatggtaactctgtgaatcatgggaatacctgccaaacctcttattaataccttcacttaaaaccccctgtgcctgagagtcattaatttgctaaaagaaaagtgctaaagcagccctgtgccctcaaacaattctgcgatggctgcccaattaataccaaagcattctgatcctcctttcaggcctcgcggacctttgaggacacaagaaggctccgatgataacctgtcaacctaggtagaaacccagccaagtgtgagctgttgtagctgcagttcggctgccatcgcgtctgcgataagaaagaattcaggcaccatgtcatccagtacacaggattataaccggatcgaagcgacacattaag

SEQ ID NO: 1450 - DNA, 1723 bp, Homo Sapiens
tgctacccgcgcccgggcttctggggtgttccccaaccacggcccagccctgccacaccccccgcccccggcctccgcagctcggcatgggcgcgggggtgctcgtcctgggcgcctccgagcccggtaacctgtcgtcggccgcaccgctccccgacggcgcggccaccgcggcgcggctgctggtgcccgcgtcgccgcccgcctcgttgctgcctcccgccagcgaaagccccgagccgctgtctcagcagtggacagcgggcatgggtctgctgatggcgctcatcgtgctgctcatcgtggcgggcaatgtgctggtgatcgtggccatcgccaagacgccgcggctgcagacgctcaccaacctcttcatcatgtccctggccagcgccgacctggtcatggggctgctggtggtgccgttcggggccaccatcgtggtgtggggccgctgggagtacggctccttcttctgcgagctgtggacctcagtggacgtgctgtgcgtgacggccagcatcgagaccctgtgtgtcattgccctggaccgctacctcgccatcacctcgcccttccgctaccagagcctgctgacgcgcgcgcgggcgcggggcctcgtgtgcaccgtgtgggccatctcggccctggtgtccttcctgcccatcctcatgcactggtggcgggcggagagcgacgaggcgcgccgctgctacaacgaccccaagtgctgcgacttcgtcaccaaccgggcctacgccatcgcctcgtccgtagtctccttctacgtgcccctgtgcatcatggccttcgtgtacctgcgggtgttccgcgaggcccagaagcaggtgaagaagatcgacagctgcgagcgccgtttcctcggcggcccagcgcggccgccctcgccctcgccctcgcccgtccccgcgcccgcgccgccgcccggacccccgcgccccgccgccgccgccgccaccgccccgctggccaacgggcgtgcgggtaagcggcggccctcgcgcctcgtggccctacgcgagcagaaggcgctcaagacgctgggcatcatcatgggcgtcttcacgctctgctggctgcccttcttcctggccaacgtggtgaaggccttccaccgcgagctggtgcccgaccgcctcttcgtcttcttcaactggctgggctacgccaactcggccttcaaccccatcatctactgccgcagccccgacttccgcaaggccttccagggactgctctgctgcgcgcgcagggctgcccgccggcgccacgcgacccacggagaccggccgcgcgcctcgggctgtctggcccggcccggacccccgccatcgcccggggccgcctcggacgacgacgacgacgatgtcgtcggggccacgccgcccgcgcgcctgctggagccctgggccggctgcaacggcggggcggcggcggacagcgactcgagcctggacgagccgtgccgccccggcttcgcctcggaatccaaggtgtagggcccggcgcggggcgcggactccgggcacggcttcccaggggaacgaggagatctgtgtttacttaagaccgatagcaggtgaactcgaagcccacaatcctcgtctgaatcatccgaggcaaagagaaaagccacggaccgttgcacaaaaaggaaagtttgggaagggatgggagagtggcttgctgatgttccttgttg

SEQ ID NO: 1451 - DNA, 454 bp, Homo Sapiens
gaattcaaacattcgattccaagagctacctaaattaaggtggctttaaaaaatatttaaattatcaatgatttaggaacgaggctggaagagtaatataaagatgtatatttacaatgccacattaggaaatgtagttccctactctgcactttggaaagacatgaatctgtccagagtcaatactatcatatggctgcttcctactcttccactggaaaaaccctctccacttggaaaattcattttatgcatgctcccactgttgatactctgcatctctcatatgagttaggcaaaatgaatctaataggttacttttgttttcaaaataaaccacccaaacaggttttttaaaactttcaaaaatggaacatttaacccttcacacaaacttccattactgagtacctagtctaatggcaagtacagtattaaggattattgcttttat

SEQ ID NO: 1452 - DNA, 30847 bp, Homo Sapiens
gcatgcgcaggctctgctctgtcttcttcctgttctgtgtggcccagccccttcctggaaccaggcagccctggcaggagtgagggccagctgcagggaaagtgaagggggcaacacctgccaggctgtgggtctcacgaggctcgggggagttataagaggccccctctctcagggaactcctcccaggcttggggaggaggcatcctggacccagccacgccccacagatctgaccgaagcaggggttcttggtcttgcttggaacccagattcagccccctttgggaatctaatcaagggtgtggaccctttcccagaggaaatggtgtgttcactcctgagggtccatgggcccttgaagctgctcatggctcccctgctgcaggattcccctgggtgccgtcaaactacagcttccctggggggcctccaccccatacttacccaccagcttcttaagagctcgagctcggacccttatagtagtaaacaggctccccagagcctggtggcctttctggggccacccggcagcctgcatgggacacccatggccttgtctcctccggccccagctctcttttccagctcagccaaggctgatggcggaaaagagcagctgacgtacgagtctggggaagacgaggaggatgaggaggaggaggaagaggaggaggaggacttcaagccatccgacggcagtgaaaacgaaatggagacagagattctggactacgtgtgacagggcccaaggctgggcctccctgacccggccagactggtgtctggcctaatgagggagccggggctccccattgccacccacagtgcccggaatggccctaggaggccctctgaggagagctagagtcccagcaaagggtgcagctgaccctagcactggctgtgacatgctgcttggtgctgcctctggtcctgaggggttagggacatcccaaagggtataccctgctctgccacccatgaaccagcccagcatccagccagtgagtgggcacccaatgcctctcaggatgagaccagtaaatgccggaggtggagctgggcagctgtggagccccagccacaggccagtctcgcttggctctcatgactgtggtggtggagatagcgtggggagcctcgcccatggtctcacgtggcaagaagtgcctttagctctggatcccaaccgtttggcacagctttggccacagccaggcccctctggaattgtccttattaaaccagtttcccgagaagtcttggtttcttggtgtgaatgttggcgctgcaggggagtcttcttattgccttggggcttgggccccctttgtcccttcatatattccttcattcattccttcattcattcagtgacatgctggcagtgctggcctgtgcccccctcacatgtggtcgggttgggtgagggcagctaggaggactccaggcctggggtcagttcttctctaaatgaataccttcttgacaaagtcatgggaaacgggccctgctgtcctgtggctgcccagtgtgaaactagtgggtcctgagcccaccgagcctgcctgcctggccccgctccccatgttgcccttggctgaggcacctcttgtgtctccccaagtcggcagcagcactccctcccaacctgtgtgcgtgccgagtatttgttgaagaaacagtcagttgtcagagaatggccctgttctggattggctggttgcttctgtgtggtgctgaacctgctcctctctcccctgtatttcctggggacaggtggaggctcagccagattcaggttcaaggtctcttcctaggctgcgtcagtctgcatgcacgggaggtctgcttactaggattgaccagcaggtttaggtgttgtcagcctgatgtgttggtcttttatctaacggtttttgggtttctgtggttttttgtttcatttgtgggtcttttttttttttttgagatggtcttgctttgtcacccaggttggagtgcagtgatgcaatcagggctcactgcagcctcaacctcctgggctcgggtgatccttccacctcagcctcctgagtagctggaactacaggttgtgtaccgccatgcccagataatttttgaatttttgtagagatgaggtctcactaatgttgtccaggctgggctcaagggatcctcccgcctcagccttccaaagtactgggattacaggtgtgagccactgcgtccagcctatttaatggcttttgaatagccgttgataattgcctggacctactacttccttaagggtgcaaaatggtgatttttttgaattatatcgttccctctgcatttagtagctggaatcctataaaggagtcttcctcatcgtctgtttgattaccctgaaatactattttcacagaaaagaagggaaaatgcctgttatcacctctaacagttttcagaacaatgagttagtgccctggcaagggccagtgacagggcaggagggggtggagagcgtgtttcctgggctgcctggtgaactctcacgtctgtcaattgcaggcttgctttttcatgcccaacttgtctatctttgcccagaggcggcctcaggttgacctctgtagtcctttgacacaagccttgggtcttgggcaccttccttacttacagctaccacgatgctgcaggctccagcccctccctggcatttcctgttgcggacccggcccaaccatctccccagggtgcactcagtcggtgtgaatgtggtgtttagagaccccagtctggtcaccaggggtggggcttgctcctgggatttcgttactgctagggctttggaagagacagagccaggaaataattttttttttttttttgccaattttaaaaaaataaagtatgaggctgggcacggtggctcatgcctgtaatcccagcactttgggaggctgaggcgggcagatcacttgagctcaggagtttgagaccagcctggccaacatggtgaaaccagtctctactaaaaatacaaaaatcggctgggtgtgatggcgcacgctgtaatcccagctacttcagaggctaaagcaggaggatccctcgaacccaggagttcaagactgcagtgagctatgattgtgccactgcactctagcctgggtgacagagaccctgtctcaaaaaaacaaacaaacaaaaaacctctgtggactccgggtgataatgacatgtcaatgtggattcatcaggtgttaacagctgtaccccctggtgggggatgttgataacgggggagactggagtggggcgaggacatacgggaaatctctgtaatcttcctctaattttgctgtgaacctaaagctgctctaaaaatgtacatagatataaactggggccttcctttccctctgccctgccccagccctcccccacctccttcctctccctgctgcctcccctctgccctcccctttcctccttagccactgtaaatgacactgcagcaaaggtctgaggcaaatgcctttgccctggggcgccccagccacctgcaggccccttatttcctgtggccgagctcctcctcccaccctccagtcctttccccagcctccctcgcccactaggcctcctgaattgctggcaccggctgtggtcgacagacagagggacagacgtggctctgcaggtccactcggtccctggcaccggccgcaggggtggcagaacgggagtgtggttggtgtgggaagcacaggccccagtgtctcctgggggactgttgggtgggaaggctctggctgccctcaccctgttcccatcactgcagagggctgtgcggtggctggagctgccactgagtgtctcggtgagggtgacctcacactggctgagcttaaaggccccatctgaagactttgttcgtggtgttctttcacttctcagagcctttcctggctccaggattaatacctgttcacagaaaatacgagtcgcctcctcctccacaacctcacacgaccttctcccttccctcccgctggcctctttccctccccttctgtcactctgcctgggcatgccccagggcctcggctgggccctttgtttccacagggaaacctacatggttgggctagatgcctccgcacccccccacccacaccccctgagcctctagtcctccctcccaggacacatcaggctggatggtgacacttccacacccttgagtgggactgccttgtgctgctctgggattcgcacccagcttggactacccgctccacgggccccaggaaaagctcgtacagataaggtcagccacatgagtggagggcctgcagcatgctgccctttctgtcccagaagtcacgtgctcggtcccctctgaagcccctttggggacctaggggacaagcagggcatggagacatggagacaaagtatgcccttttctctgacagtgacaccaagccctgtgaacaaaccagaaggcagggcactgtgcaccctgcccggccccaccatcccccttaccacccgccaccttgccacctgcctctgctcccaggtaagtggtaacctgcacaggtgcactgtgggtttggggaaaactggatctccctgcacctgagggggtagaggggagggagtgcctgagagctcatgaacaagcatgtgaccttggatccagctccataaatacccgaggcccagggggagggccacccagaggctgatgctcaccatggggcgcctgcaactggttgtgttgggcctcacctgctgctgggcagtggcgagtgccgcgaaggtaagagcccagcagaggggcaggtcctgctgctctctcgctcaatcagatctggaaacttcgggccaggctgagaaagagcccagcacagccccgcagcagatcccgggcactcacgctcatttctatggggacaggtgccaggtagaacacaggatgcccaattccatttgaatttcagataaactgccaagaactgctgtgtaagtatgtcccatgcaatatttgaaacaaatttctatgggccgggcgcagtggctcacacctgcaatcccaccagtttgggaggccgaggtgggtggatcacttgaggtcaggagttggagaccagcctggccaacatggtgaaaccccgtctctactaaaaatacaaatattaatcgggcgtggtggtgggtgcctgtaatcccagctactcgggaggctgaggcaggagaaccgcttgaagctgggaggtggagattgcggtgagctgagatcacgctactgcactccagcctgggtgacagggcgagactctgtctcaaaaaatagaaaaagaaaaaaatgaaacatactaaaaaacaattcactgtttacctgaaattcaaatgtaactgggcctcttgaatttacatttgctaatcctggtgattccacctaccaacctctctgttgttcccattttacagaaggggaaacgggcccaggggcagggagtgtggagagcaggcagacgggtggagagaagcaggcaggcagtttgcccagcatggcacagctgctgcctcctattcctgtgcaggaagctgaaagccgggctactccacacccgggtccgggtccctccagaaagagagccggcaggcaggagctctctcgaggcatccataaattctaccctctctgcctgtgaaggagaagccacagaaaccccaagccccacaggaagccggtgtcggtgcccggcccagtccctgcccccagcaggagtcacacaggggaccccagatcccaaccacgctgttctgctgcctgcggtgtctcaggccctggggactcctgtctccacctctgctgcctgctctccacactccctggccctgggaccgggaggtttgggcagtggtcttgggctcctgactcaaaggagaggtcaccttcttcttgggcgagctcttcttggggtgctgagaggccttcggcaggtcatcacgacccctccccatttccccaccctgaggccctctggccagtctcaattgcacagggatcacgccactggcacaaggagacacagatgcctcgcaggggatgcccacgatgcctgcatgtgttgcttctggttcctttcctccagttccaaccgccgcactctcccacaccagtgtgacagggggcccatcaccctagacttcagagggctgctgggaccctggctgggcctgggggtgtagggccaccctgcccttccccacctggaacctggcacaggtgacagccagcaagcaatgacctggtcccaccatgcaccacgggaagagggagctgctgcccaagatggacaggaggtggcactggggcagacagctgcttctcaacagggtgacttcaagcccaaaagctgcccagcctcagttccgtcagggacagagggtggatgagcaccaacctccaggcccctcgtgggggtggacagcttggtgcacagaggccattttcatggcacagggaagcgtggcgggggtgggaggtgtggtccctagggggttctttaccagcagggggctcaggaactgtggggacttgggcatggggccatcgactttgtgcccagccagctaggccctgtgcagggagatgggaggagggaaaagcaggccccacccctcagaaaggaggaaggttggtgtgaaacatcccgggtacactgagcattgggtacactcctcccgggagctggacaggcctcccatgtgatggcaaacaggccgacaggagacacggctgttgctcgtcttccacatggggaaactgaggatcggagtcaaagctgggcggccatagccagaacccaaacctccatcccacctcttggccggcttccctagtgggaacactggttgaaccagtttcctctaagattctgggagcaggacacccccagggataaggagaggaacaggaatcctaaagccctgagcattgcagggcagggggtgctgcctgggtctcctgtgcagagctgtcctgctttgaagctgtctttgcctctgggcacgcggagtcggcttgccttgccccctccggattcaggccgatggggcttgagcccccctgaccctgcccgtgtctccctcgcagctgggcgccgtgtacacagaaggtgggttcgtggaaggcgtcaataagaagctcggcctcctgggtgactctgtggacatcttcaagggcatccccttcgcagctcccaccaaggccctggaaaatcctcagccacatcctggctggcaaggtgggagtgggtggtgccggactggccctgcggcggggcgggtgagggcggctgccttcctcatgccaactcctgccacctgcagggaccctgaaggccaagaacttcaagaagagatgcctgcaggccaccatcacccaggacagcacctacggggatgaagactgcctgtacctcaacatttgggtgccccagggcaggaagcaaggtctgcctcccctctactccccaagggaccctcccatgcagccactgccccgggtctactcctggcttgagtctgggggctgcaaagctgaacttccatgaaatcccacagaggcggggaggggagcgcccactgccgttgcccagcctggggcagggcagcgccttggagcacctccctgtcttggccccaggcacctgctgcacagggacaggggaccggctggagacagggccaggcggggcgtctggggtcaccagccgctcccccatctcagtctcccgggacctgcccgttatgatctggatctatggaggcgccttcctcatggggtccggccatggggccaacttcctcaacaactacctgtatgacggcgaggagatcgccacacgcggaaacgtcatcgtggtcaccttcaactaccgtgtcggcccccttgggttcctcagcactggggacgccaatctgccaggtgcgtgggtgccttcggccctgaggtggggcgaccagcatgctgagcccagcagggagattttcctcagcacccctcaccccaaacaaccagtggcggttcacagaaagacccggaagctggagtagaatcatgagatgcaggaggcccttggtagctgtagtaaaataaaagatgctgcagaggccgggagagatggctcacgcctgtaatcccagcactttaggaggcccacacaggtgggtcacttgagcgcagaagttcaagaccagcctgaaaatcactgggagacccccatctctacacaaaaattaaaaattagctggggactgggcgcggcggctcacctctgtaatcccagcacgttgggagcccaaggtgggtagatcacctgaggtcaggagtttgagaccagcctgactaaaatggagaaacctcttctctactaaaaatacaaaattagccaggcgtggtggcgcttgcctgtaatcccagctactcgggaggctgaggcaggagaatcgcttgaactcaggaggcggaggttgcggtgagccgagatcatgccactgcactccagcctggagaacaagagtaaaactctgtctcaaaaaaaaaaaaaaaaaaaaaatagccaggcgtggtatctcatgcctctgtcctcagctacctgggaggcagaggtggaaggatcgcttgagcccaggggttcaaagctgcagtgagccgtggtcgtgccactgcactccagcctgggcgacagagtgaggccccatctcaaaaataagaggctgtgggacagacagacaggcagacaggctgaggctcagagagaaaccaggagagcagagctgagtgagagacagagaacaataccttgaggcagagacagctgtggacacagaagtggcaggacacagacaggagggactggggcaggggcaggagaggtgcatgggcctgaccatcctgcccccgacaaacaccaccccctccagcaccacaccaacccaacctcctggggacccaccccatacagcaccgcacccgactcagcctcctgggacccacccactccagcaaccaacgtgacctagtctcctgggacccaccccctccagcaccctacccgacccagcttcttagggacccaccatttgccaactgggctctgccatggccccaactctgttgagggcatttccaccccacctatgctgatctcccctcctggaggccaggcctgggccactggtctctagcaccccctcccctgccctgcccccaggtaactatggccttcgggatcagcacatggccattgcttgggtgaagaggaatatcgcggccttcgggggggaccccaacaacatcacgctcttcggggagtctgctggaggtgccagcgtctctctgcaggtctcgggatccctgtggggagggcctgccccacaggttgagaggaagctcaaacgggaaggggagggtgggaggaggagcgtggagctggggctgtggtgctggggtgtccttgtcccagcgtggggtgggcagagtggggagcggccttggtgacgggatttctgggtcccgtagaccctctccccctacaacaagggcctcatccggcgagccatcagccagagcggcgtggccctgagtccctgggtcatccagaaaaacccactcttctgggccaaaaaggtaaacggaggagggcagggctgggcggggtgggggctgtccacatttccgttctttatcctggaccccatccttgccttcaaatggttctgagccctgagctccggcctcacctacctgctggccttggttctgcccccaggtggctgagaaggtgggttgccctgtgggtgatgccgccaggatggcccagtgtctgaaggttactgatccccgagccctgacgctggcctataaggtgccgctggcaggcctggagtgtgagtagctgctcgggttggcccatggggtctcgaggtgggggttgaggggggtactgccagggagtactccggaggagagaggaaggtgccagagctgcggtcttgtcctgtcaccaactagctggtgtctcccctcgaaggccccagctgtaagggagagggggtgccgtttcttctttttttttgagatggagtctcactgttgcccaggctggagtgcagtgtcacgatctcagctcactgcaacctccacctcctgggttcaagtgattctctgactcaacctcccatgtagctgggactacaggcacatgccaccatgcccagataatttttctgtgtgtttagtagggatggagtttcatcgtgttagctaggatgatctcggtcttgggacctcatgatctgcccacctcggcctcccaaagtgctggaattacaggcgtgagccactgtgcccggccccttctttattcttatctcccatgagttacagactcccctttgagaagctgatgaacatttggggccccctcccccacctcatgcattcatatgcagtcatttgcatataattttagggagactcatagacctcagaccaagagcctttgtgctagatgaccgttcattcattcgttcattcattcagcaaacatttactgaaccgtagcactggggcccagcctccagctccactattctgtaccccgggaaggcctggggacccattccacaaacacctctgcatgtcagccttaccagcttgctacgctaaggctgtccctcactcattcttctatggcaacatgccatgaagccaagtcatctgcacgtttacctgacatgagctcaactgcacgggctggacaagcccaaacaaagcaacccccacggccccgctagaagcaaaacctgctgtgctgggcccagtgacagccaggccccgcctgcctcagcagccactgggtcctctaggggcccgtccaggggtctggagtacaatgcagacctcccaccatttttggctgatggactggaacccagccctgagagagggagctccttctccatcagttccctcagtggcttctaagtttcctccttcctgcttcaggcccagcaaagagagagaggagagggaggggctgccgctgaagaggacagatctggccctagacagtgactctcagcctggggacgtgtggcagggcctggagacatctgtgattgtcacagctggggagggggtgctcctggcacctcgtgggtcgaggccggggatgctctaaacatcctacagggcacaggatgcccctgatggtgcagaatcaaccctgccccaagtgtccatagatcagagaagggaggacatagccaattccagccctgagaggcaaggggcggctcaggggaaactgggaggtacaagaacctgctaacctgctggctctcccacccagaccccatgctgcactatgtgggcttcgtccctgtcattgatggagacttcatccccgctgacccgatcaacctgtacgccaacgccgccgacatcgactatatagcaggcaccaacaacatggacggccacatcttcgccagcatcgacatgcctgccatcaacaagggcaacaagaaagtcacggagtaagcagggggcacaggactcaggggcgacccgtgcgggagggccgccgggaaagcactggcgagggggccagcctggaggaggaaggcattgagtggaggactgggagtgaggaagttagcaccggtcggggtgagtatgcacacaccttcctgttggcacaggctgagtgtcagtgcctacttgattcccccagggaggacttctacaagctggtcagtgagttcacaatcaccaaggggctcagaggcgccaagacgacctttgatgtctacaccgagtcctgggcccaggacccatcccaggagaataagaagaagactgtggtggactttgagaccgatgtcctcttcctggtgcccaccgagattgccctagcccagcacagagccaatgccaagtgaggatctgggcagcgggtggctcctgggggccttcctggggtgctgcaccttccagccgaggcctcgctgtgggtggctctcaggtgtctgggttgtctgggaaagtggtgcttgagtccccacctgtgcctgcctgatccactttgctgaggcctggcaagacttgagggcctctttttacctcccagcctacagggctttacaaaccctatgatcctctgccctgctcagccctgcaccccatggtccttcccactggagagttcttgagctaccttccatcccccatgctgtgtgcactgagagaacactggacaatagtttctatccactgactcttatgggcctcaactttgcccataatttcagcccaccaccacattaaaaatcttcatgtaataatagccaattataataaaaaataaggccagacacagtagctcatgcctgtaatcccagcacattgggaggtcaaggtgggaggatcacttgaggtcaggagtctgagactagtctggccaacatggcaaaaccccatctctactaaaaatacaaaaattatccaggcatggtggtgcatgcctataatcctagctactcaggaggctgaggtagcagaattgattgacccagggaggtggaggttgcagtgagccgagattacgccactgcactccagcaggggcaacagagtgagactgtgtctcgaataaataagtaaataaataataaaaataaaaaataagttaggaatacgaaaaagataggaagataaaagtatacctagaagtctaggatgaaagctttgcagcaactaagcagtacatttagctgtgagcctcctttcagtcaaggcaaaaagggaaacagttgagggcctataccttgtccaatctaattgaagaatgcacattcacttggagagcaaaatatttcttgatactgaattctagaaggaaggtgcctcacaatgttttgtggaggtgaagtataaattcagctgaaattgtggaacccatgaatccatgaatttggttctcagctttcccttccctgggtgtaagaagccccatctcttcatgtgaattccccagacacttccctgcccactgcccgggacctccctccaagtccggtctctgggctgatcggtccccagtgagcaccctgcctacttgggtggtctctcccctccaggagtgccaagacctacgcctacctgttttcccatccctctcggatgcccgtctaccccaaatgggtgggggccgaccatgcagatgacattcagtacgttttcgggaagcccttcgccacccccacgggctaccggccccaagacaggacagtctctaaggccatgatcgcctactggaccaactttgccaaaacagggtaagacgtgggttgagtgcagggcggagggccacagccgagaagggcctcccaccacgaggccttgttccctcatttgccagtggagggactttgggcaagtcacttaacctccccctgcatcggaatccatgtgtgtttgaggatgagagttactggcagagccccaagcccatgcacgtgcacagccagtgcccagtatgcagtgaggggcatggtgcccagggccagctcagagggcggggatggctcaggcgtgcaggtggagagcagggcttcagccccctgggagtccccagcccctgcacagcctcttctcactctgcagggaccccaacatgggcgactcggctgtgcccacacactgggaaccctacactacggaaaacagcggctacctggagatcaccaagaagatgggcagcagctccatgaagcggagcctgagaaccaacttcctgcgctactggaccctcacctatctggcgctgcccacagtgaccgaccaggaggccacccctgtgccccccacaggggactccgaggccactcccgtgccccccacgggtgactccgagaccgcccccgtgccgcccacgggtgactccggggccccccccgtgccgcccacgggtgactccggggccccccccgtgccgcccacgggtgactccggggccccccccgtgccgcccacgggtgactccggggccccccccgtgccgcccacgggtgactccggggccccccccgtgccgcccacgggtgactccggggccccccccgtgccgcccacgggtgactccggcgccccccccgtgccgcccacgggtgacgccgggcccccccccgtgccgcccacgggtgactccggcgccccccccgtgccgcccacgggtgactccggggccccccccgtgacccccacgggtgactccgagaccgcccccgtgccgcccacgggtgactccggggccccccctgtgccccccacgggtgactctgaggctgcccctgtgccccccacagatgactccaaggaagctcagatgcctgcagtcattaggttttagcgtcccatgagccttggtatcaagaggccacaagagtgggaccccaggggctcccctcccatcttgagctcttcctgaataaagcctcatacccctgtcggtgtctttctttgctcccaaggctaagctgcaggatctgcctggcaattgcaggcttgctttttcatgcccagctcatcttatctttggccagaggcggcctcaggttgacctctgtagtcctttgactcaacccttgggtcttgggcaccttccttacttgcagccaccatgatggtgcaggctccagcccctccctggcatttcctgccatggacccggcccaaccatctccgcagggtgcactccttcgtcggtgtgaatatggtgtttagagaccccaatctggtcaccaggggtggtgcttgctcctgggatttcgttactgctagggctttggaagagacagagccaggaaataagtatttttttttaaccagtaaaaaaaaaaaaaagtatgaggccgggcacagtggctcacacctgtagtcccagcactttgggaggctgaggcaggaggatcacttgaggtcaggagttggagactagcctggccaacatggtgaaaccccatctgtactaaaaatacaaaaaattagccaggtgtggtagtgcgcacctgaggtcccagctgaggcaggagaatcacttgagctcgggaggtagaggctgcagtgagccgagatcgcaccactgcacttgagcctgggcaacagagcaaggcaccatctcaaataataataaaagtatgaattcatacaggtatttcccagttgtaagactgtcaggttttacttctctcattttacacttgtttctttctccgcctatgctgaaagtctgggttcgacagcaccaacataattgtttatgttctttttcctataacatacatatgctagttttgaaatataagatataggccgggtgcagtggctcacgcctgtaatcccagcgctttgggaggcaaggcaggcggatcacgaggtcaggagatcgagaccatcctggctaacacgatgaaaccccgtctctactaaaaaatacaaaaaaagttagccaggcacggtggcgggcacctgtagtcccagctactcgggaggctgaggcaggaagaatggtgggaacctgggaggcagagcttgcagtgagctgagatcacgccactgcactccaggctgggcgacagagcgagactccgtctcaaaaaaaaaaaaagaaatataagatattgcaataaatcatatgagttacatttaaagtacatgaatttaaataaattataaattatataaagtaatatatgataaaatattaaggactactaaggatcatttaagatcgttttgctcattctccttaaattatcccacagaataaacaattgtgcctctaggtcccttaagtaactctgtggttacttaattggtagattaagccatctaccgatacacagttagaagtttgggttttttaatcatgcagatgtagacactgaccaaagacttcttgttttttcctttgagactgagtttcgctcttatcacccaggctagggtgcaatggcatgatcttagctcactgcaacctctgcctcctgggttcaagctattctcctgcctcaggttcctgagtagctgggcctacaggcgtgccccactacgttcggctgattttttttgacttttagtagagacagagtttcaccattttggccaggctgatcttgaactcttgacctcaggtgatctgcccgcctcagcctcccaatgtgctgggattacaggcatgaagccactgtgcctcagcccctacctaggacttttaagcggatgtttctctgcctgaaaacaaagtttaagtgttccttttagagcaacctgtaaacagtaactgtagaccctgatatttattgtgccatgaacttctcatccatagttttgctgagtgaaggtattgatgggaaatgtgaaattcagagaggcaggcaccgggcccaggccacacagctggggagcggcagcattggttgggacctgtgttggatttgcaattctgccttgtgtgatgtaacctggacctcattaaaattaaaaattctgctctgcaaagacactgttaggaaaacaaagacaagccacagactgggaaaacattagcaaaagacatccgattaaagcactgttatccaaaaatatacaaagagcctttaacactcaataaataaaaaaaaaacctgattccacaatgggtcaaaggcagacacctcaccagagaagctatacaggtggcaaataagcatctgaaaagttaacctaggttgggtgcagtggctcacacctggaatcccatcacatgcggcagccaaggcaggaggatctcttgaggctagttaattcaagaccagcctggacagcatagtaagaccccatctgtatttttttcaaaaagatatccacatcatatgttgtcaggaaaacgcaaatttaaacagtgagctaccactgcatacctgtaagaatgccaaaatccagaaaattggccaaacaccaaattgctgatgaggacgtggagcaaccagaactctcattcagtgcttgttgggaataacaaacggtacagccactttggaagacagtttggcagtttcccaaaacataatgcctatttcttccatgtgatccagcactctgattccttaagatttactcaacctgcaaacagatgtttatagctgtaaaccaaagataaaactccaagcccggcagctgactgaatggaacgccctcttggccagggaaacccaaagggacctgaaggttcaggccatgatgggcagtaggggtcggacatgcctcatcatactctcttccctttggaattcaggcacagctgaccagctttaaaacagagatcttaagactgacagaacagactctgtagaaataagatataaaattccaacctgactgaagtatagcatcacatgacagatagcaggtcatgaaacaaattgaaatattttaccccaaaatgtatttctttgacgtattttggaatggccctgcacagctgtctcttgtggagaaaatttgcattctgtagagaatctccttcccttaccaggtcatttctgaagatgtccagcaccctttagaggtctgagaggaaacatttgccatctattgtctctaagggaagccatctatgagatttcatctacataacaaaaatcttggaccaggcacggtggctcatgcctgcaatcccagcactttgggaggccgaggtgggcagatcacctgaggtcgggagtttgagaccagcctgacgaacatggagaaacccaaactctactaaaaatacaaaaatttagctggcgtggtggcgcatgcctgtaatcccagctattcagagggtggaggtaggagaattgcttgaacctgggaggtggagattgcagtgagcagagatcatgccattgcactccagcctgagcaacaagagtgaaactctgtctcaaaaaaaaaaaaaaaaaaaaaaaaaaaagaaagagaaagagagaaagaaaagaaaagaaagaaagaaagagaaccttggtcttcacaactttttaacttaaccaagatcctcctttgtattgattccagggtttttgataataactctttcaaccaattgctaattagaaaatctttgaattcacctgtgatttttaagccatcccaaaccctctcacattactgatttatgtcttatgtccccctgaaatgtataaaaccaagctgtaactcaactgcctggggcacatgttctcaggaactcttgacaccatgcctctggttacagtcaatcatatttggctcaggataaatctcgtcaaatattttacagtttgggttttttggtcaacatagcagatgtttatagtagctttatccatcattgccacaacctggaggtaaccaagatgtccttcagcaggtgaatggatacaatacatccagacaatggaatctttttcaggtctaatgttgcgggacgcagaggactagagagaccagtacaggtgaatacaggaggatatttattttaaggtatgcaccagctcagtggattcacatccaaaaaggtgagccttgaacaaagacagagtggggtttttataagcaggctacaaaagaaaaacaaaggcagtcaatcatagagtgtataacttgtggtcttgcctagctggtggccttgtagctgtgtcaaaagaaaaacaagaactggctaaatacaaatatttgcaagacatagtcatgcttaagaggccagggaaaggagtaacagtaaaggaatttgtctttctctctttttttcctcagccttgctctggaggtggggggctgtctggagctcattcctttggccttggctttttggacagcgttatcttataactgtcctcgaagtgagctgctaagcagaggaaaacttgtttctttttctttttaccctcactacatttttccccacttcaagtccttttataaaagaagtttaatagaaggcctcactattacttattctgcgtcaagagacaagttttcttctttgggcaaaggttgatatttatgcagagccgtcagctgagtggtagtttgcctagctactattgcctctatagctgattgaatgcttctagcaaggaggaggtaagagacaaaggagtattaggcaacttcctagtacagccagaactactgctattaaagtcttgaaccctctgaaaaatgaaaaccagtctccaaagagagaatctggagaccaccctttccaagtttgaactggaacatgggcgaattttctcattcttgcagttattcctataattgcctttccattgtcatcaatttccaggcagcaattagttcgattgaactttccacatcctcctccttcctgggcgaggaggcagtctaaagctaatctattttgatagatagcattcctcatttttgtagattgctgggctaatagatctaaagcccttgctgtttaattagtgatgatctcaagcactatctataacctcatgatgcagttaagcatgtaaataggagaccagtaaccccatgagccatcgtccccccaccaggtagctggcccatagtagtgaattattctctcagggggccattcatcatctttccagtcccctatggctgtgtctttctttacgctccttctatatctttctctcttctcatcatagacaggatactctaaggcttctccttgtcttagagggattaagaagaaagacggcctaattgttccaagtacacaggcccctgtccatttggctggtagctgtcggtaggcccgtggcccacagatccgatagagaccagagggtgcttgccaggtatttggagcttcaagctgataccaggtgtggtttagagcagagaaacgggagaatggatttggatgaggtggtttgggactatctttgccgcgccataaagtttttcctaattttttaacatgtttctgttccaaacatgttaattcccctactgggtctgtagaagtttttccctagcaagcaatacagtatttcccgataatagaagtttttaagagccagacgcttgaacttgtgggagtcagtttgcaggaagggtcagtcagagtaaagttattttgaggcattaactcttttgcttcccaaggccattggtctcccatgtttgtccctccacaaacataacatgaggagatgcctaggctgccagcaatgttttcagccatctgagcaaataggtttttggctaaagggggaggctcggcaacttttgatttatgtgctcatagaatgacttaaagactcggaattgctgctgggatgacttcttggtttgagtcctctttatgatatataaatttactttagctttttgactgctgctttgtaatgccatggagtaacctgtagtccatataggtagatccggctctaagatagtaagatttacaggattgcaagtgcttgtcttacagtccggttttgctggcgctttgatgagcaagattggctttagcctcagtgatgatcggtcagtgaactgtgttgtgcggttccagcaagctattgctagggccttggaggggcaaacagggtatgcacatacaattttgtactggcagtttgtacagtaccctgtaggaccagagattgtgagataggttgggttcacggatgttaactgacaaatatcaaagtatatggctatagccccccctggggggtagaggcttggctttgatttataagacttcctttctttgactcagtatgaacctcaaaccaagtcctaggtaaagacttagaaggtcatagcatatataaggctggccatttcctgggtcacaaattgaataggtgatccgattgtaagtacaagttcctaggtgagtccctgtacactcctaataagtatagaataatagagtcctagttatactgtttcctgaccctgtagtgtgtgtacaatggggacactttctaagggtacttattttaacatggtcaaggggggtgataacagcaaaacaatgtacagcgtattcatatccagcaaggacagaagagggccttgcctgggggaggagattgagcacagcaacggaacaatagtaaaacagttagtattataaggaagactactagtcctaagatttctaaccacatttacttgcttgacgagtcctcaagcttcggccgtgcgtagactagtcagcttcgggtgtgtgactagagcggggcttgtctccttaagcttcagccgtgcgttgactggtcagcctcacgagtgaccagagcagggtgatcgtcctcagcagcagcttgttgtcttctcaggatcagctgggttggatgatctgtgtcctgctggctggtccactcgtcctgagctgccggtttcagccgactgtggtggatccaagacataacacctgcaactttaacagcaacgggagtggacaagatgacagtacagggcccaccccatatgggtcctagagaagttggattccactttttaacccaaacagagtctccagatttaaaggggcgcactggtctatcaggcttacaggcatcctttcttgtacccagccatggacctcttgcatggctattcctaaagcctgcatttgctttcttaaggttaattcctctagttcctggagatcacctttaatttgacctatgatttggggttggccaactgaacaaaacctcatagggtaaatactcagtttgtttggtgggggtgcacctgtctcggaggaggaccataggcaaaacctgaacttatctcagatgagcttcctggcaatatttcttcagtagctgcttgagtgtccacttcatgcgttccacttttcctcaactatgcagccaataggctgtgtgtaacttccattttatttttaacagtcttgttaaatctcgtactatttcagctacaaatgccggcccattgtctgactgtaaagatagaggcagtccaaacctggggataatatcttttaacagtactttagtcatttgtcatgctttttctgtcctggtggggaaagcttcaacctatcctgaaaaagttgcaaataaacactagaatataccgatagcttctggcacggggcatttcgtttaagtctataaggaagttttcacaaggcatggctccttctcctgttctgtttcccagaggaggggttccttttctcctctttttgtaacttcatataatagctcagccatcagcgagaaatctggaatccagatacggcagaatcctgctgccttcaacttctaatgtgaccacagactcctggaggcccagtgagaaggagcccggtctgtcctagtcctcacatccttcagctcctgccagcccaatcagattagtatctggttcctctaaggtacggcagcccttggccaatggctctttgtctcaccacggccttggccatttccctcattgccttctggacattcatccttccagtgccccctttttttttttttttttttttgcatctctcacattgatccctctctagccttggtcagctcttaaatccttgtctaacttgacctcttccacgtccacatctgcgtccacatcctctcacatggctaatttctctttctataagggctgctgccaacagatccgcctttttcttaagcctttcatctgcttccttttcccttccttagttctcctgctcctgcagtcggctggcagggctgggcaaggacaaacctgaatataaaattcagtgtgtctgctgcccaccagtcctttatgcttggagaagagagagatgtttctctttttcttctcttctatctatttaaaacctccggcttcctaaagttcctcgtgtttgttccctgtcctaaattttcctggtgcatgacaacaaaccccgggtatgtagaccagacaatgtagccgcttcaagggatttgagtgaggaaggaatgaatcaatggagcccaggggggttttagagcattcaaactattcaggatgatactatggggaccaagggagagctttccccttctccctctgaaggaccactgaaaaatcactgacagattgtctcataggagaaaagcatacatatttgtttaatgcgtatacacgggagcctttgaaatggagacccaacttctcaacagagtacagagcttagataccatcttgaggttccacaaagaatgtgggctcagagcatggccaaaactaggttaggggctgggcgcagtggctcacaactgtcatcccagcactttgggaggctgaggcgggcagatcacttgagctcaggagttcgagaccagcctggccaacatggcgaaactccctctctactaaaaatacaaaaattagccgggtgtgatggcgggcgcctgtaatcccagctacttgagaggctaaagcaggaggatcccttgagcccaggagttcaagactgcagtgagctgttattgtgccactgccctctagcctgggtgatagtgagacctgtctcaaaacaaacaaaaaaaccctaaatctgtggactctgggtgattatgacatgtcaatgtaggttcataaagtataacagctgtacccccctggtggggcatgttgactaatgggggagactgggttggggcgaggacatacggaaactctctgtaaccttcttctaatttgctgtgaacctaatctgctctaaaaatgtatatatataaaaagtggggccttcctttccctctcccctgccccagccctctcccccacctccttcctctccctgctgcctcccctctgccttcccctttcctccttagccactgtaaatgacactgcagtgaatatcctggagcacaaagggcatgtctcccagttcagaattacctcctttatttagggcaggttctcagaactagagtagccgggcaaaggtctgaggcaaatgcctttgccctggggcgccccagccacctgcaggccccttatttcctgtggccgagctcctcctcccaccctcccggcctttccccagcctccctcgcccactaggcctcctgaattgctgggcaccggctgtggtcgacagaagagggacagacgtggctctgcaggtccactcggctccctggcaccggccgcaggggtggcagaacgggagtgtggttggtgtgggaagcacaggccccagtgtctcctgggggactgttgggtgggaaggctctggctgccctcaccctgttcccatcactgcagagggctgtgcggtggctggagctgccaccgagcggtctcggtgagggtgacctcacactggctgagcttacaggccccatcttaagactttgttcgtggtgttctttcacttctcagagcctttcctggctccaggattaatacctgttcacagaaaatacgagtggcctcctcttcctccacaacctcacacgaccttctcccttccctcccgctggcctccttttctctcctgtcactctgcctgggcatgccccagggccttggctgtgtcctttctttcctcagggaagaccacaagtttgggctagatgcctccgcacccccccacccacacccctgagcctctagtcctccctcccaggatgcatcaggctggatggtgacatctccccacccttgaatgagacggctttatgctgctctggggacccgcacccagcttggactgcttgctccatggccccaggaaaagcttcgtacagataaggtacgccacttggtgggggcccacagcatgtcaccctctctggtcccagaagtcactgcttggtcccctgtgaagcctctggggacctaggggacaggcagggcatggagacaaagtagtgcccttttctctgacagtgacaccaagccccgtgaacaaaccagaaggcagggcactgtgcaccctgcccggccccaccatcccccttaccacccgccaccttgccacctgcctctgctcccaggtaagtggtaacctgcacaggtgcactgtgggttttgggaaaactggatctccctgcacctgagggggtagaggggagggagtcctgagagctcatgaacaagcatgtgaccttggatccagctccataaatacccgaggcccagggggagggccacccagaggctgatgctcaccatggggcgcctgcaactggttgtgttgggcctcacctgctgctgggcagtggcgagtgccgcgaaggtaagagcccagcagaggggcaggtcctgctgctctctcgctcaatcagatctggaaacttcgggccaggctgagaaagagcccagcacagccccgcagcagatcccgggcactcacgctcatttctatggggacaggtgccaggtagaacgcaggatgcccaattccatttgaatttcagataaactgccaagaactgctgtgtaagtatgtcccatgcaatatttgaaacaaatttctatgggccgggcgcagtggctcacacctgcagtcccaccagtttgggaggccgaggtgggtggatcacttgaggtcaggagttggagaccagcctggccaacacggtgaaaccccgtctctactaaaaatacaaatattaatcgggcgtggtggtgggtgcctgtaatcccagctactcgggaggctgaggcaggagaaccgcttgaagctgggaggtggagattgcggtgagctgagatcacgctactgcactccagcctgggtgacagggcgagactctgtctcaaaaaatagaaaaagaaaaaaatgaaacatactaaaaaacaattcactgtttacctgaaattcaaatgtaactgggcctcttgaatttacatttgctaatcctggtgattccacctaccaacctctctgttgttcccattttacagaaggggaaacgggcccaggggcagggagtgtggagagcaggcagacgggtggagagaagcaggcagcagtttgcccagcatggcacagctgctgcctcctattcctgtgcaggaagctgaaagccgagctactccacaccgggtccgggtccctccagaaagagagccggcaggcaggagctctctcgaggcatccataaattccaccctctctgcctgtgaaggagaagccacagaaaccccaagccccacaggaagccggtgtcggtgcccggcccagtccctgcccccagcaggagtcacacaggggtcccagatcccaagagtgttctgcgctgcgtgtctcaggccctggggactcctgtctccacctctgctgcctgctctccacactccctggccctgggaccggaggtttgggcatggtcctgggctcctgactcaaaggacaggtcaccttcttcttgggcgagctcttcttggggtgctgagaggccttcggcaggtcatcacgacccctccccatttccccaccctgaggccctcaggatggacaagcccaaacaaagcaacccccacggccccgctagaagcaaagcctgctgtgctgggcccagtgacagccaggccagcggcttcccttcaagcagccactgggtcctctaggggcccgtccagggctctggagtacaatgcagacctcgcaccatttttggctgatggactggaacccagccctgagagagggagctccttctccatcagttccctcagtggcttctaagtttcctccttcctgcttcaggccccagcaaagagagagaggagagggaggggctgccgctgaagaggacagatctggcccctagacagtggctctcagcctggggaccgtgtggcagggctggagacatctgtgattgtcacagctggggagggggtgctcctggcacctcgtggtcgaggccggggatggctctaaacatcctacagggcacaggatggcccctgatggtgcagaatcaaccctgcccggaatggtccatagatcagagaagggaggacatagccaattccagccctgagaggcaaggggcggctcagggaaaactgggaggtacaagaacctgctaacctgctggctctcccacccagaccccatgctgcactatgtgggcttcgtccctgtcattgatggagacttcatccccgctgacccgatcaacctgtacgccaacgccgccgacatcgactatatagcaggcaccaacaacatggacggccacatcttcgccagcatcgacatgcctgccatcaacaagggcaacaagaaagtcacggagtaagcagggggcacaggactcaggggcgaccgtgcgggagggccgccgggaaaggcactggcgaggggggccagcctggaggaggaaggcattgagtggaggactgggagtgaggaagttagcaccggtcggggtgagtatgcacacaccctcctgttggcacaggctgagtgtcagtgcctacttgattcccccagggaggacttctacaagctggtcagtgagttcacaatcaccaaggggctcagaggcgccaagacgacctttgatgtctacaccgagtcctgggcccaggacccatcccaggagaataagaagaagactgtggtggactttgagaccgatgtcctcttcctggtgcccaccgagattgccctagcccagcacagagccaatgccaagtgaggatctgggcagcgggtggctcctgggggccttcctggggtgctgcaccttccagccgaggcctcgctgtgggtggctctcaggtgtctgggttgtctgggaaagtggtgcttgagtccccacctgtgcctgcctgatccactttgctgaggcctggcaagacttgagggcctctttttacctcccagcctacagggctttacaaaccctatgatcctctgccctgctcagccctgcaccccatggtccttcccactggagagttcttgagctaccttccatcccccatgctgtgtgcactgagagaacactggacaatagtttctatccactgactctcatgggcctcaactttgccaccttacaaaataatttcagcccaaggcctcattaaagaccttcatgtaataatagccaattagaaggaaaaataaggccgagtgcagtggtctcgcccttgtaatcccagcacattgggaggtcaaggtgggaggatcacttgaggtcaggagtctgagactagtctggccaacatggcaaaaccccatctctactaaaaatacaaaaattatccaggcatggtggtgcacactgtgatcccagctactcaggaggctgaggcagcagaatcagttgaacccaggaggtggaggttgcagtgagccgagattacgccactgcactccagcaggggcaacagagtgagactgtgtctcgaataaataagtaaataaataaataataaaaattaaaaataaattagcaatctgaaaaagataggaagataaaagtatacctagaagtctaggatgaaagctttgcagcaactaagcagtacatttagctgtgagcctcctttcagtcaaggcaaaaagggaaacagttgagggcctataccttgtccaatctaattgaagaatgcacattcaccttggagagcaaaatatttcttgatactgaattctagaaggaaggtgcctcacaatgttttgtggaggtgaagtataaattcagctgaaattgtggaacccatgaatccatgaatttggttctcagctttcccttccctgggtgtaagaagccccatctcttcatgtgaattccccagacacttccctgcccactgcccgggacctccctccaagtccggtctctgggctgatcggtccccagtgagcaccctgcctacttgggtggtctctcccctccaggagtgccaagacctacgcctacctgttttcccatccctctcggatgcccgtctaccccaaatgggtgggggccgaccatagagatgagatccagtacatctttggggagccctttgccaccccactccgggctaccggccccaagacaggacagtctctaaggccatgaccgcctactggaccaactttgccaaaacagggtaagacgtgggttgagtgcagggcggagggccacagccgagaagggcctcccaccacgaggccttgttccctcacttgccagtggagggactttgggcaagtcacttaacctccccctgcatcggaatccatgtgtgtttgaggatgagagttactggcagagccccaatcccgtgcacgtgcacagccagtgcccagtatgcagtgaggggcatggtgcccagggccagctcagagggtggggatggctcaggcgtgcaggtgcagagcaggcttcagccccctgggagtccccagcccctgcacagcctcttctcactctgcagggaccccaacatgggcgactcggctgtgcccacacactgggaaccctacactacggaaaacagcggctacctggagatcaccaagaagatgggcagcagctccatgaagcggagcctgagaaccaacttcctgcgctactggaccctcacctatctggcgctgcccacagtgaccgaccaggaggccagttccatgccctccacaggggactctgaggccactcccgtctcccccgacaggcaactccgagtctgcccccgtccctgcaacgggtgactctcaggatgcccctgtgcccctcacaagtgactctgaggctgcccccgtgcccccctcaggtgactctgaggctcccccgtaccctacgggtgactctgaggcccgtgcccaccttgggtgacactgaggctgccccatccccgctacgggtgactctgaggccgcccctgtgtcccccacagatgactccgaggaagctcagatgctgcagtcattagtttctagtgtcccatcagccttggtctcaagaggccgagagggtgcaaccccaggggctcccctcccatcttgagctcttcctgaataaaacctcattcccctgtctggcgtctttgctctcaaggctaagctgcaggaaggagtggacctcagttacccttacagcaccaggtgggggcccaacctgtgaccccatcacctggcacaatccccaggctctggggcgttgatggtgccatcctcactttcgagtggaggaggtgggcccagggaagttgattggcaggcccaggagtgggagtcaggcacaggtcactccagagcctgcccttccctgaatggaaccaggctgctggctcccaggggctagattctgtcccagatggtgggaggggctggtggcagctgcagtcagagagggagctggggtctggcaggctgtggctgcctctggactaggggatcccagccacacccacatcctctgggtgcagggagtgaagtctgtgttctaactggggtctggggaaccgcctgggaaaagaaagggattctgctcctccagccggatgcaagtggaagaaagaataacacatcacaccagaaggttggaagcagaggatggggagggtgctgggcagtaggcgctgggttggcggcctctggggggtgcccaatggctctggcagagttgacggggcagcgcgccagagggcagaaggcagagtcaggagtactcctgcctctgctgggtctaagcccagggacatcacttgagcactttgaccagcctgaccttcaccataggccttgtgaggtgggtatggtct

SEQ ID NO: 1453 - DNA, 516 bp, Homo Sapiens
ttttttttttttgcgggctaacgctttatttgccagccaaggccccgggcccgcctgggcttctgctcagaagatcctcacggagtccagctgcacgtccccgcccacctccaccaggcgcacgcgcgccagcggcaggcggtggcggaagtggtggtactgggcgtccccaaccacggccttgaagccgtcgtctgacgcgatgatgagcacctcgaagggctgcccgcgctggaaaggaacgcccggcccgcgctcctcgcggccccaggagccttgctccttgctgttgaagaccacctccgacgtgtccagccgggggttgaaatgcagggcggcatcggagccctgctcctccccgcacagcaggtttacatggaacctgctggcattgggaggaaccaagccgcgaattctcagcaccgtgccagggcggatgccctcgggcagcgaggacttgtgggggacgttctgcaagagtggggtgcaggggccactgtgagccggtgagaccga

SEQ ID NO: 1454 - DNA, 351 bp, Homo Sapiens
  misc_feature (213)..(213): n is a, c, g, or t
  misc_feature (237)..(237): n is a, c, g, or t
  misc_feature (323)..(324): n is a, c, g, or t
  misc_feature (332)..(332): n is a, c, g, or t
  misc_feature (337)..(338): n is a, c, g, or t
  misc_feature (345)..(345): n is a, c, g, or t
cttctgaataacatgagaagccaatatgaacaacttgctgaacaaaaccgcaaagatgctgaagcctggttcaatgaaaagagcaaggaactgactacagaaattgataataacattgaacagatatccagctataaatctgagattactgaattgagacgtaatgtacaagctctggagatagaactacagtcccaactggccttgaaacantccctggaagcctccttggcaganacagaaggtcgctactgtgtgcagctctcacagattcaggcccagatatccgctctggaagaacagttgcaacagattcgagctgnnaccgagtnccagnntacttgnttacca

SEQ ID NO: 1455 - DNA, 40433 bp, Homo Sapiens
gaattctttattggactatgcatattcccaaacatattattgtcatacaactgagggaaaaatgtaaaactatatctgggaaatgaaaaattataaattctcaaaatgatacataggaaaatgatttacaaagaaaaaaaaggaaaactgaacttagtatctttctactttaaaggggttcaagaacttaggagtagttacacacctcctaaaatcttgaaaaagaggctatgaactcacttcacaaagggttcagatactcacattgtgtccaagagactcagcaattgggaatcttgccagttagattcataaagcaatccgaaagccagaatgcaatttctttaggggtggtttctagatgtttattctagatatttttaaaagattttgtttatttttgatgtgaagaaagaaaattattatagaatctagaaataaatattggctttaaaagtattaatttgccttgtcctttgtaattgtgatccgaaatatctcacaataattttgtttcagtgttattttcttctcaggaggaaaggaatgttaaaaccttactagcaactaacacttgataaagatttaaactatataacaattttaaagaaagtctaaaacaccagatagtcttgaaacctcgcatgcttcaccgtttaataaaattatgactcattttagtaagaacatgcttttttagtaagaaaaaatgctttctgagctaagtttgaactgctggggcacatgggacacccacaaacccagtcagcagaagtctcaaactcctaaaagattaaaggaaaaatacattagtgtgtacagagaatgaaaaaaaaatccccaatggttctaatctataaacggaagtaaaactaaaactcccctaaaatccccccagtcatcaatccttataaattcagcacttatcttcttcctttacttctggagaccctcattaaacaacacgaaagcctttgctgacttttatctcgtaaaatagagccctcaaatgacactaagcagggataccgacctccaaaatcacaaactgttttacttctaaaaccatgcatgcaaacgtggggtttcctgagttctgctaggggcgggctgtctggacccccgtgtattttttttttttttttttttttttttgcaggtgtgcaatccagggtgcgcgctctgtgcagggaggggagcagaggtgtgcggtgggcaccgcctgggccgggcggggcggggtgggtggggcccgggtgtgtgctggggtgagagtgaaggacatgtgacaatacgacggtggcggctgcaggatccgggaggggagtgaaagctccgctggggcgctccattagtgagcggtgatggttgccgcccacttgtattgaagcgtcctttgtcactaacaagttaaattagagatgttatttatttaagaagaaggaaaaaaaaccctagccaaacagcctatgaatacatatgctcacatcccctactcctccaactcctaatttccccgtctccagagggcacagttgtaaaccttgacgaaaatccaatcttctgtgcgggaatttccccccaccgcttgccgcccccgcgacagtgagtgggagctggaggagctctggtcccgctgcccgggagcacgcggagccgggcgaccgcggtgcggcagccagggaggaggggaggcggcgggactgggcgcgggcgggccgccgccgcgacccgggagcggggtttgctcaggaaaaggcgccgtcgcggcccccggccacccctccctggccccgggctccctgcccgcgcgcctcccgggcctccgggcggctagggcaccgcgcgggcgagcgccgaatgggagcggcgacccggccagcccggcagcccgcgggcggcagccagggcgaccgcggaggcggcgggcagggcgcgtgcgcactgcaggggcgccagatttggcgggagggggagtgtccaaagctctttgtttgatggcatctctgtttacagagtttacactttaatatcaacctgtttcctcctcctccttctcctcctcctccgtgacctcctcctcctctttctcctgagaaacttcgccccagcggtgcggagcgccctgcgcagccggggagggacgcaggcaggcggcgggcagcgggaggcggcagcccggtcggtccccgcggctctcgcggagccccgccgcccgccgcgccatggcccgaagaccccggcacaggtaacggggagccgggcgggcggccgagggcgggggcgggggtcgcggggcgccaggctcccgggagcaggtgggaattcgttccgggatcatctgaggggctgtcagaccctccgaggacctggagcccctgcctcggcagcagaagccgctccagagactgatgaatggaagagtctttgcgggaaatgtatccggacgttgggaagcacgccctgcggctcattttgcaagttgcatggggatacatttttctttagggggaaaaagaaagcacgttccagccgagggcagagcggtgcccaccagccccggggagcccaccaggtgcctggcttgatgccgcgggtgtcggcgagggatccgcagcgtaattgctggatgcattgagatatgtttggacttggaagtgcagagcatatggcagatacagggaaaatgctggattgtttagtagctgcaggtagttcatttaaatttcattcattctttatggaggcgaggaccagtgtcagctgacaggcggctgaaaagcagattttagggggataaaggggtctctacttttgcaaattgtcttaagacctggttttggaggttcgaatcatttttctctgaaaggcttttacttccactgcaaacattgcacggcacccacacgccgccgtcgcacatgtcactgcacttagggaggctcgccgggaagatgggtgcagtcccttcacatttttggccggacagatgggaagagggagaggaggaggaggagggaaatcctcgtccgaactgtcagttgctcgttccccagtctccaccggcctctggactttcccagcagcacacgccggggctccctgcgagcggcgggtgcagggctagctcggcagccgtcgcagtcgccactcggctcaaggggacagaggccggcagcacccaaggccgctgcgcgcgcaaccgggacgcgatccccgcgggctctgcccccaggccaaaggtccccgcctggggcgcacgcgtggatgcggctgaggtcgccgcgccttctcgcaccctccttcagccgccttaggtcgccccggccgaggcgcggtgaccggacagatcctcgcgaaggagttctaaggcgaagtccatggaggcaaagcaaatccattcgcctttccttagattgtttgattttctcctactggtttgttgttgagcctgcggcgctggtccccgcgcggcgctgggaagttgcaaagagcgtgggtggagaccctgcagcagcacccgcgggctgggctgggcggggagcagcgccggggcttggttgggctctggggacgagagggcgacttgggggagctccgggctccctatgctcctccggagcctggccgcgcaggacggtgtgctgcccctcgacgctccacttttcgcctttaggacttcacaggacagctaccggggtcatctgtttttttttttttttttttcgagagctgaaactggcagcaggaggagggagtcgggcaggggtgctgggaggaggcgcggcacggctccgccgccccgaggtctcggcccccggggcggggccgcgcaggttccctgaggctccaggtagcccagaggggaggcggctgggaggggcgggagccttgaacctgcctcaggggaagagaaacccgactgcgggctcggagccgtttcttgcaagggcgagcgtcaactcggcagggattatattaaccaggtcagcgaaatgagtttgaacccctccgaatcacagtagcggccacaaggcacttcctcccgctcccctccctcttcctaacccccagcacctcttttctttttcgtttctttgcacggtttgtttccttgacagaatgtaacattcatagttgtactcttgtaaccacaccgggtctagcaggtggggagtcgagtgcatcaaccctgaaatcagcctttgaaaatcctctgactgttgggtctgagatcttgtcagagcagataaaggaaaagttatttcaggttccttagtagaaattaatcatgcttctaggacgacttagagcaagcaaatcgcatgcaaagttcaaaggcgagcctgggtggccagcctggcagggaaactcaggagctgggcgcgtgagcagccccggactcgccctgctgcgtcctggccccttcaggtcctgcagaagtcactctccaccttgcccccaagaccttagttttgcacatctttgcctctgtgcttagcttttaagaggcacggaaggacatggcatggtcatgtattagcgctggaaagtaccttagaaataggatccaagcaagcccttattgtaaaggcgaggaactgaagtcttgagagagaggaagtgatttgtccaagtcatacagctaggtggaggctagactagaacctttgcctccagaaccctagtcctgttgattcccgtgctctcacctgacgttggctgccccctgcgggcggctgaataggttgcttgttcctgggttgttaaaccgctgcggagagagaggtgctcaatgactactctgaaaaatgtgctcagttctgaaaatgtgacctctagatccagccaaacctgaaaagttaattcgacttgaatctatgactgcagtttcagattcctctggttttcttggtgtctctcacatttcacaagggactgcatttggggtctttccaaggagttccctatgaatctttcaaaagatgcagacttacacctctgggctttatagcttttttttttttttttttttttgctttatcatatcgtgttttacatttttgtagttcttgttcagaagttgtttagtgcctcctgttgacagtggaaacagaactaggctattgtttcaaaacacagacactaaatgaaaggaattattacagattataaatatatatttcctgggattttatttggtggtggtggtattttaaatttggattacatcatgtcgccattcaacctggactatcagattgttgcttaaaataatagctttaaattatgagaacccccaattcaggatttttggtaagcacttcagcttcacttgtagggggctggtaatatgcataccagtgagttagtttgggaagacaaaacctgtaatgaatataacttttctttttaaaaacaatgatttacattatgatatggctttatatcattgtttttattggtcttagtttaatgggtttcccaacattgcaatgacaaattttagtgaagtttctaagatagtatttttcctattttaagttttataagaaaaactataaaataaaccgtgtctgtaaaattattgtcatctgatcagttgattagattaacaaacattatgattatgattaacaaacagtaagcatatagttacttcttcaaaagtcataaaatttcctaggttaggttaactaaataaaagaaaaagctttcgaaaatagtaatgggttcttttaaatccatggcttttttctggggaaatcccttctggattaggttacattttataatatttcaaacaccattccatcagagacagaaaaaacaagagtaagtaagactctgactaacaagtggcctaattattcacttagttactctagaaactaagtattgtaaacatgggcacaagttggatcaaccaggcctggagttgtgagcaatttggtattaattttatttacaaaacattaaagcttgatcactcaatgttcttatctttgctttggttttaaaatcctttcctcttagattctcctaatcctctagactttatgggatcactataatcctgttttgcgctgtactacttcttgatttttttcttcttttaataaaacaaaaaccccattggaatagcatagttgaattgtttattatgtttgagaaatattatttaaacgatgtgacagatgccaaagattttgagtgtgcacttatataaaggacatgggttcttcttccttttcttatccttaaccttaagttttcaacttaaaccttcactggttggaaggtggccaaatgtataacttgtccctggtctaatagtaacagcaggttcagacatgcaggggaataggaaggtgccaggtccttggccgtgtctgtggatacccataacagcagaaccagtttacaatactagagcaacagaatgcagcaaacaatcttgttgtgcaagttttcaaagttttgtcttcataacctttgaaaagattgttgaggagttttgtgtaagttttgtaatccagtagtagtctaaatcctcttgtttcagcccacgtctacccattcttatttctgcagcatatatagcagtgacgaggatgatgaggactttgagatgtgtgaccatgactatgatgggctgcttcccaagtctggaaagcgtcacttggggaaaacaaggtggacccgggaagaggtaactaatcattttatcaagacgcagaaaatagatagagtgtataatttataaaaaacaaaatttcaactaaactacaggtgctcaagctcattagcaggctccttgagatcttatcctagcccgcatgtgcagcgtgccctatgccccccacttcattatattatccatttccacactatttgcagttctttgaatgtcctcttctcattttaggcttcatctgtgtttccttttgcctgttgagttctcatccttttgtcccacctcttcttcctacttttacattacccatgaaggcatcacctcttctgtgaagccatccctggcttcgccggacaaggattggatgcatcctcctgtgatcccatgcatgggtgcatgttctactttattgttgctgggacatatatacctcctccagctgactgcaagtctgttgagggcagggctcttgtctattcatctttgtgtttcctgaattcacaaatgcttggacccaaaataggatattaataaatgttctctcaataagtgaatgacttgctactcccaaaaacaaaacaaacaaaagaataaaacaaaacactcagagaactcatctttttacagtgtattgatttaatatccttgatatacttaacagagccatctatatgaaggtatgttttaaaatcatccgataatggatggagacacatctgcttctcctgtttctttttcggctggcttatcaaaagtttgattttgtaggaatggaaaaatattttagaagcaaaattattaatatgtggagaaaagtttctctaatgttcttaaaatttttgcaactaattttagatgattcatgttacaataaatggtattggctcttcttcagtttcactgttctctgcttcatttaaaccagagctccttttaacaggcaggtaggattcccagagaggcccataggaaattcatattttacctattaagattatccacttggataatccttatgatacggaaattctgttgtcaacattggtttcctaattcttgtgtctgtattgtaccagggacctccactgtgtgtgaatgttacctttgcagaaacataagaaggaatgcatttatatacttatgaactggtaggattgtgaacagcatataaactaaaagaactgattagctggaaatgtttaatgtcttttatgttctaacacatctggcctatctaaatctaactgattttcttatatagctttcaaatttaattttaaaaatggtctttatttcttttataaaaagttaaactaactggaaatattctatttcttgctcaagatcctatttattaccataggtaaatgtgtactgaatctagcactggaatgcattttttcctaacagagtaaagcagttatttataataaacactcaatatatgccaggcattatgataaatgttttgcaaaattgcctcatgtaatccccaaataaccctgttaatatcagcctcatgttaataaattgccccatgtaatccccaaataaccctgttaatttccattttatagatggcaatactaaggcccagaaaggtaaaatggtatacccgctttacacaattaatagttgagtcaagatgccaactctggtctgattctaaataaatctatactcccaagtccgtatattacattaatatctcctgtattcggatactttagagagactttttattctagattcgttccctcattcactttaacttgaacagagttatatagtaaataactgatatcctaggattacctttaaatgtcttaggatgaaaaactgaagaagctggtggaacagaatggaacagatgactggaaagttattgccaattatctcccggtaagttagtaagtttttcttataacgaaaggaaagcttctcccaaagatttctataaaatattctaggaggagttattaagatagtgtataatttactcacatttaagaagtgggagaaatgccctacccataacttatattttatattataatgcatataattaaattattagaatttagattattagaatcgattattataatttagattatcaaattttaaaaacagttgcttcttgttttatcttttcatttataggataattagtattttgatgatttgttacatggtagttgattaaacttgatatttcctccaagtcagtttttcctgaattccctatttttgtcaatagcaatacttttggcaccaaggtttaaaattctgaagacctttcttgacttatcacattcccccaacccctacatctaagcagttactaaggaccctggaattcctttatagtcagtcccgtccttttcattctcatggctgtgctgaaggttgggctcctgcctctcatttggactatcatataacttcctaactggcttccccacttgtagttttccatttttctttcttttttttttttttgttttttgtttttttttttttgagatggaatctagctttgttgcccaggctggagtgcagtggcacgatctcagctcactgcaacctccgcctcccaggttcaagcgattctcgtgcctcagcccccttagtagatgggatcacaggtgcccgccaccatgcctggctaatttttgtatttttagtagagacaaggtttcaccatattgatcaggctggtcccaaactcctgacctcaagtgatctgcccacctcagcctcccgaagtgctaggattgcaggcatgagccaccgtgcccagccagtcttctacttttccattcatcccaaacaccattggcaggtggaacttcctaaaatgcagctgtaccttatcttttcaaaaccaaccacagtgacagaatctcacaaattaagtaaactgccttgacttggcacacagaggccctcctctattgccccaacttacagctccagttctgtttcctgcttcctctctctaagcaggtttgcttgaatttatttctgctttacctcctctgggcttttgctcctggtcttcccacctcctagaatattctccctttatgtcaccaattaaagttctgtccatccttcaaagtccttatgaagagctcttcaagactcctcccaaggaaaccatttctcctcctaagaagatgcttctctcctcacttcagtatcattttgctttggtcttttcttccaagtgaatcaaattcagcatctgtgatagtcagtcatctacttgtcttttccttcttataagtttacaaactcctgtaacataggacctatcttttatgcatcttttttctttctgcaatataaatactttggtcctggattgaagcacatctcttgtctgaatgggaagcaaactttagtcttttagggtggtttccatgaaagcctgacaacatagaatctctatcaagcctcaggctatgtagatactctgcaaaagtatctgaggttaaggttaacttggcaggcacatgtgtagtatgatggtcctttagatcatgtggcaggaatgtttccctcaggaggcagagtgtctaattttagatgcaactttgatatattacttgcatgttctgtagcctgtaagtaatgagggatagatgggctctaaacatgctctaaaatgttcttaaatattttcactgcatatggtctatgtgtgattcctattacaacaaaaaattcacgtgcttatcacatcatatctttatggtggtgcatactttatttgtctagaatcgaacagatgtgcagtgccagcaccgatggcagaaagtactaaaccctgagctcatcaagggtccttggaccaaagaagaagatcagagagtaagttctttcttcattggtgtgtgactcataattaagaatattcccaaaatgctaatattttcctatttgaggaagcaggtaaattgggcaaacaggaagtagaggactctattcccatatttccagtgaatgaaagcaaattttggaaattttctaaagatcttgtaacactgaagaatgattatactgactcattacataactttaaaacataggttatttttgtgtgtttatctgaaggtgatagagcttgtacagaaatacggtccgaaacgttggtctgttattgccaagcacttaaaggggagaattggaaaacaatgtagggagaggtggcataaccacttgaatccagaagttaagaaaacctcctggacagaagaggaagacagaattatttaccaggcacacaagagactggggaacagatgggcagaaatcgcaaagctactgcctggacggtaataatatgtcaaaaaatatattgatcgggaagaatgagggagtgggtattgaacattctgctttaaatgtatggtgagtaaattatatttcatcagtcgtaagtgttttattagataaaccagctacatagcttttagagattgaagacatcttagagtttatttggttgagaacttccaggatccacctgacagtgagccctgggtgaagacatttagctttccccagcctcaatttccccatttccaaaatgaatcatacagggccagtgttaggatcaagtaaaatgaatgtcaaaggacttggtaaactataaaactctaaatgcatagaaagaaactgaagacagtttgtctctggcagttcacgtagctggttaagttactcaaaggaactcagctaccattttcctgataaccatcattcatttcttttattttttttaattattattttttagagacagaggcttgttctgtcacacatgagtgacagagtgcagtggcatgatcatagctcaatacatccttgaactcctgggctcaagggatcctcccacctcagcttcttgagtagctaggactacaggtgcaccccactacacccagctgattttaaaatattttttgtagagatggaatcctgctatgttacccaggctggtatcaaactcctggcctcaaacaatcctttcacctcccaaagtgctgggattataggcatgggccaccatacctggccaccagtattcatttcattataccactttgcttaattttttacttcattgattaaagaaataatgtatttcttgaattctcatactacttccaggtttttaaataatgtcagggtaataatgctttctttttaatgaacaaggcaagaaaatgacctcattatgagggataactatggaagctcattttgtcccatttttcccacttaagtagtatataacagattttgttcctttggaaagcaatacttttaatgataaatcttgcattaaaatgatgtagatcaaaaatattaaaaatagttttattcttgagcttcataatccaggagaaagtttatatagtattctctagtgatgctccaaagcatttgcacccttgtggttcagtataaacttagaaattttaagaggttggtaaaaaaaggcctttcctcccatatggcctgagaggatacactgctgattcttctcaaaattaacagggctattgaacttcctctttctttagcatacattcccccacccccattgaaatagaaaaagggagacttaaacggtttttttgaattgagaaactgttttcctgagaatggaaagactttagtaaaaatgcgttgccttttgaaaatatactgggggttaggatctttccctttgggatcccattttccactctcgtctctgtctgattcagaaaacaattggggtggctttcaaagagtaggaggttttttggtctcagaagttctcactagtgctttgagagataaagagtgaagtattcttcatcagcagcatcttatcatccaccagacttcaccatgtccctctcgtggtgtgtaggccctgctgtgccacattcaaaggagtaatttccccaaggcagctggaactttacattgtgttggagtcttgtaccgcgaccggtcagaataaacatgaagcgttatcgtattgaaaatactcctttaccaaggaaatggaatggttaaaagatactgatatttctagaaaacgacatgcattccagattgtgtaactaagagaaatctaactaggcaatagagaaagcctgatctcagagggtggagaagaaggaaacaattaaaaagagaaaacaactaataggcccaagggaaaggtctctgttagaaacagttttctgtcaattcactttaatctgaattgaaatttttgtttgtgaaatttgtgtgatatatttctgtgcagaactgataatgctatcaagaaccactggaattctacaatgcgtcggaaggtcgaacaggaaggttatctgcaggagtcttcaaaagccagccagccagcagtggccacaagcttccagaagaacagtcatttgatgggttttgctcaggctccgcctacagctcaactccctgccactggccagcccactgttaacaacgactattcctattaccacatttctgaagcacaaaatgtaagccattcctgtgaatctagtttaatgagagagacggttagtttagctccaggtaataatcatactttgcagttgtatacttttcagagaactttcctgagcatgatcatggccagtcttcacctatgccctttgaagtagatagggtgtaggtatggtgtgttacccctggtttatgtctccagaaacgaggatggtaagcgctttgcccagggtgacacagctcatagagatagtgctgactagaaaacgagctgtccgattctaaattgctgcttcaaatctaatttgaaggcaacctttgaatgtaaatttacttaaggtactattgaagaataggggaatggagtcgcatttgtagatgtaatgtttttctcttccaaaacgaaaagggaaggtagtattatgtttaaagaggagggagtttgacactgaaattcagtggttatggtatgtttcattctggcagtgatcaggcagacatgtcttaatttattcactcagtaagtgtttaccttcttactctgagtcaggagcagaactttgtgacattcattttctgatgtctccttttagtctccgttggatcagtgtgatcccttccttatttctagatatttatatttagggaaagtgataatccataataggtggaaaaagaagaagaaagaggaaaaaaatcgagaaactttaatcttaagaataacaatattaaatgataaaacttacccaagaatagagagctcatatgcaaattatatgcaaaacatgttcataaatagtttttattcttctctgtccatggatttgactacaaactttacagaaaggtctcagatgaataaattatcataagaagtcctgtgctttttattaaaactcaaaattattccaagaaaaatatttttatttacaaacagctggtgccatcaatttttcccatagaaacaattttgaaacattcattaatgtattttataatatattttttattgtttttttcattgtgtttttctctaattaaggaacacttcccaaaatttaaagtgctcatcaacacctcccaaggatttttcaccatgttcctttagctgtttagccattttaaaggcctggctaaatttcacattaaaaggttttaaaaatttgtttagtgtattttatcagtaaagtgttttttttctctcagtcccagaacgaaacctcaggaagccaagtcccctgaagcatatgtagccctgaatgacgtggcctttgttttgtcttttgcatctaggtctccagtcatgttccataccctgtagcgttacatgtaaatatagtcaatgtccctcagccagctgccgcagccattcaggtaagatcattgatcattcactgttcaaagcaccacttttaagaaatgcttatttctttcatctaaacacatatttttacctgagcaactaaagtaaaaaggaaagggaacatggagaggagagcagagtcttggccagcaatctattaatcttgtcttctagaatgagtttgctctggaattttctgattctttgatgttgcaaggtgaaataactcatcagtcagcatccactctagcctgagatttcacatcactcccttaagtctgaaataacattcacaaagatttctgcaggagccaaatttggttggtggtgttgtcacagtgaggctctttgggctgtgcggcacctcatgaccatattggctacacccattgtatttgcagcttccaatcagacctttgtctttatttcccttactttgtaatttcagagacactataatgatgaagaccctgagaaggaaaagcgaataaaggaattagaattgctcctaatgtcaaccgagaatgagctaaaaggacagcaggtgctaccagtaagactgtcatcatgtgcttgaatgaggggatagcagctttgcctcagtttacctaagcgctcttctcttctaaatattacacttagcaaggctccatatatccattcagaatgtctcaacacaagaagttgcttgtagtaaaatgtagttggtatcagattatatgctgattaaattggaagcagtctttttgtaattgcaataaaaatgcaatatccacttatgattgttatcatcaatttttttcttcagaaggactataatcagtttaaagactagcaaagataaaatgaatgaaaatctgcattttctacagagctatgtatctatatggtaccattttggtttttttctattattttgttaacctatattttcatattttataatttcagacatgatttgatgcatgttcagtatatacatgtaaaaggttatatataaaacctcttcataaataacattagctgctctcttttatttgcatgtgtgaaagttatgtgggccattactgaattctgacatctttagcgactgggcagccaactgggatggctccttgtgctttgcaacatacatagttaaccaacaaagacaataaaagagaagtgatgcccagtaggtattcctaggggtaaatttattttttgttaaataataagatgtttatgtgcacatgctagttcgaccactttttaactttagttaatgttttgcaatttctcctgttgtgtggtcatactgtaaggagacttctgttaatttgctcttctgctttcctaaccacgttgatttggcagtgcttcactgcatcagtgcaatctgtagcattagaaagggatagaagcaacaagaatatgtgtagatcaaagcaactctaactcctgagtcctctagcttttttgtggttagaatgcaaataggacagttcttcagttcttcactcacagcaagcatttatggacctttggcaaattatattaaagtggaattttaagacaatatgataattatacttcgaaatatagacctatgatttgacatttttacaaaatgataacaaggtaatcatataggtacaacctctagcactattaaaaacagggtcttgcattgataaaaggaaacatcttgacaactgtttcataggcgtaagtttgggatgatgcaactactcttatctttcctccaacagcatctgataccttgtgcaacttcattgctaagttccttctccctttcttctgtcctctctttatttctacacccttcccccttccttagacacagaaccacacatgcagctaccccgggtggcacagcaccaccattgccgaccacaccagacctcatggagacagtgcacctgtttcctgtttgggagaacaccactccactccatctctgccagcggatcctggctccctacctgaagaaagcgcctcgccagcaaggtgcatgatcgtccaccagggcaccattctggataatgttaagaacctcttagaatttgcagaaacactccaatttatagattctgtaagtagaattgtgaagggaagttaacgattctggaagataaattagaaaacccatttcttaaatcattgccattttctatagccaagctgttattagcatatattaatgtaaaggtagaagtatgattttcatcttcatgaatatgttttttcaaagatctgatttcatagcctaccgagagagacaaaagtatttataaatacttacaaaataggacttttgaaggaagagttttttttcacattttcacacttttccttcaaaagtcatatttttaaaaatagtcagattgatgacttataaagcagagcttggattatgggaacggaatggtgtttgagttacttttaacttttttttttctttgcttacttcatggtgcttctctagaattttgtcttgcttttgaacagcacattaatgatttggcttactcagagctgaaagcaatcttttagtgtatttgaagtaataatcagctccttggtcatacctggctctttccacaaaatggtgattattgattactggtcccattgcttcactgagatgaatcatctttcgtgaaacaaatttgtattcagcacctcctcagcgaacacttggttcctttcccagttgattaaaaatcatttattgcacactcattggttaggagatgaccattgccgtaatatgccatctagaaaaggtcttcattttgctttccattgcatgcagatgtagagtgtcgggaggtccctgcagcacatcagagggccagccttgaggcagcccactagaccctgctctactgcagtataatagagcaactgctcatcttgaagctgttgctcaagaagccaaaccaacgggcctagtgtttgctttgcgttgagcatctctctctcagtgctgtttcaggtgatgatggcacacactatctcaaagttctgtgcctcccacattgtttcaggattcttcatcatggtgtgatctcagcagttttgaattctttgaagaagcagatttttcacctagccaacatcacacaggcaaagccctacagcttcagcaaagagagggcaatgggactaaacctgcaggagaacctagcccaagggtgaacaaacgtatgttgagtgagagttcacttgacccacccaaggtcttacctcctgcaaggcacagcacaattccactggtcatccttcgaaaaaaacggggccaggccagccccttagccactggagactgtagctccttcatatttgctgacgtcagcagttcaactcccaagcgttcccctgtcaaaagcctacccttctctccctcgcaggtagaacacaatttctgcacagctgttactcattttcaacagacacctgagccttaataatctagaaactaatacttcggaacaaatgactaattactgctgcctttgctgatttcattctgtcgttgaatctagctgttgctaagttatactgcctcccaaagtttaggctgtctgcaggctaactgttgattttggcatcattctctctcttttacttttgggtggttttgaaagatagttgcatgaaacgtacttttatttccttcaacactagagtttaacatttctgtccctttctttttctcccatctgatccctccctttaaaattgttaacatcatttcttcctcgttgttcatttattcttatgcgattcactgacccaggggaggagggaaccaaattgtgtttatataacatttgggttgcaactagaaaatttaaagctagaaaatttaaaggttccaattcatctttaaatggaagagtttgggaagaggatgagaaacaaatgcttaaggaaaagaacatatttttaatttcagtttctcaacattggctcttttgagttgtgccatactattttactagtgcagtttttgccaaggaatatttttatttcatacagcttttttaaggcatgaaaatcacaattcttatcagagatttgtgttcctaaattatttaaataattaaattaatagataatttggcactttaaaacatttttccaattgtatctgttgaatttgttttaagaacagatttaggtatgatataggtatatacatttgggaaacactgaatcaaacaaagttacaagtaggtttcttagctgggcatagtggcatgggcctgtagtcctagctactggggaagctaaggcaagaggattgcttaagcacaggagttcaagttcagcctggtgaacatagcgagatcccatttctttaaaaactttcttttttttaactgcaggccttctcagagttattaatatgccgttgtgccttgtgaatttccaggaggagattatgatatgttgtgtttcccaaatttattttaccttggaattgtttaaggaacacctagttttttcccagaactttagtgttctgagagacacagtttattattcaagaattttccatataatgtaaaccttctgtaatactaattttggttcatagattattaaagagaaaaaacaaagtatgaaaggaaactattaattattaactattattttccccaaaatcactaaagccttttaaatgttaataaagaacacatctcattctctttaatgacaagtgtcatttattgagagtattttctcacagttttgcaagtttttcagcaatgaccctaaattttatttcttggaaaccacacccaaatcctgggtgctcaattgaaataaaacaataccctagtcaatataacatgcttgttagcatctttattatttaatatagtgggtcaggaaaacattcttgttatctaggtgtgatttttaaattggggagaataaagaattaccatctaatctaagtattttttctttctctccatatttagttcttaaacacttccagtaaccatgaaaactcagacttggaaatgccttctttaacttccacccccctcattggtcacaaattgactgttacaacaccatttcatagagaccagactgtgaaaactcaaaaggaaaatactgtgtaagtctttggttcaggaataaaatgatttatcttatttacttatatttaattaatggaatatagttcccagatgtctgatccacttgtatgtgcataattttactgaccatttatatataatcatgtctattcccacattgaatatatctgtcctgggcatattacaactacctacaggtagaagatgggaagataaactagattccttttgtaacttactccaaaatttcctatatatgcacaagtagttttcataaaacttttccattcggtttgtttgttccctccataaggccttcttatgaaagccagattttcaacctcctttcctctctaattgtaagcttcagaataagaacgagtatggtttcttacctagtttgtatttttatttaattttatttgtttattatttatttatttttagtttgtattttttaatcttattttttctttttgaatttatgtgtagataggacctcttctgacatccccaggaatattatatgattagaagccaagggatgagtaagcagtcatttttattcaataaagccttaatcaattcagagaaatggtagagaaagtgtgaattatcagaaaccttgaaaagaaatgcactgttatttcgaagtacaaaaagtaaattttaaaagtttaacatgttttgtagtatgggctctgttttcatgaatagggaaacctgatttgtaaatgacatcaggtcttcttgatgctcatagtcttatacagatcataggcactacatgtgtcttcagagccattaaggaaagatgttaaatcatttaatgcttttagtcttcgaggtataatattttgaaatatttgaaaatatgtgatatgcatattctctttttcttaacgaataacgtgattaatcagcacaccccaattccatatccggaacagagtttattgtattcagtggaaaaatgttaaatgtaacaggtaaagccatgtagggacatttattcttttgtattgagccactgcttgttttctttttaaagttttagaaccccagctatcaaaaggtcaatcttagaaagctctccaagaactcctacaccattcaaacatgcacttgcagctcaagaaattaaatacggtcccctgaagatgctagtaagttctagaaaagtttttggatttcattggtttattagtcccattaggagttctctctgatgcaaaaatacccactcttccgtttagcctcagacaccctctcatctagtagaagatctgcaggatgtgatcaaacaggaatctgatgaatctggaattgttgctgagtttcaagaaaatggaccacccttactgaagaaaatcaaacaagaggtaaacacgcaaccctttggaagcaacaagctgagaatcctgccccctttattccttgtgtgcagcttgatgtgtctgccattggcactgtgcaacaccacgacttttcgtgcaagattttcatacaaggtgcagcgaaaaggtactgccagactgtaggcatcatcaacctttcctttgggaagccaagccatctctatctacttcatgtttggacagaaaacatactagagagtatcaagaaaagggagggaaagaggtttttaatgtacttttaaacattactgattatataaagttgatatttcatttttagatgtgaagaattggaatttaaattaaaataatagtatctttaattaattgtattaaaaaaagggaggctgggcgcggtggctcatacctgtaatcccagcactttgggaggctgaggtgggcagatcacaaggtcaggagttcgagatcatcctggctaacatggtgaaaccccgtatccactaaaaatacaaaaaaattagctgggtttggtgcgggcgcctgtagtcccagctactcaggagtctgaagcaggattatggtgtgaacccgggaggcagatcttgcagtgagccaagatcgtaccactgcactccagcctgggagacagcaagactccgtctcaaaaaaaataaaaattaaaattaaaaaagagaatctaacctgcaaggaacaaagttttagcttgttggcaacagctgttttccaccaggttagatacaagtgcttcttgaatttattttcatgtaaagataagtatttttttttatagctaaaaatctgatttgattatttagtaatggagaattttaccagaatgtgattaaaaaccagtcttttgtcaccaaaagatcttttatgtcaccaaaataaaatccttgacggatacaacactactaggtgtatcattaaaatatattcttaatagaataaacacctagaatcagaacattggttgaaaacgtaggagctttacaggggcagtaaatttggagctagtcacatttcaaatttgccatcagtgtttctttgttgaatccagaagatagagcaaattgagctgatagtgtaagttagcaacatagttttataaaagtatttgagggactggccagaaatatactcctgactgtacatgtttcataggaagttctagaaacaacaaagcactttctatatgcttttaggtggaatctccaactgataaatcaggaaacttcttctgctcacaccactgggaaggggacagtctgaatacccaactgttcacgcagacctcgcctgtggcagatgcaccggtaagtacgtgtgcaccagcccccaagttgttatgtgacactggtgcctcatgaaatcctgtgtgtggcatagggctgctgcggtttcagcactccctctttaacacatcttatttctaaatgttctcctgcacatgatttttaaaaaatgattattaatgtagagtataaagttgagattttttcatgtattagaaacattgcagactttttcattatttgttttctcattatttgagtgccttggccatttaaaaaaatctacatggatataaaaactatgttcatttatatattttcctttatttgtcttctaaataatattgtcttcttgttaagttgtctcttgtttggtttgtgtagcatctcatatggtatcaaccacgttgtctatagtagatgcccagtattgtacccaattgctttgggttactaccaccatttttaaagtttataatttgtgaagggttgtccttatgtcttaaggaaaatcagagctaataacagctgctaagatttatttagtaggtactaagtggtaagtactgctctaggggctttcgatgaattgattcagttaattctcacaattatcctgtaaggttggtattatttttattaatttttattttttttgagacggagtttcgctcttgttgcccagactggagtgcaatggcacgatttcggctcactgcaacctctgcctcccgggttcaagcgattctcctgcctcagtctcccgagaagctgggattacaggcacccgccaccacgcccagctaattttgaatttttagtagagacggggtttctccatgttggtcaggctggtcttgaactcctgacctcaggtgatctacccgcctcggcctcccaaagtgctaggattacaggcgtgagccaccgcgcccggccaggtgggtattattatcatttctattatgtcaactggaaaacagaggcacaaagaggcttagtcatttgctcaagattgtatacctaataagggatggtgctgggttggaactcagaaggtcttgttctaaattccctacttttcaccattttttgccaataatttatagctctaaaatattgatagttctgtaccaatatatgaaataaagtgttctctccccagaacttagtaaatcttctattttgaaaggcatgtatttattaattcatttagcagatgttttttgagtgcctaacacatgcctagaactctgggatcccaaaggagctttgtgttgtggtgatgtttgccacaatgggattaaggttcagacatagttgatttctccttttagctcatagtggggagaatttatggcagatgactgcatttttttatgctaatgtgtatcatctcatagtaatctactctccacagtgttagaaaaatgtggctctcatattatccaacctcatttaaatttcaaattattctcttccctttagaatattcttacaagctccgttttaatggcaccagcatcagaagatgaagacaatgttctcaaagcatttacagtacctaaaaacaggtccctggcgagccccttgcaggtaattactattccaacattggtattttaaaattcattcactgaaaaactgtcatctttggtggtggtggtggtggtggtgatggtagtgctggtggtctgtttttcgttttcaacattttagacataggggagtaatgcttttatacaattcttgatgtctagaaaaatccaataattcctttttgctactcatatgagacatgctagaaatttttatcagtgcagattccccaaagcatgatgaaatgaaacatttcttactgtgactgagactaagatgtattacacgtgtgtcactatcttcttctgccctcaaatgttttataaaaatatatcaatatagtttactttatgttccaaattttttattttttatgctgtatccctaggcaaccaaagctcagagactgttccaattttaaatgaagtctgaaattagtcagacagaaaataattgcaatgtatttgactgtcagaataagaaagtcaactgtcaatgttgtgaggccgatctgaagttgaccatctgctgtcaggttttaatatcaaaagagatttcccttgtaaccctaaagtgggtgtgtgttgatgaaatataaccaattccaaattaatcctgagccaaatgtaaataagaatgcaaattttgcttccctaaattatttaaagcagtttctgacattaaatagcccaatacccagccacctgcagagccctctcctccatccccctgtgccatgcagagggaaacttcataaccctagaggaagtgaagagcctggattcagaagctgaaggtcatatttcttgctgtaagttaaatggcacgatcatcggacagcagcctttgagtctgcccattaccttaaagggatttcccattcttgtgatagtttctccttccaaattgtgagaatctgaaaacttgcccggtaagtatttgtgatgcttagtttttcagggttttttgttgatgttgctttgttttttgaaacagggtcttacccggtggcccaggctggagtgtagtggggtgatctcggctcactgcaacctccgcctcccagattcaagtgattcttatgcctcagcctcccaattagctggaattacaggtgtgagccaccggcaacccagccgtttttttgtatttttggatagagacaaggttttgccatgttggccaggcaggtctcgaattcctggtttcaagtgatctgcccacctcggcctcctacagtgctgggattacaggtgtgagctaccgcacctagccagtgcgtagtattattgtaaaataaggattgcaagcacattttgtttaattaaatcagattgcttccttcctggcctctctctgacagcaattgttttggtaaaatggctgtggactggaatgtgagacagggagtcagtatttatggggaatctggacaagttcctgcgtcagtgaggctggagttggccccgtgtggagaagactcagaataccacaaagaggccagacgcagtggctcatgcctgtaatcccagcactttgggaggccaaggcgggtggataacttgaggtcaggagtttgagaccagcctggccaacacggtgaaaccccatctctactaatcccagctactcgggaggctgagacaggaggatcgcttgaacccaggaggcagaggctgcagtgagccgagatcatgacactgcactccagcctgggtgacagaatgagactccatctcaaaaaaaagaatatcacaaataattgggagatgaggaagagaatgaactccacccagacataagaggaacccagaaagggagttacaaagatttcaaggcaaagggcagccatttcaaaattttcctgaaagctgttcttaggtccagaagaaaagcttttgcttttttttttttttttaattattcccacctaagttacttggctcttggtttctagagaacagaattcaactactgctattcgtgttttaattaagttagattaagttttgcatatattttctaacctagtctggggccaacttgtatttgtagtagtacagaaaaagtctgttctaaatttcaaaaagccaacacatcaatatacttggggacaattaccattacataagttgaaacccatagttcagtattgagctttatcagtatatttgtattttatttaatggaaatattggttatctttgaaactcaaaattaagttatagctctattttattaatctgtattctcctgtctatcagtgagtcatattggcactttatgaattctaacatctgtacactgagattaagttgtgtatggtgaaggtaatatttgtcaattctatcaaactgaataattgagacttgaaagttaattttagagtcaatactcctgtctaaaccatatagtttactggtttacactgaccagatatattttaataatctgctataaagccaggctcagtggctcatgcctgtaatcacaatactttgggaagccaagactggaggatagcttgagaccaggaatttgagaccagcctgggcaacatagtgagactcagtctctattaaaaaataattagctgggctgggcgtggtggctcacgctgtaatcccagcacttttggaggccgaggtgggcggatcacgaggtcaggagatcgagaccatcctggctaacacggtgaaaccccgtctctactaaaaatacaaaaaaattagccgggcgtagtggcgggcacctgtagtcccagctacttgggaggctgaggcaggagaatggcatgaacccaggaggcggagcttgcagtgagctgagatagcgccactacactccggcctgggtgactgagcgagactccatctcaaaaaaaaaaaaaaaaaaaaaaaaataataataataataataattagctgggtgtagtggtacatacctgtaatcctagctacttgggaggctagggcaggaggatcccttaagcccaggagttcaaggttacagtgagctatgattatacccctgcactctagcctgggagacaagaccaagaccttgtctctaaaaaaaattttttaaggccagccgtggtggctcacacctgtaatcccagcactttgggaggcagaggcgggtggatcacaaggtcaggagtttgagaccaacctggccaacatggtgaaactctgtctttactaaaaatacaaaaaatagccaggcgtggtggtgcgcacatgtaatcccagctacttgggaggctgcggcaggagaattgcttgaacccaggaggtgaaagttgcagtgagcccagatcgtgccattgaactccagcctaggcaatagagtgagactctatctcaaacaaacaaacaaaaatttaatctgctataatagatactaatttattttaagaaatacttagtgaatgttgttctacatacttgccaattgggaggaaaaaagaaatattcactaaatgaatgaatgttatacaccaagtatctccttcattttatgtcatggagttctagcttctgatatcacagaaatatgtgatttctaaaatgtttcagactattgtgataagtattggaaaatgcatcaagtgactctaaatatttaaacatacatcacctatatttcatataatcctgattcaataatatttctatagattttttatgcaatttggtaattttgtttgtttgaaacacagtgctatttcatatatttctattgataatccaatttgacctaattaggcatatttctcacacatggtattattgaacatattgcacatttattaaatgatatgtattttacttaagagtactttatataatctataatttttgtaatttgtacttataataaatcaaatattaagtgggattttagccaaaccatctagacatttttgtcataatgtttttattaaaacagcaaaataggagtttcaaaatattttaaaatttgaatacttctaaaatgtaaaatgtttgcaactggtgtaatgcagttgattgtctatccctctaaactgtctaaataacttaggttcaagaacagtttattgaagaacataggaactgcgcaattctgtgttttatcatttcagttttaatcaccccggcttgattatggcaacaacattttagacaagcaattattactatttttgaggcccatatactgggccattatggttttgcttctaacgtacatataaatgcacatgcaatatatataaattatgtttgctgttttaaaattagaaatgccgagaagctatgtgtttgacattttattataaattttgtacacacatagatgtatggaaaatatactatgttctagagtcaacaattgttatcattttgccatatttacctcatctctttttttttttttttgagatgaaatctcattctgttgcccaggctggggtgcagtgacgcaatctcagctcactgtaacctctgcctcccaggttcaagcaattctcctgcctcagtcccctgagtagctgggactacagatatctgcctggctaatttttgtatttttagtagagatagggtttctccatgttggctaggctggtctcgaactgctgacctcaagtgatccacctgcctcggcctcccaaagtgctgggattatagatgtgagccaccagcctgggctacctcatctcttttttatgaagtttttatttttattttttaattttttttttaatttttttttttttttgagacagcgtcttgttctgtcacccaggctggagtgcagtggcatgatctcggctcactgcaacctccacctcttgggttcaagtgattcttctgccttagcctctcgagtagctgggactacaggcgcttgtcaccatgctagctaatttttggtatttttagtagggacggggtttcaccgtgttagccaggatggtctcaatctcctgacctcatgatcggcccgccttggcctaccaaagtgctgggattacagacatgagccactgcacccggccagttttttattttttatttttttgagacaaggccttgctctgtcacccaggctggagtgcagtggcaagatcatggctcactgcagcctacctcctggactcaagcaatcctcctccctcagcctcctgagtagctgggactataggcacatgccaccatgcccagctagtttttttttttttttttagagatggggtctccctgtgttgcccagcctggcctcaaactcctgggctcaagcaatccttctgccttgacctcccaaagtgctgggattacaggcaggagccaccctgcccagcctgaagtattttaaagtaaattccaactaatataacattttattctcatgtacttccagcatgtgtctctaaaaatagacatttttatatataacctaataccatcattacatatttaacaataattctttaatcttctcattctcaggtatatttaaattttcccattaatccaaaaaagaatcaaaattgaaacaatttcacacattgcatttggttaagcctcttaaatctcttttactctctagtccagtgctgtctaatagaacttctacagtgatgtgaaggaaatatctaatatgctgctatccactatgatagccagtggcttttgagcacttgaaatatggcaagtgctgctgaggagcagaattttcaatttgaattaatttaagttgctttaatttaatagccacatttccttactctcttactggaatcagccatttccccatggtgctctgaatcctcttagtgagaaatggtacatagacaccaaaatcagggtgctaagtctgtccattgttatgtggtttgtcattgagatacaaataattttttttgttttgttttgagacagagtctcactctgtcacccaggctgcagtgcagtggtacaatcttggcttactgcaacctccacctccttggtccaagctattctcctgcctcagtttcccaagtagttgggattacaggcacccaccaccacactcagctaattttcgtatttttagtagagacatggtttcaccatgttggccaggccaggctcaaactcccaacctcaggtgatctgcctgtctcagcctcccaaagtgctaggattacaggcgtgagctgccacacctagccaagactcagtgaattttaataatccagagctctccatgtatcccctaatctataatctacagtgcttaaatagaggcttttataagccattatgtacactcatgttatgtttgtttttttaattacttagtctttttccaaaaggaatttgcaacagctacataatcttataattgttatgtttcttttatattttcacagttgttttaattttaaattgtaaaagcaaacaggatattcttataataaaaatgttctgagatgtttttcatatttgtgtctttcatgtggctcagaatatatgagattttcatgtcatatcattgtcagtattcagccttttctccacattgtgtggggtagaggatagagtctagaagcttataaaatggtcacaaatgaggaagtagagaaaacattcagcctagaaagcgtgcatttgtggtatgaaaggcactgtggaatgctgctggattctgcccttcagtagttacccgagagagaccgaggcagacgcatagctccctcctcagcaaggagaaaagagttgcctgctttcctcagcgtgctttccatttcctttgttttgaaaaaagcacattatgctaatcaactttccttaaggtagacatttttattggtagatcaaaaaccgtgctttaagttataagccttctgaacttctgtatttttctcttaaattataatttccttttattcctatttaaaacccaagtgtaaaagatgtgttcataggctttctactcactcacttgcctgtttttcgtaaccacagaatgacagccttaaattttaatttcctgacttggcttgcccatggcctgacttttttaaaacaaggagtttaagttaaagaaatttctccagccattattatttaaacacatttacacagtatcaaagaatttaaaaatgttgctagcagttgatactcccctcagctttctgttcagcgtgttttagattgctcctattttgttatttgtctatgaacttttatatttttcaaaaaaataaggcaagccctttttgcctgataggcactgctgagcagtataataaacaagcatgggggcaacagaacctgggttccaggctagactccaccgttttcaaacggcatgactttaattcatcaagtgaacacaattaagcaaagtataagtttgggaccatggaatatccttcactcatcacacaggttactgtgaagatcaaatggatataatattgctttcaagatggcggcacacttgccactatacacaggtgatattattaggcagagtcgccacatagtccctgtccttgaaatgcaggcaaggagccctcaccaaaggccagggtggttttttgtttttcgggtttttgtttgtttttttcattgtggtatattatttcctctggcatgctattccctgtcccactcttacagaactgtgtcagtgggtcaccaaaagagagagctgattcaactgattccttgaaataaaggtagtcagacctcgcggtatgatggagatgaagcaactgatttactggttttctctatttttctgctgttcgtgttgtcatttaaacagacatggaaaccgtctgcacacgacagagatctttccgagcctttttcatctagtgtgctgtgctgacccgctcccctggatgcctgcacactcatttggttctcccttttggtcacttttttccacttaccctggcagaaattcacgtggctgtcagtagtaattcagtgacctgctttcaaaaaatgttataaattaagcagcttttctgtgtatagcttttgggttgaactgagaagggctaagtgaagggagaagctatgttgagctcagagtcagaatgccctgccccagacattttgagatgtgaatttttcatttgttttgtttggtgacacttagagagaataaacattctgagataaaaatcttccttgggcaggccagcaaagatagaattgctttagagcaatttggcacttggtcttaatcttaatagtttggaactcatatgtgactaaggaaaaggatattgcaaaaagttgtgccaccctaggctatatgatataaacttagaaagtctatcaacgtgaaaggtgaagagacctctagagacatcggggacaaactccaaatttgggaaaggtccatccacatttgcaattgttagttaggcttgggaagtggagtcattggtggatgaggcaacttccaatcaccatctcgatttttatttccctaacttttaagattattttctatagaaaatcagtagtgctgaagttggagtcatttaattgatttgtgccaacctagggaagcatttactctcgagaaaagtttggtaaccattaatcttaccttagcaacatttcagtttaagcttatctctgactttccaaagacaactaaagatttctacagtctctcttataactgatccattttttcaaaagatgtccctttgggaaggaattctcatttttagaattttagtccagaggaagtatttttttttcagataggtgaaataggataagcagaaaattcttattttttactgttttagataccattgatgccatgcttattttaaaacaaaacacaataaaaacatgataccatctgatgagttgctttggttttactttttttttttttttttttttttttttttttagtttatacaagtttcttattaggtcagcaaattgtaaaacacataatttgccaaggcttttgaagccagcagatactgggtgaagttgctgtatgaatataataataagaaccgtttttgttcagcttgatgaaaaaactattcatgttctaaatgaaaatgtgaagatcatctaattctgacagaaaaccacctgtggacatggtcttgtttctttttatttcttctgttttctacaaaagatggcaatatttatttaaagtgctttaacaggatatcccagttaaagctttgacagactgtttatagttcacttctgcccaggggcaattaaaggcacattacaggataagcgagatgactccccggccacaggaggaggatgtgtgggtaggattattaatgttgaaatgaattatgatagagtgacatgtctgcaagagcaccatgggttagtaacttaacaagaattcatatgcagaaacccataattctcagcagttctttagggtaaatgaaactaaagtttagggagagagaacaaggagaatttgcaaagatatgtatgacagtatttaaaaatgttcttccagcacaaagacattaatcttcctttgtcaaaataattctttctgcatgaaaagttggcatggggctcccaggcttcaggtaagatgggagaaagggagcgtttctttttttttgtaccaaagtactcaatcttctgatcttccttgactttcacgacataggcatatgtctactctgaccagtttgtttcatttattgtggtaagatgtgcttgtcttgtgctttcctggtgcagaaaaggagctgcctcgctcatgcttggtggcctttttgttcctacacacagtggttctcgtacatggtggctaccacatcctggtgtttgtctatactgggagaatcaggcgttccaagtcatcttggctgccctagctctgagcttcaggggatatatgactcagaaatgctatgctttctggaatttggatatttcatttttatttgtttcttggtaaattctcttttgacttaggagaagctaactatttggaaaggtctctcagaactctaattacaaatatatggtaccttctttatattgatctcatttttaaatacctagtcctggaggaagagctaaatatgaatacagtgatgagctgtgtaggggatctcacaggaacacagtcagatttcaagttgaaaatagattcagttgataatacttagtactagattctcctgaatcgactttgggaattctgagtcaacctaaggactatattacaaaggatcagaccttgacttttaggccaggtgtagtggctcatgcctgtaatcccagcactttaggaagccaaggcaagtggatcacttcagtccaggaggttgagaccagcctgtgcaacacagcgagaccctgtctctaccaaaaatacaaaaattagccaggtgtagtgtagcacctgcctgtagtctgagctactgaggaggctgaggttggagaatcaactttaaccccggatatggaggctgcagtgagctgtgatcatgccagcctgggcaaggagcaagaccctctctcaaaaacaaaaacaaaaaagacacagaacttgacttttaacaggaggcatagtaatagcaagcataagattgttttaacatagcatttaagataatttacgcatttagaaaattaattctggctggttgtagtagcttatccttaatcctaaccctatgagaggccaaggcaggaagatcacctgaggccaggagtttgagaccagcctaggcaacatagcgagacccctgctctctacaaaaaattttttttaaaaaacatagctgggcatggtgacacactcctgtagtcccagctactcaggaggctgaggcgggaggcttgcttgaggccaggagtttgagggagctgtgatcacgcccctgcactccagcctgggcaacagaatgaggccctatatctaaaaaaaagaaaaatggacaagaaaattctatactgattgaagcccagctaaatagaaaaaaaaaaattctaataggccattttaaagactttggaaaaattcttagctagagtaaaacagaagcaatcctttctttcctggttctcacatctccattctcaccttcattccccttcccctccatttgtttcaagtatttttcttttctatgtgtgtctttatgtaaatttaaatttacctacaagatattatgatattaagatatttcattctgcttcctgttttgtcacttgttctttaagatccaagtccttggctccatgtgcatctaatccttgccataagccctgcatcgtacttcatattcaccatattgaactattcaccctcaagtagtcactattaaatgtcacactgttgtagcgactacaaatgcaagctcagtaactgaaaagataacattaaattttgttttttaattggtttcctgtgtcaatttcatgtttcgggaatttgtatggacagatagacaccagagagatatgcgtatttcacctgcatgcttgaggctagagaaacatgatttattcagaactatttcaaatactgtaactaacctggtaattttgtttaggaaaacattaaattcggaatagaaggcaattcagaatacctgtctgttatctttgtcttgtcatttttgagatactcagttcctggaaaatattatgataatccatcttgctatgtagtatttcaagttatatgttgagcctctgagcttgcagagtgaacatttctattcatagacagtgctgttgacatcagtggggagatggcacaagctttgtgccctaggaaagtttaaaagctagaacattacactgcaaaccctatgtcaggaaactttgttgcagcaactaggcaaggaaaccctaccactgtacccataccttgttttagtagaattatgtttctttgctaagaagtctggtgactctcacaccccatctcagcactttcctggattccaaggccctggtgccctgagcacacaacttcccaggttccttttattgttcctgataagaactcgaattagaggcagcgtctggtactcaccaggggtgtggtcccatgggtgacattcttgctccatcatttcttacccgggtaaccttgagtatggcgcctaaatcctctcttcctttcaaattgcctggtctgtaaaatggatgcagtgaatggtagctatgccacaggtgttttgtgtgagaattaaatgagaggagttatatcaataacacttagaggcatgcggtgcctatagtgagggcttgttttatgttgtcgtttaaccctttctttctcagccctcccccactccacatcccctcccactggcaatgtacaaattgcagcttcctgcctctttcctgctatctcgctccctggatgacatccctgcgtttccacctctctctcccctaatcttagctgttttcaccctttcccctaatcttagctgttttcaccctttccccacagcattgccttgacagttcctcagtgtcccatcccctcttcccatggacaacaccacaaacctgcgcacacggcctgttattattcctcctgtttcacctgtgtccattctgtctcataaaggacactgtaggctctgaacagctaaggcctttcttattcttttgtcccatggaaaataatccctccagatagcaataccaggaatagtgccttttctaacccactggtttccttttgagcttacagccaccaaatcttatatctgtttgtttctgttcccctctctgcattgactgctagagagatcagagtcaagcaggaggttacatctagctggggcactgtgctttatgctggtgtttcgtgtgcaaatctcataccatcttcatgttacagttgttccttagtgtccatgggggatttgtttcagaacccgcaaggacaccaaagtccagggatgctcaagtccctgatataaaatagcattgtgtttgcatataatctacacacatcttaccatataattttttttattatttgtatacattcgtggggtacaagtgtaattttgttacatggatgtattgcatagtggtcaaagtcgaggctgtgagtgtatttatcgttggaataatgtacattgtacccgttcattcctgtatactttaagtcatctctagattacttataatagctaatacaatgtaaatgctatggaaatagttgttatattgttaggggataatgacaaggaaaacacctatacatgttcaatacacagcaattatttttttctgaatatttttgatctgccattgattgaatctatggatgtggaacccacagatatgggacccacagatgcagagggccaactgtgtttattttttccaaatttgtttccctgttatgactcttctttatacacatttttaaactctgttgtcttgtatttgttttctgatcatcttacgtccttttggaaaccaagtggggcataaatagtacatgtttgcatttgaggcaacacagaggcatcgcaggagctggagacagcaaagttcaaagccagtccaccacttacctacagagtggccttgggcaagttacctccattttctgtctccattctcgagcctgtctagagagagaatgaacctgcctcccgaggtgatggtgctgttttaatgaaataatgcatgtgaaatgtgaagtgccactgtccctggcatggagatgctgtccttagatattaggtccatcttgtatcttctagtgtatctttaaaaattaaactatactggcttcatgcctgtaatctcagcactttgggaggccaagaccggcagatcacttgagtccaggagttcaagaccaacctgggcaacatggtgaaaccctgtctctacagaaaatacaaaaattagtggggcttggtggcacgtgcctgtagtcccagctgcttgggtagctgaggtaggaggatcacttgagcccaggaggctgaggctacagtgagctgtgattgcaccaataccgatcagcctggtatgacagagcatgactctgtctcaaaaaaaaaaggaaaaaaattaaactatactgataaatatttctaaagtaattgatgaaaacatatatatgacacttagcaggtgttgatcaattccagtgcgtgcatgagctgctttgcactgtggctacagcactcagcagtttgcttagtgagtagatggccatagctcactttaggtatctggagaataatgctcattcctgtctccagctttgtaaaattgcctaatagacggaaggcattaaaatatgaagatgggattatatcttatgaagctgcttggaatgggttttccctcttaacaaataatttctgatcatccatatcccttaagaacaccggatttctgggggccagggaggtaagattctatctgacaaagccttcctggtgtcaaccacttgccatctgttggtcagtgctggccctgctgggtctatagaatgagcttctttgtctgacgctcctgttgccatccctttctccatcagccttgtagcagtacctgggaacctgcatcctgtggaaagatggaggagcagatgacatcttccagtcaagctcgtaaatacgtgaatgcattctcagcccggacgctggtcatgtgagacatttccagaaaagcattatggttttcagaacacttcaagttgacttgggatatatcattcctcaacatgaaacttttcatgaatgggagaagaacctatttttgttgtggtacaacagttgagagcagcaccaagtgcatttagttgaatgaagtcttcttggatttcacccaactaaaaggatttttaaaaataaataacagtcttacctaaattattaggtaatgaattgtagccagttgttaatatcttaatgcagatttttttaaaaaaaaacataaaatgatttatctgtattttaaaggatccaacagatcagtattttttcctgtgatgggttttttgaaatttgacacattaaaaggtactccagtatttcacttttctcgatcactaaacatatgcatatatttttaaaaatcagtaaaagcattactctaagtgtagacttaataccatgtgacatttaatccagattgtaaatgctcatttatggttaatgacattgaaggtacatttattgtaccaaaccattttatgagttttctgttagcttgctttaaaaattattactgtaagaaatagttttataaaaaattatatttttattcagtaatttaattttgtaaatgccaaatgaaaaacgttttttgctgctatggtcttagcctgtagacatgctgctagtatcagaggggcagtagagcttggacagaaagaaaagaaacttggtgttaggtaattgactatgcactagtatttcagactttttaattttatatatatatacattttttttccttctgcaatacatttgaaaacttgtttgggagactctgcattttttattgtggtttttttgttattgttggtttatacaagcatgcgttgcacttcttttttgggagatgtgtgttgttgatgttctatgttttgttttgagtgtagcctgactgttttataatttgggagttctgcatttgatccgcatcccctgtggtttctaagtgtatggtctcagaactgttgcatggatcctgtgtttgcaactggggagacagaaactgtggttgatagccagtcactgccttaagaacatttgatgcaagatggccagcactgaacttttgagatatgacggtgtacttactgccttgtagcaaaataaagatgtgcccttattttacctacttttgttttctctcttatttgtcactatggacaacagttacactttaaagaaaatggagcagactcaaagcactttcctctaataattgcacaccatatgcacttcgtgtgaagaagccaggaatcattacaatggagaagaaagaacaagcaaactgagttaaatagttcacaaacaatcacatggacaatggggaggaatcttccagaatgcatcagtcagggtctagcggcatttgagtgcggatgctgtaaggggaattcgttcacaaatgtactgataccacagatgtgggcaggggctaggagagcaacagggtgcagcctgaaggcacctggaaggccgcctggagggggacagtcaggaaagcaggagcccttgagaggagcactagcctttgatgagaccactgccatcgaaggagacctcacagggagggagccaagggtaaaccctaactttgtttccccatttctcctatctctgcctaggggtcctcactggcagaaccaaccagaagctggaggacaagggagctc

SEQ ID NO: 1456 - DNA, 3202 bp, Homo Sapiens
ctgagacaccgcagcttccctgagcgccgagtccctccggggacagcagcagggagcgcccgcgcagccaccgagcctctgcccagccaagccgccgtcgccgcgccgggggaccgccagccatggccgcgccgggggatccgcaggacgagctgctgccgctggccggccccgggtcccagtggctcaggcaccgaggggagggggagaacgaagcggtgacgccgaaaggggccacgccggcgccgcaggctggggagcccagcccggggttgggcgccagggcccgggaagcggcgtcgcgggaagccggctcgggccccgcccggcagtcgcccgttgccatggaaactgcatccacaggtgtggcaggtgtttccagtgccatggaccacaccttctcaacaacatcaaaagatggggaaggatcgtgttacacatctctcatttctgacatctgctatccacctcaggaggattctacatattttactggaattcttcagaaggaaaatggccacgtcaccatttcagagagccctgaggagctgggtacacccggcccctccttaccagatgtgcctgggatagagtctcgtggcttatttagttctgattctggaatagagatgactcctgcagagtccacggaagtgaacaagatcttagcagaccctctggaccagatgaaagcagaggcctataaatacattgacataaccagacccgaggaggtgaagcaccaagaacaacatcaccccgagctggaagataaagacttggactttaagaataaagacactgacatctcaattaaacctgaaggagtccgtgaacctgacaaaccagctcctgtggagggaaaaatcatcaaggaccatttattggaagaatccacatttgctccatacatagatgatctctctgaagaacagcgcagggctcctcagatcaccacccctgtcaaaatcacactgacggaaatagaaccttctgttgaaaccactacccaagagaagacccctgagaagcaagatatatgtctaaagccaagtcctgacacagtccccactgtcactgtctcggagcctgaagacgacagcccaggatctatcacccctccatcttctggaacagaaccatctgctgcagaatcccaggggaaaggcagcatctccgaggatgagctgatcaccgccatcaaagaagcaaagggattatcgtatgaaaccgccgagaacccacggccggtgggccagctggccgacaggcccgaggtcaaggccaggtccggaccgccaaccatccccagccccctggaccacgaggccagcagcgcggagtcgggggactcagagatcgagctggtgtccgaggaccccatggccgcggaggacgcgctgccctcaggctatgtgagctttggccacgtgggcggcccgccgccctcgcccgcctcgccatccatccagtacagcatcctgagggaggagcgcgaggccgagctggacagcgagctcatcatcgagtcgtgcgacgcctcctcggcctcggaggagagccccaagcgggagcaggactcacccccgatgaagcccagcgccctggatgccatccgggaggagactggcgtccgggccgaggagcgtgcgccaagccggcggggcctggccgagccgggttccttcctcgactacccctcaactgagccccagcctggccccgagctgccccctggagacggagccctggagcctgagacgcccatgttgccacggaagcctgaagaagactcgagttccaaccaaagtcctgcggccacaaagggccctgggcctctaggtcctggcgccccgcccccactgctgtttctcaataagcaaaaagctattgacctgttgtattggcgggacatcaagcagacgggcatcgtgtttgggagtttcctgctgctgctcttctccctgacccagttcagcgtggtgagcgtcgtggcctacctggccctggccgcactctcagccaccatcagtttccgcatctacaagtctgttttacaagcagtgcagaaaaccgacgaaggccaccctttcaaggcctacttggagcttgagatcaccctttctcaggagcagattcagaagtacacggactgcctgcagttctacgtgaacagcacacttaaggaactgaggaggctcttccttgtccaggacctggtggattccttaaaatttgcagtcctgatgtggctcctgacctacgttggcgctctcttcaatggcctgaccctgctgctcatggctgtggtttcaatgtttactctacctgtagtgtatgttaagcaccaggcacagattgaccaatatctgggacttgtgaggactcacataaatgctgttgtggcaaagattcaggctaaaatcccaggcgctaagaggcacgctgagtaaactgatttcccaccggggactggacacaaacaggaatgtctggagtggtaacagctctcttcttactcattactgcaaattgattgtctttcccccctccctccagtaccataatcttagagacaaaccttaaaacagctgtttttaggctgttccttgtactcttaggatatttgagtcacttgtgtcaaccactaaagtatagagaaaagtgtattagatgtggtttttaattttgtgttgctaaaaaaagtgcatgatggtgagagcccaagttatctttccctcttcggtgttcttcttctcttctctgcaatgcttctgtagcttctaatgttccccgtggctaggcctttcctgccgagtgctctgatgcaatagtggaaatcgcttatatgtccttgggttgctggttggattaatctttaataacaatatatagaattgtagactgatgttttagcatttttccaacacacacaacgtaaaaataaaagcagtcgaccgcacttatggtaatcagttttgtataacttaaaataattaaataaatgaataaatccaaaacaaacatgcagtacttttgttgtatgggattggtgggctgatttacatgtatggttactaaaaagtaccagcatgttaactttattacaatttgtattactttctctgtagttcctaatggattcaattacggactctggatatttgcacttatgtacttgatactgaatgcataaataaat

SEQ ID NO: 1457 - DNA, 428 bp, Homo Sapiens
cgacgccttttccccttaattcgcaaacccttctttcttttctttttagcgggctgttttgcctctttattcactccttctgctaccatcttttcctctaccacatcttcttcatctgtattagaattaataggaacacatcccagaatcccagaatcactaaaagtgttgcatcttctgccaggagagagtgaagaaactggtacacttagagtacatacactcattctctttatgtctccacaattcgtaccagaatctgttagtgggtttattactcaagcagaaatacagctgttcctctctacttgcattaccttttctccagtttctatggggaatcaaattcccactggaccaataacttccaagccaggttatttttggaggaaaactgacagcaatggagaacattcccgaactctttc

SEQ ID NO: 1458 - DNA, 1637 bp, Homo Sapiens
aatattctgcttttcctgttatgtgtttcagatttttctacaccaccgccacactcatcatagccttcacctctgcaggctcagccgtgctgctcttcctggccatgccaatgctcaccattgggggaatcctgtttctcatcaccaacctgcagattgggaacctatttggccaacaccgttcgaccatcatcactctgtacaatggagcatttgactcttcctcggcagtcttccttattattaagcttctttatgaaaaaggcatcagcctcagggcctccttcatcttcatctctgtctgcagtacctggcatgtagcacgcactttcctcctgatgccccgggggcacatcccatacccactgccccccaactacagcataggcctgtgccctgggaatggcaccacaaaggaagagaaggaaacagctgagcatgaaaacagggagctacagtcaaaggagttcctttcagcgaaggaagagacccaggggcagggcagaagcaggaactccgctccttctggagctacgctttctctcggcgctttgcctggcacctggtgtggctgtctgtgatacagttgtggcactacctcttcattggcactctcaactccttgctgccaacatggccggtgggacatggcacgagtcagcacctacacaaatgcctttgccttcactcagttcggagtgctgtgtgccccctggaatggcctgctcatggaccggcttaaacagaagtaccagaaggaagcaagaaagacagggtcttttaacatccgaggaccacattctttatactttccaaatcatcacctgccccatgcaacttacagggataaagccaagatgaaactccccttacttctggctcttctatttggggcagtttctgctcttcatctaaggtctgagacttccacctttgagacccctttgggtgctaagacgctgcctgaggatgaggagacaccagagcaggagatggaggagaccccttgcagggagctggaggaagaggaggagtggggctctggaagtgaagatgcctccaagaaagatggggctgttgagtctatctcagtgccagatatggtggacaaaaaccttacgtgtcctgaggaagaggacacggtaaaagtggtgggcatccctgggtgccagacctgccgctacctcctggtgagaagtcttcagacgtttagtcaagcttggtttacttgccggaggtgctacaggggcaacctggtttccatccacaacttcaatattaattatcgaatccagtgttctgtcagcgcgctcaaccagggtcaagtctggattggaggcaggatcacaggctcgggtcgctgcagacgctttcagtgggttgacggcagccgctggaactttgcgtactgggctgctcaccagccctggacccgcggtggtcactgcgtggccctgtgtacccgaggaggctactggcgtcgagcccactgcctcagaagacttcctttcatctgttcctactgagctggtcccagccagcagttcagagctgccctctcctgggcagctgcctcccctcctctgcttgccatccctccctccacctccctgcaataaaatgggttttactgaaaa

SEQ ID NO: 1459 - DNA, 3090 bp, Homo Sapiens
gaattccgggcccggatagccggcggcggcggcggcggcggcggcggcggcggccgggagaggcccctccttcacgccctgcttctctccctcgctcgcagtcgagccgagccggcggacccgcctgggctccgaccctgcccaggccatggccggcaacgtgaagaagagctctggggccgggggcggcacgggctccgggggctcgggttcgggtggcctgattgggctcatgaaggacgccttccagccgcaccaccaccaccaccaccacctcagcccccacccgccggggacggtggacaagaagatggtggagaagtgctggaagctcatggacaaggtggtgcggttgtgtcagaacccaaagctggcgctaaagaatagcccaccttatatcttagacctgctaccagatacctaccagcatctccgtactatcttgtcaagatatgaggggaagatggagacacttggagaaaatgagtattttagggtgtttatggagaatttgatgaagaaaactaagcaaaccataagcctcttcaaggagggaaaagaaagaatgtatgaggagaattctcagcctaggcgaaacctaaccaaactgtccctcatcttcagccacatgctggcagaactaaaaggaatctttccaagtggactctttcagggagacacatttcggattactaaagcagatgctgcggaattttggagaaaagcttttggggaaaagacaatagtcccttggaagagctttcgacaggctctacatgaagtgcatcccatcagttctgggctggaggccatggctctgaaatccactattgatctgacctgcaatgattatatttcggtttttgaatttgacatctttacccgactctttcagccctggtcctctttgctcaggaattggaacagccttgctgtaactcatcctggctacatggcttttttgacgtatgacgaagtgaaagctcggctccagaaattcattcacaaacctggcagttatatcttccggctgagctgtactcgtctgggtcagtgggctattgggtatgttactgctgatgggaacattctccagacaatccctcacaataaacctctcttccaagcactgattgatggcttcagggaaggcttctatttgtttcctgatggacgaaatcagaatcctgatctgactggcttatgtgaaccaactccccaagaccatatcaaagtgacccaggaacaatatgaattatactgtgagatgggctccacattccaactatgtaaaatatgtgctgaaaatgataaggatgtaaagattgagccctgtggacacctcatgtgcacatcctgtcttacatcctggcaggaatcagaaggtcagggctgtcctttctgccgatgtgaaattaaaggtactgaacccatcgtggtagatccgtttgatcctagagggagtggcagcctgttgaggcaaggagcagagggagctccctccccaaattatgatgatgatgatgatgaacgagctgatgatactctcttcatgatgaaggaattggctggtgccaaggtggaacggccgccttctccattctccatggccccacaagcttcccttcccccggtgccaccacgacttgaccttctgccgcagcgagtatgtgttccctcaagtgcttctgctcttggaactgcttctaaggctgcttctggctcccttcataaagacaaaccattgccagtacctcccacacttcgagatcttccaccaccaccgcctccagaccggccatattctgttggagcagaatcccgacctcaaagacgccccttgccttgtacaccaggcgactgtccctccagagacaaactgccccctgtcccctctagccgccttggagactcatggctgccccggccaatccccaaagtaccagtatctgccccaagttccagtgatccctggacaggaagagaattaaccaaccggcactcacttccattttcattgccctcacaaatggagcccagaccagatgtgcctaggctcggaagcacgttcagtctggatacctccatgagtatgaatagcagcccattagtaggtccagagtgtgaccaccccaaaatcaaaccttcctcatctgccaatgccatttattctctggctgccagacctcttcctgtgccaaaactgccacctggggagcaatgtgagggtgaagaggacacagagtacatgactccctcttccaggcctctacggcctttggatacatcccagagttcacgagcatgtgattgcgaccagcagattgatagctgtacgtatgaagcaatgtataatattcagtcccaggcgccatctatcaccgagagcagcacctttggtgaagggaatttggccgcagcccatgccaacactggtcccgaggagtcagaaaatgaggatgatgggtatgatgtcccaaagccacctgtgccggccgtgctggcccgccgaactctctcagatatctctaatgccagctcctcctttggctggttgtctctggatggtgatcctacaacaaatgtcactgaaggttcccaagttcccgagaggcctccaaaaccattcccgcggagaatcaactctgaacggaaagctggcagctgtcagcaaggtagtggtcctgccgcctctgctgccaccgcctcacctcagctctccagtgagatcgagaacctcatgagtcaggggtactcctaccaggacatccagaaagctttggtcattgcccagaacaacatcgagatggccaaaaacatcctccgggaatttgtttccatttcttctcctgcccatgtagctacctagcacaccatctccctgctgcaggtttagaggaccagtgagttgggagttattactcaagtggcacctagaagggcaggagttcctttggtgacttcacagtgaagtcttgccctctctgtgggatatcacatcagtggttccaagatttcaaagtggtgaaatgaaaatggagcagctagtatgttttattattttatgggtcttgagtgcatttgaaggtg

SEQ ID NO: 1460 - DNA, 344 bp, Homo Sapiens
tttttttttttttttttttttttgtgttgcagaatttttattttgctgtataaacactgcacaataattagggaagaataattcatttcaaacttaatataactttcaaatctatcccctggttcatacaatataaagataagcaatcagcaacagttaaacaatcagcttgatgagcttttggccaagtgtgttactttttttttttcaaaaattactaaggtgatatcatgaataaacacaatagaataaattgatgaaattcacgagtagtcctgtgactagtgcttatgtaacagatccataaacgcatctataaataacaacaataatattatcagatg

SEQ ID NO: 1461 - DNA, 633 bp, Homo Sapiens
tggggtccggagaagggctcctgggcctcagccccgggcctaatggtcacagccacctgctgaagaccccactgggcggccagaaacgcagctttgcccacctgctgccctcgcccgagcccagcccagaaggcagctatgtgggccagcactcccagggcctcggcggccactacgcggactcctacctgaagcggaagaggattttctaagtggctggcaccagagataactcaagggcctgcaccaaatcgcttttgggttttctgatgttttgttttgtgttttttttaaaccattttctctctttcggtaatagaaaaatctctgaaagactttactgaccaatcagccggagccccaggagcccaaggggtgtgggggagtctggaggcctcattatgtctctggcttgctccccacgctgaaaccctgcagccttaagagagaggggccccggcctgctctccctcgctccccccatctcctcctccgctgtgcccgtctctccggagccctcctgcctcattgctcctgtaatttgggcctttcgagtgccttggaggtttccctgacctcccgtgaagatacagagactgtctccttttttttaactttgacactgacttctgt

SEQ ID NO: 1462 - DNA, 2315 bp, Homo Sapiens
tttttttttttttttttttagcaagagcaatacaaaggggttatataaatttatttttcatgtaacaattgattcagttagaaaaatttcccattttcaatgttaattccatctctcgtttttggaaaaaaatcactaaaaggacaaaaacccacagaaaaatacaatctgtatctgttctatatttacagataaccagtcattattaaggcgcagattaaaagttaacatttattcaaatcatcaaaatattttgtgcatcatataacaacaactctgtatactgtagtgtcatattcccttcattgcatcaagagaaagtgagagaaagaatttccagtgtttttatttattcttagccaccctacttaatctaatttaagtgggacagttttccctttggcatatcaaagcactgttcataaatcaacttaatactgcatattcattacttcttcctcctgttgcaaatgcatggtagacagctgggaaaagagctccaagattattatctgggaaggtcttattaaaagcataacaacatttagagtactgagttgttgaacaggacataaatctggtattgttaacctgtactacatgtttagcatgatgcattaatacaatcaaataagatggatgatcatcacatgatccacatgaccatttgtacacatatgcacaggatgagtaaagggagtgattcagttcaacatccttaagcagataaggcttagtttagcttaaaaagggcagtccctcggtgccagttataattgataattttatgacaggcccattatctatgccttcaaggtaaccaataccattttttaaagtgagaatgtttctgtgtgcaaaatgcctcttcaattcttgttcttactgtaatggtcagactcagccatggaaaagtgtcaggcaagtatttcttatcccatatttgtataaaagtacccaattcttgtatatgcttatctaatgccttctgctgagagcacgtgagagtggtttatgtccatgtagaaaatcttgactactgaacataaataactctttacagtacaggtaacttgacaacatttcctatgggaaagttttctaacaaattaatatacttggaaataatattgctttgaagaaagaaaggcactttagtgtttcttcatggattaaaaacacttcataaatctataagatctctgaaaagacccaggaaacaatgttgcctgatttcttggactttcacagtataagattgtaataatgactctagccacttaaaaagatatattttttttttccttcagaacttagctgtctttatgaactgccaccctggaggctcaaataagcctgttcattctcaacaaacataagtctacttcaagcagacagatacggtttcaggaaagtcctgtggccatacggaacatagctaacgtgtacatgataaggattgtaatctatttctccttataatggcaacagtgctgtcttgtcagatgattatttgtctttttaaataaagtgacaatctcgggctccagttattgaatgtcgtccattctctaccataaatctctagtaaatatcaatttcatcaattatgtactgtatgcttataatatctaaaaataaaagtttgatataaataaatgtcctttagtggcaatatactaaaaaacagccctttgcctccagacaaccattaaaatcattttagcattacaggcagcagctaagtatgacgactgcaaagggttaatactgcaaagtccatttggtctttctttgcacctattactgtgaactaggtccattgctaggtgtttctaggatgctaacatacatgaaacagaattggtccagaagcaagtggactcacttacatttcccaaaatcacagaatattctgcacagaaactaagatccagtaccatttcaaataaaagtttgatgcagtcagaaaaatgtgactaactcttatctgtaccaacatattaggtgacacaaaaatgagagagatggagacagcgagaacttccataggacaggaaattagaacgtgtaaagtgctgaaagaccacaataattattttaaagcagtaccagaaaattccactttgattattttttaaaaatccccaaatacccaaacaaaacaagcaaacaaaataacttctaagtcttctggcatcccagatgtcaattcatccttcattttaagtaaaaaaaaaaaaaaaaaaaaaaaacttatcgataccgtcgacctcgataatgatgatgatgatgatgatgatgatgatgtcgac

SEQ ID NO: 1463 - DNA, 689 bp, Homo Sapiens
cccgaccctaatatttctggtggtgatgtggctatgattgacaaatattctgtaaaatttctgcctgtctgcctctagaattctgcattatacaggcaaattttctttaaagctagagacttgtgctaaatttgcctgattttcatacagatatgctgtagtaatacagctaccttttcatttcatctttgtgctttggttaacaagcaggctcaagagactgctttgtgtaattaaatgaattgacctaaacatgagctgtcaggtgaatacttaatatttccatgcagatacagaattccatattgtgttcagtaaatttcttttggttcttcacagtgaagaaagaatgtttctaacctaacatttgtagaaggatactggaaaattccttccaggaaggaaggaaggaagatgccattacttggtgtatttatgatggatgaccacaaagctattgttctaccagttattaattaccttctaagatcttcagttactgctttattaatgtcactgaaattctaaaaaccaggacattcttcccccgttcattttatgcttcatggttgaaatttttctgtcagtgagtggaaaataaccatgagatacatagactgtagcgcaaatggaactgttgaaagttccttagaaagccagtgctgtggcattggagatacggagagagt

SEQ ID NO: 1464 - DNA, 351 bp, Homo Sapiens
tgttctcccaccaattttgttttctttcttaaatgatgtcccttaagtcatatcccagtaactttctatatatttctatattccaacattaatttttatgatgcattacttgatttgcccagaatgtattatggatatatgttcttatcacctttttttctccattaacctgatgtatttatttagccagatatgctgtttatcaacaaagaaaatatatgtggtttatccttgacctcacctggtctttatttggatgccggtagaatccctttctgagatctatagggagggtgggttatgtgcatagcttttgagccaaagtctaatgtttagattctagatactaaa

SEQ ID NO: 1465 - DNA, 1216 bp, Homo Sapiens
ttcggcacttgggagaagatgtttgaaaaaactgactctgctaatgagcctggactcagagctcaagtctgaactctacctccagacagaatgaagttcatctcgacatctctgcttctcatgctgctggtcagcagcctctctccagtccaaggtgttctggaggtctattacacaagcttgaggtgtagatgtgtccaagagagctcagtctttatccctagacgcttcattgatcgaattcaaatcttgccccgtgggaatggttgtccaagaaaagaaatcatagtctggaagaagaacaagtcaattgtgtgtgtggaccctcaagctgaatggatacaaagaatgatggaagtattgagaaaaagaagttcttcaactctaccagttccagtgtttaagagaaagattccctgatgctgatatttccactaagaacacctgcattcttcccttatccctgctctggattttagttttgtgcttagttaaatcttttccagggagaaagaacttccccatacaaataaggcatgaggactatgtgaaaaataaccttgcaggagctgatggggcaaactcaagcttcttcactcacagcaccctatatacacttggagtttgcattcttattcatcagggaggaaagtttctttgaaaatagttattcagttataagtaatacaggattattttgattatatacttgttgtttaatgtttaaaatttcttagaaaacaatggaatgagaatttaagcctcaaatttgaacatgtggcttgaattaagaagaaaattatggcatatattaaaagcaggcttctatgaaagactcaaaaagctgcctgggaggcagatggaacttgagcctgtcaagaggcaaaggaatccatgtagtagatatcctctgcttaaaaactcactacggaggagaattaagtcctacttttaaagaatttctttataaaatttactgtctaagattaatagcattcgaagatccccagacttcatagaatactcagggaaagcatttaaagggtgatgtacacatgtatcctttcacacatttgccttgacaaacttctttcactcacatctttttcactgactttttttgtgggggcggggccggggggactctggtatctaattctttaatgattcctataaatctaatgacattcaataaagttgagcaaacattttactt

SEQ ID NO: 1466 - DNA, 479 bp, Homo Sapiens
ccacaccagctgtcccactcaccatggagaagatcctgatcctcctgcttgtcgccctctctgtggcctatgcagctcctggcccccgggggatcattatcaacctggagaacggtgagctctgcatgaatagtgcccagtgtaagagcaattgctgccagcattcaagtgcgctgggcctggcccgctgcacatccatggccagcgagaacagcgagtgctctgtcaagacgctctatgggatttactacaagtgtccctgtgagcgtggcctgacctgtgagggagacaagaccatcgtgggctccatcaccaacaccaactttggcatctggcatgacgctggacgctccaagcagtgagactggccacccaattccacaccttacccaaaatgctgtaggccactaggcgccagggcattttttcccttctccaacgcatttcccggctggccaccttcttgaccaggatatttg

SEQ ID NO: 1467 - DNA, 492 bp, Homo Sapiens
  misc_feature (391)..(391): n is a, c, g, or t
  misc_feature (427)..(427): n is a, c, g, or t
  misc_feature (437)..(437): n is a, c, g, or t
  misc_feature (442)..(442): n is a, c, g, or t
  misc_feature (457)..(457): n is a, c, g, or t
  misc_feature (463)..(463): n is a, c, g, or t
  misc_feature (472)..(472): n is a, c, g, or t
  misc_feature (482)..(482): n is a, c, g, or t
tggggacaaacaacgcaggatataattgccaaaaccaggcttgaggttggtgactcttgaaagattttctttcttcaggcctagatcagaaaattaagtgcagcaatatcatgaattctcagaagccctttcagggagccagtgagtcatacagtatccacagttgagtcacttaaagatgtcagtatacgaaacattattcacaatccttgggcaatctcatttttttttccttctcccctcctcccctgccccccatacatttctatccttgagttagttttggaggggcaggaagtacttaacatctcaggaagctagattgggaaacatgctcagctataaggactgagctttaaattttggagtttaaaaatgtacatcagggagncagctgggggagggtcttttttttaaaaaaatcttncaaatttggntttcngtggcctatgggccntttgtnaattacttngggggttttncctttttttt

SEQ ID NO: 1468 - DNA, 382 bp, Homo Sapiens
  misc_feature (154)..(154): n is a, c, g, or t
  misc_feature (159)..(159): n is a, c, g, or t
cacacatagaccaaacttgtatacacacagacatctacactgacataccccatgtacacacacagatctagacgtgctccacatatgtgtgaatatgcgcacatacaggcctaccacaaacacaaaacccacctgcaaaggtttcacggaacgnggagnctctcctggcctcccgtccctcctcccagcctgtttgttgtgcctctgtagagagcgcttcggagagagaggcgaagtaggaagtgggattttctcttccctctcctgggcccgtttgcccctaccctcgcccagcaagctgcgcccaaattctattctgcctctggaaactgctggaccatccaaggtcagctgcctgccctgacccctaccccagggccag

SEQ ID NO: 1469 - DNA, 285 bp, Homo Sapiens
caattctcatgtattccacagcagcaaagtttagtaaacaatcatggggcctggaaaatgaggctttaattgtaagatgtcctagacaaggaaaacctagttacaccgtggattggtattactcacaaacaaacaaaagtattcccactcaggaaagaaatcgtgtgtttgcctcaggccaacttctgaagtttctaccagctgaagttgctgattctggtatttatacctgtattgtcagaagtcccacattcaataggactggatatgcggaatgtcaccata

SEQ ID NO: 1470 - DNA, 636 bp, Homo Sapiens
aagcttgcggccgccacttcctttccgcctcgccggtagggctcgcccaccgagtgaagccggccgcggccaatcgcggcgcccgcctgctcccagtggcacggcctgggggccggcgtccgccggggctggggaagccgttccaagttccaagggtcgcgggtgtaactcatgcccctcccagcacgcgccggcgtctccccttggcccccggtctgggtgcgtttgccaccctctcctccttgttccctaagaagcgggggaggggaaggaggcgggcagcctaggcagggcgccagagccgtggtcgggcaccaggtgaaacgcccgggtcagtctgtgtaggccggacccttggcgctcggctgcggatgtgatcccggggactggcggccgaggtagctcagaagagcgaggtggctttcgctcgtttctgacccgctactgtctgaaacttggggacatattgcccgccccctccctcttcaacctcctccctccggttgctccttgtccttgggtatggaaggaaaaaactcacttgttctaaatgaggaaaagtggtgctggcattcgtctttagccaccggcctccttatggctgggactcggtttgcttttgatgaatggccagtg

SEQ ID NO: 1471 - DNA, 419 bp, Homo Sapiens
cggccgccgcccccgcctcaggtgaaatgacaatggatgctctgttggctcgattgaaacttctgaatccagatgaccttagagaagaaatcgtcaaagccggattgaaatgtggacccattacatcaactacaaggttcatttttgagaaaaaattggctcaggctttactggagcaaggaggaaggctgtcttctttctactaccatgaggcaggtgtcacagctctcagccaggacccacaaaggattttgaagccagctgaagggaacccaactgatcaggctggtttttctgaagacagagattttggttacagtgtgggcctgaatcctccagaggaggaagctgtgacatccaagacctgctcggtgccccctagtgacaccgacacctacagagctggagcgactgcgtct

SEQ ID NO: 1472 - DNA, 458 bp, Homo Sapiens
  misc_feature (83)..(83): n is a, c, g, or t
  misc_feature (389)..(389): n is a, c, g, or t
  misc_feature (440)..(440): n is a, c, g, or t
  misc_feature (452)..(452): n is a, c, g, or t
gcaggaaagatgcagccactcctgcttctgctggcctttctcctacccactggggctgaggcaggggagatcatcggaggccnggagagcaggccccactcccgcccctacatggcgtatcttcagatccagagtccagcaggtcagagcagatgtggagggttcctggtgcgagaagactttgtgctgacagcagctcattgctggggaagcaatataaatgtcaccctgggcgcccacaatatccagagacgggaaaacacccagcaacacatcactgcgcgcagagccaatccgccaccgtcaatataatcagcggaccatccagaatgacatcattgttattgcagctgagcagaagagtcagacggaatcgaaacgtgaaaccnagtggctctgcttaggagcccagggagggactgagacccgggacggtgtgnactgtggccggntggggg

SEQ ID NO: 1473 - DNA, 2076 bp, Homo Sapiens
ggttaaatttttctgctacattgtctgctcagctcgtattctggtcatagaggaacctgaagccagagaaactagacaaaaaggaacctctttcaggagctataaaagaaagggaggaatcatgtccacaattgcagctttctatggcggcaagtccattctcatcacgggggccacaggctttctgggcaaagtgctaatggagaagctgtttcgcaccagcccagacctgaaagtcatttacatccttgtgaggcccaaggctggccagacactgcagcagggggttttccagatcctagacagtaagctatttgagaaagtcaaagaagtttgtccaaatgtgcatgagaagatcagagctatttatgcagatctcaatcagaatgactttgccatcagcaaagaggacatgcaggagcttctctcctgtacaaacataatatttcactgtgcagccactgtacgctttgacgacactctcagacatgctgtgcaacttaacgtcactgccacccggcagctcttgcttatggctagtcagatgccaaagctggaagcctttatacatatctctactgcctattcaaattgtaacctgaagcacatcgatgaagttatctatccgtgccctgtggagccaaaaaaaatcattgattcccttgagtggttagacgatgctattattgacgagattacacccaagctgatcagagattggcccaatatttatacctacaccaaggccttgggagaaatggtggtgcagcaagagagcaggaacctgaacattgccatcataaggccctccattgtgggagcaacttggcaggagcctttcccaggttgggttgataatataaatggacctaatggaatcattattgcgactgggaaagggtttcttcgggccataaaagctactccaatggctgtggcagacgtaattccagttgatacagtcgtcaatctcatgctagctgtaggatggtatactgcagttcacagacctaagtcaacattagtctaccacattacatctggtaacatgaatccctgcaattggcacaaaatgggagtccaagtcttggcaacctttgaaaaaatcccatttgagagacctttcaggaggccaaatgctaattttaccagcaacagcttcacatcacagtactggaatgcggtcagccaccgggcccctgccattatctatgactgctatctgcggctcactggaaggaagcccaggatgacaaagctcatgaatcggcttttaagaactgtttccatgttggagtatttcatcaaccggagttgggaatggagcacgtacaatacagaaatgctgatgtctgagctgagtcctgaagaccagagagtattcaactttgacgtgcgccagttgaactggttggaatacattgaaaattatgttttgggagttaaaaaatacttattgaaagaggatatggctgggatcccaaaagcaaagcaacgcttaaaaaggctccgaaatattcactacctctttaatactgccctcttccttatcgcctggcgccttctcattgcaagatctcagatggctcggaatgtctggttcttcattgtaagcttctgttataaattcctctcctactttagagcatccagcacgctcaaagtttaagagcatttagccatcgccttttatctggaacctctcagatacctctaaaacagcaaactgtgattctcaagattagaaagtaacaaggaatatgcccaaactgtcaaatgtcacctgttatgtattcgtccctattccttaactatgtatttttatttcagtgagagaaggaaagttgtaaactagcccatagtcacctatattttagggaaaaaaatccaaattgtttcctaacattctattttatgcccttgcgtattaaacgtgaaagtactcccacttttctatatttagtttttcttttctctctgagatgattcatttaaactcagtaaatatggaaagatgcatggcagaagctgaaatgagctcaagcagtactaaccttggaaccattctgggtaccc

SEQ ID NO: 1474 - DNA, 932 bp, Homo Sapiens
tgtctaggtatgagctgggctgaaaatcggccgaggctggccaacccatgttgcatttcagttcaggaaagaatggtaggcttggtggggggagctcccgcaaaaggggaactaatacagaaacactctggtattgtctgcctctcttgttccagcgccgttttccctatatccggaattcgtccctgcgcattccaatacctgaagcggccacagggtacaggacagggagccctccgacagaaaagagtcgcggcgctaaacaaagcctgatatcactccgcttccataagccggatccccataaactacgctctagctcctcccactgccgttgtgggtaacgcggacgtggaagaacctcgtctgcggaggaaaaggtagatgttaaatggtaactacgcgcgaggttctgaggagccctgggaacaggaaggagaaaagaataccaaaagtgacaacagtttgccaatcgcagtctttaatctgataaagcggttatctcgtcttgagtcccaggtgccgagtcaatccccatacacagccgccgccattgcctcgagtccttgtgtctgactgtctgttcctgctgctgtatgacacagcacctcgaggcaaggaaataagaaaactgcctctgatccaagcagagaaggtctgccgtgtagatctgctgtagtggcttgtcaccattggaaagcaaggtcctacttcagtggcagatctggttggccttttgagtggttgattgacccaccacccttccacagggctgggcccatgccacaggccatccttccctaactttgagtagagcttcctcttgcttgttttctatttcactgggcaggaacctgttgttggcacggggccgagtggctacttgactttgtgtgaacccccaccgggacaacttcgctccgctgacacgc

SEQ ID NO: 1475 - DNA, 497 bp, Homo Sapiens
attttttttttttttttttaacaaatctgctgtgacttttttatagtttccaattctatatggaaattttccatcttttatctccttgaatacagtaaacatacttaaagtctacctcacaatgcaattatttggtgcccctttgggtctactgtttctgccagttttcattccgcctttctcctcctgtatccagggtatgtggagatactgtatttgaaaaagtacccaaataatttgaggcctaggaaaatattcttcctccaggtttctatctttcaggttcctaggggcattagaaacctaaggtcaccttagtccacttccaaaatctcacaatttactaatccaccttgatgatttaatgctaaactacactctatgtgaatggtctacttctgtttcaccattatccctaggatgctgtccttcaggatctctaaccaaagaattctaccagagtcacaaccttggaggtcgtatacttttaacgttcg

SEQ ID NO: 1476 - DNA, 397 bp, Homo Sapiens
gcggccgtggttggtgggggggcaggaagctgctggtggagctgcagcatccttcagtctcaggcccctgggagggggaggggaaagaaccagggctgagctgtggagtgaaggggagccatttctctccaccgactgcaacctccgtgctcacagctcacggttcaccagaatccaggggcttggtcggcctaggaatccacaatgctggatattttcatcctgatgttctttgccatcataggcctggtcattctgtcctacattatctatctgctctagtggcctggagctgcggccggagcctgctggagaacagctcagaaggaaggatggagctgaatggccgagtgccctgcttgctgacgcaccggtggatttttgcttctgctgttat

SEQ ID NO: 1477 - DNA, 503 bp, Homo Sapiens
ttttttttttttactctttttactgcatctccattagtaatcttgctgatcacatttttcccgtacattctcactgctgtctatattctatcactacaaagagaggccttaaaaactgcactcaagggagacatgatttcctttccctttctctgtcagaaaagcaactcataatagggaaggaaaagattgcatttaggttaaaggaatataaataagaaagagtctgcctctttctctctttaagacgctaagcctcaaaagggttcttggttttaaaaaggccatcaccccttgacctacactaaacattaatattatatacctggtaataaagccagaggatttttagtgagagctatgaaagggaaaggatggctaagacaggtttctttggtggatgaaagtcacaggctcataaatacaactttgcgaggttagtcttgtggttagctagtacttaaaatttgtgattccctcgactatatgggttgacaggggga

SEQ ID NO: 1478 - DNA, 457 bp, Homo Sapiens
agcggccgccagcgactgctggtccagaagcggggcgctctccggaggaagttcggcttctcggccgaggactaccgcgagctggagcgcctggcgctccaggctgagccccaccgcgccggccgccagtggaagttccccggctccttctacttcgccatcaccgtcatcactaccatcgggtacggccacgccgcgccgggtacggactccggcaaggtcttctgcatgttctacgcgctcctgggcatcccgctgacgctggtcactttccagagcctgggcgaacggctgaacgcggtggtgcggcgcctcctgttggcggccaagtgctgcctgggcctgcggtggacgtgcgtgtccacggagaaacctgtggtggccgggctggctgcgtgtgccgccaccctggccctcggggccgtcgccttctcgcacttcgagggctggaccttct

SEQ ID NO: 1479 - DNA, 2035 bp, Homo Sapiens
attaacctccagctttttaagcagtttatcgatggtcgactggcaaaactaaatgcaggaaggggtttctctgatgtatttgaagaagagatcacttcaggtggcttttgtggagggaacccgaggtcatatcaacaatgggtgcatacagtcaagaaaggaggtgcactgttcaacacagcaatgaccaaagcaacccctgctgtacggacagcatataaatttgcaaaaaatcatgcaaagctgggactaaaggaagtgaagagtaaactaaaacacaaggaaaatgaagaagattatgggacctgttctagttctgtacaatatacaccagtttacaaattacacaatgaaaagggaggaaactcagaaaagcgtaagcttgctcaggcacgcttaaaaaggcctcttaagagccttgatggtgctctatatgatgatgaagatgatgatgacattgaaagagcaagcaagttatcttctgaagatggtgaagaagcttctgcttatctctatgagagtgatgactctgttgaaacaagagtgaagactccttactcaggtgaaatggacttactaggagagattcttgatacattgagcacacacagctcagatcaggggaagctggcagctgcaaagagcttggatttctttagatcaatggatgacattgattacaaacctacgaataaatctaatgctcctagtgagaataacctggctttcctctgtggtggttctggtgaccaagcagagtggaatcttgggcaagacgatagtgccctccatggcaaacacctccctccatctcctaggaagcgggtttcctctagtggtttgacagattctctgtttatcctgagagaggaaaacagtaacaagcacctcggtgctgacaatgtgagtgaccctacttcaggactggatttccaactcacttcccctgaagtttcccagactgataaaggaaaaacagaaaagagggaaacactaagccagatttcagatgatctgcttatacccggtcttgggcggcattcatcgacttttgttccttgggagaaagaagggaaagaagccaaagagacttcagaagatattggactgctccatgaagtagtgtcattatgtcatatgacatctgacttccaacaaagcttgaacatttcagacaaaaacacaaatggaaaccaaacttaaatcttgcatccaagcttctatggagacattttgagattcaatgcaatctgtataataaacagaattatttgtaggaatggcaactcatactatttaaatttttttttgcatttgcaacatttttctcacttgttcatttcgaggatatatgaaatgcattgatttttaaatataaagcgaattctactgtgcttttaaatcaggtactagtttgtatgtatgtttaaagtatgtattgaccatgagatttcccagtgtttggtgcttaatgccgtttattttatttaagctaagaatgcatatgtaacccatgcacataaccagtagctactatactaatctggttgagcatgaactgatcaagatatcaaaacttatcaaaactagcctgaagctgatgaaactgttaacccactaattgccttaatcttaaagctgttttttaagcatacttaaataatgtatgaaagtatgtataaagtttgaaggataagttattagtgttctgcagagcaataatgcctttttctattcatcaaatcaaggtcaaaattcatcttttcaagattaaaaagctctcttaatggaaatatttaatttgcttatataaagcactatagccatgttttccaaaaagtataaaatatacacttacctttcattcagtgaaatataggaagtgctgaattacaatgtgaagttaatgacttctgtttacaaatgagacactctaacgagttttcagtctctctgtatgcctttgctatttaggggtccaccccaagaaagccaaatacaacataaaccgtcctgacaaaaaaaaaaaaaaaaa

SEQ ID NO: 1480 - DNA, 446 bp, Homo Sapiens
  misc_feature (425)..(425): n is a, c, g, or t
gcggccgcgctccgctgcccggttgcagccccccctagctctcccctaagaggagccgttcggggtcgggggtcgggggtcggggatccgcgtggggcctgcaggcgaagggctggccgggcctgctgagctgctgttctgcatgactcagtggttttcggagagggccctgttggctgttattgagtgaggcctttgcttagagggggatggggtatcagtgggacccgaacttgttccaaaatccattggaacatggggccgggggttctcggcgtcgtcttttgggcttctcgacgtcgctgcgtttttatcctgagatccgttttcatggaggaaatggaacacctcctttgtttggtgcatttaggctgatgaatgtgaaattttttgctcgctttccacgcactccgtggaggtgtgtnttcggggaagggtcggattat

SEQ ID NO: 1481 - DNA, 2213 bp, Homo Sapiens
agactgggctgggcaggtctgagagttagggaaagtccgttcccactgccctcggggagagaagaaaggagggggcaagggagaagctgctggtcggactcacaatgaaaacgctccttcttttgctgctggtgctcctggagctgggagaggcccaaggatcccttcacagggtgcccctcaggaggcatccgtccctcaagaagaagctgcgggcacggagccagctctctgagttctggaaatcccataatttggacatgatccagttcaccgagtcctgctcaatggaccagagtgccaaggaacccctcatcaactacttggatatggaatacttcggcactatctccattggctccccaccacagaacttcactgtcatcttcgacactggctcctccaacctctgggtcccctctgtgtactgcactagcccagcctgcaagacgcacagcaggttccagccttcccagtccagcacatacagccagccaggtcaatctttctccattcagtatggaaccgggagcttgtccgggatcattggagccgaccaagtctctgtggaaggactaaccgtggttggccagcagtttggagaaagtgtcacagagccaggccagacctttgtggatgcagagtttgatggaattctgggcctgggatacccctccttggctgtgggaggagtgactccagtatttgacaacatgatggctcagaacctggtggacttgccgatgttttctgtctacatgagcagtaacccagaaggtggtgcggggagcgagctgatttttggaggctacgaccactcccatttctctgggagcctgaattgggtcccagtcaccaagcaagcttactggcagattgcactggataacatccaggtgggaggcactgttatgttctgctccgagggctgccaggccattgtggacacagggacttccctcatcactggcccttccgacaagattaagcagctgcaaaacgccattggggcagcccccgtggatggagaatatgctgtggagtgtgccaaccttaacgtcatgccggatgtcaccttcaccattaacggagtcccctataccctcagcccaactgcctacaccctactggacttcgtggatggaatgcagttctgcagcagtggctttcaaggacttgacatccaccctccagctgggcccctctggatcctgggggatgtcttcattcgacagttttactcagtctttgaccgtgggaataaccgtgtgggactggccccagcagtcccctaaggaggggccttgtgtctgtgcctgcctgtctgacagaccttgaatatgttaggctggggcattctttacacctacaaaaagttattttccagagaatgtagctgtttccagggttgcaacttgaattaagaccaaacagaacatgagaatacacacacacacacacatatacacacacacacacttcacacatacacaccactcccaccaccgtcatgatggaggaattacgttatacattcatattttgtattgatttttgattatgaaaatcaaaaattttcacatttgattatgaaaatctccaaacatatgcacaagcagagatcatggtataataaatccctttgcaactccactcagccctgacaacccatccacacacggccaggcctgtttatctacactgctgcccactcctctctccagctccacatgctgtacctggatcattctgaagcaaattccgagcattacatcattttgtccataaatatttctaacatccttaaatatacaatcggaattcaagcatctcccattgtcccacaaatgtttggctgtttttgtagttggattgtttgtattaggattcaagcaaggcccatatattgcatttatttgaaatgtctgtaagtctctttccatctacagagtttagcacatttgaacgttgctggttgaaatcccgaggtgtcatttgacatggttctctgaacttatctttcctataaaatggtagttagatctggaggtctgattttgtggcaaaaatacttcctaggtggtgctgggtacttcttgttgcatcctgtcaggaggcagataatgctggtgcctctctattggtaatgttaagactgctgggtgggtttggagttcttggctttaatcattcattacaaagttcagcatttt

SEQ ID NO: 1482 - DNA, 334 bp, Homo Sapiens
  misc_feature (28)..(28): n is a, c, g, or t
  misc_feature (241)..(241): n is a, c, g, or t
  misc_feature (247)..(247): n is a, c, g, or t
  misc_feature (272)..(272): n is a, c, g, or t
  misc_feature (306)..(306): n is a, c, g, or t
  misc_feature (314)..(314): n is a, c, g, or t
gcaggctttgtgcgcgctgggaatccantgatcgccgccccgcagagccccctgtccccggaggcgtctcatttccgggccgcccaccacccgcgtagaccggcagccgctgtcccggcagtctccagccgtcccgcccgcttgtggccaactggctccagtcactccccgaaatgccagtcgacttcactgggtactggaagatgttggtcaacgagaatttcgaggagtacctgtgcgncctcgncgtcaatgtggccttgcgcaaaatngtcaactttctgaagccagacaaagagatcgtgnaggaacgntgaccatatgatcattcgta

SEQ ID NO: 1483 - DNA, 359 bp, Homo Sapiens
gcgtggtcgcggccgaggtacatcaaataatgtcatatatgaaattaaaagcagatcacaaaaccgagattcatgcctccatttttaccaaggggaggaaacaagagccatacagccagaataattcttcagaagcacactttgttatcaattatgtaactaaagaatcaaagtatgtatatataactgaagagttaatcaacagtaagaccgtgatctacatctgataccaataagaagctaagagtaataaatacctatcctgacattcactaagtaaataatgactatcattttaataatcattattttttctgactgttatttttttttaaataggcaaaagagcaataataaat

SEQ ID NO: 1484 - DNA, 6128 bp, Homo Sapiens
ggggagcttggcagagccctaggatgaactgtgttttgttttgttttgttttgttgcaggttggagcctttttcctgcagaaagagaagcaattccgggcttttccacagataacctgctagggctcgcagagacctggattctaaccccatctcgcctttcctcacctggggcattgttttctgcatttgagaactgctgggtgggctggtgttacccaggatttttaaatttttgcaggagacgctttgcaggagatctctagggcttttttctgtgtcaattaaagagcctggccagctggacctgggctgtctttttgacaaaaacaaacgtcatccccctcccagctgagcacttgttagaactggactttaactgagggcctgaaccccctaacaacgggacaaacagtatgaaatcaaaaccgtttaccctcctcccaccagcggtttgcgtagggccttgggtgcactagcaaaacaaacttattttgaacactcagctcctagcgtgcggcgctgccaatcattaacctcctggtgcaagtggcgcggcctgtgccctttataaggtgcgcgctgtgtccagcgagcatcggccaccgccatcccatccagcgagcatctgccgccgcgccgccgccaccctcccagagagcactggccaccgctccaccatcacttgcccagagtttgggccaccgcccgccgccaccagcccagagagcatcggcccctgtctgctgctcgcgcctggagatgtcagaggtccccgttgctcgcgtctggctggtactgctcctgctgactgtccaggtcggcgtgacagccggcgctccgtggcagtgcgcgccctgctccgccgagaagctcgcgctctgcccgccggtgtccgcctcgtgctcggaggtcacccggtccgccggctgcggctgttgcccgatgtgcgccctgcctctgggcgccgcgtgcggcgtggcgactgcacgctgcgcccggggactcagttgccgcgcgctgccgggggagcagcaacctctgcacgccctcacccgcggccaaggcgcctgcgtgcaggagtctgacgcctccgctccccatgctgcaggtaccacagtcccgcccctgctccagcacctcctgccgcccgcccccgcccggcacctcccgcccccactcccctaactactgggtggggctgcagccgggcaggggcttgtccacaactagagcttgaaaccagagcacgtagttggggaaggagcttgggtcacccagtggagcccgctcattgcacggtcttggcaggacgtgccctgggagaagaaggaagatgttccagggcacacatagcttagtggagactcaaggaggaagctcccacttggccctcgtagcccagggatctttagagacccagacagcaagagtagagggaggcggtggggctgcctccgcagttgggatgccaccctgggtcccccaccagtctccttgccagcacgtgggcagccccagtggctggagcatccgggaaggcctaagaagggaatccctcctgctggcctccccaggaggtgtttggaatgtcctttgtaatatacgtcctggatacagtatgtgcttcccagatgtttacagaacataatgtgagagttgaggctaaaagcttcacttccattcattgccatagaaaaacaatgtttgatgtgtatgttgccccctaagaacatgacaatcaggttctttcctggatttaagcaggcatttgtttgtagcgggaagtggaggaaatgcctctttctctactccagcccctatctcctcatctggactgcttgcacgtcctgtcctgtgccattcttggaggaattaggacttccataccctgatagggtgttagagtgagtgtgtgagagtcagtgacccttccaaggagggaacagggatttcctgcggattctctgcccttcagaggaaatgaaagggagtcgtctcactgatcctcaaggagatggatttccacagggggtcccttataggccagtgtgctgattctgttcatgtacctttggactctatctgcaagatcctctcgccatgggggtggagggggtgttgcagagaagtccattaggacgtgggaaggcaggggccccaaaatagaagagggtagtagtttgggtcaggagagctgcattctagactccacttctagatgaactgtaccatccattcagggatattagtaaaatccccattttaaggatggagaagctgaggtttcgaggctccctactaatgcggttaggaactgaactctaatcctggcttctttagggttgttctcaacctcagcaaatgcatttgttgctctgctcccctgctgctttaaaagcagaaacgtggggcacccttgccaggccctgaaacttactattgtcaggaacagagctggcatgctgttgggacataactcttcctggaaaccattacaaggtcctttacagtgagagtcagtgaaaatcaggttagggaatgtggccatcctcatggcccagcctggttttgagggaaggaagtgatctcctgggggcccgaaaggggcagatgctttgggagggctcatggggtctgcaatgtttcctttccagaggcagggagccctgaaagcccagagagcacggagataactgaggaggagctcctggataatttccatctgatggccccttctgaagaggatcattccatcctttgggacgccatcagtacctatgatggctcgaaggctctccatgtcaccaacatcaaaaaatggaaggtgaggcccagcaggtgggtggtgggaactctcctgtcagaggatgtagcttgagtcggctgtgacaagcagacctggcccactccttcctggtcctgatgccctggaaagaaatgcttttcccccaaaacctagtggccatttctcagttaaactttgtcaaactgtgaacacatggactttcaggagaggagcccactggatgcaaagaaaatgtagttccggacgataggttacttcatgtctctgagctcctctctaaagggtgtgagaacattgagttacattgttccaaaacttagtacaagggcctaactgctttcacccccattgtatgatttgcctccctttaaaaaagttgtcataaaatagacataaaatgtactgttttaactattttgaagcataggtttctgtggcattaagtaacaataagtaatgcatgttattctgcaaccactaccaatatctaccttcagaattttcatcttcccaaactgaagctcggaactcattaaacatcaactctccattatcttaattatgtctgttttgaattctaccacttgagggcgacagagaatcaaagtcggagtgatttgatttgagaaaataaattacttccacaaacatgcctacccagaaaaagggaggattaaaccattttctcaacattttggaatttcatctgagaataacgataaatggaggaaagttaattcttaaattatccaaatgaatgccttaatcctcacttgatttagtttatgtaaaagaaccttgtagattgcagaggaaagttattcaaaatctagaaatgtcttctgctaaattcttaattaagagttatgcccactcttctaaccagatggcgggtgccaaaagtattcagtaggtggcaggaagagttgggaagagttttgtggtgttggtgaggctcttgccaggggatgtctctgtgcaggtgttgagagagtgattggtgagggagagaatggtgttcttgttctttatctgaacaacttaagacagactaactgcaggtgggaaaaagaggcccagagggagcacatcacatgacacctagtcccaggtccccgtggccagatcgtagggccactcctgcttctacaaaacctcttccatcagtcattgtctaggctgataattcactgtgtcttgttagatatgctaatgtcaagttattctcttaggagccctgccgaatagaactctacagagtcgtagagagtttagccaaggcacaggagacatcaggagaagaaatttccaaattttacctgccaaactgcaacaagaatggattttatcacagcagacaggtaggtggccttgccagtgtgcgtcgtcagggtgaaagggactactgccctacattcctgccaagccacggtcattcatgtcaaagaaggtccactccaaagtagacaccagaagtggttgtattgagccagatccacccctctgggaacctggaacagctaggtgaagaaagcctattgaacaggtcaatatgtcaccaccagaggtggaaaacctgcgctggaccaggggccctggggctaagcctgagctccatcactcagcaagccaatagctatggaagactttcctaggccccctaacgcttggatcttgggttcctcacctatacaagagaggaagggaacaaacttaacttagaaaagcaagtatctatttggacagctcttaacacttttttctccttgaactgtctaataaaacacaacaacatttttgtggcttgccagataataaatgagatcaaacagaccaagatttcatattgaggagtgctttaggtctcagtgaagtacaggttctgtagattttattgggagaaactgaggactaggccctgcttcacgggcaatgaacagtggggcacacacgagacatgttccctctgggatgggctcccctgacatcaggctatgaagcagacagctgtacacacactgtactgtttaacacacatgggaagtcattattgcacatgccactcggtcactgtctctattttatgatgagaaccaggagggtgtgagatttgcctgcatcatgggcagctggtttcacagccgggactcttggcttggctctgcagtgctcggctgcactgaaaaaagggccagctatggctctactttccctgtcagcttgtcatctgctgctcttgaccttggtcttgtctttgcagtgtgagacatccatggatggagaggcgggactctgctggtgcgtctacccttggaatgggaagaggatccctgggtctccagagatcaggggagaccccaactgccagatgtattttaatgtacaaaactgaaaccagatgaaataatgttctgtcacgtgaaatatttaagtatatagtatatttatactctagaacatgcacatttatatatatatgtatatgtatatatatatagtaactactttttatactccatacataacttgatatagaaagctgtttatttattcactgtaagtttattttttctacacagtaaaaacttgtactatgttaataacttgtcctatgtcaatttgtatatcatgaaacacttctcatcatattgtatgtaagtaattgcatttctgctcttccaaagctcctgcgtctgtttttaaagagcatggaaaaatactgcctagaaaatgcaaaatgaaataagagagagtagtttttcagctagtttgaaggaggacggttaacttgtatattccaccattcacatttgatgtacatgtgtagggaaagttaaaagtgttgattacataatcaaagctacctgtggtgatgttgccacctgttaaaatgtacactggatatgttgttaaacacgtgtctataatggaaacatttacaataaatattctgcatggaaatactgttatctctgtggatgtttatttagtgatattatctttttgaaatccctttgtccttcaccctcaccttccttatgcattttgtgcttttgtgataccaagatggtgttttgggtctgcagagccccttgtcctaactaccctagatcttgccccggctgccccagggtttccacttcccagtggcattgggaccttcctcctctgcctggccaggctgggcattcctgtgtcccacctctccattagtccccatcctccccagggtcctcagcctcttcctcttggtttggtttgtcccttccgttcaacttataaataggaacagggtttctttcctcttaaacacaagacag

SEQ ID NO: 1485 - DNA, 595 bp, Homo Sapiens
ctcctaaagatggaagttgtcaaaatacatcaccacaaaacaaattttaaaaggctattttaaatacaagattccatcttcactaaactgccccttagatcactaagataatttagcatcaaaatcagcttagataatcatacgttacaaagctgccaccagcagcttattagttctaaagctttccaaaaaacctcagccaacttgacactttgatctcacatgtcaaaaaaagtggtcaaggttgatcagttagcttttaacagaagaatttgctcctgatggagtggcagctataatcatatggtatttttagaacagtgatacaatgaaaaataatatcataattatgtatttataaagtgttgattttctacaaactagaggttagcaatgattgctagaacaaataattacatttctaaaagaaataaaaaatgcatggagataatatcaatcaaatgagttaatgaaaaatcatgatcctattatcttaatgaatgcagtatagtgttataaatgcccttgcacttacatcttcatcacatagtatgaatgacaaatagaaagaccaaagaactgataaattactctc

SEQ ID NO: 1486 - DNA, 744 bp, Homo Sapiens
gacgtatatgagctccggtcctgtttgttatttccatcccgggagtagtgttgtcaagtgttagatgattgggggcgtggctgagatgtaagcacgatgcgcaggtgggtcgatagcatgtgtgcgcctagatccgggggtcctgtgatgcagcagaagagtgaagtgtgacgggtgcttgctacttgtggacgtgcggtcactgtacgtgtccagtctgaacgtttctccgcttccgacgtggcctggatgcacctcagagtatgacgaatctgatgttccagcagaaatccaggtgttaaaagaacccctacagagcagccaaccttcccttttgcagttgcaaaccaactcttgctggtttctttgctggagcacttgagccacgtgcatgaaccaaacccacttcgttcaagacaggtgtttaagctactttgccagacgtttatcaaaatggggctgctgtcttctttcacttgtagtgacgagtttagctcattgagactacatcacaacagagctattactcacttaatgaggtctgctaaagagagagttcgtcaggatccttgtgaggatatttctcgtatccagaaaatcagatcaagggaagtagccttggaagcacaaacttcacgttacttaaatgaatttgaagaacttgccatcttaggaaaaggtggatacggaagagtataccagggtccggaataaattagatggtccagtattatgccataaaaa

SEQ ID NO: 1487 - DNA, 407 bp, Homo Sapiens
cacaaatgtcaaatgttaattttatccaaaaacacccccacagacacactcagcacacacagtgtcactacttactctcagattgctctccagactgggggaaccaattgacaaggcccccagctcccccagctatgagactacattccccataacttttcagcatgttcacttgattctccaaccttaacagacttgtgatattactttaatggcaaacaaggctctgctgtcccacgcgcttactttgccacatggcacagtatctgtgtcacagacgcactcttcacaaggacaggtccaggcctgtgtcagtcactgcttcatcccagcacctagcacagggcctgactcatggtgagctgtggacaaacgcacatgcaattaacgacttgttcctgcctcag

SEQ ID NO: 1488 - DNA, 2637 bp, Homo Sapiens
tcctccactctgggaacagctcacacccccaaagtggtgaccaccatggccactatgcccacagccactgcctccacggttcccagctcgtccaccgtggggaccacccgcacccctgcagtgctccccagcagcctgccaaccttcagcgtgtccactgtgtcctcctcagtcctcaccaccctgagacccactggcttccccagctcccacttttctactccctgcttctgcagggcatttggacagtttttctcgcccggggaagtcatctacaataagaccgaccgagccggctgccatttctacgcagtgtgcaatcagcactgtgacattgaccgcttccagggcgcctgtcccacctccccaccgccagtgtcctccgccccgctgtcctcgccctcccctgcccctggctgtgacaatgccatccctctccggcaggtgaatgagacctggaccctggagaactgcacggtggccaggtgcgtgggtgacaaccgtgtcgtcctgctggacccaaagcctgtggccaacgtcacctgcgtgaacaagcacctgcccatcaaagtgtcggacccgagccagccctgtgacttccactatgagtgcgagtgcatctgcagcatgtggggcggctcccactattccacctttgacggcacctcttacaccttccggggcaactgcacctatgtcctcatgagagagatccatgcacgctttgggaatctcagcctctacctggacaaccactactgcacggcctctgccactgccgctgccgcccgctgccccgcggccctcagcatccactacaagtccatggatatcgtcctcactgtcaccatggtgcatgggaaggaggagggcctgatcctgtttgacccaattccggtgagcagcggtttcagcaagaacggcgtgcttgtgtctgtgctggggaccaccaccatggctgtggacattcctgccctgggcgtgagcgtcaccttcaatggccaagtgttccaggcccggctgccctacagcctcttccacaacaacaccgagggccagtgcggcacctgcaccaacaaccagagggacgactgtctccagcgggacggaaccactgccgccagttgcaaggacatggccaagacgtggctggtccccgacagcagaaaggatggctgttgggccccgactggcacaccccccactgccagccccgcagccccggtgtctagcacacccacccccaccccatgcccaccacagctgctctgtgatctgatgctgagccaggtctttgctgagtgccacacccttctgcccccgggcccattcttcaacgcctgcatcagcgaccactgcaggggccgccttgaggtgccctgccagagcctggaggcttacgcagagctctgccgcgcccggggagtgtgcagtgactggcgaggtgcaaccggtggcctgtgcgacctcacctgcccacccaccaaagtgtacaagccatgcggccccatacagcctgccacctgcaactctaggaaccagagcccacagctggaggggatggcggagggctgcttctgccctgaggaccagatcctcttcaacgcacacatgggcatctgcgtgcaggcctgcccctgcgtgggacccgatgggtttcctaaatttcccggggagcggtgggtcagcaactgccagtcctgcgtgtgtgacgagggttcagtgtcggtgcagtgcaagcccctgccctgtgacgcccagggtcagcccccgccgtgcaaccgtcccggcttcgtaaccgtgaccaggccccgggccgagaccccctgctgccccgagacggtgtgcgtgtgcaacacaaccacctgcccccagagcctgcctgtgtgcccgccagggcaggagtccatctgcacccaggaggagggcgactgctgtcccaccttccgctgcagacctcagctgtgttcgtacaatggcaccttctacggggttggtgcaaccttcccaggcgcccttccctgccacatgtgtacctgcctctctggggacacccaggacccaacggtgcaatgtcaggaggatgcctgcaacaatactacctgtccccagggctttgagtacaagagagtggccgggcagtgctgtggggagtgcgtccagaccgcctgcctcacgcccgatggccagccagtccagctgaatgaaacctgggtcaacagccatgtggacaactgcaccgtgtacctctgtgagtctgagggtggagtccatttgctgaccccacagcctgcatcctgcccagatgtgtccagctgcagggggagcctcaggaaaaccggctgctgctactcctgtgaggaggactcctgtcaatgccgcatcaacacgaccatcctgtggcaccagggctgcgagaccgaggtcaacatcaccttctgcgagggctcctgcccgggagcgtccaagtactcagcagaggcccaggccatgcagcaccagtgcacctgctgccaggagaggcgggtccacgaggagactgtgcccttgcactgtcctaacggctcagccatcctgcacacctacacccacgtggatgagtgtggctgcacgcccttctgtgtccctgcgcccatg

SEQ ID NO: 1489 - DNA, 4662 bp, Homo Sapiens
ggaaagtccaccttccccatcaaggccagcctgggaacatggagtggcagcggccgcagcaaatgagagagccaacgcgcggaaagtttgctcaatgggcgatgtccgagataggctgtcactcaggtggcagcggcagaggccgggctgagacgtggccaggggaacacggctggctgtccaggccgtcggggcggcagtagggtccctagcacgtccttgccttcttgggagctccaagcggcgggagaggcaggcgtcagtggctgcgcctccatgcctgcgcgcggggcgggacgctgatggagcgcgccatcagcccggggctgctggtacgggcgctgctgctgctgctgctgctggggctcgcggcaaggacggtggccgcggggcgcgcccgtggcctcccagcgccgacggcggaggcggcgttcggcctcggggcggccgctgctcccacctcagcgacgcgagtaccggcggcgggcgccgtggctgcggccgaggtgactgtggaggacgctgaggcgctgccggcagccgcgggagagcaggagcctcggggtccggaaccagacgatgagacagagttgcgaccgcgcggcaggtcattagtaattatcagcactttagatgggagaattgctgccttggatcctgaaaatcatggtaaaaagcagtgggatttggatgtgggatccggttccttggtgtcatccagccttagcaaaccagaggtatttgggaataagatgatcattccttccctggatggagccctcttccagtgggaccgagaccgtgaaagcatggaaacagttcctttcacagttgaatcacttcttgaatcttcttataaatttggagatgatgttgttttggttggaggaaaatctctgactacatatggactcagtgcatatagtggaaaggtgaggtatatctgttcagctctgggttgtcgccaatgggatagtgacgaaatggaacaagaggaagacatcctgcttctacagcgtacccaaaaaactgttagagctgtcggacctcgcagtggcaatgagaagtggaatttcagtgttggccactttgaacttcggtatattccagacatggaaacgagagccggatttattgaaagcacctttaagcccaatgagaacacagaagagtctaaaattatttcagatgtggaagaacaggaagctgccataatggacatagtgataaaggtttcggttgctgactggaaagttatggcattcagtaagaagggaggacatctggaatgggagtaccagttttgtactccaattgcatctgcctggttacttaaggatgggaaagtcattcccatcagtctttttgatgatacaagttatacatctaatgatgatgttttagaagatgaagaagacattgtagaagctgccagaggagccacagaaaacagtgtttacttgggaatgtatagaggccagctgtatctgcagtcatcagtcagaatttcagaaaagtttccttcaagtcccaaggctttggaatctgtcactaatgaaaacgcaattattcctttaccaacaatcaaatggaaacccttaattcattctccttccagaactcctgtcttggtaggatctgatgaatttgacaaatgtctcagtaatgataagttttctcatgaagaatatagtaatggtgcactttcaatcttgcagtatccatatgataatggttattatctaccatactacaagagggagaggcacaaacgaagcacacagattacagtcagattcctcgacaacccacattacaacaagaatatccgcaaaaaggatcctgttcttcttttacactggtggaaagaaatagttgcaacgattttgttttgtatcatagcaacaacgtttattgtgcgcaggcttttccatcctcatcctcacaggcaaaggaaggagtctgaaactcagtgtcaaactgaaaataaatatgattctgtaagtggtgaagccaatgacagtagctggaatgacataaaaaactctggatatatatcacgatatctaactgattttgagccaattcaatgcctgggacgtggtggctttggagttgtttttgaagctaaaaacaaagtagatgactgcaattatgctatcaagaggatccgtctccccaatagggaattggctcgggaaaaggtaatgcgagaagttaaagccttagccaagcttgaacacccgggcattgttagatatttcaatgcctggctcgaagcaccaccagagaagtggcaagaaaagatggatgaaatttggctgaaagatgaaagcacagactggccactcagctctcctagcccaatggatgcaccatcagttaaaatacgcagaatggatcctttctctacaaaagaacatattgaaatcatagctccttcaccacaaagaagcaggtctttttcagtagggatttcctgtgaccagacaagttcatctgagagccagttctcaccactggaattctcaggaatggaccatgaggacatcagtgagtcagtggatgcagcatacaacctccaggacagttgccttacagactgtgatgtggaagatgggactatggatggcaatgatgaggggcactcctttgaactttgtccttctgaagcttctccttatgtaaggtcaagggagagaacctcctcttcaatagtatttgaagattctggctgtgataatgcttccagtaaagaagagccgaaaactaatcgattgcatattggcaaccattgtgctaataaactaactgctttcaagcccaccagtagcaaatcttcttctgaagctacattgtctatttctcctccaagaccaaccactttaagtttagatctcactaaaaacaccacagaaaaactccagcccagttcaccaaaggtgtatctttacattcaaatgcagctgtgcagaaaagaaaacctcaaagactggatgaatggacgatgtaccatagaggagagagagaggagcgtgtgtctgcacatcttcctgcagatcgcagaggcagtggagtttcttcacagtaaaggactgatgcacagggacctcaagccatccaacatattctttacaatggatgatgtggtcaaggttggagactttgggttagtgactgcaatggaccaggatgaggaagagcagacggttctgaccccaatgccagcttatgccagacacacaggacaagtagggaccaaactgtatatgagcccagagcagattcatggaaacagctattctcataaagtggacatcttttctttaggcctgattctatttgaattgctgtatccattcagcactcagatggagagagtcaggaccttaactgatgtaagaaatctcaaatttccaccattatttactcagaaatatccttgtgagtacgtgatggttcaagacatgctctctccatcccccatggaacgacctgaagctataaacatcattgaaaatgctgtatttgaggacttggactttccaggaaaaacagtgctcagacagaggtctcgctccttgagttcatcgggaacaaaacattcaagacagtccaacaactcccatagccctttgccaagcaattagccttaagttgtgctagcaaccctaataggtgatgcagataatagcctacttcttagaatatgcctgtccaaaattgcagacttgaaaagtttgttcttcgctcaatttttttgtggactactttttttatatcaaatttaagctggatttgggggcataacctaatttgagccaactcctgagttttgctatacttaaggaaagggctatctttgttctttgttagtctcttgaaactggctgctggccaagctttatagccctcaccatttgcctaaggaggtagcagcaatccctaatatatatatatagtgagaactaaaatggatatatttttataatgcagaagaaggaaagtccccctgtgtggtaactgtattgttctagaaatatgctttctagagatatgatgattttgaaactgatttctagaaaaagctgactccatttttgtccctggcgggtaaattaggaatctgcactattttggaggacaagtagcacaaactgtataacggtttatgtccgtagttttatagtcctatttgtagcattcaatagctttattccttagatggttctagggtgggtttacagctttttgtacttttacctccaataaagggaaaatgaagctttttatgtaaattggttgaaaggtctagttttgggaggaaaaaagccgtagtaagaaatggatcatatatattacaactaacttcttcaactatggactttttaagcctaatgaaatcttaagtgtcttatatgtaatcctgtaggttggtacttcccccaaactgattataggtaacagtttaatcatctcacttgctaacatgtttttatttttcactgtaaatatgtttatgttttatttataaaaattctgaaatcaatccatttgggttggtggtgtacagaacacacttaagtgtgttaacttgtgacttctttcaagtctaaatcatttaataaaactttttttaaattaaaaaaaaaaaaaaaaaaa

SEQ ID NO: 1490 - DNA, 2602 bp, Homo Sapiens
ctcaccctgaaggtgacagttccttggaaccttccctgatccttgtgatcccaggctccaagagtccacccttcccagctcagctcagtacctcagccacctccaagatccctacactgatcatgcttttcccaatctccatgtcggccacggagtttcttctggcctctgtcatcttctgtctggtattctgggtaatcagggcctcaagacctcaggtccccaaaggcctgaagaatccaccagggccatggggctggcctctgattgggcacatgctgaccctgggaaagaacccgcacctggcactgtcaaggatgagccagcagtatggggacgtgctgcagatccgaattggctccacacccgtggtggtgctgagcggcctggacaccatccggcaggccctggtgcggcagggcgatgatttcaagggccggcccgacctctacaccttcaccctcatcagtaatggtcagagcatgtccttcagcccagactctggaccagtgtgggctgcccgccggcgcctggcccagaatggcctgaaaagtttctccattgcctctgacccagcctcctcaacctcctgctacctggaagagcatgtgagcaaggaggctgaggtcctgataagcacgttgcaggagctgatggcagggcctgggcactttaacccctacaggtatgtggtggtatcagtgaccaatgtcatctgtgccatttgctttggccggcgctatgaccacaaccaccaagaactgcttagcctagtcaacctgaataataatttcggggaggtggttggctctggaaacccagctgacttcatccctattcttcgctacctacccaacccttccctgaatgccttcaaggacctgaatgagaagttctacagcttcatgcagaagatggtcaaggagcactacaaaacctttgagaagggccacatccgggacatcacagacagcctgattgagcactgtcaggagaagcagctggatgagaacgccaatgtccagctgtcagatgagaagatcattaacatcgtcttggacctctttggagctgggtttgacacagtcacaactgctatctcctggagcctcatgtatttggtgatgaaccccagggtacagagaaagatccaagaggagctagacacagtgattggcaggtcacggcggccccggctctctgacagatcccatctgccctatatggaggccttcatcctggagaccttccgacactcttccttcgtccccttcaccatcccccacagcacaacaagagacacaagtttgaaaggcttttacatccccaaggggcgttgtgtctttgtaaaccagtggcagatcaaccatgaccagaagctatgggtcaacccatctgagttcctacctgaacggtttctcacccctgatggtgctatcgacaaggtgttaagtgagaaggtgattatctttggcatgggcaagcggaagtgtatcggtgagaccattgcccgctgggaggtctttctcttcctggctatcctgctgcaacgggtggaattcagcgtgccactgggcgtgaaggtggacatgacccccatctatgggctaaccatgaagcatgcctgctgtgagcacttccaaatgcagctgcgctcttaggtgcttgagagccctgaggcctagactctgtctacctggtctggttgggcagccagaccagcaggctggcctatgtggtctaagattcagcctgaaactcatagacactgatctggctgcagttttgctatctgggctgtgggcaagcctaagggatcctgcctgcccctaccctggacttgcctctgcacaccctccagagacaacaggtaaaacagggccacatagatgctgatggagccttcccaagttgtgcttgagccaggaggcctgctagggttaggaggtccttaggcctctgagaagctctgaagaactctctggaagcccctgggcccagtacctagctggctctgtgagggtgctgactggcttcagcaagttagaactagccaaaccaggaccctgtccaatctttgacaattgggagctgccaagagtgaagggaagagacagcccaggatactggcacagaggtagtctcactgcttgaactaggctgagcaatctgaccctatgggtctaggacacagttcctgggaacatcacattcctctgcccttcctgcaggcaggaacaaacagggctgccttctggccttgtaagacccttattgctgtcctggaggggctggggacttgtgtctgcggggatccagagcgcacagggagtgcacatatccaggcaccaggactagggctggagtgaggggggggtatttcaattaccttctattggtctcccttctctacactcttgtaataaaatgtctatttttaatgtttgtacacaacaatccttctattctagcctgcattgagcttgcatgcttgcataagagcttaagaaccattgatttaatgtaatagggaaaattctaacccaggtatccaaaaatgtgtaagaacaactacctgagctaaataaagatattgttcaga

SEQ ID NO: 1491 - DNA, 419 bp, Homo Sapiens
  misc_feature (24)..(24): n is a, c, g, or t
  misc_feature (38)..(38): n is a, c, g, or t
  misc_feature (43)..(43): n is a, c, g, or t
  misc_feature (277)..(279): n is a, c, g, or t
  misc_feature (289)..(289): n is a, c, g, or t
atccgaagtgcggctgcgcaaggntgacggcgcgcganaaggnggagggggtgttttggttctagccgctcgccgtccttgcaggctctgccgtcggaaagccgctcattctcgcttccccttccctttcccggctcaagtccttcctctctctttcctttctttccgcctatcttttttctgctgccgctccgggtccgggccattttccgggccgggcgcactaaggtgcgcggccccggggcccagtatatgacccgccgtcctgctatccttnnnttcccccgcnccatgtggctgcggggccgcggcggcgctgcccactatggcccggaaagtagttagcaggaagcggaaagcgcccgcctcgccgggagctgggagcgacgctcagggcccgcagtttggctgggatcact

SEQ ID NO: 1492 - DNA, 402 bp, Homo Sapiens
  misc_feature (183)..(183): n is a, c, g, or t
  misc_feature (204)..(204): n is a, c, g, or t
  misc_feature (361)..(361): n is a, c, g, or t
aatgcccttcccagcggtatatctccctccagtgttcccactgcggactgagggccatgaccgggcggatcgtgggaggggcgctggcctcggatagcaagtggccttggcaagtgagcctgcacttcggcaccacccacatctgtggaggcacgctcattgacgcccagtgggtgctcactnccgcccactgcttcttcgtgnacccgggagaaggtcctggagggctggaaggtgtacgcgggcaccagcaacctgcaccagttgcctgaggcagcctccattgccgagatcatcatcaacagcaattacaccgatgaggaggacgactatgacatcgccctcatgcggctgttcaagncccttgaccctgttccggtgagggaattttgcatttcccgt

SEQ ID NO: 1493 - DNA, 1581 bp, Homo Sapiens
gttggtagaacaccttttcaccttatgtcaaaagcatgaaatatgaaggcctagaaacaaaggttaatttatatacatagtactaataattataccaagtctactattatttcctactagtcagatgatttttatgaatgtaaaatattagaaaggcacagtaagtgacaccaagattaataagacaaataggtatggcagaaacagagaggtatatgagctgcatagggatctctgttgataagaatctgtgtagacttttttctccttccttcctttgatctttgatcatgggaagacatggaaaaagaaagctaactacagtgattttgtccactacactgttatttggttaaaaattttagtttcctaatgagtattagcatgtatgagaaattatgggagaaaaaggcgcatcctagaaaaggtgtgcttaattactattggggattggttaacatagcatgggagctggattgtcagagattcattatctagaaaatggcaacaagagtttataaaacgaacttctgtgagattactttttagctagcaaagacaaagatgtccttcagtaggtgaagtgataaactatgatacatccagatgatggaatactattgaggactaaaaagaaataagctgtcaagccatgaaaacacatggagggacgttaaatgcatattactaagtgaaaaaagctaatctgaaagggctacatactgtgtgattctaactatataacattccataaaaggcaaaactgtgaagacagcaaaaaaaaatcagcggttgccagggtttagaaggaagggagggataaatgtgcagagcacagaggatttttaggccagtgaaaatacttcgtatgatactacaatggtggaaacatgtcattatacatttatccaaacccaaagaatgtccaccaccaagagtgaaccctcaactatggactttgggtgatgatgtgtgggacaggaggtatatgaaaaatctctgtaccttcctcccaattttgctgtgaacttaaaactgctctaaaaaaagtcttttttaaaaaaagctctatgaactagttggtattataaaccttaggccatttcaagtaaaaattacatatcaatgtttattaaatactgagttaatagctgaatacctctttcatatacaaataagtacatttgcaattttttaaaaaagtcttaattccattagtaactgtggtttcatagttgccaaataactgtaagctatggatgttgcacaagactgtgattttatttaatcatttcatatctatttaaacatttccaaagcgcacattcatcttaatgttttcacactatttttgctcaacaaaaagttattttatgttaatggatataagaagtattaataatatttcagtcaaggcaagagaacccgataaagatcattgctagagacgtttaatgttacctgtagcggtacacttgttaaagaagtgattaagcagttacataaaattctgatcatagctttgattgataccatgaaggtataattcagtgcctggatactaacaactttacttgttta

SEQ ID NO: 1494 - DNA, 485 bp, Homo Sapiens
gctgcgaggagcggccggcgggcggcggcggccggcgggcggcgatggcggcggcggaggccggtggcgacgacgcccgctgcgtgcggctgagcgccgagcgggcacaggcgctgctggccgacgtggacacgctgctgttcgactgcgacggcgtgctgtggcgcggggagaccgccgtgcctggcgcgcccgaggccctgcgggcgctgcgagcccgcggcaagcgcctgggcttcatcaccaacaacagcagcaagacccgcgctgcctacgccgagaagctgcggcgcctgggcttcggcggccccgcggggcccggcgccagcctggaggtcttcggcacggcctactgcaccgcgctctacctgcgccagcgcctggccggcgcccccgcgcccaaggcctacgtgctgggcagcccagccctggccgcggagctggaggccgtgggcgtcgccagcgttggcgtggggcccgagcca

SEQ ID NO: 1495 - DNA, 658 bp, Homo Sapiens
acatagctaggtacgaggctgggtgtggctgggctcttgcctgtgaaatctttctttgctttccccatcttttcctcgcattttttcaccatctttccctcaatctccaggagccaatgcgagacttggctccgattaagcgacggcccgagactcggggtgcgcgaggaggatcgacagagtggtgatggagagcaccccttcaaggggactgaaccgagtacacctacaatgcaggaatctgcaggaattcttagggggcctgagccctggggtattggaccgattgtatgggcaccctgccacatgtctggctgtcttcagggagctcccatccttggctaagaactgggtgatgcggatgctctttctggagcagcctttgccacaggctgctgtagctctgtgggtaaagaaggaattcagcaaggctcaggaggaaagtacagggctgctgagcggcctccggatctggcacacacagctgctcccaggcgggctccagggcctcatcctcaaccccattttccgccagaacctccgcgattgccttctgggtaggggggaaggcctggtctgatgacacaagtcagctgggaccagacaagcatgccggggacgttcccttccttgacaagtaagccgaggaacaatggga

SEQ ID NO: 1496 - DNA, 3051 bp, Homo Sapiens
agaaccgctgtggcaccgctactccgtgccgcgcccgtcgagcattgcgttgctgcattgcgccccaccgactccactatgttgaagaaattcgacaagaaggatgaggagtcaggtggaggctccaacccattccagcaccttgagaagagtgcggtactccaggaggcccgtgtatttaatgaaactcccatcaaccctcggaaatgtgcccacatcctcaccaagattctttatctcataaaccagggggagcacctggggaccacggaagcgaccgaggccttctttgccatgaccaagctctttcagtccaatgatcccacactccgtcggatgtgctacttgaccatcaaggagatgtcttgcattgcagaggatgtcatcattgtcaccagcagcctaacaaaagacatgactgggaaagaagacaactaccggggcccggccgtgcgagccctctgccagatcactgatagcaccatgctgcaggctattgagcgctacatgaaacaagccattgtggacaaggtgcccagtgtctccagctctgccctcgtgtcttccttgcacctgctgaagtgcagctttgacgtggtcaagcgctgggtgaatgaggctcaggaggcagcatccagtgataacatcatggtccagtaccacgcactagggctcctgtaccatgtgcgtaagaatgaccgcctagccgtcaataagatgatcagcaaggtcacacggcatggccttaagtctccctttgcctactgcatgatgatccgggtggccagcaagcagctggaagaggaggatggcagccgtgacagcccactgtttgacttcatcgagagctgcttgcgcaacaagcacgagatggtggtgtatgaagccgcctcggccatcgtcaatctgccaggctgcagtgccaaagagctggccccggctgtgtcagtgctccagcttttctgcagctcacccaaggctgctctccgctatgctgctgttcgtaccctcaataaggttgccatgaagcatccgtcagctgtgacagcttgtaatctggatctggagaacctggtcacagattcaaaccgcagcattgccacgctggccatcaccaccctccttaagacgggcagcgagagcagcatcgaccgcctcatgaagcagatctcctccttcatgtcagaaatctcggatgaattcaaggtggtggttgtccaggccatcagtgccctgtgtcagaaatatcctcgcaaacacgccgtccttatgaacttcctgttcaccatgctgcgggaagagggtggctttgagtataagcgcgctatcgtggactgcatcatcagcatcattgaagagaactcagagagcaaggagacagggctgtcacatctgtgcgagttcatcgaggactgcgagttcacagtgctggccacccgtattctacatctcctgggccaggaggggcccaagaccaccaatccctcaaagtacatccgcttcatctataaccgagtggtcttggagcatgaggaggtccgggcaggtgctgtgagtgctctggcgaagtttggagcccagaatgaagagatgttacccagtatcttggtgttgctgaagaggtgtgtgatggatgatgacaatgaagtaagggaccgagccaccttctacctaaatgtcctggagcagaagcagaaggcccttaatgcaggctatatcctaaatggtctgactgtgtccatccctggtctggagagggctctgcagcagtacactctagaaccatcagaaaaaccttttgacctcaagtctgtgcccctggccacggcgcccatggcagagcagagaacagaaagtacccccatcacagcagtcaaacagcctgagaaagtggcagctaccaggcaggagatcttccaggagcagttggcagcagtgccagtgttccgcggtcttgggcccctcttcaagtcctcgcctgagcccgtggccctcaccgagtcagagacggagtatgtcatccgctgcaccaaacacaccttcaccaaccacatggtttttcagtttgactgcacaaacacactcaatgaccagaccttggagaatgtcacagtgcagatggagcccactgaggcctatgaggtgctctgttacgtgcctgcccggagcctgccctacaaccagcccgggacctgctacacactggtggcactgcccaaagaagaccccacagctgtggcctgcacattcagctgcatgatgaagttcactgtcaaggactgtgatcccaccactggggagactgatgacgaaggctatgaggatgagtatgtgctggaagatctggaagttactgtagctgatcacattcaaaaggtcatgaaactgaacttcgaagcagcctgggatgaggtaggggatgaatttgagaagggggaaacgttcaccttgtctaccatcaagacacttgaagaggctgtgggtaatattgtgaagttcttgggaatgcacccttgtgagaggtcagacaaagtgccggataacaagaacacccacacgttgctcctggctggtgtgttccggggtggtcatgacatcctgatgcgctcccggctgctgcttttggacacagtgacaatacaggtgacagccagaagtttggaggagctgccagtagacatcatcttggcatctgtgggataagaggccagcctgcataggacctcatacccttccccaacactacctggaagttgtgccttcctcatgaaactggcagaaaccccttcccaagcttctgtattgaaaaacaattaggaatcattgcagatttttttttattctgctcccacctcccacccgggactacttgctggtgacttttttttttttttttttttaaataggggatgattttagcttgtcctaaatcttgctgtccacccttccaggaaagggacattgtaaatgaataaaacattctcaactcctcttgaatctatcccccaagaaaccatcttatccctgtaataaatcagcatgtatttattg

SEQ ID NO: 1497 - DNA, 553 bp, Homo Sapiens
aaaatgaaaaaaaatttatttcctcagtgttttatccactgtcaatactgtatttttgatgcaatatatttgccaaaagaactcagcttttattttccattttaaacaactacaatatttacaagctgttcagaataacactcagacacacacacactcacagacacacgtaagtacatatgtccttatctctggtttatactgaatgctggtaaaggccatgaatactttccagagcccatgatcagaaaaggaaaacccattttcctttcttacgttcactttcctagaatcattttcaatattcctccttccatttcctcatgcagagctcattgccagacttgtataggtttaatcagtttttacattttacttttacttaaactataagcttttaaaaagcataagcagacatgattccccccccccccccatttctattattttggttgtagaatcaagcttcatagataaaaaatcttgttcaatcacaagtacactaaacccaagagtcatctggagcagccatcttatgctctatcactactct

SEQ ID NO: 1498 - DNA, 565 bp, Homo Sapiens
taggatctgtcgtttaaactgtaaaccgcttgctcttacaggcttgcactctgctgttcttaagtcttcgtagttgaggggtcttcaacccacaggccacagactggtgctactccatgacctgttagaaaccaggccgcatgagcagtgaggaagcctcatctgtatttacagccactccccattgctcacattactgtctgggctccacctcctgtcagatcaatggtggtattggattctcataggagcgagaatcctattgtgaactgcacatgtgagggggctaggttgtgtgctccttagaagaatctagtgcctgatgatccgaggtggagctgaggtggtgatgctagagctgaggtggtgatgctagcactggggagtggctgcaaatacagattaacattagcaaagaggtttgactttacagagatgataataaatcaattgcttgcagactcatcaacccctatctgtgagtggcaagtgacaagctgcatctggtggcaggctttatagtggcaagtgagttggtgtacttcagttgtacagctgtatctgg

SEQ ID NO: 1499 - DNA, 297 bp, Homo Sapiens
  misc_feature (293)..(293): n is a, c, g, or t
ttatccgctggctcctgtttccaattgattgagggatgcccccaaggaagttaacttcactgcaattctgagctgtaattgactttaataagctccaacagcactgaaagacgtttggattattttcagtttgggataatactactatgaacattcctgtacatgtcttttgagaacacgcatgtgtacatttgtgatgggtatgtaatggggtggaattactggttcatagaatatgtgcatattcacctttagatatagaggctgccaaccatttttctaaagtgattatnccaa

SEQ ID NO: 1500 - DNA, 766 bp, Homo Sapiens
gctagtcgggctgggtgttaatcggccgagggtcagtcagtgcgcggccaggtacgggccgacgggcccgcggggccggcgccgccatggcggccgtgtttgatttggatttggagacggaggaaggcagcgagggcgagggcgagccagagctcagccccgcggacgcatgtccccttgccgagttgagggcagctggcctagagcctgtgggacactatgaagaggtggagctgactgagaccagcgtgaacgttggcccagagcgcatcgggccccactgctttgagctgctgcgtgtgctgggcaaggggggctatggcaaggtgttccaggtgcgaaaggtgcaaggcaccaacttgggcaaaatatatgccatgaaagtcctaaggaaggccaaaattgtgcgcaatgccaaggacacagcacacacacgggctgagcggaacattctagagtcagtgaagcacccctttattgtggaactggcctatgccttccagactggtggcaaactctacctcatccttgagtgcctcagtggtggcgagctcttcacgcatctggagcgagagggcatcttcctggaagatacggcctgcttctacctggctgagatcacgctggccctgggccatctccactcccagggcatcatctaccgggacctcagcacgagaacatctgctcagcagccagggcacctcaactgaccgatttggacctgcaggagctatcctgagggcgtcttccccttggggcctgg

SEQ ID NO: 1501 - DNA, 364 bp, Homo Sapiens
tttttttttttttttaagcatctcaataaagtattttattggcagaataagcaagaaccgaatctagttgcctaagaagaggccaacattgccactgtgtaattaagaatcatgggggaaaaatgagtgttgagccatagtctagctatagcttccccaagaatttacagaaattctcttctggggtactgaatccataggtgaatctctggaaggagcactggcatttgctagggctactgtgcgggctggaactgaatattgattgtgtaagaatatgtaagaatgtactctgcctgaaatcttttgctctaaaagttcatcatggccaacactagctttcagaaataagccagatacaagt

SEQ ID NO: 1502 - DNA, 405 bp, Homo Sapiens
aaagacaaagtagtattatgttgcttcagtttctttaaatacctcgtttcttttgagaccaaaaattcccatcaaggaaataaatcagcctgattttaacattttacatattacattgcctttaagcactatgattggatggctttttttctatttgtttaataatccttggctaaattcacatgtatctaaagtaaaatagctgagttactgaattctataaggggaagaaaaagcatttattttcacatgattaactgaaatggaaaagtaagacatttagcagaataattcatttaaaaataattttaaaaaatcagacatatttaaaaatctaggttgtctatccagtatgtgaatgcttaattataattgttacatgttgaatgggtattaagagtaagt

SEQ ID NO: 1503 - DNA, 504 bp, Homo Sapiens
ttttttttttttttttttttttttttttttttaaaatccaccttttggaactaagggtaacaatgattcctggtcataattttacctattcttgtcaatacagattttaaaattaattttgagatttatttattgctaggcctaacagttttcaaagaccacaacgtaacattaaaattcctgacctttccagttgaaacacagcagtactatatgaagtattatagtctgctgcaaaaagtaatgcaaccctatcagggaaaaagcataaatggggggagcctatcataacctgtatatgctgattctcctgaagggaacacacctatgtttggcagcaaatgggtaaaaacaagttcatgagtgaggtaaagagttgaaaacaagttaaggactgcagaatatgggcagacacagagaatcttaacctaaaacagttctaaggaatttaatttacttttcctttcttcacatgtttttggggaaaaaattacagaattagcc

SEQ ID NO: 1504 - DNA, 2904 bp, Homo Sapiens
ggcacgagctctgtgagactgaggtggcggtcagccggagtgagtgttggggtcctggggcacctgccttacatggcttgtttatgaacattaaagggaagaagttgaagcttgaggagcgaggatggcagtcaacaaaggcctcaccttgctggatggagacctccctgagcaggagaatgtgctgcagcgggtcctgcagctgccggtggtgagtggcacctgcgaatgcttccagaagacctacaccagcactaaggaagcccaccccctggtggcctctgtgtgcaatgcctatgagaagggcgtgcagagcgccagtagcttggctgcctggagcatggagccggtggtccgcaggctgtccacccagttcacagctgccaatgagctggcctgccgaggcttggaccacctggaggaaaagatccccgccctccagtacccccctgaaaagattgcttctgagctgaaggacaccatctccacccgcctccgcagtgccagaaacagcatcagcgttcccatcgcgagcacttcagacaaggtcctgggggccgctttggccgggtgcgagcttgcctggggggtggccagagacactgcggaatttgctgccaacactcgagctggccgactggcttctggaggggccgacttggccttgggcagcattgagaaggtggtggagtacctcctccctgcagacaaggaagagtcagcccctgctcctggacaccagcaagcccagaagtctcccaaggccaagccaagcctcttgagcagggttggggctctgaccaacaccctctctcgatacaccgtgcagaccatggcccgggccctggagcagggccacaccgtggccatgtggatcccaggcgtggtgcccctgagcagcctggcccagtggggtgcctcagtggccatgcaggcggtgtcccggcggaggagcgaagtgcgggtaccctggctgcacagcctcgcagccgcccaggaggaggatcatgaggaccagacagacacggagggagaggacacggaggaggaggaagaattggagactgaggagaacaagttcagtgaggtagcagccctgccaggccctcgaggcctcctgggtggtgtggcacataccctgcagaagaccctccagaccaccatctcggctgtgacatgggcacctgcagctgtgctgggcatggcagggagggtgctgcacctcacaccagcccccgctgtctcctcaaccaaggggagggccatgtccctatcagatgccctgaagggcgttactgacaacgtggtggacacagtggtgcattacgtgccgctccccaggctgtcgctgatggagcccgagagcgaattccgggacatcgacaacccaccagccgaggtcgagcgccgggaggcggagcgcagagcgtctggggcgccgtccgccggcccggagcccgccccgcgtctcgcacagccccgccgcagcctgcgcagcgcgcagagccccggcgcgccccccggcccgggcctggaggacgaagtcgccacgcccgcagcgccgcgcccgggcttcccggccgtgccccgcgagaagccaaagcgcagggtcagcgacagcttcttccggcccagcgtcatggagcccatcgtgggccgcacgcattacagccagctgcgcaagaagagctgagtcgccgcaccagccgccgcgccccgggccggcgggtttctctaacaaataaacagaacccgcactgcccaggcgagcgttgccactttcaaagtggtcccctggggagctcagcctcatcctgatgatgctgccaaggcgcactttttatttttattttatttttattttttttttagcatccttttggggcttcactctcagagccagtttttaagggacaccagagccgcagcctgctctgattctatggcttggttgttactataagagtaattgcctaacttgatttttcatctctttaaccaaacttgtggccaaaagatatttgaccgtttccaaaattcagattctgcctctgcggataaatatttgccacgaatgagtaactcctgtcaccactctgaaggtccagacagaaggttttgacacattcttagcactgaactcctctgtgatctaggatgatctgttccccctctgatgaacatcctctgatgatcaaggctcccagcaggctactttgaagggaacaatcagatgcaaaagctcttgggtgtttatttaaaatactagtgtcactttctgagtacccgccgcttcacaggctgagtccaggcctgtgtgctttgtagagccagctgcttgctcacagccacatttccatttgcatcattactgccttcacctgcatagtcactcttttgatgctggggaaccaaaatggtgatgatatatagactttatgtatagccacagttcatccccaaccctagtcttcgaaatgttaatatttgataaatctagaaaatgcattcatacaattacagaattcaaatattgcaaaaggatgtgtgtctttctccccgagctcccctgttccccttcattgaaaaccaccacggtgccatctcttgtgtatgcagggctatgcacctgcaggcacgtgtgtatgcactccccgcttgtgtttacacaagctgtggggtgttacgcatgcctgcttttttcacttaataatacagcttggagagatttttgtatcacattataaatcccactcgctctttttgatggccacataataactactgcataatatggatacgccttatttgatttaactagttccctaatgatggacttttaagttgtttcctttttttttcttttttgctactgcaaacgatgctataataaatgtccttatc

SEQ ID NO: 1505 - DNA, 835 bp, Homo Sapiens
taggctaggtacgaggcctgggtggttgagctgaaggggatactcaccggctgaagttccgactgtgattccccctacccccacaaggcgattttgaccccctgagggctgctctagaggactcaggccccgaagctgtcccaggaaggtccccgctgcatcccaccacccaagctgtgcctcatggagtcgatgtttagcagccctgccgaggcggcgctgcagcgagagaccggggtgccaggactgcttactcctcttccggacctggacggagtgtacgagctggagcgagtcgctggatttgtccgcgacctggggtgtgaacgagttgccttgcagttccctgaccagctattgggagatgctgtggctgtggctgcacgactggaggagacgacagggtcaaagatgttcattctgggtgacacagcctacggcagctgctgcgtggatgtgctgggtgctgagcaagctggagctcaggctctcatacattttggccctgcctgcttaagccctccagcccgcccactgcccgttgccttcgtgcttcgtcaacgttctgtggccttggagctctgtgtcaaggcctttgaggcccagaacccagaccccaaagcgcctgtggtgctgctgagtgagccggcctgtgcccatgccctggaggctttggctactctcctgcgcccacggtacctggacctgctagtctccagcccagcttttccccaaccagtgggttccctgagtccagagcctatgccctagagcgtttgggcgccgttccccttgcccaaggaggcgtctaagagtatggtgcttctatgtaggg

SEQ ID NO: 1506 - DNA, 566 bp, Homo Sapiens
  misc_feature (557)..(557): n is a, c, g, or t
gagttatgaactgctcctcctctgacctgcagtgactgaatcacagtttaggtccctgtctagcaggggctgaggtgtcaggaggggacttctggcccaccttagcgttcaggcctctgtgagtgggcatgcagcagatattgtggggaggcgatggccagatgggactagtgttccctcctatctggccacggcgttatgcggcgatggggtgggccggggtggtcctggctggcattgcctgagccggcagtgatgaagtggggagctttgccctttgacaggtggtgggctggtctggggccttaatgtgaaaagacgagtggcaggcagctggagtagagcgagcccagcagccctaaaaggctgcttcatggccatctagtccccagttcagggcagcatccaatagcccacaaggccagcgtgggtggggcgggggtggtcccacagctgggttccacctgaagagcctccgtgcctcggagcatggagaggcaggctatgggtggcacctctcccgtcctgccctgtgttcccagttgaagaacctggancttgagtac

SEQ ID NO: 1507 - DNA, 2041 bp, Homo Sapiens
tttcagtttctccagctgctggctttttggacacccactcccccgccaggaggcagttgcaagcgcggaggctgcgagaaataactgcctcttgaaacttgcagggcgaagagcaggcggcgagcgctgggccggggagggaccacccgagctgcgacgggctctggggctgcggggcagggctggcgcccggagcctgagctgcaggaggtgcgctcgctttcctcaacaggtggcggcggggcgcgcgccgggagaccccccctaatgcgggaaaagcacgtgtccgcattttagagaaggcaaggccggtgtgtttatctgcaagccattatacttgcccacgaatctttgagaacattataatgacctttgtgcctcttcttgcaaggtgttttctcagctgttatctcaagacatggatataaaaaactcaccatctagccttaattctccttcctcctacaactgcagtcaatccatcttacccctggagcacggctccatatacataccttcctcctatgtagacagccaccatgaatatccagccatgacattctatagccctgctgtgatgaattacagcattcccagcaatgtcactaacttggaaggtgggcctggtcggcagaccacaagcccaaatgtgttgtggccaacacctgggcacctttctcctttagtggtccatcgccagttatcacatctgtatgcggaacctcaaaagagtccctggtgtgaagcaagatcgctagaacacaccttacctgtaaacagagagacactgaaaaggaaggttagtgggaaccgttgcgccagccctgttactggtccaggttcaaagagggatgctcacttctgcgctgtctgcagcgattacgcatcgggatatcactatggagtctggtcgtgtgaaggatgtaaggccttttttaaaagaagcattcaaggacataatgattatatttgtccagctacaaatcagtgtacaatcgataaaaaccggcgcaagagctgccaggcctgccgacttcggaagtgttacgaagtgggaatggtgaagtgtggctcccggagagagagatgtgggtaccgccttgtgcggagacagagaagtgccgacgagcagctgcactgtgccggcaaggccaagagaagtggcggccacgcgccccgagtgcgggagctgctgctggacgccctgagccccgagcagctagtgctcaccctcctggaggctgagccgccccatgtgctgatcagccgccccagtgcgcccttcaccgaggcctccatgatgatgtccctgaccaagttggccgacaaggagttggtacacatgatcagctgggccaagaagattcccggctttgtggagctcagcctgttcgaccaagtgcggctcttggagagctgttggatggaggtgttaatgatggggctgatgtggcgctcaattgaccaccccggcaagctcatctttgctccagatcttgttctggacagggatgaggggaaatgcgtagaaggaattctggaaatctttgacatgctcctggcaactacttcaaggtttcgagagttaaaactccaacacaaagaatatctctgtgtcaaggccatgatcctgctcaattccagtatgtaccctctggtcacagcgacccaggatgctgacagcagccggaagctggctcacttgctgaacgccgtgaccgatgctttggtttgggtgattgccaagagcggcatctcctcccagcagcaatccatgcgcctggctaacctcctgatgctcctgtcccacgtcaggcatgcgagggcagaaaaggcctctcaaacactcacctcatttggaatgaagatggagactcttttgcctgaagcaacgatggagcagtgaccctctaatcaactcggtggcctaaagaaaaatcttgggtaacattttcacttcaatttccctctgggatcattgtaatccatgaaaaaaaataattttaaagaaagagttaaaatacttaaaaaaaaaaaaaaa

SEQ ID NO: 1508 - DNA, 216 bp, Homo Sapiens
  misc_feature (161)..(161): n is a, c, g, or t
gacgccggagccctctgaccgcacctctgaccacaacaaacccctactccacccgtcttgtttgtcccacccttggtgacgcagagccccagcccagaccccgcccaaagcactcatttaactggtattgcggagcacgaggcttctgcttactgcaactngctccggccgctgggcgtagtgcgactcggcggagtcccggcggcgcgtccttgt

SEQ ID NO: 1509 - DNA, 7683 bp, Homo Sapiens
tttatagcagcagcagaaatataccaccctagtggacacacctccttttagctaggtacctataaatgtccaggattttctattcaattgagaagaacccagcaaaatggggatctccacagtcatccttgaaatgtgtcttttatggggacaagttctatctacaggtgggtggatcccaaggactacagactacgcttcactgattccctcggaggtgcccttggatacaactgtagcagaaggttctccatttccctcggagttgaccctggagtcaactgtagcagaaggttctccgatttccttggagtcaaccctggagacaactgtagcagaaggttctctgattccctcagagtcaaccctggagtcaactgtagcagaaggatctgattctggtttggccctgaggctggtgaatggagatggcaggtgtcagggccgagtggagatcctataccgaggctcctggggcgccgtgtgtgatgacagctgggacaccaatgatgccaacgtggtctgtaggcagctgggttgtggctgggccatgtcagctccaggaaatgcctggtttggccagggctcaggacccattgccctggatgatgtgcgctgctcaggacacgaatcctacctgtggagctgcccccacaatggctggctctcccataactgtggccatggtgaagatgctggtgttatctgctcagctgcccagcctcagtcaacactcaggccagaaagttggcctgtcaggatatcaccacctgtacccacagaaggatctgaatccagtttggccctgaggctggtgaatggaggcgacaggtgtcgaggccgggtggaggtcctataccgaggctcctggggcaccgtgtgtgatgactactgggacaccaatgatgccaatgtggtctgcaggcagctgggctgtggctgggccatgtcagccccaggaaatgcccagtttggccagggctcaggacccattgtcctggatgatgtgcgctgctcaggacacgagtcctacctgtggagctgcccccacaatggctggctcacccacaactgtggccatagtgaagacgctggtgtcatctgctcagctccccagtcccggccgacacccagcccagatacttggccgacctcacatgcatcaacagcaggacctgaatccagtttggccctgaggctggtgaatggaggtgacaggtgtcagggccgagtggaggtcctataccgaggctcctggggcaccgtgtgtgatgatagctgggacaccagtgacgccaatgtggtctgccggcagctgggctgtggctgggccacgtcagccccaggaaatgcccggtttggccagggttcaggacccattgtcctggatgacgtgcgctgctcaggctatgagtcctacctgtggagctgcccccacaatggctggctctcccataactgtcagcacagtgaagacgctggtgtcatctgctcagctgcccactcctggtcgacgcccagtccagacacgttgccgaccatcaccttacctgcatcgacagtaggatctgaatccagtttggccctgaggctggtgaatggaggtgacaggtgtcagggccgagtggaggtcctataccgaggctcctggggcaccgtgtgtgatgacagctgggacaccaatgatgccaatgtggtctgcaggcagctgggctgtggctgggccatgttggccccaggaaatgcccggtttggtcagggctcaggacccattgtcctggatgacgtgcgctgctcagggaatgagtcctacttgtggagctgcccccacaatggctggctctcccataactgtggccatagtgaagacgctggtgtcatctgctcaggacctgaatccagtttggccctgaggctggtgaatggaggtgacaggtgtcagggccgagtggaggtcctataccgaggctcttggggcaccgtgtgtgatgacagctgggacaccaatgatgccaatgtggtctgcaggcagctgggctgtggctgggccatgtcagccccaggaaatgcccggtttggtcagggctcaggacccattgtcctggatgatgtgcgctgctcaggacatgagtcctacctgtggagctgccccaacaatggctggctctcccacaactgtggccatcatgaagatgctggtgtcatctgctcagctgcccagtcccggtcgacgcccaggccagacacgttgtcgaccatcacgttacctccatcgacagtaggatctgaatccagtttgaccctgaggctggtgaatggaagtgacaggtgtcagggccgagtagaggtcctataccgaggctcctggggcaccgtgtgtgatgacagctgggataccaatgatgccaatgtagtctgcaggcagctgggctgtggctgggccacgtcggccccaggaaatgcccggtttggccagggctcaggacccattgttctggatgatgtgcgctgctcaggacacgagtcctacctgtggagctgcccccacaatggctggctctcccacaactgtggccatcatgaagatgctggtgtcatctgctcagtttcccagtcccggccgacacccagtccagatacttggccgacctcacatgcatcaacagcaggacctgaatccagcttggccctgaggctggtgaatggaggtgacaggtgtcagggccgagtggaggtcctataccgaggctcctggggcaccgtgtgtgatgatagctgggacaccagtgacgccaatgtggtctgccggcagctgggctgtggctgggccacgtcagccccaggaaatgcccggtttggccagggttcaggacccattgtcctggatgacgtgcgctgctcaggctatgagtcctacctgtggagctgcccccacaatggctggctctcccataactgtcagcacagtgaagacgctggtgtcatctgctcagctgcccactcctggtcgacgcccagtccagacacattgccgaccatcaccttgcctgcatcgacagtaggatctgaatccagtttggccctgaggctggtgaatggaggtgacaggtgtcagggccgagtggaggtcctataccaaggctcctggggcaccgtgtgcgatgacagctgggacaccaatgatgccaatgtcgtctgcaggcaactgggctgtggctgggccatgtcagccccaggaaatgcccggtttggtcagggctcaggacccattgtcctggatgatgcgcgctgctcaggacacgagtcttacctgtggagctgcccccacaatggctggctctcccacaactgtggccatagtgaagacgctggtgtcatctgctcagcttcccagtcccggccaacacctagtccagacacttggccaacctcacatgcatcaacagcaggatctgaatccagtttggccctgaggctggtgaatggaggtgacaggtgtcagggccgagtggaggtcctataccgaggctcctggggcaccgtgtgtgatgactactgggacaccaatgatgccaatgtggcttgcaggcagctgggctgtggctgggccatgtcagccccaggaaatgcccggtttggccagggttcaggacccattgtcctggatgatgtgcgctgctcaggacatgagtcctatctgtggagctgcccccacaatggctggctctcccacaactgtggccatcatgaagacgctggtgtcatctgctcagcttcccagtcccagccgacacccagcccagacacttggccaacctcacatgcatcaacagcaggatctgaatccagtttggccctgaggctggtgaatggaggtgacaggtgtcagggccgagtggaggtcctataccgaggctcctggggcaccgtgtgtgatgactactgggacaccaatgatgccaatgtggtttgcaggcagctgggctgtggctgggccacgtcagccccaggaaatgcccggtttggccagggttcaggacccattgtcctggatgatgtgcgctgctcaggacatgagtcctatctgtggagctgcccccacaatggctggctctcccacaactgtggccatcatgaagacgctggtgtcatctgctcagcttcccagtcccagccgacacccagcccagacacttggccaacctcacatgcatcaacagcaggatctgaatccagtttggccctgaggctggtgaatggaggtgacaggtgtcagggccgagtggaggtcctataccgaggctcctggggcaccgtgtgtgatgactactgggacaccaatgatgccaatgtggtttgcaggcagctgggctgtggctgggccacgtcagccccaggaaatgcccggtttggccagggttcaggacccattgtcctggatgatgtgcgctgctcaggacatgagtcctatctgtggagctgcccccacaatggctggctctcccacaactgtggccatcatgaagacgctggtgtcatctgctcagctttccagtcccagccgacacccagcccagacacttggccaacctctcgtgcatcaacagcaggatctgaatccactttggccctgagactggtgaatggaggtgacaggtgtcgaggccgagtggaggtcctataccaaggctcctggggcaccgtgtgtgatgactactgggacaccaatgatgccaacgtggtctgcaggcagctgggctgtggctgggccatgtcagccccaggaaatgcccagtttggccagggctcaggacccattgtcctggatgatgtgcgctgctcaggacacgagccttacctgtggagctgcccccacaatggctggctctcccacaactgtggccatcatgaagatgctggtgtcatctgctcagctgctcagtcccagtcaacgcccaggccagatacttggctgaccaccaacttaccggcattgacagtaggatctgaatccagtttggctctgaggctggtgaatggaggtgacaggtgtcgaggccgagtggaggtcctgtatcgaggctcctggggaaccgtgtgtgatgacagctgggacaccaatgatgccaatgtggtctgcaggcagctgggctgtggctgggccatgtcggccccaggaaatgcccggtttggccagggctcaggacccattgtcctgggtgatgtgcgctgctcagggaatgagtcctacctgtggagctgcccccacaaaggctggctcacccacaactgtggccatcacgaagacgctggtgtcatctgctcagccacccaaataaattctactacgacagattggtggcatccaacaactacaaccactgcaagaccctcttcaaattgtggtggcttcttattctatgccagtgggacattctccagcccatcctaccctgcatactaccccaacaatgctaagtgtgtttgggaaatagaagtgaattctggttatcgcataaacctgggcttcagtaatctgaaattggaggcacaccataactgcagttttgattatgttgaaatctttgatggatcattgaatagcagtctcctgctggggaaaatctgtaatgataccaggcaaatatttacatcttcttacaaccgaatgaccattcactttcgaagtgacatcagtttccaaaacactggctttttggcttggtataactccttcccaagcgatgccaccttgaggttggtcaatttaaattcatcctatggtctatgtgccgggcgtgtagaaatttaccatggtggcacctggggggcagtttgtgatgactcctggaccattcaggaagctgaggtggtctgcagacagctagggtgtggacgtgcagtttcagcccttggaaatgcatattttggctctggctctggccccatcaccctggacgatgtagagtgctcagggacggaatccactctctggcagtgccggaaccgaggctggttctcccacaactgtaatcatcgtgaagatgctggtgtcatctgctcaggaaaccatctatcgacacctgctccttttctcaacatcacccgtccaaacaactattcctgcggaggcttcctatcccaaccatcaggggacttttccagcccattctatcccgggaactatccaaacaatgccaagtgtgtgtgggacattgaggtgcaaaacaactaccgtgtgactgtgatcttcagagatgtccagcttgaaggtggctgcaactatgattatattgaagttttcgatggcccctaccgcagttcccctctcattgctcgagtttgtgatggggccagaggctccttcacttcttcctccaacttcatgtccattcgcttcatcagtgaccacagcatcacaaggagagggttccgggctgagtactactccagtccctccaatgacagcaccaacctgctctgtctgccaaatcacatgcaagccagtgtgagcaggagctatctccaatccttgggcttttctgccagtgaccttgtcatttccacctggaatggatactacgagtgtcggccccagataacgccgaacctggtgatattcacaattccctactcaggctgcggcaccttcaagcaggcagacaatgacaccatcgactattccaacctcctcacagcagctgtctcaggtggcatcatcaagaggaggacagacctccgtattcacgtcagctgcagaatgcttcagaacacctgggtcgacaccatgtacattgctaatgacaccatccacgttgctaataacaccatccaggtcgaggaagtccagtatggcaattttgacgtgaacatttccttttatacttcctcatctttcttgtatcctgtgaccagccgcccttactacgtggacctgaaccaggacttgtacgttcaggctgaaatcctccattctgatgctgtactgaccttgtttgtggacacctgcgtggcatcaccatactccaatgacttcacgtctttgacttatgatctaatccggagtggatgcgtgagggatgacacctacggaccctactcctcgccatctcttcgcattgcccgcttccggttcagggccttccacttcctgaaccgcttcccctccgtgtacctgcgttgtaaaatggtggtgtgcagagcgtatgacccctcttcccgctgctaccgaggctgtgtgttgaggtcgaagagggatgtgggctcctaccaggaaaaggtggacgtcgtcctgggtcccatccagctgcagacccccccacgccgagaagaggagcctcggtaggtggtcgctctcagaccccattgtccaccggggcgcagacccctgactcggggacttgggatgttcctcttggtgtcatattccaactcagattgagccctacattgtgctgcacctggtcatacggagttgaatcagacctggttcccgcctcccccaaggctcatggtccttggaggacccgttgcagggtgaggtcaagagagttctgacctggatggcccatagacctgacgtcccagaatccatgcttctcatctgcaaaatgaaaatgtcaatacttacttcttagcactgttgagagggttacttacataaaggaattttggtgaaactgc

SEQ ID NO: 1510 - DNA, 483 bp, Homo Sapiens
  misc_feature (466)..(466): n is a, c, g, or t
gcacgaggtttattatatgtgagtggggaccaggagagtgaatataaaagaaaatggaagaaaagccacagaacattaacatttattgagcatctactaagtatcaagtgttggaccagtctctttatatgtaaacaatttcatttaatctctatataatttatgaggtagatacagttattaacaggacaaaattacttttatgtctatattgataacccctgtttctaaaataaaatataaatcttgaaaattagaccagttatgccaagtaatatttttaagtatttcattattggtagtattaaaacctaagtggaaaaatatggaaatttggtttcctcactataggataatccgactgtggtagttgaagacctcaggctttgcacagtgaaacattgtgaagacatagagcgacgattctgctttgaggtggtctcgccaacaaagtaagtggttctanaggatctgtgatttgct

SEQ ID NO: 1511 - DNA, 427 bp, Homo Sapiens
  misc_feature (22)..(22): n is a, c, g, or t
tttttttttttttttttccgantcaaaggttaccattatatggtatagggctttggaaactcccagactgttgaactttcctattgtttgtgatctagataaattggagttactacgtggccaagtctaaaagcactcataccttcctcagaattgtctagtaaacgaaatcagccacgtacagtaacatgtttgtaaaagaccctattgatgagaagcacggaaccacagaatgtttctctttttaatgcacaagtggactgagatggcatcagttattcactgccgcagaaaattaatattcatttattcccattttttcccaattttatgaaaaagagtatctgaaaatggggcaacacagaggatcaaaattttgtcaacaaagcacatggtttctaactgcaggcaatttatgttttcctca

SEQ ID NO: 1512 - DNA, 436 bp, Homo Sapiens
gtttatgtaaggggggaaatattcaaacatgaaatgaaagaaaaaaatagtcaaaattatttactttaacttctaacctatatagagtctaagtggacttccaataaatactagaaataaaaaaaagattcacttaaaaatagacaaatttgttagatttcatttagttaagaaaaatcatccagaataaattaggtctggatttatatagtaccttttaaagatattaatgttaactgtaatagaagggtgaaaagatctacttttttaaccacataaacctttacaaaaagaccacccaacaacttaataaggctcctcaaatatggatgaaaatccggtaccttaaagaagtaattgttttaatggttaacagagtttaaaatttcccaaattcttgaccagagaattacttactaggcgaacctctaataga

SEQ ID NO: 1513 - DNA, 1690 bp, Homo Sapiens
aagcataacaggacccggtgcatttcaaggactgaaataaggagggccgacagcatgacttctgaagaccaagaacctgagcgggactatgagaacgagtctgagtcttcggagcccaaactgggcgaggaatccatggaaggggatgagcacattcacagcgaagtgagtgaaaaagtcctgatgaatagtgagaggcctgatgagaaccacagtgagccctctcaccaggacgtcatcaaggtgaaggaagaatttacagaccccacttacgacatgttttacatgagccagtatggactgtacaatggtgggggtgccagcatggccgccttgcatgagagctttacatcgtctctgaattatggcagccctcaaaagttctccccagaaggtgacctatgttctagcccagaccccaaaatctgttatgtgtgcaagaagagtttcaaaagctcctacagtgtgaaacttcactacaggaacgttcacttgaaagagatgcacgtctgcacagtggctggttgcaatgctgcattcccctctcgccgaagccgagacagacacagtgccaacataaacctacatcgtaaactgttgaccaaagaactcgatgacatgggcctggactcgtcgcagccctcccttagcaaggacctccgcgatgaatttttggtgaagatatatggtgcccagcaccccatggggctcgatgtcagggaagacgcctcctctcccgcagggactgaagactcccacctgaacgggtatgggagaggcatggcagaggactacatggtccttgacttgagcaccacctccagcctccagtccagcagcagtatccattcctccagagaatccgacgcaggcagcgatgaggggattcttctcgatgacattgacggggcgagtgacagtggggagtcggcacacaaggccgaggcccctgccctccctggcagcctaggggctgaagtttcaggatctcttatgttcagcagcttgtctgggagcaatggtgggatcatgtgcaacatttgccacaaaatgtacagcaacaaggggaccctgagagtgcactacaaaactgtgcatttgagagaaatgcacaagtgcaaagtcccaggttgcaatatgatgttttcctctgtacgaagccgaaatcggcacagtcagaaccctaatctccacaaaaacattcccttcacttcagtagattagtctcagaatggacactacaaatgccagctctcaccagatggcctacgtgtttgaactgccatagtcagtgtgcgcttatgtacttggggtgtgtgtgtgtgtgtgtgtgtgtgtgtgtgtgtgtgtgcataaatgtatgctctgtggctacatatacacacacgtatttccttgagataaacaagataaacactaggtgcttttgaatttttttcacttccctttatagttttgggaaaggagtgggatctttgatttcagggtgaaaacagagtacccctttaaacacacacacacacacgcacatacacacacacacacacacgcacacacacacacacacacagtgtgcaactagccccagttttgacagaataattcttggtcttccccaaagagacaatttgttgtacccatgactgttgcctgcaaaaataaaagggaaaaaaaaaaaaaaaaaaaaaaa

SEQ ID NO: 1514 - DNA, 2350 bp, Homo Sapiens
ccgttgctgtcgcctcaaaggattggctaaaagcaagcaactggattgaacaccctaagaagaaagattcacactgcaccagagatatcagaaagaatgaaaactctgccgctgtttgtgtgcatctgtgcactgagtgcttgcttctcgttcagtgaaggtcgagaaagggatcatgaactacgtcacagaaggcatcatcaccaatcacccaaatctcactttgaattaccacattatcctggactgctagctcaccagaagccgttcattagaaagtcctataaatgtctgcacaaacgctgtaggcctaagcttccaccttcacctaataagccccccaaattcccaaatcctcaccagccacctaaacatccagataaaaatagcagtgtggtcaaccctaccttagtggctacaacccaaattccatctgtgactttcccatcagcttccaccaaaattactacccttccaaatgtgacttttcttccccagaatgccaccaccatatcttcaagagaaaatgttaacacaagctcttctgtagctacattagcaccagtgaattccccagctccacaagacaccacagctgccccacccacaccttctgcaactacaccagctccaccatcttcctcagctccaccagagaccacagctgccccacccacaccttctgcaactacacaagctccaccatcttcctcagctccaccagagaccacagctgccccacccacacctcctgcaactacaccagctccaccatcttcctcagctccaccagagaccacagctgccccacccacaccttctgcaactacaccagctccactatcttcctcagctccaccagagaccacagctgtcccacccacaccttctgcaactaccctagacccatcatccgcctcagctccaccagagaccacagctgccccacccacaccttctgcaactacaccagctccaccgtcttccccagctccacaagagaccacagctgccccaattaccacacctaattcttccccaactactcttgcacctgacacttctgaaacttcagctgcacccacacaccagactactacttcggtcactactcaaactactactactaaacaaccaacttcagctcctggccaaaataaaatttctcgatttcttttatatatgaagaatctactaaacagaattattgacgacatggtggagcaatagtatattgtatgttgtaaagtgttctgtcatttacaagatgtgattcatgagtgcagaactaccacctttcttttagcaccaatcccaacatgaaattatattactcagatttaaagcactatcattaatctttcaatctaattattcaccaccacaagacctattaacaagacaaaatgcctctatcccacaagccagatgcaggtctggggttcaaaataactctttggatcctacagagatagcctactgagggcaaagaaagtccttagataaagagagaatattgtatgggccatcaaccatttacttttccctgaatgttagaaactcacaaaaccactaccttgtacccccatcaaaatcccacctgaaccatctaatcctataaacataaaggggtaaaattggaactctccagatgaacaaagacatctaaatatctgtagatagaaacatttatctatctaaatatattgatagacctgtcattgtattgattaatgacaaaaccctttagataattatcttccattttaaataaaattttatttcacaaatatgagccaagaaagaggaaagttgatttgaagtgaggattagaagtgaatgacaataaagtctggcagccaagcacgaaccaagactggcactatttttcttagtgtatataattgtttaaactgcaaggttgacatttattgtgttgtgtctaagttaatttcgatctaatgtacctgattctagcctctgtgaacaacaagaatatgtttgtgtatgttcacatggtgcttataatatttcactatcaattcaattaattcacataaattccatgtgaaatgtattcaacaatggaatattttctaaaacatttagtatacatttgaacgtattttaaaccatgccaaactactgctttaatgtcaagtttgcagaattgtctctgaaaataaaaaccctgactttagttgtaaaacaataaaagttagctacttggtatacggagatgttaatttgggatatggaggcatttttatcttctgtcactactacttaaaactctgatgattatgttagatttttttgctaactaataaagatttcaaatggcaattta

SEQ ID NO: 1515 - DNA, 3367 bp, Homo Sapiens
tgtgggccatcaacaaggtcccacaaggtgaccaagaatgtgagcaagcccaggcacagccactgtgggcgcctgaccaaacagcactaaatttgtgtgggacatgatcccagaggtgtgtggcttcacccctcaacgagtggcgtggcatggagttactgaatctccaaggtcaaacaggccctcaaattcatcaagaaaagggtagggacaaacatctgtaccaagagaaggcaggaggagctgagcaacgtcctgctgccatgaggaaagcagctgccaagaaggactgagcccctgccatctgcctataatgaaagctttgcaaaataaaataaatataaaataaagtaataaaattaaattaaatttaaaaataaaataaagcaaaacaaaataaaatatataaagtaaaaattgttaaaatgcaaaacaatatggacataaatacagaaacacagggaaacttctttaggcactcatttacaggtaaaaatatgaaattgaataaaggtcatctggtgtcaaataatataggccttatctattataagagtttggactgaaaagcaaaagtgagataacaaaaaaaagcttttcagaatattattttgtatagatatgtgaaggatgaagggtgggtgaaaggaccaaaaacagaaacacagtcttcctgaatgaatgacaatcagaattccgctgcccaaagtagtccgacaattaaatggatttctaggaaaagctaccttaagaaggctggttaccatctgggttttcacagtgctttcacattcttatcactttcaacactactgcaaataggaagggacagtaacatttagaagagaacaaaacagaaactcttggaagcaggaaaggtgcatgactcaaagagggaaattcctgtgccataaaaggattgctggtgtataaaatgctctatatatgccaattatcaatttcctttcatgttcagcatttctactccttccaagaagagcagcaaagctgaagttagcagcagcagcaccagcagcaacagcaaaaaacaaacatgagtgtgaagggcatggctatagccttggctgtgatattgtgtgctacagttgttcaaggtatgcagtaatttttatttctcaacctataagttccttttctaatgtttcaaatgtcttttcttccacttttatcctaaaagacatgataaagttttatttaatctcacagattagaagttactacagctttagcacagaaatggtggacatgtttaagatactagagatgattattgaaactagaaattatgaacttcatggaatttttgatttggctagaatatctggcaaaagcctttagcaacagttttaaatgtctgttaagaagattttatatagcgatcatgttaacaagcttcctgggaaaatatttgaggataaaatcaagggggcaaaacaagcttcacctccaataaacttccttcatgcttcccatttgttagacgaattgcttactaatttaatgagaaaataatcaacatcttacttaacttttcccagtaacagatgtgttaagtgctatttgacaaattactatctttacccttaatgaaaattctgctcacgttcaccaccagctataaaccacagccatctgttgcaatcagacgcattactaactaatgctatgatctattctaggcttccccatgttcaaaagaggacgctgtctttgcataggccctggggtaaaagcagtgaaagtggcagatattgagaaagcctccataatgtacccaagtaacaactgtgacaaaatagaagtgatgtaagtaatgaacttgctgaagatgacaatggtgcaggcttttttgtttatgtatttgcatctaaactttaagactcttttgtatgttcttttaacagtattaccctgaaagaaaataaaggacaacgatgcctaaatcccaaatcgaagcaagcaaggcttataatcaaagtaagttaccaaattactcccatgttataatctgttttatccaagacagatcttttgaaaaagaaaataatgtggacaactacagaaagattctgctatgatcctgtgtgaaatattctgttaaggggtccttggttgtaacagcttccccttcttactacatgtttttagatgtcctgggggaaacaagaacagcccaagtaaataaaactcttgttttcttattccagaaagttgaaagaaagaatttttaaaaatatcaaaacatatgaagtcctggaaaagagcatctgaaaaacctagaacaagtttaactgtgactactgaaatgacaagaattctacagtaggaaactgagacttttctatggttttgtgactttcaacttttgtacagttatgtgaaggatgaaaggtgggtgaaaggaccaaaaacagaaatacagtcttcctgaatgaatgacaatcagaattccactgcccaaaggagtccaacaattagatggatttctaggaaaagctaccttaagaaaggctggttaccatcggagtttacaaagtgctttcacgttcttacttgttgcattatacattcatgcatttctaggctagagaaccttctagatttgatgcttacaactattctgttgtgactatgagaacatttctgtctctagaagtcatctgtctgtattgatctttatgctatattactatctgtggttacggtggagacattgacattattactggagtcaagcccttataagtcaaaagcatctatgtgtcgtaaaacattcctcaaacattttttcatgcaaatacacacttctttccccaaacatcatgtagcacatcaatatgtagggagacattcttatgcatcatttggtttgttttataaccaattcattaaatgtaattcataaaatgtactatgaaaaaaattatacgctatgggatactggcaaaagtgcacatatttcataaccaaattagtagcaccagtcttaatttgatgtttttcaacttttattcattgagatgttttgaagcaattaggatatgtgtgtttactgtactttttgttttgatccgtttgtataaatgatagcaatatcttggacacatctgaaatacaaaatgtttttgtctaccaaagaaaaatgttgaaaaataagcaaatgtatacctagcaatcacttttactttttgtaattctgtctcttagaaaaatacataatctaatcaaatttctttgttcatgcctatatactgtaaatttaggtagactcaagactagtttaaagaatcaaagtcatttttttctctaataaactaccacaacctttcttttttaaaaaaagatc

SEQ ID NO: 1516 - DNA, 1740 bp, Homo Sapiens
gagtagctgggattacaggcatgtgccaccacgcctcgctaatattagtatttttcatacagacaagatctcactatgttgctcagggtagtctcgaattctgggactcaaatgatcctcccacttcagcctcccaaagtgctgggattacaggcataagccatcatgcccggcctctgacgctgtttctttcaacccccaggatttcagattccaccagcttatggagaagggaaccaagttcgagatgcgtgattgcccagaaagttggaggctgagctgagacttgaacccagagaccagaacctccagaggtcaaagtcctcctgggtcccccagagaagggccctgagatgacagctcgttggtcctcatggaagcgtgacccccccagtagactttctcccacacccaaccttggtttcctcatctatatgatagggacaagccagactctacctccctggtggtcatggtctccgcttattcgggttcataaccttaaaggcccctcgcaccacctcagtgagccatttatgcctggcacagggccaactctcagtgcatatctgcaaaggaaccaatgaatgagtgaatgaagtgacaaatgaataaaggaataaatgaatgaggcacttatcatgtaccaggctttcgttaccacgtcccatttattcctctgaggcagggtctattttatccttgttacagatggggaaactaaggcccagggaggagcaaagtcttccccaagtatgtacccactcagaacttgagctctgaatgtctcccacccagcttagcccaagagcggggttcagtgatgcccaccccctaaggctctagagaaagggggtaggcccacatgccagtttgggggtggtaaagccaggtaagttttctttatgggtcccctgaaaccctgaaagtgaaccccagtcctgcatgaaagtgagctccccatagctcaaggtattcaagcacaatacggctttgagtgctgaagcaggctgtgcaggcttggatagtgacatgccctctctgagcctcaatttccccacctgtcaacagcagacagtgacagctgtgatcaggggatcacagtgcatggggatgggtgggtgcatggggatggaggggcatttgggagccctccccgataccaccccctgcagccacccagatagcctgtcctggcctgtctgtcccagtccagggctgaaagggtgcgggtcctgcccgcccctaggtctggaggcggagtcgcggtgacccgggagcccaataaatctgcaacccacaatcacgagctgctcccgtaagccccaaggcgacctccagctgtcagcgctgagcacagcgcccagggagagggacagacagccggctgcatgggacagcggaacccagagtgagaggggaggtggcaggacagacagacagcaggggcggacgcagagacagacagcggggacagggaggccgacacggacatcgacagcccatagattcctaacccagggagccccggcccctctcgccgcttcccaccccagacggagcggggacaggctgccgagcatcctcccacccgccctccccgtcctgcctcctcggcccctgccagcttcccccgcttgagcacgcagggcgtccgaggacgcgctgggcctccgcacccgccctcatggaggccgtggagaccggggaacggcccaccttcggagcctgggactacgg

SEQ ID NO: 1517 - DNA, 5458 bp, Homo Sapiens
gccccagggcctggagaggtctgaagaaacctgggagccagcagcccggggctccactctgggttctgaaagcccattccctgctctgcggctcctcccaccccacctcttctcagccttgcagctcaagggttgatctcaggagtccaggacccaggagagggaagaatctgaggaacacagaacagtgagcgttgcccacaccccatctcccgtcaccacatctcccctcaccctcaccctccctgcctggccctggaccccatcccaggacctccctatcagctgacttcttccagtgtcttgcaggcccctctgggctcctccctcccctggcttttcctaccactccccctctatcggcgtctatctgtaggtgccctgggatttataaaactgggttccgaatgctgaataagagacggtaagagccaaggcaaaggacagcactgttctctgcctgcctgataccctcaccacctgggaacatcccccagacaccctcttaactccgggacagagatggctggcggagcctggggccgcctggcctgttacttggagttcctgaagaaggaggagctgaaggagttccagcttctgctcgccaataaagcgcactccaggagctcttcgggtgagacacccgctcagccagagaagacgagtggcatggaggtggcctcgtacctggtggctcagtatggggagcagcgggcctgggacctagccctccatacctgggagcagatggggctgaggtcactgtgcgcccaagcccaggaaggggcaggccactctccctcattcccctacagcccaagtgaaccccacctggggtctcccagccaacccacctccaccgcagtgctaatgccctggatccatgaattgccggcggggtgcacccagggctcagagagaagggttttgagacagctgcctgacacatctggacgccgctggagagaaatctctgcctcactcctctaccaagctcttccaagctccccagaccatgagtctccaagccaggagtcacccaacgcccccacatccacagcagtgctggggagctggggatccccacctcagcccagcctagcacccagagagcaggaggctcctgggacccaatggcctctggatgaaacgtcaggaatttactacacagaaatcagagaaagagagagagagaaatcagagaaaggcaggcccccatgggcagcggtggtaggaacgcccccacaggcgcacaccagcctacagccccaccaccacccatgggagccttctgtgagagagagcctctgttccacatggccctggaaaaatgaggattttaaccaaaaattcacacagctgctacttctacaaagacctcaccccagaagccaagatcccctggtcaagagaagctggcctgattatgtggaggagaatcgaggacatttaattgagatcagagacttatttggcccaggcctggatacccaagaacctcgcatagtcatactgcagggggctgctggaattgggaagtcaacactggccaggcaggtgaaggaagcctgggggagaggccagctgtatggggaccgcttccagcatgtcttctacttcagctgcagagagctggcccagtccaaggtggtgagtctcgctgagctcatcggaaaagatgggacagccactccggctcccattagacagatcctgtctaggccagagcggctgctcttcatcctcgatggtgtagatgagccaggatgggtcttgcaggagccgagttctgagctctgtctgcactggagccagccacagccggcggatgcactgctgggcagtttgctggggaaaactatacttcccgaggcatccttcctgatcacggctcggaccacagctctgcagaacctcattccttctttggagcaggcacgttgggtagaggtcctggggttctctgagtccagcaggaaggaatatttctacagatatttcacagatgaaaggcaagcaattagagcctttaggttggtcaaatcaaacaaagagctctgggccctgtgtcttgtgccctgggtgtcctggctggcctgcacttgcctgatgcagcagatgaagcggaaggaaaaactcacactgacttccaagaccaccacaaccctctgtctacattaccttgcccaggctctccaagctcagccattgggaccccagctcagagacctctgctctctggctgctgagggcatctggcaaaaaaagacccttttcagtccagatgacctcaggaagcatgggttagatggggccatcatctccaccttcttgaagatgggtattcttcaagagcaccccatccctctgagctacagcttcattcacctctgtttccaagagttctttgcagcaatgtcctatgtcttggaggatgagaaggggagaggtaaacattctaattgcatcatagatttggaaaagacgctagaagcatatggaatacatggcctgtttggggcatcaaccacacgtttcctattgggcctgttaagtgatgagggggagagagagatggagaacatctttcactgccggctgtctcaggggaggaacctgatgcagtgggtcccgtccctgcagctgctgctgcagccacactctctggagtccctccactgcttgtacgagactcggaacaaaacgttcctgacacaagtgatggcccatttcgaagaaatgggcatgtgtgtagaaacagacatggagctcttagtgtgcactttctgcattaaattcagccgccacgtgaagaagcttcagctgattgagggcaggcagcacagatcaacatggagccccaccatggtagtcctgttcaggtgggtcccagtcacagatgcctattggcagattctcttctccgtcctcaaggtcaccagaaacctgaaggagctggacctaagtggaaactcgctgagccactctgcagtgaagagtctttgtaagaccctgagacgccctcgctgcctcctggagaccctgcggttggctggctgtggcctcacagctgaggactgcaaggaccttgcctttgggctgagagccaaccagaccctgaccgagctggacctgagcttcaatgtgctcacggatgctggagccaaacacctttgccagagactgagacagccgagctgcaagctacagcgactgcagctggtcagctgtggcctcacgtctgactgctgccaggacctggcctctgtgcttagtgccagccccagcctgaaggagctagacctgcagcagaacaacctggatgacgttggcgtgcgactgctctgtgaggggctcaggcatcctgcctgcaaactcatacgcctggggctggaccagacaactctgagtgatgagatgaggcaggaactgagggccctggagcaggagaaacctcagctgctcatcttcagcagacggaaaccaagtgtgatgacccctactgagggcctggatacgggagagatgagtaatagcacatcctcactcaagcggcagagactcggatcagagagggcggcttcccatgttgctcaggctaatctcaaactcctggacgtgagcaagatcttcccaattgctgagattgcagaggaaagctccccagaggtagtaccggtggaactcttgtgcgtgccttctcctgcctctcaaggggacctgcatacgaagcctttggggactgacgatgacttctggggccccacggggcctgtggctactgaggtagttgacaaagaaaagaacttgtaccgagttcacttccctgtagctggctcctaccgctggcccaacacgggtctctgctttgtgatgagagaagcggtgaccgttgagattgaattctgtgtgtgggaccagttcctgggtgagatcaacccacagcacagctggatggtggcagggcctctgctggacatcaaggctgagcctggagctgtggaagctgtgcacctccctcactttgtggctctccaagggggccatgtggacacatccctgttccaaatggcccactttaaagaggaggggatgctcctggagaagccagccagggtggagctgcatcacatagttctggaaaaccccagcttctcccccttgggagtcctcctgaaaatgatccataatgccctgcgcttcattcccgtcacctctgtggtgttgctttaccaccgcgtccatcctgaggaagtcaccttccacctctacctgatcccaagtgactgctccattcggaaggaactggagctctgctatcgaagccctggagaagaccagctgttctcggagttctacgttggccacttgggatcagggatcaggctgcaagtgaaagacaagaaagatgagactctggtgtgggaggccttggtgaaaccaggagatctcatgcctgcaactactctgatccctccagcccgcatagccgtaccttcacctctggatgccccgcagttgctgcactttgtggaccagtatcgagagcagctgatagcccgagtgacatcggtggaggttgtcttggacaaactgcatggacaggtgctgagccaggagcagtacgagagggtgctggctgagaacacgaggcccagccagatgcggaagctgttcagcttgagccagtcctgggaccggaagtgcaaagatggactctaccaagccctgaaggagacccatcctcacctcattatggaactctgggagaagggcagcaaaaagggactcctgccactcagcagctgaagtatcaacaccagcccttgacccttgagtcctggctttggctgacccttctttgggtctcagtttctttctctgcaaacaagttgccatctggtttgccttccagcactaaagtaatggaactttgatgatgcctttgctgggcattatgtgtccatgccagggatgccacagggggccccagtccaggtggcctaacagcatctcagggaatgtccatctggagctggcaagacccctgcagacctcatagagcctcatctggtggccacagcagccaagcctagagccctccggatcccatccaggcgcaaagaggaataggagggacatggaaccatttgcctctggctgtgtcacagggtgagccccaaaattggggttcagcgtgggaggccacgtggattcttggctttgtacaggaagatctacaagagcaagccaacagagtaaagtggaaggaagtttattcagaaaataaaggagtatcacagctcttttagaatttgtctagcaggctttccagtttttaccagaaaacccctataaattaaaaattttttacttaaatttaagaattaaaaaaatacaaaaaagaaaaaatgaaaataaaggaataagaagttacctactccaaaaaaaaaaa

SEQ ID NO: 1518 - DNA, 288 bp, Homo Sapiens
  misc_feature (226)..(226): n is a, c, g, or t
  misc_feature (232)..(232): n is a, c, g, or t
tttttttttttttttttttttttttttttttttttttcaaaactgcaaaataaatttattgggggggggccggttaaaaagacaaatgatgatctgaattcaatccattaaattgctgataaaattgcaaatttcaactgaatttacattgaggcccaccaggggtagtgggctccaactggaacagtttatccccccagggtttttgagggcaaggaaaatccanaaaaanaaaaaattgggggttgcaacacagtttaagggcccaaaaataaattttcccccggg

SEQ ID NO: 1519 - DNA, 554 bp, Homo Sapiens
tctagatgcatgctcgagcgcgccgcagtgtgatggatatctgcagaattcggctgcatgtgtgtttgagctgcggggtaagcgggaaagacaccacacatagcgcagtcgggaccatcgccggagcctgaggacacttctctgtcgtcacagttagttttacatgtggcacccataaaagatgaggctgagaacacggaaagcttctcagccagtcaaatcaaatccaaacacaacgcactgccagagcaaagaggacatattcagaggtcgatgatagcctgccttcaggaggagaaaaaccatcgaagaatgaaaccggcttgtagtcttcaattaaaacactttattaaaggaagcaccacctaaggacgagagagaacatccttcaacaaccggagtagaattgaacgtgatatcgataacaatttgatcacgtcaaacaccaagagcaggagaaaaacctaaacaaacacagatatctcgagtaagacggaaaagtcaagtccctggagaagctggcagttatgccacgcccaatcaacatgtacaac

SEQ ID NO: 1520 - DNA, 561 bp, Homo Sapiens
tttcctattagattcatctgtatatggttgtttctcaaaactcagagggtaataaaggaggaggcaagatagagggtttttattgaaagtaggttatgcaaacttggcttgaaaggtacttatcattttaaaaattatgcctaatgatgcatcaaatacaaaaacatataatacatcaatagtcaaccctttccccataaaggcaaagttactgagaaatgtttatttttcctctggtaatggctaatccaggtaataatatgaaagcaaatggaaaattcacattgcttctttcattgcttctgtcccttaaacctgttaatctttcagaaccacattactgaggtgctggcctgtgcatggaaacccaatgatatccaggtcttacaggtccagggcccagtggacagacaggccctggtcctccacgctggccaccatgtcttcgatggcattccagtccagcttgctgaggatgctgccagtgctctcagacacgctgtccacaccgcccaccccaaaaggatgctctggctcttcctcttcagttggagacaagtc

SEQ ID NO: 1521 - DNA, 2734 bp, Homo Sapiens
gctcggcgctgtagccgccgctgccgccgctgctcttggctcggggacgcgggcgggcgctccgagaggctctggtgcctgcggctgctgctctcctccgacgcccggggctgcggcgctccgggtcccggcccctgtcccggcatctctcgggtccctgagccccggccacgggtcccgcgtccggccggagagaacgcactcagctgctcgagccgccccgggctcgcgcccccgggccatgaagaggggcccgtgaggcgcgcgcggagtcggaggaagaggagggaggagggaggccgaggaggagggcgcgggaggcggaggatgccgccgcggctgctgccgccgccgccacccgcgggtccccggcgaccctgactccagacccgaggatggagccggcgctgggcgctgcagctgctcccggcgcgtccccgaccaggtagctggtgtcacttcggtgtggttggaagaagactttctccccagctgcattcccggaggcgccctttcgacctggaggccgggtctgctggccacagggctgccgcactggctgggactgccagctgggcctggagacgctggtggctgtggactccccagcttggagcagtccctctttgacctcaccccttggagaagcaaccccatgaaggtgcccagccatgcaatgttcctggaaggccgtcctcctccttgccctggcctccattgccatccagtacacggccatccgcaccttcaccgccaagtcctttcacacctgccccgggctggcagaggccgggctggccgagcgactgtgcgaggagagccccaccttcgcctacaacctctcccgcaagacccacatcctcatcctggccaccacgcgcagcggctcctccttcgtgggccagctcttcaaccagcacctggacgtcttctacctgtttgagcccctctaccacgtccagaacacgctcatcccccgcttcacccagggcaagagcccggccgaccggcgggtcatgctaggcgccagccgcgacctcctgcggagcctctacgactgcgacctctacttcctggagaactacatcaagccgccgccggtcaaccacaccaccgacaggatcttccgccgcggggccagccgggtcctctgctcccggcctgtgtgcgaccctccggggccagccgacctggtcctggaggagggggactgtgtgcgcaagtgcgggctactcaacctgaccgtggcggccgaggcgtgccgcgagcgcagccacgtggccatcaagacggtgcgcgtgcccgaggtgaacgacctgcgcgccctggtggaagacccgcgattaaacctcaaggtcatccagctggtccgagacccccgcggcattctggcttcgcgcagcgagaccttccgcgacacgtaccggctctggcggctctggtacggcaccgggaggaaaccctacaacctggacgtgacgcagctgaccacggtgtgcgaggacttctccaactccgtgtccaccggcctcatgcggcccccgtggctcaagggcaagtacatgttggtgcgctacgaggacctggctcggaaccctatgaagaagaccgaggagatctacgggttcctgggcatcccgctggacagccacgtggcccgctggatccagaacaacacgcggggcgaccccaccctgggcaagcacaaatacggcaccgtgcgaaactcggcggccacggccgagaagtggcgcttccgcctctcctacgacatcgtggcctttgcccagaacgcctgccagcaggtgctggcccagctgggctacaagatcgccgcctcggaggaggagctgaagaacccctcggtcagcctggtggaggagcgggacttccgccccttctcgtgacccgggcggtgcgggtgggggcgggaggcgcaaggtgtcggttttgataaaatggaccgtttttaactgttgccttattaacccctccctctcccacctcatcttcgtgtccttcctgcccccagctcaccccactcccttctgccccttttttgtctctgaaatttgcactacgtcttggacgggaatcactggggcagagggcgcctgaagtagggtcccgccccccccaccccattcagacacatggatgttgggtctctgtgcggacggtgacaatgtttacaagcaccacatttacacatccacacacgcacacgggcactcgcgaggcgacttctcaagcttttgaatgggtgagtggtcgggtatctagtttttgcactgtcttactattcaaggtaagaggatacaaacaagaggaccacttgtctctaatttatgaatggtgtccatcctttccccatccctgcctcctgcccctgacgcccatttccccccttagagcagcgaaactgccccctcctgcccgcccttgcctgtcggtgaggcaggtttttactgtgaggtgaacgtggacctgtttctgtttccagtctgtggtgatgctgtctgtctgtctgagtctcgtggccgcccctggaccagtgatgactgatgaatcttatgagcttctgattgatctcggggtccatctgtgatatttctttgtgccaaaaagaaaaaaaaagagtggatcagtttgctaaatgaacattgaaattgaaatgctttatctgtgttttctgtaaataaaagagtgcaataatcgaaaaaaaaaaaaaaaa

SEQ ID NO: 1522 - DNA, 2890 bp, Homo Sapiens
gtcgcagattcaaacaaatagcagcgaacagggaatgacagttccaccagaagacgattaagccacagcctctaattggaacggcatttgtacagtcagagactcttaccagacatctccaggaatctgtgagccattgtcaaaacgtccattttcatctggctgtgaaagtgaggaccacaacaggtaggtattggtagaaacaggagtcctcagagaagccccaagatgcagcctgagggagcagaaaagggaaaaagcttcaagcagagactggtcttgaagagcagcttagcgaaagaaaccctctctgagttcttgggcacgttcatcttgattgtccttggatgtggctgtgttgcccaagctattctcagtcgaggacgttttggaggggtcatcactatcaatgttggattttcaatggcagttgcaatggccatttatgtggctggcggtgtctctggtggtcacatcaacccagctgtgtctttagcaatgtgtctctttggacggatgaaatggttcaaattgccattttatgtgggagcccagttcttgggagcctttgtgggggctgcaaccgtctttggcatttactatgatggacttatgtcctttgctggtggaaaactgctgatcgtgggagaaaatgcaacagcacacatttttgcaacatacccagctccgtatctatctctggcgaacgcatttgcagatcaagtggtggccaccatgatactcctcataatcgtctttgccatttttgactccagaaacttgggagcccccagaggcctagagcccattgccatcggcctcctgattattgtcattgcttcctccctgggactgaacagtggctgtgccatgaacccagctcgagacctgagtcccagacttttcactgccttggcaggctgggggtttgaagtcttcagagctggaaacaacttctggtggattcctgtagtgggccctttggttggtgctgtcattggaggcctcatctatgttcttgtcattgaaatccaccatccagagcctgactcagtctttaaggcagaacaatctgaggacaaaccagagaaatatgaactcagtgtcatcatgtagtggcatgctcagctctggatttgcagtcagtttgggattctcttcagaaagatggcatctaagtgtctgtgttcttgtaagcctgaggtggaatccacccagttttgtctgctagccatatgggacatctaattggaaaagcatctgcataaaagtttggaaacaatgaccacttctctaccattgtcccccaccccaccccccagaataacgctgactgtcccctgaaacagccttctctcctgccctgtttatttcatcctcgatgggaattcttgctaggtaagcactaataactcggcatcttgacgatagtcccatttgggtggtttcagctgcactatctgtatgaaatggtgtcaccaaaacccttttcttcagtatcgacaaagattacattctgagtaccaaccaaaccctaaattgaaagacaaaactatggtttcagtcaacatattcatgaattagggagctaatgggttaagcttccagttcccgctatgctactggatttgtataaatactgatattctccaaacctagtggtgtagggagcaagagaatgcagctggaaggcacaaggggaggacattgtggcattcagaaactgcaggagacaagatgaatttgagaagccaaatggaatttttaatggaaaccatttatcagattaatctcttgctctcctgcattttagaggacaccaattaatttcctggtctttagtatataataacctaaaataccattgtaacctcagtcatgaaaaatacatcactctgtctttttagctcaaatgtattttcctaattgcccacttgagaacagacatttgacaagttatatcaacgactgtgcttgtccattattttacacatgccctagaagccaaaactgaaagccactggatcctggtctagctgaatcttcagagtgggaggtctccaaaaagatattaccttattgggcttaacaattcacaaggcactttcacacccattatctaatttaatcctcataatgactatgtgaggcaaatgccacattgcccatttttcagataaagaaacaaaatcttagggaagataagttgagttgtccaagagcacactgaaagttgaatgttatctaatgcattcctctacctttcagaagatcagtagctggctgagaatctttgccaaatcttccttgctagccagaagtggaattggcagcttctagaatatgtacacctctggacaaaatgttcctcaatcttaagatacaaagaccctcattgtctgggtctattcccacacttactgagtacagatgaaggaaagtggtagcaatttaatcataactttcatttgctgaaaaacattatgagaaggcctcccttcctaagccacctctggtcttgctaagtcttgatcttgcttcctgccagcaccaaacattacattcaggggatttcctctggctcagtcttttccccttgaagttctctaatagatgttacttttgacaaaagatcgcctatgagttacaagcaccaggggatgctctacatcaagggatgcaccttcagtcaaactgtcaaaaagcccagaattcccaaaggcattaggtttcccaactgctttgtgctgatatcagaacagcagaaattaaatgtgaaatgtttctgatgacttatgttctacaatctatggacatacgggatttttttttcttgctttgaagctacctggatatttcctatttgaaataaaattgttcggtcattgtt

SEQ ID NO: 1523 - DNA, 1713 bp, Homo Sapiens
tttccatgggcagggtcgacagactcccttttcagtgatttctggctctgagaaacctctttactcactagaaaagaactttatttaaatggccaattttgttcctcagaaaaagaaattaaaaaaaaagaaaaataggatactgaagacagaaccatgtgacttggtgacaaacaaaaggaggggtgcactagaatttcaataggctccctaattccatagaaaaagcaaagcaacccaatgcctcctgagcctgcagtgcatgaagagagtgcttgagctgacccagccaccaggccttctggggctagacataacttcccactggaacagcagcagcctctttcccctctttgtgttttcatgaagaaaacggctgttctcttaggtagccaggaaatagattacatggggcaaactttcaaaagcaatctctaccctggtgctcaggctacatacagaggcagaaaaggggcacggaagagcccttgctcttgagagagagtattttcatattcccaagggctttccgtgtagagttgctatttctgatatcacttaaacctttacaagaaaaaaggctgtggtgactcagtgttcctataaattcagaatgtggaaactactaatccaaagcatcacttctagcactgagtatcaagacgatcagcctgaccaaaatattgcaaagagttttctaagtctctgaagatttttttctccttgaacactgagtctatagcagtcagcaatgtaccttagccgatccctgggaatggttatggaacagtagggcttgtttccatcctttttagagtgaagagatagaaaattagggctacctagtgtgggttctttttcagaactatgtattttctcctcactgcatgatgggtaaaaatgccctgggttgaaacaagaaacattatctttccacaccactgactaaaacacctgccagtggtttctttaggctccaccttttgctccgtaaactgtagactttcagactgaaatctaatcttaagtgacctcaattaaggtattttcacaaaaggctacttatagtgtagcattattgccttaaatcagaaagccctgggaagaggataaaagatatagaaatgagaaggctctgaagttataggcatttcttgctgtttaatagttacattatcacaaaaacaagccctattcatgattgaggactatggaaatagtgacttcttgaggaggcaccaaactttcctagaactgggtactctcagatagtggctgctatttcctattctatttcagtgacgtaggttggggctgaatgtaaaatagacatcatattactaaatagaatcctataaaatgcaatcacaggtgcccgggagtactagttttaaacatttccttaacaaggagaacaatccagcaaaaagctttctttctctatacagtgcatatctctaaacttttcttcctcagttttagagaacatctgttttatctggtggttctttgtttgaatgcaaactcataactttcaagtctccggtgcaagagcataatctacagatcatgggcaaaatctagccacagtcctgagagtccaggcttctgggatgcccagctgggtataaaagtccctactaaccctgtttcaaattcagaggtttctttggtttagaatgcctcaatgagattttgatacatccaagagag

SEQ ID NO: 1524 - DNA, 568 bp, Homo Sapiens
gcggccgccgagccagtgccccgcgggggtaacagatgaagcacatctggacagctgtgcgacctcctcgcgggccgacgtcagccgagcacgtcccccacgtcctctccttctcgccacttattatttattcgttttcccaaagaagcgactagggacccaagtttaaaaattcccccccccccacccaatgcgagacgtggccagatcccatccaacacacggtttaattttcatggggctctgggatcaaaagaacagaaacagcaacaacaaaagcccagccgctgtctgattttaagctggcaaagtgggaaaaataaagtgttgagtaaacagaccaagttggatcatggggaatttcagaggtcatgccctccctggaaccttcttttttattattggtctttggtggtgtacaaagagtattctgaagtatatctgcaaaaagcaaaagcgaacctgctatcttggttgcaaaacattattctatcgattggaaattttggagggaattaccatagttggcatggctttaactggccatggctgggagcagtttattccc

SEQ ID NO: 1525 - DNA, 291 bp, Homo Sapiens
cacgaggcgggttggcgcttgggtactggctgggtccgatgctgggtacgctgcgcgccatggagggcgaggacgtggaagacgaccagctgctgcagaagctcagggccagtcgccgccgcttccagaggcgcatgcagcggctgatagagaagtacaaccagcccttcgaggacaccccggtggtgcaaatggccacgctgacctacgagacgccacagggattgagaatttggggtggaaaactaataaaggaaagaaacgaaggagagatccaggactcctccatga

SEQ ID NO: 1526 - DNA, 1835 bp, Homo Sapiens
ggagctgcgggctgcgtggccgggatgagcgccagcacgggcggtggtggggacagcggcggcagcggcggcagtagcagcagctcacaggcctcctgcgggcccgagtcctcgggctccgaactagccctggccacaccggtgcctcagatgctgcagggccttctgggctccgacgacgaggaacaggaagaccccaaagactactgcaagggcggctaccaccctgtgaagatcggcgacgtgttcaatgggcggtaccacgtggtgcgcaaactgggctggggccacttctccaccgtctggctctgctgggacatccagcgcaagcgctttgtggccctcaaagtggtgaagagtgcggggcattacacggagacagctgtggatgagatcaagctcctgaaatgtgtccgggacagcgaccccagtgaccccaaaagagagaccattgtccagctcattgatgacttcaggatctcaggagtcaatggagtccatgtgtgcatggtgctggaggtgctgggccaccagctcctcaaatggatcatcaagtccaactaccagggcctgcccgtgccctgcgtgaagagcatcgtgaggcaggtgctgcacggcctggactacctccacaccaagtgcaagatcatccacacggacatcaagcccgagaacatcttgctgtgtgtgggggacgcttacatcaggcgcctggctgccgaggccacggagtggcaacaggcaggggcgccgcccccctcccgctccatagtcagcactgccccccaggaggtcttgaccggtaagctgtccaaaaacaagaggaagaagatgaggcgcaaacggaaacagcagaagcggctgctggaggagcggctgcgggacctgcagaggctggaggccatggaggctgccacccaggctgaggactctggcttgagactagacgggggcagcggctccacatcctcttcaggcttctccggctccctcttctctcctgcctcctgctccatcctctccggctcgtccaatcagcgagagaccgggggcctcctgtcgcctagcacaccattcggtgcctcgaacctcctggtgaaccccctggagccccaaaatgcagataagatcaagatcaagatcgcagacctgggcaacgcctgctgggtgcacaagcacttcacggaagacatccagactcggcagtaccgggccgtcgaggtgctgatcggcgccgaatacggccccccggcagacatctggagcacagcctgcatggccttcgagctggccactggtgactacctgttcgagccgcattctggagaagactacagtcgtgatgaggaccacatcgctcacatagtggagcttctgggggacatccccccagccttcgccctctcaggccgctattcccgggagttcttcaaccggagaggagagctgcggcacatccacaatctcaagcactggggcctgtacgaggtactcatggaaaagtacgagtggcccctagagcaggccacacagttcagcgcctttctgctgcccatgatggagtacatccccgaaaagcgggccagtgccgctgactgcctccagcacccctggctcaacccctaggcccggctgtggctccacctccagctctccgtgccttaagggaaaagcgggacagctcccaccaccctgctgggcgccagttctccacaaccacagggcagagagacgctggagccaggcccggctctcagagcgtgttctgcctgagacccccgtgagggctctcggagaaagtgtgtgtattcctttcttaataaagtgtggactga

SEQ ID NO: 1527 - DNA, 2280 bp, Homo Sapiens
cgggccaggtttccaggctcggccgccgcctccatcccagcacctgcggagggagcgctgaccatggctccctggcctgaattgggagatgcccagcccaaccccgataagtacctcgaaggggccgcaggtcagcagcccactgcccctgataaaagcaaagagaccaacaaaacagataacactgaggcacctgtaaccaagattgaacttctgccgtcctactccacggctacactgatagatgagcccactgaggtggatgacccctggaacctacccactcttcaggactcggggatcaagtggtcagagagagacaccaaagggaagattctctgtttcttccaagggattgggagattgattttacttctcggatttctctactttttcgtgtgctccctggatattcttagtagcgccttccagctggttggaggaaaaatggcaggacagttcttcagcaacagctctattatgtccaaccctttgttggggctggtgatcggggtgctggtgaccgtcttggtgcagagctccagcacctcaacgtccatcgttgtcagcatggtgtcctcttcattgctcactgttcgggctgccatccccattatcatgggggccaacattggaacgtcaatcaccaacactattgttgcgctcatgcaggtgggagatcggagtgagttcagaagagcttttgcaggagccactgtccatgacttcttcaactggctgtccgtgttggtgctcttgcccgtggaggtggccacccattacctcgagatcataacccagcttatagtggagagcttccacttcaagaatggagaagatgccccagatcttctgaaagtcatcactaagcccttcacaaagctcattgtccagctggataaaaaagttatcagccaaattgcaatgaacgatgaaaaagcgaaaaacaagagtcttgtcaagatttggtgcaaaacttttaccaacaagacccagattaacgtcactgttccctcgactgctaactgcacctccccttccctctgttggacggatggcatccaaaactggaccatgaagaatgtgacctacaaggagaacatcgccaaatgccagcatatctttgtgaatttccacctcccggatcttgctgtgggcaccatcttgctcatactctccctgctggtcctctgtggttgcctgatcatgattgtcaagatcctgggctctgtgctcaaggggcaggtcgccactgtcatcaagaagaccatcaacactgatttcccctttccctttgcatggttgactggctacctggccatcctcgtcggggcaggcatgaccttcatcgtacagagcagctctgtgttcacgtcggccttgacccccctgattggaatcggcgtgataaccattgagagggcttatccactcacgctgggctccaacatcggcaccaccaccaccgccatcctggccgccttagccagccctggcaatgcattgaggagttcactccagatcgccctgtgccactttttcttcaacatctccggcatcttgctgtggtacccgatcccgttcactcgcctgcccatccgcatggccaaggggctgggcaacatctctgccaagtatcgctggttcgccgtcttctacctgatcatcttcttcttcctgatcccgctgacggtgtttggcctctcgctggccggctggcgggtgctggttggtgtcggggttcccgtcgtcttcatcatcatcctggtactgtgcctccgactcctgcagtctcgctgcccacgcgtcctgccgaagaaactccagaactggaacttcctgccgctgtggatgcgctcgctgaagccctgggatgccgtcgtctccaagttcaccggctgcttccagatgcgctgctgctactgctgccgcgtgtgctgccgcgcgtgctgcttgctgtgtggctgccccaagtgctgccgctgcagcaagtgctgcgaggacttggaggaggcgcaggaggggcaggatgtccctgtcaaggctcctgagacctttgataacataaccattagcagagaggctcagggtgaggtccctgcctcggactcaaagaccgaatgcacggccttgtaggggacgccccagattgtcagggatggggggatggtccttgagttttgcatgctctcctccctcccacttctgcaccctttcaccacctcgaggagatttgctccccattagcgaatgaaattgatgcagtcctaaaaaaaaaaa

SEQ ID NO: 1528 - DNA, 377 bp, Homo Sapiens
  misc_feature (29)..(31): n is a, c, g, or t
  misc_feature (49)..(49): n is a, c, g, or t
  misc_feature (85)..(85): n is a, c, g, or t
  misc_feature (92)..(92): n is a, c, g, or t
  misc_feature (104)..(104): n is a, c, g, or t
  misc_feature (118)..(118): n is a, c, g, or t
  misc_feature (126)..(127): n is a, c, g, or t
  misc_feature (140)..(140): n is a, c, g, or t
  misc_feature (325)..(325): n is a, c, g, or t
  misc_feature (363)..(363): n is a, c, g, or t
cttggagagttctcgggttcgtgaacttnnnggaggcgcaatgagctgnattaacctgcccactgtgctgcctggttcccccagnaggaccnggggggcagatnccaggtgattcttngggcccgnntgttcttaggganaaaggagagagttgatgagacgcgtccgtcgtttccagattgctcagtacaagtgcctggtgatcaagtatgccaaagacactcgctgcagcaggagcttctgcacacatgaccggaacaccatggaggcactggccggctggctgctccgagacgtggtccaggaggccctgggcgtggttgtnataggcatggacgaggggcagtttttgcgtgacatggnggagttgtgggagg

SEQ ID NO: 1529 - DNA, 1485 bp, Homo Sapiens
tcagccaattagagctccagttgtcactcctacccacactgggcctgggggtgaagggaagtgtttattaggggtacatgtgaagccgtccagaagtgtcagagtctttgtagctttgaaagtcacctaggttatttgggcatgctctcctgagtcctctgctagttaagctctctgaaaagaaggtggcagacccggtttgctgatcgccccagggatcaggaggctgatcccaaagttgtcagatggagagtaaatacaaggagatactcttgctaacaggcctggataacatcactgatgaggaactggataggtttaagttctttctttcagacgagtttaatattgccacaggcaaactacatactgcaaacagaatacaagtagctaccttgatgattcaaaatgctggggcggtgtctgcagtgatgaagaccattcgtatttttcagaagttgaattatatgcttttggcaaaacgtcttcaggaggagaaggagaaagttgataagcaatacaaatcggtaacaaaaccaaagccactaagtcaagctgaaatgagtcctgctgcatctgcagccatcagaaatgatgtcgcaaagcaacgtgctgcaccaaaagtctctcctcatgttaagcctgaacagaaacagatggtggcccagcaggaatctatcagagaagggtttcagaagcgctgtttgccagttatggtactgaaagcaaagaagcccttcacgtttgagacccaagaaggcaagcaggagatgtttcatgctacagtggctacagaaaaggaattcttctttgtaaaagtttttaatacactgctgaaagataaattcattccaaagagaataattataatagcaagatattatcggcacagtggtttcttagaggtaaatagcgcctcacgtgtgttagatgctgaatctgaccaaaaggttaatgtcccgctgaacattatcagaaaagctggtgaaaccccgaagatcaacacgcttcaaactcagccccttggaacaattgtgaatggtttgtttgtagtccagaaggtaacagaaaagaagaaaaacatattatttgacctaagtgacaacactgggaaaatggaagtactgggggttagaaacgaggacacaatgaaatgtaaggaaggagataaggttcgacttacattcttcacactgtcaaaaaatggagaaaaactacagctgacatctggagttcatagcaccataaaggttattaaggccaaaaaaaaaacatagagaagtaaaaaggaccaattcaagccaactggtctaagcagcatttaattgaagaatatgtgatacagcctcttcaatcagattgtaagttacctgaaagctgcagttcacaggctcctctctccaccaaattaggatagaataattgctggataaacaaattcagaatatcaacagatgatcacaataaacatctgtttctcattcc

SEQ ID NO: 1530 - DNA, 469 bp, Homo Sapiens
ttaagagacagtgtcttgctctgcctcctaggcaggagtgcggtctcacgataacagttcactgcagcctccatctcctgggctcaagcaatccacccacctcggcctcccacgtagctggggctacaggcacgcatcaccatgcctggctcttgtcagtatgaatccctgctgtgtccccagcatctagagcagagcctggcacatggcaggcccatctttgtggagtgaactgggaacaggagcgctgggatggtggagtgttctaagtgagacagccacagtgcccgtcctgtttgctcctctcgcccgaactgccactttcagtgtcaggactgggaagagcataggcagaaaggcctggaatccagggagccccaggctgcccactgcccaccgcccacctcagcctggcccagcactcagagggtctccacctcggcctggcccagcgcacagaggcctccca

SEQ ID NO: 1531 - DNA, 8018 bp, Homo Sapiens
cgccgctctgagtccagcctcctactgagaacagtccctcccttgtgcgggtcgcacggctagccgcaggttcggccacgtcaaatccattttctaaaaaagcagggagcagagctctctcttcgccgccgacgcagaaaggagctggggaggaaaaagctgctgccttttgcgctggagattcgtgggcaaggcttctcattttcccaggctgcttcccctcccgggtgaggagcgtcctgagactaaggaaagagcctggaaaatggagcagacctggacgagagattattttgcagaggatgatggggagatggtacccagaacgagtcacacagcagcttttcttagtgacactaaagatcgaggccctccagtgcagtcacagatctggagaagtggtgaaaaggtcccgtttgtgcagacatattccttgagagcatttgagaaaccccctcaggtacagacccaggctcttcgagactttgagaagcacctcaatgacctgaagaaggagaacttcagcctcaagctgcgcatctacttcctggaggagcgcatgcaacagaagtatgaggccagccgggaggacatctacaagcggaacattgagctgaaggttgaagtggagagcttgaaacgagaactccaggacaagaaacagcatctggataaaacatgggctgatgtggagaatctcaacagtcagaatgaagctgagctccgacgccagtttgaggagcgacagcaggagacggagcatgtttatgagctcttggagaataagatccagcttctgcaggaggaatccaggctagcaaagaatgaagctgcgcggatggcagctctggtggaagcagagaaggagtgtaacctggagctctcagagaaactgaagggagtcaccaaaaactgggaagatgtaccaggagaccaggtcaagcccgaccaatacactgaggccctggcccagagggacaagagaattgaagaactgaatcagagcctggctgcccaggagaggcttgtagaacagctatctcgggagaaacaacaactgctacatctgttggaggagccaactagcatggaagtgcagcccatgactgaagagttgctgaaacaacaaaagctgaattcacatgagaccactataactcagcagtctgtatctgattcccacttggcagaactccaggaaaaaatccagcaaacagaggccaccaacaagattcttcaagagaaacttaatgaaatgagctatgaactaaagtgtgctcaggagtcgtctcaaaagcaagatggtacaattcagaacctcaaggaaactctgaaaagcagggaacgtgagactgaggagttgtaccaggtaattgaaggtcaaaatgacacaatggcaaagcttcgagaaatgctgcaccaaagccagcttggacaacttcacagctcagagggtacttctccagctcagcaacaggtagctctgcttgatcttcagagtgctttattctgcagccaacttgaaatacagaagctccagagggtggtacgacagaaagagcgccaactggctgatgccaaacaatgtgtgcaatttgtagaggctgcagcacacgagagtgaacagcagaaagaggcttcttggaaacataaccaggaattgcgaaaagccttgcagcagctacaagaagaattgcagaataagagccaacagcttcgtgcctgggaggctgaaaaatacaatgagattcgaacccaggaacaaaacatccagcacctaaaccatagtctgagtcacaaggagcagttgcttcaggaatttcgggagctcctacagtatcgagataactcagacaaaacccttgaagcaaatgaaatgttgcttgagaaacttcgccagcgaatacatgataaagctgttgctctggagcgggctatagatgaaaaattctctgctctagaagagaaagaaaaagaactgcgccagcttcgtcttgctgtgagagagcgagatcatgacttagagagactgcgcgatgtcctctcctccaatgaagctactatgcaaagtatggagagtctcctgagggccaaaggcctggaagtggaacagttatctactacctgtcaaaacctccagtggctgaaagaagaaatggaaaccaaatttagccgttggcagaaggaacaagagagtatcattcagcagttacagacgtctcttcatgataggaacaaagaagtggaggatcttagtgcaacactgctctgcaaacttggaccagggcagagtgagatagcagaggagctgtgccagcgtctacagcgaaaggaaaggatgctgcaggaccttctaagtgatcgaaataaacaagtgctggaacatgaaatggagattcaaggcctgcttcagtctgtgagcaccagggagcaggaaagccaagctgctgcagagaagttggtgcaagccttaatggaaagaaattcagaattacaggccctgcgccaatatttaggagggagagactccctgatgtcccaagcacccatctctaaccaacaagctgaagttacccccactggccgtcttggaaaacagactgatcaaggttcaatgcagataccttccagagatgatagcacttcattgactgccaaagaggatgtcagcatacccagatccacattaggagatttggacacagttgcagggctggaaaaagaactgagtaatgccaaagaggaacttgaactcatggctaaaaaagaaagagaaagtcagatggaactttctgctctacagtccatgatggctgtgcaggaagaagagctgcaggtgcaggctgctgatatggagtctctgaccaggaacatacagattaaagaagatctcataaaggacctgcaaatgcaactggttgatcctgaagacataccagctatggaacgcctgacccaggaagtcttacttcttcgggaaaaagttgcttcagtagaatcccagggtcaagaaatttcaggaaaccgaagacaacagttgctgctgatgctagaaggactagtagatgaacggagtcggctcaatgaggccttacaagcagagagacagctctatagcagtctggtgaagttccatgcccatccagagagctctgagagagaccgaactctgcaggtggaactggaaggggctcaggtgttacgcagtcggctagaagaagttcttggaagaagcttggagcgcttaaacaggctggagaccctggccgccattggaggtgcagctgcaggggatgacaccgaagatacaagcactgagttcactgacagtattgaggaggaggctgcacaccatagtcaccagcaacttgtcaaggtggctttggagaaaagtctggcaactgtggagacccagaacccatctttttcccctccttctccgatgggaggggacagtaacaggtgtcttcaggaagaaatgctccacctgagggctgagttccaccagcacttagaagagaagaggaaagctgaggaggaactgaaggagctaaaggctcaaattgaggaagcaggattctcctcagtgtcccacatcaggaacaccatgctgagcctttgccttgagaatgcggagctgaaagagcagatgggagaagcaatgtctgatggatgggagatcgaggaagacaaggagaagggcgagttggataaccagtcccagcctcgtgaccctgggcctcagtcagcgtttagcctaccagggtccacccagcacctgcgctcccagctgtcacaatgcaaacaacgctatcaagatctccaggagaagctgctgctatcagaagccactgtctttgctcaggctaacgagctggagaaatacagagttatgcttacaggtgaatccttggtgaagcaggacagcaagcagatccaggtggacctccaggacctgggctatgagacttgtggccgaagcgagaatgaggctgaacgggaggaaaccaccagtcctgagtgtgaggagcacaacagcctcaaggaaatggtcctgatggaggggctgtgctctgagcagggacgccggggctcaacactggctagttcctctgagaggaagcccttggagaaccagctagggaagcaggaagagttccgggtatatggaaagtcagaaaacatcttggtcctacgaaaggacatcaaagatctgaaggcccagctgcagaatgccaacaaggtcattcaaaacctcaagagccgggtccggtccctctcagttacaagtgattattcgtctagtctggaaagaccccggaagctgagagctgttggcaccttggaggggtcttcacctcatagtgtccctgatgaggatgaggggtggctgtctgatggcactggggctttctactctccagggcttcaggccaaaaaggacctggagagtctcatccagagagtatcccagctggaggcccagctcccaaaaaatggactagaagagaagctggctgaggagctgagatcagcctcgtggcctgggaaatatgattccctgattcaggatcaggcccgggaactgtcttacctacggcaaaaaatacgagaagggagaggtatttgttatcttatcacccggcatgcaaaagatacagtaaaatcttttgaggatctcctaaggagcaatgacattgactactacctgggacagagcttccgggagcaactcgcccagggaagccagctgacagagaggctcaccagcaaactcagcaccaaggatcataaaagtgagaaagatcaagctggacttgagccactggccctcaggctcagcagggagctgcaggagaaggagaaagtgattgaagtcctgcaggccaagctggatgctcggtccctcacaccctccagcagccatgccttgtctgactcccaccgctctcccagcagcacctctttcctgtctgatgaactggaagcctgctctgacatggacatagtcagcgagtacacacactatgaagagaagaaagcttctcccagtcactcagattccatccatcattcgagtcattctgctgtgttgtcttctaaaccatcatcaaccagtgcatctcagggggctaaggccgaatccaacagcaaccccatcagcttgccaactccccagaatacccccaaggaggccaaccaggcccattcaggtgccagcactgttcctcctgcttccacagctacattgctgagcaacgacttggaagccgactcttcctactacctcaactctgcccagcctcactctcctccaaggggcaccatagaactgggaagaatcctagagcctgggtacctgggcagcagtggcaagtgggatgtgatgaggcctcagaaagggagtgtatctggggacctatcctcaggctcctctgtgtaccagcttaactccaaacccacaggggctgacctgctggaagagcatcttggtgaaatccggaacctgcgccagcgcctggaggaatccatctgcatcaatgaccgcctacgggagcaactggaacaccggctgacctctactgctcgtggaaggggatccacttctaacttctacagtcagggcctggagtccatacctcagctctgcaatgagaacagagtcctcagggaagacaatcgaagacttcaggctcaactgagtcatgtttccagagagcactcccaggaaacagaaagcctgagggaggctctgctgtcctctcgatcccaccttcaagagctggaaaaggagctggagcaccagaaggtggaaaggcagcagcttttggaagacttgagggagaagcagcaagaggtcttgcatttcagggaggaacgtctttccctccaggaaaacgactccagactgcagcacaagctggttctcctgcagcaacagtgtgaagagaaacagcagctctttgagtccctccagtcagagctacaaatctacgaggcactttatggcaattccaagaaggggctgaaagcttacagcctggatgcctgtcaccaaatccctttgagcagtgacctgagccacctggtggcagaggtacgagctctgagagggcagctggagcagagcattcaggggaacaattgtctgcgactgcagctgcaacagcagctggagagcggtgctggcaaagccagcctcagcccctcctccattaaccagaacttcccagccagcactgaccctggaaacaagcagctgctcctccaagattcagctgtgtcccctccagtccgggatgttggtatgaattccccagctctggtcttccccagctctgcttcctctactcctggctcagaaacgcccataatcaacagagcaaatggcttgggtttggatacttctccagtaatgaagacccctcccaagctagagggtgatgctactgatggctcctttgccaataagcatggccgccatgtcattggccacattgatgactacagtgccctaagacagcagattgcggagggcaagctgctggtcaaaaagatagtgtctcttgtgagatcagcgtgcagcttccctggccttgaagcccaaggcacagaggtgctaggcagcaaaggtattcatgagcttcggagcagcaccagtgccctgcaccatgccctagaggagtcagcttccctcctcaccatgttctggagagcggccctgccaagcacccacatccctgtgctgcctggcaaagtgggagaatcaacagaaagggaacttctggaactgagaaccaaagtatccaaacaggagcgactccttcagagcacaactgagcatctgaagaacgccaaccagcagaaggagagcatggagcagttcattgtcagccagctaaccagaacacatgatgttttaaagaaggcaaggactaacttagaggtgaaatccctaagggctctgccatgtactccagccttgtgacccttgccttccaggaaccatgcaagaagcgcagccaccagaagtccttaaaacagcaggaaaggtgggcctgtcccccttttgtgcagctacctatctgctgaggagcatctgggcctcattcctccaagtccacgggagggtccagaagagggagtcagagatgtatcctggtggagctgggagaaaggcagaaagcctttctgacggctatggaatacgattagccaaggtccacttggcccagcactaagaaaaagatgcgtagtttgcacagaaggttttgtgatcctgcctctcaacagccccagcagcttgggaactagcaagagcacatttcttgcctcatcagctgtcctgagatggaaaactcagtgaatataggaccctgattccgatgaaaggggcacgtggtcccaatgctggagctcctctggcaggttctaaaagcacactactgagcagcggtgccctgccggacactgctggcgggggctcagtgagcactactcacagatccacacctgaccctgttgggtcgagtcaggctgggccttggtctgcactgtagcacctgtgttctttgagttcacatcatgaatgtggtgacttcccagataccatctcaggcttaacctagcacatcctatttcttttcttctatgatatccaaattggactgacctcacttcaaagttgctgtcccattttgtcaccctatcttatctcggggaaattgcagactgatggccagaccaactctgttgaaattcttgcatagagcaaacctgtgctcatttttaagtggcatgggagaggccccaagcctagtaaagcctagtctgtgtcttcacagtgctggtagaatgtgtttgtgtgtataaatatatgatatagatttatatatgttgctaacgccatatattgaaggccaacataactggtggacagggtgggtgacagaaaatgaaagtctttttggtgattgttaaagcaaaatgtgtataaagaaataaatagtttttctttc

SEQ ID NO: 1532 - DNA, 2437 bp, Homo Sapiens
tcggatccactagtaacggccgccagtgtgctggaattcgcggccggtcgacccaccaccatgaggtcctgcctgtggagatgcaggcacctgagccaaggcgtccagtggtccttgcttctggctgtcctggtcttctttctcttcgccttgccctcttttattaaggagcctcaaacaaagccttccaggcatcaacgcacagagaacattaaagaaaggtctctacagtccctggcaaagcctaagtcccaggcacccacaagggcaaggaggacaaccatctatgcagagccagtgccagagaacaatgccctcaacacacaaacccagcccaaggcccacaccaccggagacagaggaaaggaggccaaccaggcaccgccggaggagcaggacaaggtgccccacacagcacagagggcagcatggaagagcccagaaaaagagaaaaccatggtgaacacactgtcacccagagggcaagatgcagggatggcctctggcaggacagaggcacaatcatggaagagccaggacacaaagacgacccaaggaaatgggggccagaccaggaagctgacggcctccaggacggtgtcagagaagcaccagggcaaagcggcaaccacagccaagacgctcattcccaaaagtcagcacagaatgctggctcccacaggagcagtgtcaacaaggacgagacagaaaggagtgaccacagcagtcatcccacctaaggagaagaaacctcaggccaccccaccccctgcccctttccagagccccacgacgcagagaaaccaaagactgaaggccgccaacttcaaatctgagcctcggtgggattttgaggaaaaatacagcttcgaaataggaggccttcagacgacttgccctgactctgtgaagatcaaagcctccaagtcgctgtggctccagaaactctttctgcccaacctcactctcttcctggactccagacacttcaaccagagtgagtgggaccgcctggaacactttgcaccaccctttggcttcatggagctcaactactccttggtgcagaaggtcgtgacacgcttccctccagtgccccagcagcagctgctcctggccagcctccccgctgggagcctccggtgcatcacctgtgccgtggtgggcaacgggggcatcctgaacaactcccacatgggccaggagatagacagtcacgactacgtgttccgattgagcggagctctcattaaaggctacgaacaggatgtggggactcggacatccttctacggctttaccgccttctccctgacccagtcactccttatattgggcaatcggggtttcaagaacgtgcctcttgggaaggacgtccgctacttgcacttcctggaaggcacccgggactatgagtggctggaagcactgcttatgaatcagacggtgatgtcaaaaaaccttttctggttcaggcacagaccccaggaagcttttcgggaagccctgcacatggacaggtacctgttgctgcacccagactttctccgatacatgaagaacaggtttctgaggtctaagaccctggatggtgcccactggaggatataccgccccaccactggggccctcctgctgctcactgcccttcagctctgtgaccaggtgagtgcttatggcttcatcactgagggccatgagcgcttttctgatcactactatgatacatcatggaagcggctgatcttttacataaaccatgacttcaagctggagagagaagtctggaagcggctacacgatgaagggataatccggctgtaccagcgtcctggtcccggaactgccaaagccaagaactgaccggggccagggctgccatggtctccttgcctgctccaaggcacaggatacagtgggaatcttgagactctttggccatttcccatggctcagactaagctccaagcccttcaggagttccaagggaacacttgaaccatggacaagactctctcaagatggcaaatggctaattgaggttctgaagttcttcagtacattgctgtaggtcctgaggccagggatttttaattaaatggggtgatgggtggccaataccacaattcctgctgaaaaacactcttccagtccaaaagcttcttgatacagaaaaaagagcctggatttacagaaacatatagatctggtttgaattccaggatcgagtttacagttgtgaaatcttgaaggtattacttaacttcactacagattgtctagaagacctttctaggagttatctgattctagaagggtctatacttgtccttgtctttaagctatttgacaactctacgtgttgtagaamactgataataatacaaatgattgttgtccatggaaaggcaaataaattttctacagtgaaaaaaaa

SEQ ID NO: 1533 - DNA, 273 bp, Homo Sapiens
  misc_feature (48)..(48): n is a, c, g, or t
aagcttgcggccgcccgcacttgcgctggggactcgctggactgcggngggcgcgggctggctgagttgcccggggacctgccctactggacgcggagcctaaacctgagttacaacaaactctttgagattgaccctgctgggtatgaggacttgccgaacctacaggaagtgtaccttaataataatgagttgacagcggtaccattcctgggcgctggttcatcacatgtcgaatgtctctttttgcagcacaacaagattcgccgcgtg

SEQ ID NO: 1534 - DNA, 2155 bp, Homo Sapiens
tgggggcgttcgcctcgtttgcctcgcgccctccactggagctgttcgcgcctcccggctcccaccgcagcccacccggcagaggagtcgctaccagcgcccagtgcgctctgtcagtccgcaaactccttgccgcccgccccgggctgggcgccaaataccaggctaccatggtctacaagactctcttcgctctttgcatcttaactgcaggatggagggtacagagtctgcctacatcagctcctttgtctgtttctcttccgacaaacattgtaccaccgactaccatctggactagctctccacaaaacactgatgcagacactgcctccccatccaacggcactcacaacaactcggtgctcccagttacagcatcagccccaacatctctgcttcctaagaacatttccatagagtccagagaagaggagatcaccagcccaggttcgaattgggaaggcacaaacacagacccctcaccttctgggttctcgtcaacaagcggtggagtccacttaacaaccacgttggaggaacacagcttgggcactcctgaagcaggcgtggcagctacactgtcgcagtccgctgctgagcctcccacactcatctcccctcaagctccagcctcatcaccctcatccctatcaacctcaccacctgaggtcttttctgcctccgttactaccaaccatagctccactgtgaccagcacccaacccactggagctccaactgcaccagagtccccaacagaggagtccagctctgaccacacacccacttcacatgccacagctgagccagtgccccaggagaaaacacccccaacaactgtgtcaggcaaagtgatgtgtgagctcatagacatggagacaccaccacctttcccagggtgatcatgcaggaagtagaacatgcattaagttcaggcagcatcgccgccattaccgtgacagtcattgccgtggtgctgctggtgtttggagttgcagcctacctaaaaatcaggcattcctcctatggaagacttttggacgaccatgactacgggtcctggggaaactacaacaaccctctgtacgatgactcctaacaatggaatatggcctgggatgaggattaactgttctttatttataagtgcttatccagtagaattaataagtacctgatgcgcattgaacgacaatcttaagccctgttttgttggtatggttgtttttgttttcctccctctcctctggctgctacaacttcccctttctggtacaagaagaaccattctttaaaggtgagtggaggctgatttgcagctgaagtgggccagccttgcaccagccaggccagaccaccatggtgaaggcttctttccccactgcaggacccactttgagaaggaccgaggaggaggatttgggttgttttgttaggggttactttcaggggaacatttcatttgtgttatttcttaaacttctatttaggaaattacattaagtattaatgaggggaaaggaaatgagctctacgaggatttcaccctgcatgggagagagcagggttttctcagattcctttttaatctctatttatctggttgtttctgacaggatgctgcctgcttggctctacaagctggaaagcagcttcttagctgcctaattaatgaaagatgaaaataggaagtgccctggagggggccagcaggtcacggggcagaatctctcaggttgctgtgggatctcagtgtgcccctacctgttctcccctccaggccacctgtctctgtaaaggatgtctgctctgttcaaaaggcagctgggatcccagcccacaagtgatcagcagagttgcatttccaaagaaaaaggctatgagatgagctgagttatagagagaaagggagaggcatgtacggtgtggggaagtggaagggaagctggcgggggagaaggaggctaacctgcactgagtacttcattaggacaagtgagaatcagctattgataatggccagagatatccacagcttggaggagcccagagaccgtttgctttatacccacacagcaactggtccactgctttactgtctgttggataatggctgtaaaatgtttaaaaacaaaaaaaaaaaaaaaaaaaa

SEQ ID NO: 1535 - DNA, 5338 bp, Homo Sapiens
ggccgcgagtgcatcttccacgaacctaattcatctctccagcaaaggacacatctctccagcaaaggacacctctctccagcaaaggacacctgcagagatgtccccagtccttcacttctatgttcgtccctctggccatgagggggcagcctctggacacactcggaggaaactgcaagggaaactgccagagctgcagggcgtcgagactgaactgtgctacaacgtgaactggacagctgaggccctccccagtgctgaggagacaaagaagctgatgtggctgtttggttgccccttactgctggatgatgttgctcgggagtcctggctccttcctggctccaatgacctgctgctggaggtcgggcccaggctgaacttctccaccccaacatccaccaacatcgtgtcagtgtgccgcgccactgggctggggcctgtggatcgtgtggagaccacccggcgctaccggctctcgtttgcccaccccccgtcagctgaggtggaagccattgctctggctaccctgcacgaccggatgacagagcagcacttcccccatcccatccagagtttctcccctgagagcatgccggaacccctcaatggccctatcaatatactgggtgagggccggcttgcgctggagaaggccaaccaggagcttggtctggctttagactcttgggacctagacttctacaccaagcgcttccaggagctacagcggaacccgagcactgtggaggcctttgacttggcgcagtccaatagcgagcacagccgacactggttcttcaagggccagctccacgtggatgggcagaagctggtgcactcactgtttgagtccatcatgagcacccaggaatcctcgaaccccaacaacgtcctcaaattctgtgataacagcagtgcaatccagggaaaggaagtccgattcctacggcctgaggaccccacacggccaagccgcttccagcaacagcaagggctgagacatgttgtcttcacagcagagactcacaactttcccacaggagtatgcccctttagtggtgcaaccactggcacagggggccggattcgagatgtccagtgcacaggccgcggggcccacgtggtggctggcactgccggctattgctttggaaatctgcatattccaggttacaatctgccctgggaggatctaagcttccagtatcctgggaattttgcccggcccctggaggttgccattgaagccagtaatggagcttctgactatggcaacaagtttggggaaccagtgctggctggcttcgcccgctccttgggcctccagctcccagacggccagcggcgtgagtggatcaagcccatcatgtttagtgggggcattgggtccatggaagctgaccacataagcaaggaggccccagagccaggcatggaagttgtaaaggttggaggtcccgtctacaggattggagttggaggtggagctgcttcatctgtgcaggtgcagggagataacaccagtgacctggactttggggctgtgcagcgaggagacccggagatggaacagaagatgaaccgtgtgatcagggcttgtgtggaggcccccaagggaaaccccatctgcagccttcatgatcagggcgctggtggcaatggcaatgtcctaaaagagctgagtgacccagctggagccatcatttacaccagccgcttccagcttggggacccaaccctgaatgccctggaaatctggggggctgagtaccaggaatcaaatgctcttctgctgaggtcccccaaccgggacttcctgactcatgtcagtgcccgtgaacgttgcccggcttgcttcgtgggcaccatcactggagaccggagaatagtgctggtggacgatcgggagtgtcctgtcagaagaaatggccagggggatgcccccccgacacccccgccaacccctgtggacctggagctcgaatgggtgctgggcaagatgcctcggaaggagttcttcctgcagaggaagccccccatgctgcagcctctggccttgcccccagggctgagcgtgcaccaggctctggagagggttctgaggctgcccgccgtggccagcaagcgctacctcaccaataaggtggaccgctccgtgggaggcctggtggcccagcagcagtgcgtggggcccctgcaaactcctctggcagatgtagcggttgtggcactgagccatgaggagctcataggggctgccacagccttgggagaacagccagtcaagagcctgctggacccaaaagtcgccgcccggctggccgtggccgaagccctcaccaacctggtgtttgctctggtcactgacctccgggatgtgaagtgtagcgggaactggatgtgggcagccaagctcccaggggagggcgcagctttggcggatgcctgtgaggctatggtggcagtgatggcagccctgggtgtggcagtggatggtggcaaggactccctcagcatggctgctcgggttggcactgagaccgtgcgggctcctgggtcactggtcatctcagcctatgccgtctgcccagacatcacagccactgtgaccccagacctcaagcatcctgaagggagaggccatctgctctatgtggctctgagccctgggcagcaccggctcgggggcacagctctggcccagtgcttctcccagcttggggaacaccctccagacctggaccttcctgagaacttggtgcgggccttcagcatcactcaggggctgctgaaagaccgcctcctctgctcaggccacgatgtcagtgacggaggcctcgtcacatgcctgctggagatggcctttgctggaaattgcgggctacaggtggatgtgcctgtccccagggttgatgtcctgtctgtgctgttcgctgaggagccaggcctcgtgctggaggtgcaggagccagacctggcccaggtgctgaagcgttaccgggatgctggcctccattgcctggagctgggccacacaggcgaggccgggccccacgccatggtccgggtgtcagtgaacggggctgtggttctggaggagcctgttggggagctgcgagccctctgggaggagacgagtttccagctggaccggctacaggcagagcctcgctgtgtggcagaggaggaacggggcctgagggagcggatggggcccagctattgcctgccccccacctttcccaaagcctccgtgccccgtgagcctggtggtcccagcccccgagtcgccatcttgcgagaggagggcagtaatggagaccgggagatggccgatgccttccacttagctgggtttgaggtatgggacgtgaccatgcaggacctctgctctggggcaattgggctggacactttccgtggcgtggccttcgtgggcggcttcagctatgcagatgtcctgggctctgccaaagggtgggcagctgctgtgacctttcatcccagggctggggctgagctgaggcgcttccggaagcggccagacaccttcagcctgggcgtgtgtaatggctgtcaactgctggctctgctcggctgggtgggaggcgaccccaatgaggatgctgcagagatgggccctgactcccagccagcccggccaggccttctgctacgccacaacctgtctgggcgctacgagtctcgctgggccagcgtgcgtgtggggcctgggccagccctgatgctgcgagggatggagggcgccgtgctgcccgtgtggagtgcgcacggggaaggttacgtagcattttcttctccggaactccaagctcagattgaggccaggggcttggctccactgcactgggctgatgatgacgggaaccccacagagcagtaccctctgaatcccaatgggtccccagggggcgtggctggcatctgctcctgtgatggccgccacctggctgtcatgcctcaccctgagcgggccgttaggccttggcagtgggcatggcgaccccctccatttgatactctgaccacctccccctggctccagctctctatcaatgcccgaaactggaccctggaagggagctgctgactggccacaggggctcacctgggccccatggcttttcacctaagtgggtcctgccccctcccccatgaccttcaggagcaccccatattatttccaaaaatatcttggacagacaaggaccaaaatgccaaaatctcagcggactcgatgatctgcctgctgatgttccttctgtggctgtgtctattttcagttctgctctaacatggcatgccctttctcagcccaggaaacagcatgtggttcagagaaaagagcgacaaggaaaagttaggactcctgaggtccgaacaggggcttctgttgcccacttcacaacacccagtgatcaccggtgtgcaattgcctccttggctctgagggatgttttgcgctcccttttctcatcattggggttagcgggtgcagacaaattcagcaatagtatgcagatcagcccctcaccacctcattgttctcatctggaactgaaactttctggatttctcttgaagtgctacactgcactgaatgtaaggaattgttgcttgtggaagtttctcagcgtttctggctgtcttagggctggcctcagaacccagcattcctgttatttgcttctaaattagcagctctctttttttttttttttttgaggcagtctcactctgtcacccaggctggagtgcagtggcgtgatctcggcccactgcaacctctgcctcctgggttcaagcaattttcctgcctcagcctcccgagtagctgggagtacaggcacacaccaccacacccagctaatttttgtatttttagtagagatagggtttcaccgtgtctcccaggctggtctcaaactcctaacctcaagtgattcgcctgcctcggcctcccaaagtgctgggattacaggtgggagccactacagctggcccagcagctctgtttctgatagaggtggttggggctctcatccctagatcctaaccctttagtatgctggaattctactcttcacttactgcattgactgttgttgattagttattattgcaaagcactgccaccggcctcagggagtttatgtgtaatagaattaaaaataatagctgtgtataacacttagctcaagccacgcatgtgtgaggcatttggtatgtatctgaattaattctcactaaaattcagcaaaggacttgatagcctctccccgccttttcaataaaggatgaatgaaggttg

SEQ ID NO: 1536 - DNA, 3131 bp, Homo Sapiens
ggagccgccatgtaaccggcgccgcccggagcccgagccgcgcgggccccagcgacccgcccgccatgggggacgaggacgacgatgagagctgcgccgtggagctgcggatcacagaagccaacctgaccgggcacgaggagaaggtgagcgtggagaacttcgagctgctcaaggtgctgggcacgggagcctacggcaaggtgttcctggtgcggaaggcgggcgggcacgacgcggggaagctgtacgccatgaaggtgctgcgcaaggcggcgctggtgcagcgcgccaagacgcaggagcacacgcgcaccgagcgctcggtgctggagctggtgcgccaggcgcccttcctggtcacgctgcactacgctttccagacggatgccaagctgcacctcatcctggactatgtgagcggcggggagatgttcacccacctctaccagcgccagtacttcaaggaggctgaggtgcgcgtgtatgggggtgagatcgtgctggccctggaacacctgcacaagctcggcatcatttaccgagacctgaaactggagaatgtgctgctggactccgagggccacattgtcctcacggacttcgggctgagcaaggagttcctgacggaggagaaagagcggaccttctccttctgtggcaccatcgagtacatggcccccgaaatcatccgtagcaagacggggcatggcaaggctgtggactggtggagcctgggcatcttgctcttcgagctgctgacgggggcctcgcccttcaccctggagggcgagaggaacacgcaggctgaggtgtctcgacggatcctgaagtgctcccctcccttcccccctcggatcgggcccgtggcgcaggacctgctgcagcggctgctttgtaaggatcctaagaagcgattgggcgcggggccccagggggcacaagaagtccggaaccatcccttcttccagggcctcgattgggtggctctggctgccaggaagattccagccccattccggccccaaatccgctcagagctggatgtgggcaactttgcggaggaattcactcggctggagcctgtctactcaccccctggcagccccccacctggggacccccgaatctttcagggatactcctttgtggcaccctccattctctttgaccacaacaacgcggtgatgaccgatgggctggaagcgcctggtgctggagaccggccaggtcgggcagcggtggccaggagcgctatgatgcaggactcgcccttcttccagcagtacgagctggacctgcgggagcctgcgctgggccagggcagcttttctgtgtgtcgccgctgccgccagcgccagagcggccaggagttcgcagtcaagatcctcagtcgcaggctggaggcgaacacgcagcgcgaagtggctgccctgcgcctgtgccagtcacaccccaacgtggtgaatctgcacgaggtgcatcacgaccagctgcacacgtacctggtcctggagctgctgcggggcggggagctgctggagcacatccgcaagaagcggcacttcagcgagtcggaagcaagccagatcctgcgcagcctcgtgtcggccgtgagcttcatgcacgaggaggcgggcgtggtgcaccgcgacctcaagccggagaacatcctgtacgccgacgacacgcccggggccccggtgaaaatcatcgacttcgggttcgcgcggttgcggccgcagagtcccggggtgcccatgcagacgccctgcttcacgctgcagtacgctgcccccgagctgctggcgcagcagggctacgacgagtcctgcgacctctggagcctgggcgtcattctgtacatgatgctgtcggggcaggtccccttccagggggcctctggccagggcgggcagagccaggcggccgagatcatgtgcaaaatccgcgaggggcgcttctcccttgacggggaggcctggcagggtgtatccgaggaagccaaggagctggtccgagggctcctgaccgtggaccccgccaagcggctgaagctcgagggactgcggggcagctcgtggctgcaggacggcagcgcgcgctcctcgcccccgctccggacgcccgacgtgctcgagtcctctgggcccgcagtgcgctcgggtctcaacgccaccttcatggcattcaaccggggcaagcgggagggcttcttcctgaagagcgtggagaatgcacccctggccaagcggcggaagcagaagctgcggagcgccaccgcctcccgccggggctcccctgcaccagccaacccgggccgagcccccgtcgcctccaaaggggccccccgccgagccaacggccccctgcccccctcctaatccccaccactgtgacccccttccctcataggggctgtgacctgggagcccggctcactcccggaggcctctgcctgcggctgacctgatccccaagggactgtcctttcctctcctaccccaccccactcccagacagagcagaagtatttttataagcagagaattttttatgtcttaccagatagagttgcagggaagggggggcctgctggggagtggggtttggggggccctctcccaggacactgcctcttctgggcagaaggcccctccagggggactgctccaacaggaaagagcccctcccccacttctaagcactgagttaggagtgctaactcctaaactgggaccccctaccctgttctcccctgaggccccgttcctgggaggggcacccctcaactgtcactttatggactgtctgtgcaattacgtccaccaaagacccgtgttgggggtactgaaggagaggccctgggggaccctctgaagcatttctgcctcactttatgtcatctgcttctcccctgttggggctaaggaaggagataggtggctcctaaaagaggaggccatcttctcacccaccccttcctctttggcacagctactcctggctgggggtggggccttgggggtctgggctgggcatccatggtcactgcctcagcccagccaggctgtgcctttgactttaaaataaaagtccacccagtgctgtgtgtggcaaaaaaaaaaaaa

SEQ ID NO: 1537 - DNA, 713 bp, Homo Sapiens
  misc_feature (634)..(634): n is a, c, g, or t
  misc_feature (642)..(642): n is a, c, g, or t
  misc_feature (687)..(687): n is a, c, g, or t
tttttttcagttgaaatactttatttaacttattttaaaaattgattcaaaactttttatcttctttattaggtattctacccttagatttaacactcatttttcccgagtatattttctcttcaatatacaaaggaatatattttcatagagtgtgttgaatattaggaaaatcaagagttctggttctgtcaggtgcagtatttagagtgttattttgataaaatccagttgctctgatatggcttgaaaatacttgctcctttggagtataattgcaggggaaaaactgtggaataggtagaaattcaccataatgacttgaattggttttatacataatcatttgaggttttgatagtgaggtggctgtctggagtgtctttggatccaacatacatgaaaacacaggattgccagggttcacacaaggaggcagttgttcagatttcatttctgtgtctgaatttgaaggtgaagtacttttcttatcccggttgcggtctgtcattttcgctcttctttgttaattttttcggcaaagtcagttttcatgcagcagatggcaagaaagccggtgaacgcctagggacgtggccttttaaccgcacccaattaaagcagcaaacagaanatgaatanctgggtggatcagtatgtgttaacctatccgtttaatccgggganctgttttccccggtgaaaccacaaat

SEQ ID NO: 1538 - DNA, 498 bp, Homo Sapiens
gtgaaaagcaagaggaaagagatgggataagtaaacgctgtcaagagacggtgcaaatctggtggaagatgcctgctacctaaagcctacctcatacaatgttcaggggccaccatcccccacctgccccaacctccacccctctctgtgatattgactttcctgtggatagtggtgctgaagacgacaggtttgagcaaggagactcaaagaggcaaggtgccccacgccaatgacacaaacttgctctgtccgagatgcaggtacaagcaagcctggcaaagagctgagctttgcctgttggcctgtggagcaaccatgggttttactgtgtttcttggacagaggacacttggggacagaagtgaatagcatgactatttcatgcttatgtgtattttatgcactgtatttagtgcctcttggacatttaatgtatcagatatttcatgctcaggtgtctcatgtatacttggtagctaggaatgttaggtatcc

SEQ ID NO: 1539 - DNA, 566 bp, Homo Sapiens
  misc_feature (466)..(466): n is a, c, g, or t
  misc_feature (508)..(508): n is a, c, g, or t
  misc_feature (533)..(533): n is a, c, g, or t
  misc_feature (540)..(540): n is a, c, g, or t
  misc_feature (547)..(547): n is a, c, g, or t
tattcatgtataagtaaagattaagtggacaaatcttaatagcctgaagactgtctacatgtgtttcccatgtaattcctagtaatgcaaagagagagaacattcccaatagcttctcaggcacaaatttgccctctcagttaatactgcataaatgtgaccattatcttgtcttttatcatcatgtatgatgtttggttatgaacttaacaacataattctacagtatttcctactgtgtatctggtatgccactgccactcaaggtttctttgagagggagactatatatttgttactattattaatgaatctatttccatgactgctgtgaaaaacccaggctgagttaacagtgatgagctctggccaggcacagtggctcacgcctgtaatccaacactttggaaggctgaggcaggaggatcacttgagcccaggagttcaagaccaggctggggaacanaggagactcattctagaactcacaggtggaatcgcctgtggntcagcactagggaggttagcaagangctgctnagccagngttaagcaaagtagcatgc

SEQ ID NO: 1540 - DNA, 3851 bp, Homo Sapiens
cctctggcctgccaggaatcagggttcttcagaacctgacattttaaatgaagaggtcaggcaggtcatgaggaaagcctcattgtccccatgtctctgtcactgctgcacccctgagacatcacagacatggacactggggcctgcttgtttctcaaactgcccttagatcgaaagagggaggaaccaggatgaatgccactcattttcccaagaaaggccctctcctgagtgcccgggatggggctctgtccattgcctggggccgccaattgctactctgggttacggaggaaggacagggtcctgagagacaccagagacctcacacagccctgaaaacatggggctccttcataagtgtttcccatcaccaacagggagaccacgtggaggccttgcagccccactcggtgcttctccaccaaatcccaagggcagtgacgctgacgtctgtggaaagcagagaaagccctggctcccaaagccctgaagtcctgtggagctgacattccctgagtgacggtgtgaatggaaggaactcaagtgcgggtggtaggccacctcctggcccaggcctgggtgaactctgaggggacacatgtagtcacaatcccatcctcccattctccttctcagaggaaggaagtgggcatccatctgcctcatctctctcccgtggggaagatggggagtttcaggggaactttcacataaatttcgccagctcagatctcctgtgaggatggggcccaccatgctcccggtgctgccagaggccctgagcccctcccagggtccctgggtttgagccagccctgtatcatccccaggagctgaatgtcagagcaatggatagaattagatggaaagagctctcaatttggcctgagactgtccccagatactcaggaaaaacaggacgtcgcacagagtgggcagcaggtgagtggcaggttataggtcctgagtttgagtttgttctcacgtgagacagacccagcccctcactccattcacacactgggttttaaatggtgcaagataggaggaattttctggtcccaagagcaggaggaagggattttctggggtttcctgagtccaggtttgcataagatcttctgagtgtgcattgttctttgaggaccattctctgactcaccaggtaagtggctgaattctaacctctgtaatgagcattgcacccaataccagttctgaactctacctggtgaccagggaccaggacctttataaggtggaaggcttgatgtcctccccagactcagctcctggtgaagctcccagccatcagccatgagggtcttgtatctcctcttctcgttcctcttcatattcctgatgcctcttccaggtgagatgggccagggaaataggagggttggccaaatggaagaatggcgtagaagttctctgtctcctctcattcccctccacctatctctccctcatccctctctctccttcctctctctgtgtgtcccctccatccttttctcctgcttctctctcttcttccctctctctctttttttctgtctttctttttcctctctccctagagcatgtctttctttctttctctttcctttcttctacccacacttttagactgagtagactgaatgccctatttaattgaaccaagcattgcttccttcaatagataaggagtttgagaacccaatggacacctcactcgttcttctaagccaatatgaaggacgcccagtagcttgtaaatatcatctcttcactgctttccatgctacaactgctgagactatggttgaaacctgttaggtgactttttaaataaaaggcagaaattttgattttatctaaagaaagtagtatagaatgtcattttctaaatttttatatttaaagggtagatactgcaacctagagaatcccagataatcttaaggcccagcctatactgtgagaactactgcagcagacactctgcccccaggacttttctgatcagaggccctgagaacagtccctgccactaggccactgcaggttcacaggacagggacagcccattgaaaccaacttttaaaccgtggatgcctaaccttcattttctccttgatattatgaaaataaaataaaaaccatgaaaggataaaagagggagagtggaagggaaggatggagaaagggaaaaagaaaatttgagagtaaatcctaaaacaattaatctaatagatatcatcttgtgaaatcctaattttaccaatcttatttatgagccctgggttttgtgagaacaatggggttctgagaggcaccagagacctcatgttttccaaaaccgagaacagtataatgaaggaaggcggggaggcagggaggcagggaggcagggaggcagggaggcgggcaggtggggagggagggacggaaggagggagggagggagggagggagggagggagggataaaaaaagaagaatgaggttgaaaccaggacttagatattagaaacaagccattacaaaatttatttctatggttaattgtggttttcaactgtaagttacttggtgttaatttcctattaaacaatttcagtaagttgcatctttttatcccatctcaggtcaaatacttaacagactaaatgatttgaaaaagcaaaagtttactggcttgtgtgtgttaaaatggaggtatggtggctttgatattatcttcttgtggtggagctgaattcacaagagatcgttgctgagctcctaccagaccccacctggaggccccagtcactcaggagagatcagggtctttcacaatcaggttctacaaaaaataaacatccccccaaaccacagcagtgccagtttccatgtcagaaacttagaaccaaatgactgactcgcgtctcattatcatgatggaaaagcccaggcttgagaaagaagcccgctgcggatttactcaaggcgatactgacacagggtttgtgtttttccaacatgagttttgagttcttacacgctgtttgctctttttgtgtgttttttccctgttaggtgtttttggtggtataggcgatcctgttacctgccttaagagtggagccatatgtcatccagtcttttgccctagaaggtataaacaaattggcacctgtggtctccctggaacaaaatgctgcaaaaagccatgaggaggccaagaagctgctgtggctgatgcggattcagaaagggctccctcatcagagacgtgcgacatgtaaaccaaattaaactatggtgtccaaagatacgcaatctttatcctagtaattgtggtcattgggtgatgttggtttgggcaggccatctctaatatccttgaaacacctttttctgctctccaggaaggggtcagggctgccacagcggggcttggagtgctttccagggtcacaggcatctgtattctttggattccttgacctttcccatttattcccggcattttcctaaaacgtgtgctttgctcctcctgcatcctccccttgcatgccctcacctaccccacatcttccctaaaaaaagcaagcccaactcaaagaccagttccctcatggaatcatagtggatctgccaagggaggggatgtccagtcctctgttcttcacaaggactcccttcttctggctaaggtttcttatgcaattatgcctcctacagaggtgcgtgaatttttaattctccatttagctatgagatttctactagtgtggactttgtcttattcatttatgtgctggccattcataaactatttcattaattggatggcaaaatgcagttgtacaaggg

SEQ ID NO: 1541 - DNA, 351 bp, Homo Sapiens
tgtgctggcagatccgtgcagaagtgtctaaaagacacactcgcgcttctggagggacgtcgatcgtattaggataaaagcaccacgggaccccacgaaccgtgtcgtcgaaacagcagcccttatttgcacactgggagggcgtgacaccaggaaaaccacaattctgtctttcacggggggccactgtacacgtctctgtctgggcctcggccagggtgccgagggccagcatggacaccaagaccagggcgcagatcaccttggtctccatggtgggcattgccttctctctgcttcaaaagcgaccaccatctatcacaataacatatttaacacgttcttggggaa

SEQ ID NO: 1542 - DNA, 462 bp, Homo Sapiens
tttttttttttttttttaacttcatatatatttttattagatgtcgacaaggatggcacatctgtgtacggagaccccatgtgcacaggcgacttcatttctacatagctgctttctggaagcttgcaggtgaggatgggtgggtccttaattgtggcgtaagggttttcactgctattcaaggaacaagtactagaactgcacacggattctttcatgtaatctttgaagcctttgtccataacgtatgtgttctgacgtctatccattccacaagcacctggtgagtgtgggctcaccggggcggctgatgtgtctaagttcaatgtagaagtcctcgggcgggtacctggcctccagggcactgatctggaaatgggagtctaacacgttcacatagctgtagggggtccagcctgctgtgtctctgtcaagggacttgttactgagcttggtggggct

SEQ ID NO: 1543 - DNA, 454 bp, Homo Sapiens
  misc_feature (23)..(23): n is a, c, g, or t
  misc_feature (26)..(26): n is a, c, g, or t
  misc_feature (368)..(368): n is a, c, g, or t
  misc_feature (415)..(415): n is a, c, g, or t
  misc_feature (448)..(448): n is a, c, g, or t
gtgtaaatgtgacatcctcacanttnccatatctttaactttgaaaaatcttcttgtaaacttaaagcctagaagtattccaaagcaagggttacagcagtctttattctcaggctcactgaattaaacccaggactaattccacagcacaggcacaagaagcctgttgtgtagtgtactctgccagtaccttggatttaggagctccatggggaactgactaaaccaggagagagaggatttggagctagtcagtcctggtaatctatgaaatgctcatttatacccaggtttcataagcttccaattctatagcaaacccaggctctgagtgttttagaatttcctaattcatggaagtgtttctntgttctttgatcccgtgaccaacagttggaaggttggtaaggacttntctacagtctggaacacagcctaaagccctctnttcatt

SEQ ID NO: 1544 - DNA, 486 bp, Homo Sapiens
  misc_feature (330)..(330): n is a, c, g, or t
attcggcaccatgggagcggtcgggtgtattctccgccgcccccacgccctcgaggtccccgccaccgaaccagcggcggacgcgccgcgcctcccgcggcattcccgcaccggatcgctcctcgctgggggggacctggcctggcggctctggtcactatgagtgaaacatctttcaacctaatatcagaaaaatgtgacattctatccattcttcgggaccatcctgaaaacaggatttaccggagaaaatcgaggaactcagcaaaaggttcaccgccatccgcaagaccaaaggggatgggaactgcttctacagggccttggctnattcctacctggagtccctgctggggaagagcagggagatcttcaagttcaaagaacgcgtactgcagaccccaaatgaccttctggctgctggctttgaggagcacaagttcagaaacttcttcaatgctttttacagtgtggtggaactggtag

SEQ ID NO: 1545 - DNA, 171 bp, Homo Sapiens
tagttccgtgatgcccacaccgtgctggtctcaccgcataggcactgggcatcacaggcagggggaatggggaggggacggtagcgtcacgctacacccacacgcagtttcctgataaaaggtcctttggaaactttgattctcttctcaccaagttgaacggagatgtgt

SEQ ID NO: 1546 - DNA, 376 bp, Homo Sapiens
tttttttttttttttttttttttaggggtaattattttttttaaatgggacagaaataaaattcaaaagatactaaactgggagtcaggacacctgagtcttaccctcagctttttgatgcgactttaagcaaagtcgcttgctctttttggacctcagtttccttgtttgtaaaaacagaaatgatttctaagatcactcagaattgtaaaattctatgaacacttatgaagtctattgagcttgcgtcactgttcactccaatgagtggggataagttgtaagcagaaaaatatcattacttcacatcttttcgttcactatcaacacttaaaaacaaacagccttaataaaaatcaagtccactttgttttct

SEQ ID NO: 1547 - DNA, 178 bp, Homo Sapiens
cggacgcgtgggccggaagtagaatttagaggaataaaatatctgagttgcagggtataggtaaatttctcaaggttataggtgggggttcttaaaacaatgagtggtgtgtgttggtctaaagcgactcacaatcgttagtgacttcaactaaaaaaactaacctctctgctgatcg

SEQ ID NO: 1548 - DNA, 896 bp, Homo Sapiens
cagaggtcagacggtctagcgctgcgtgggccatggtgcagctccgaccgcgagcgtctcgcgccccggcgtcggcggaggcgatggtggacgagggccagctggcctcggaggaggaggaggcggagcacgggctgttgctcgggcagcccagcagcggcgcggccgccgagcccctggaggaagacgaggaaggggacgatgagtttgacgatgaggccccggaggagctgactttcgccagcgcccaggcggaagcgagagaagaggagcggcgagtgcgggagaccgtgcgcagggataaaacgctcctgaaggagaagaggaagcgacgcgaggagctgttcatcgaacagaagaaaagaaaactccttccagacactattttggagaagttaaccacagcttcacagactaacatcaagaaatcgccaggaaaggtgaaagaagttaatttgcaaaagaaaaatgaagactgtgaaaaaggaaatgactccaagaaagttaaagtacaaaaagtacagtctgtcagccagaataaaagctacttggccgtaaggctaaaagaccaagatctgagagattcaaggcaacaagcagcacaagccttcatacataattcattatatgggccaggaaccaacaggactactgtaaataagttcctgtctcttgccaacaagaggttaccagtgaaaagagctgctgtccagtttttgaataatgcttggggaatccaaaaaaaacaaaatgccaagaggtttaaaagacggtggatggtcagaaagatgaaaactaagaagtaaatcaatgctaaatgaagaatctgtactttgtatgtatagaatttatctaataaatcattcatagatcaaaaaaaaaaaaaaaaaaaaaaa

SEQ ID NO: 1549 - DNA, 119 bp, Homo Sapiens
gggacggcggcggtggcgctagcgagcgggacagtgttgtacagtgttttgggcatgcacgtgatactcacacagtggcttctgctaaccaacagatgaagacagatgcaccaacgagg

SEQ ID NO: 1550 - DNA, 620 bp, Homo Sapiens
  misc_feature (620)..(620): n is a, c, g, or t
tgtccgcggctgcgccagacagtgtagaacctgcggcctcgatgtccttctcccgtgccctattgtgggctcggctcccggcggggcgccaggctggccaccgggcagccatctgctctgcccttcgtccccactttgggccctttcccggggttctggggcaagtttctgtccttgccaccgcctcctcctctgcctccggtggctccaaaataccaaacacgtccttgttcgtgcccctgactgtgaaacctcagggccccagcgccgacggcgacgtcggggccgagctaacccggcctctggacaagaatgaagtaaagaaggtcttagacaaattttacaagaggaaagaaattcagaaactgggtgctgattatggacttgatgctcgtctcttccaccaagctttcataagctttagaaattatattatgcagtctcattccctggatgtggacattcacattgttttgaatgatatttgcttcggtgcagctcatgcggatgatttattcccatttttcttgagacatgccaaacaaatatttcctgtgttggactgtaaggatgatctacgtaaaatcagtgacttaagaataccacctaactggtacccn

SEQ ID NO: 1551 - DNA, 816 bp, Homo Sapiens
ctaggtgaggccggggtgaatcggccgaggcatcacagaggcacacacggtggttgcggacgcctggcgaaggctgtggctgagaacttcttcgtggagaccctgcagccccagctcctgcacgtgtccgagcagagcatcttgacctccaccgccctcctcacagccatgctgcgccagcttcgctcccctgcgctgctgcgggaggccgtggctttcctcctgggcacagaccggcagcctgaagcccccggggacaacccccacaccctgtatgctcatctcatcgggcatgtgaccacctctctgatgagatcagcatcaccacactccggctgttgaggagctgctgcagaagccccacgaggggatcatccacagcctggtcctgcgcaaccttgagggccgcccttacgtggcctggggctcaccagagcctgagagctatgaggacaccctagacctggaggaagacccctacttcaccgacagcttcctggattccggctttcaaactcccgcaaagcctcgcctagctcctgctaccagttacgatggcaaaacagcagtgaccgagatcgtcaacagtttcctgtgcctggccccgaggaagccaagactctgcttcctggggagacaggctatgaacacatacgtcccgatggttatggctgtcacgggtggggtcccgggtccctctgggggggctttgccccaaccttggtgccctgtgacggggctttttcgggcgctccccgggtggtgcggtgccggtcgggtactagctgactgggcctgtgtcggtgctcccccatt

SEQ ID NO: 1552 - DNA, 8107 bp, Homo Sapiens
tgagggaagaagaggaagcgggaggagcttggcttcctcgcgtatttgaggacagcccatctcccttcaagaaccctacggagagtcggactgcatctccgcagcgagctcttggagcgccgccggccgggaggcgaaggatgcaggcggctccgcgcgccggctgcggggcagcgctcctgctgtggattgtcagcagctgcctctgcagagcctggacggctccctccacgtcccaaaaatgtgatgagccacttgtctctggactcccccatgtggctttcagcagctcctcctccatctctggtagctattctcccggctatgccaagataaacaagagaggaggtgctgggggatggtctccatcagacagcgaccattatcaatggcttcaggttgactttggcaatcggaagcagatcagtgccattgcaacccaaggaaggtatagcagctcagattgggtgacccaataccggatgctctacagcgacacagggagaaactggaaaccctatcatcaagatgggaatatctgggcatttcccggaaacattaactctgacggtgtggtccggcacgaattacagcatccgattattgcccgctatgtgcgcatagtgcctctggattggaatggagaaggtcgcattggactcagaattgaagtttatggctgttcttactgggctgatgttatcaactttgatggccatgttgtattaccatatagattcagaaacaagaagatgaaaacactgaaagatgtcattgccttgaactttaagacgtctgaaagtgaaggagtaatcctgcacggagaaggacagcaaggagattacattaccttggaactgaaaaaagccaagctggtcctcagtttaaacttaggaagcaaccagcttggccccatatatggccacacatcagtgatgacaggaagtttgctggatgaccaccactggcactctgtggtcattgagcgccaggggcggagcattaacctcactctggacaggagcatgcagcacttccgtaccaatggagagtttgactacctggacttggactatgagataacctttggaggcatccctttctctggcaagcccagctccagcagtagaaagaatttcaaaggctgcatggaaagcatcaactacaatggcgtcaacattactgatcttgccagaaggaagaaattagagccctcaaatgtgggaaatttgagcttttcttgtgtggaaccctatacggtgcctgtctttttcaacgctacaagttacctggaggtgcccggacggcttaaccaggacctgttctcagtcagtttccagtttaggacatggaaccccaatggtctcctggtcttcagtcactttgcggataatttgggcaatgtggagattgacctcactgaaagcaaagtgggtgttcacatcaacatcacacagaccaagatgagccaaatcgatatttcctcaggttctgggttgaatgatggacagtggcacgaggttcgcttcctagccaaggaaaattttgctattctcaccatcgatggagatgaagcatcagcagttcgaactaatagtccccttcaagttaaaactggcgagaagtacttttttggaggttttctgaaccagatgaataactcaagtcactctgtccttcagccttcattccaaggatgcatgcagctcattcaagtggacgatcaacttgtaaatttatacgaagtggcacaaaggaagccgggaagtttcgcgaatgtcagcattgacatgtgtgcgatcatagacagatgtgtgcccaatcactgtgagcatggtggaaagtgctcgcaaacatgggacagcttcaaatgcacttgtgatgagacaggatacagtggggccacctgccacaactctatctacgagccttcctgtgaagcctacaaacacctaggacagacatcaaattattactggatagatcctgatggcagcggacctctggggcctctgaaagtttactgcaacatgacagaggacaaagtgtggaccatagtgtctcatgacttgcagatgcagacgcctgtggtcggctacaacccagaaaaatactcagtgacacagctcgtttacagcgcctccatggaccagataagtgccatcactgacagtgccgagtactgcgagcagtatgtctcctatttctgcaagatgtcaagattgttgaacaccccagatggaagcccttacacttggtgggttggcaaagccaacgagaagcactactactggggaggctctgggcctggaatccagaaatgtgcctgcggcatcgaacgcaactgcacagatcccaagtactactgtaactgcgacgcggactacaagcaatggaggaaggatgctggtttcttatcatacaaagatcacctgccagtgagccaagtggtggttggagatactgaccgtcaaggctcagaagccaaattgagcgtaggtcctctgcgctgccaaggagacaggaattattggaatgccgcctctttcccaaacccatcctcctacctgcacttctctactttccaaggggaaactagcgctgacatttctttctacttcaaaacattaaccccctggggagtgtttcttgaaaatatgggaaaggaagatttcatcaagctggagctgaagtctgccacagaagtgtccttttcatttgatgtgggaaatgggccagtagagattgtagtgaggtcaccaacccctctcaacgatgaccagtggcaccgggtcactgcagagaggaatgtcaagcaggccagcctacaggtggaccggctaccgcagcagatccgcaaggccccaacagaaggccacacccgcctggagctctacagccagttatttgtgggtggtgctgggggccagcagggcttcctgggctgcatccgctccttgaggatgaatggggtgacacttgacctggaggaaagagcaaaggtcacatctgggttcatatccggatgctcgggccattgcaccagctatggaacaaactgtgaaaatggaggcaaatgcctagagagataccacggttactcctgcgattgctctaatactgcatatgatggaacattttgcaacaaagatgttggtgcattttttgaagaagggatgtggctacgatataactttcaggcaccagcaacaaatgccagagactccagcagcagagtagacaacgctcccgaccagcagaactcccacccggacctggcacaggaggagatccgcttcagcttcagcaccaccaaggcgccctgcattctcctctacatcagctccttcaccacagacttcttggcagtcctcgtcaaacccactggaagcttacagattcgatacaacctgggtggcacccgagagccatacaatattgacgtagaccacaggaacatggccaatggacagccccacagtgtcaacatcacccgccacgagaagaccatctttctcaagctcgatcattatccttctgtgagttaccatctgccaagttcatccgacaccctcttcaattctcccaagtcgctctttctgggaaaagttatagaaacagggaaaattgaccaagagattcacaaatacaacaccccaggattcactggttgcctctccagagtccagttcaaccagatcgcccctctcaaggccgccttgaggcagacaaacgcctcggctcacgtccacatccagggcgagctggtggagtccaactgcggggcctcgccgctgaccctctcccccatgtcgtccgccaccgacccctggcacctggatcacctggattcagccagtgcggattttccatataatccaggacaaggccaagctataagaaatggagtcaacagaaactcggctatcattggaggcgtcattgctgtggtgattttcaccatcctgtgcaccctggtcttcctgatccggtacatgttccgccacaagggcacctaccataccaacgaagcaaagggggcggagtcggcagagagcgcggacgccgccatcatgaacaacgaccccaacttcacagagaccattgatgaaagcaaaaaggaatggctcatttgaggggtggctacttggctatgggatagggaggagggaattactagggaggagagaaagggacaaaagcaccctgcttcatactcttgagcacatccttaaaatatcagcacaagttgggggaggcaggcaatggaatataatggaatattcttgagactgatcacaaaaaaaaaaaaaacctttttaatatttctttatagctgagttttcccttctgtatcaaaacaaaataatacaaaaaatgcttttagagtttaagcaatggttgaaatttgtaggtactatctgtcttattttgtgtgtgtttagaggtgttctaaagacccgtggtaacagggcaagttttctacgtttttaagagcccttagaacgtgggtattttttttcttgagaaaagctaatgcacctacagatggcccccaacattctcttccttttgcttctagtcaaccttaatgggctgttacagaaactagttcgtgtttatatactatttcctttgatgtcctataagtcggaaaagaaaggggcaaagagaacctattatttgccagtttttaagcagagctcaatctatgccagctctctggcatctggggttcctgactgataccagcagttgaaggaagagagtgcatggcacctggtgtgtaacgacacaatcagcacaactggagagaggcattaaagaaccagggaaggtagtttgatttttcattgaattctacaagctaatattgttccacgtatgtagtcttagaccaatagctgtaactatcagctgcaataccatggtgaccagctgttacaaaagattttttcctgttttatctgaaacatactggatttatatatgtataagcgcctcaatggggaattagagccagatgttatgatttgtttgctctttttcttttatagttatagcaaaaatatggataatttctagtgaatgcataaattaggttgcgtttcttattttgctttaaatctctggtagtttttccacccctgtgacacaatcctaatagacagtgtcctgtaaatggacacaacacaataaagtcaagttattattgctgttactctggatgatatggaaaacactgccatattttaaatcaactactccacgtgtttttccatccaatcacactgctgtgattcagggatctttcttctaaaacggacacatttgaacctcaggttcatcacaaacctggtacctgttgcttcccagaggatggagaagtgtagttaatcacacctcttagtttaatctgaaatcttgacccagttatttaacaaataaatacctcattgattatatttaaaagtaatacacttcctgtaaacaaatggggacaatgcatccaaaaaatctttttaaacagattacacaaaaattatttccagaaaggctaccatttatcatcattatatttcaagcctcttatacttaataagcactttctaaaaagtcttgagatcccaccattctgaggaattcaatatgatcactttttccttctttgcctgggagaggttaagaggcggtttcgaaggtatagatgctattgttctgatggcccggctgaataaaatggaaattctagtttgttagaattatgcattctttttcaagattctcagtgtgcctaacttattggagcacatcagtttcttgggtaatggaaaacattacctagagttgccagtggcacattacaccagtacagagcacattccaaaggagacattggaccagttaattcccatacaagtcaaggtaacagaacaaaagggaatcctgatgcccttttaccattgctggttgagctcaggcactgtcatggacacccttaattttaaaaggttttaatcattcttctataaaatacatttaaaatggaaaaatacttaatatcactaaatatcagaacaatgtaacatttacaaatgacatattgaaagcaaaggctgttttatttagccaagatgattaccattaggagttactttatgtattgttgaaagcaaattttaaacatgatgttttagaagtgtttctgatttttaaacctggtttacaggtattacttctgcacttaccaaataatgccagatggaaatttattatttcttgcaattcccgtgatagctctgttctttatgcattgtctcaacactttcccttttttcccaaaatgagtagagaattaaagccacccaaaacagcttctgctactaaaatgttctcatcctttctcctccctctccttttcctgccacaaaaggtgaaaaatgagatccaatcctctcaccaaaatttcaaacctaggacactggaatgactgcagggatcagtggttctcccatatcaccatcaattaagacatataggacactgtcttccttcaagagggttacaatgtggccatcagacaggaaaccaaacggtggataaagtattaagtaactaagtgccaaataaatgctggaaatcttgacctctccttgggattatgggtgtaacaaaaatccctacatctgtttatgaaggccatattcagtacattttaaatggtaaataatctgtttatgtgaagaaaaagaattaagtctttcttccaactctctccttggatagcctagcacagtgcagcctccataaccatgacattcccgcccaagctctcagtgcctaatcctgctttgtcattcacatctcacaaaatcttgacatcttacattccaatacattatcaagcaagcacaagtatgctggtagtagcctctttaaataatatgtatagacaacaacaacgacaaaaaatagactgttttaaagtttcagggaaagttggtggctgatttaaagttgtgcaggaaacatcttctgtgtatgaagcaaatgtcgatgttttgaaaagctaggagatgactttgaatgaatgcaaggttagtgagatcctaagctctcaaaatagcatattccctagagctcaagaaagctggtccaggaggttgaaaaagctattttgttgttaaattattttctggcccttcttaatatttaaaaatgtatttccccttgtggctttcaaccacctgctcaaaaaaagagacttgttacatgaaagttttcattaaagagctgaaaacaagaatttagagagccattcctagaaaatgtcctactgccctgcatttgacaaacaagcatcctttactaacaagagcaggaattcagaggcacaagaaaaagcattggcatgagccaaagagtctgtcttaatgttacttttgaaaatctgctgagcggccaccatatgcaggctgagagctgggcacaggcgaagccattggaagcacttcaggaacaagcacacagctgtgggacttgaacatgcaagtgttcaggttgtgtcaagaagcttttctttccttctatgatggaatctgttcttttctatcctacttttttctctcttcctctcctcaccacattataccctgctcttacgcagtaaacgttttaatggcccgtttatgtctcatgcctccaaacaacactgaatttgaaaccccccattttttcttttcaccaccctgttgagcaattttcccaaaaaaagggcagcaattattaaattgaattcaagtttctagattttactaagttttattttgtcaggttttttaaattttttcagtgagcgtggtgactgcagaggttagtgctgtgaaaagctgggctaaatattctttctgtaaagtcaaacaggattccatcccctgtgaaataacacaaaatttcactctctaaaagcaacagcatgtaaactagaatgaaagaaggaaattatgtacgtatgcctaatattctttgtgaatgtctttcatttaactaaaattatattagaaaccagattgataaataaaaaattcaaagtagttttaattatcct

SEQ ID NO: 1553 - DNA, 414 bp, Homo Sapiens
  misc_feature (137)..(137): n is a, c, g, or t
  misc_feature (186)..(186): n is a, c, g, or t
  misc_feature (237)..(237): n is a, c, g, or t
  misc_feature (290)..(290): n is a, c, g, or t
  misc_feature (305)..(305): n is a, c, g, or t
  misc_feature (313)..(313): n is a, c, g, or t
  misc_feature (336)..(336): n is a, c, g, or t
  misc_feature (361)..(361): n is a, c, g, or t
  misc_feature (375)..(375): n is a, c, g, or t
  misc_feature (378)..(378): n is a, c, g, or t
  misc_feature (385)..(385): n is a, c, g, or t
  misc_feature (397)..(397): n is a, c, g, or t
  misc_feature (405)..(405): n is a, c, g, or t
aaaaataatgaaaaataatctctttattctctctctccaacagatctctgacccagtccttctccaatacaaaggaaagacgatcaagagcgtgaaggccagctagcgcagatgggcgggccgcaggtggctagagnaaccggtgtactctcgggggatgcagcgagatgcgccatctctgacggnaaaccgaccgacgatgcctacacggggcacctggttcctgtccagtatggntatagagtgtgccccaagaacctcggaggcaagagaaacacggtcagtattcntgatcatttccactncaggaagngctgcactccagagatggttcancatccaggagtactggcaacccccntcatccaattggtntanaaggttnattgtgttcccnacttccanccgaccggt

SEQ ID NO: 1554 - DNA, 426 bp, Homo Sapiens
aaactcggtgctggagcccacgtgctgcctgaagcacagaaggaagttctcttcggttggcaggatctgcgccagctctgccatctcgattttcccatctgagtttttatcatacttctgcatgaactccttcatcttttctccaaagttgtcactctttgacatcatgccagagcctttccttgccttctccagctcttggaaaaagttttctagctctttaccttcaatatacccatttccgtctgcgtcaaagtgcttccatatttccaggaactgggacgccgtcagctcggccaggtgcaggtaagggggctgctgctgcgggccagccatggcgagccgctcggagacctcagcctgcaccgctcccgctccgcgccggctgggctctggcactcgcgctcggggggggggggggggggg

SEQ ID NO: 1555 - DNA, 1630 bp, Homo Sapiens
gggaccggccgctcccgcagcagccatgtcgttcttcccggagctttactttaacgtggacaatggctacttggagggactggtgcgcgcctgaagggctgggcgagctcagccaggccgactacctcaacctggtgcagtgcgagacgctagaagacttgaaactgcatctgcagagcactgattatggtaacttcctggccaacgaggcatcgctctggcggtgtcagtcatcgatgaccggctcaaggagaagatggtggtggagttccgccacatgaggaaccatgcctatgagccactcgccagcttcctagacttcattacttacagttacatgatcgacaacgtgatcctgctcatcacaggcacgctgcaccagcgctccatcgctgagctcgtgcccaagtgccacccactaggcagcttcgagcagatggaggccgtgaacattgctcagacacctgctgagctctacaatgccattctggtggacacgcctcttgcggcttttttccaggactgcatttcagagcaggaccttgacgagatgaacatcgagatcatccgcaacaccctctacaaggcctacctggagtccttctacaagttctgcaccctactgggcgggactacggctgatgccatgtgccccatcctggagtttgaagcagaccgccgcgccttcatcatcaccatcaattctttcggcacagagctgtccaaagaggaccgtgccaagctctttccacactgtgggcggctctaccctgagggcctggcgcagctggctcgggctgacgactatgaacaggtcaagaagctggccgattactacccggagtacaagctgctcttcgagggtgcaggtagcaaccctggagacaagacgctggaggaccgattctttgagcacgaggtaaagctgaacaagttggccttcctgaaccagttccactttggtgttttctatgccttcgtgaagctcaaggagcaggagtgtcgcaacatcgtgtggatcgctgaatgtatcgcccagcgccaccgcgccaaaatcgacaactacatccctatcttctagcgtctggcccaaggctctcaagtgtgtgtgcgtgtgtgtgtatgtggtctgttacaagcctgtggctcacctgcctgtccggggtgtagtacgctgtcctagcggctgcccagttctcctgaccctcttagagactgttcttaggcctgaaaaggggctgggcccccccccccccaccaaggatggatggatgaagaccccctccagagcaaggaggccccctcagccctgtggttacagccgctgatgtatctaagaagcatgtcactttcatgttcctccctaactccctgacctgagaaccctggggcctgggggcagtttgagcctcctctcccttctgtgggtcgctcccagagccatggcccatgggaaggacagagtgtgtgtgtccttggcctggggggtgttgctcctcacgtccctccctcagccctgcccctctgagacaataaaactgccctctctaagcccaaaaaaaaaaaaaaaaaaaaaaaaaaaccggaattcgagctcgcccggggactcctctagagtcgacctgcagcc

SEQ ID NO: 1556 - DNA, 1403 bp, Homo Sapiens
agttacctctcccctttcacgtagttttcatttgtggtgagattctctcccaggccacaagacatttcctgctcggaaccttgtttactaatttccactgcttttaaggccctgcactgaaaatgcaagctcaggcgccggtggtcgttgtgacccaacctggagtcggtcccggtccggccccccagaactccaactggcagacaggcatgtgtgactgtttcagcgactgcggagtctgtctctgtggcacattttgtttcccgtgccttgggtgtcaagttgcagctgatatgaatgaatgctgtctgtgtggaacaagcgtcgcaatgaggactctctacaggacccgatatggcatccctggatctatttgtgatgactatatggcaactctttgctgtcctcattgtactctttgccaaatcaagagagatatcaacagaaggagagccatgcgtactttctaaaaactgatggtgaaaagctcttaccgaagcaacaaaattcagcagacacctcttcagcttgagttcttcaccatcttttgcaactgaaatatgatggatatgcttaagtacaactgatggcatgaaaaaaatcaaatttttgatttattataaatgaatgttgtccctgaacttagctaaatggtgcaacttagtttctccttgctttcatattatcgaatttcctggcttataaactttttaaattacatttgaaatataaaccaaatgaaatattttactgataagattcttcatgcttctttgctctccttaaaatgtctttttcactagttagttccaagggtcagtctcataattttgttcttatactttgatttcctttttcttttttttttttttaatagagttgggggatctttctttcttttttttttttttttttttgagatagagtctcgctctgttgcccaggctggagtgcagtggcgtgatctcagctcactgcaacctccacctcctggatacaagcgattctgctgcctcagtctcccgagtagctgggattacaggttcccgccaccatgcccagctaatttttgtatttttagtagagacggggtttcaccatcttggtcaggctggtctcgaactcctgacctcgtgatccacctgcctcggcatcacaaaatgctgggattacaggcatgagccaccgcgtccagcctagagttgggggtctttctatgttgcccaggctggtcttgaactccgggcctctagcaagcctctcatctcagcctcccaaggtgctggaattacaggtgtgagccactgcaccatactttggtttcttagcaggagattttggttcacagtaacccagctctctttcatctaagaactttagatgagaaaaaaaaaaaaaaaaaa

SEQ ID NO: 1557 - DNA, 299 bp, Homo Sapiens
  misc_feature (21)..(21): n is a, c, g, or t
  misc_feature (202)..(202): n is a, c, g, or t
ggacactcctaggggcttttntaaagctagactcgcagctccttgctcaggaaaattaaactattcacgtttcagatcaagtgttgacagtcaccagtcaggaggagttcttaaagagttttatgttgactgaatattgcacattgagtccccattgagtccctggtgggaaaagtccacaatttcccattgatagcttttnactgttgtcagtcactgttacttggatcagatcaagcgcagtgactttttgggattcagtggttattctccacacttcgtaggccattttcaaccca

SEQ ID NO: 1558 - DNA, 357 bp, Homo Sapiens
  misc_feature (43)..(43): n is a, c, g, or t
  misc_feature (126)..(126): n is a, c, g, or t
  misc_feature (187)..(187): n is a, c, g, or t
  misc_feature (274)..(274): n is a, c, g, or t
  misc_feature (311)..(311): n is a, c, g, or t
ggcgaaaagagcgggaagggtagtggaaggcaggggctgaagnccaggccaggcggaatgaagatgatggtggtcttgctcatgctgtcctcgctcagccggctcctgggcctcatgagcactcantctctcaggcaatacctggactctgtgcccttgccaccctgccaggagcaacagccaaagntagtgccgagctagaccacaaggcctgctacctgtgccacagcttgctgatgctggccggggtagttgttagctgccaggacatcantccagaccaagtggggcgagctgcagctgctgtgcantgcagttggaccgccacatcagcacgcagatccgggagaagccccc

SEQ ID NO: 1559 - DNA, 255 bp, Homo Sapiens
gaaacaataatcaacgaatgaaaccccaaaattccaggtcgacctgtccttagtcgaggagatgttcctggcgtttagagaaagggtgaatgcctctcaagaagtggagccagtagaacctgaaaactgccaccttatcgaggaacttgaaagtggctctgaagatatcgatatactccccagtgaactgtctttcatctccagtgaattaaaatacccaggcatgccaaacttcgcgccagatgaaccagggaa

SEQ ID NO: 1560 - DNA, 621 bp, Homo Sapiens
  misc_feature (210)..(210): n is a, c, g, or t
  misc_feature (509)..(509): n is a, c, g, or t
agcggccgctcgcgatctagaactgagaaggttcccgacgcggcgatggcgagaagcagagaaatggacctggggaggggcgtgcggggtgcggtagggttggatggaagccttggcgggccaaaaccactgcggcttcaaaatccggatgcgccggtatttgaggcggaggcggggctgtggggggaggagggaggctatggcgctcanagcactgtgggacactgtaggccacgtggggcggaacggaaacctcgcagggtcagaccgtagcgacgcgggaagtccggacgcagtagctccctgaagcggaggcgaaggggagtttaagccccagcggcggcaatggcggagaggcccgaggacctaaacctgcccaatgccgtgatcaccaggatcatcaaggaggcgctcccggacggtgtcaacatctccaaggaggcccggagcgccatctcccgcgcctgcagcgtcttcgtgctgtacgccacatcctgtgctaacaactntgcaatgagaggaaagcggaagacgctgaatgccagtgatgtgctctcagccatggaagagatggagtgtcagtggttcgttaccgcattgaaagaagctctggaagcatat

SEQ ID NO: 1561 - DNA, 4045 bp, Homo Sapiens
gaacgatttaaggagcgaatactactggtaaactaatggaagaaatctgctgcaccactggatattgggagtgtgtggcatgcatcctcatcatcaggaaactctaaaaaagaaccgagtggtgctagccaaacagctgttgttgagcgaattgttagaacatcttctggagaaggacatcatcaccttggaaatgagggagctcatccaggccaaagtgggcagtttcagccagaatgtggaactcctcaacttgctgcctaagaggggtccccaagcttttgatgccttctgtgaagcactgagggagaccaagcaaggccacctggaggatatgttgctcaccaccctttctgggcttcagcatgtactcccaccgttgagctgtgactacgacttgagtctcccttttccggtgtgtgagtcctgtcccctttacaagaagctccgcctgtcgacagatactgtggaacactccctagacaataaagatggtcctgtctgccttcaggtgaagccttgcactcctgaattttatcaaacacacttccagctggcatataggttgcagtctcggcctcgtggcctagcactggtgttgagcaatgtgcacttcactggagagaaagaactggaatttcgctctggaggggatgtggaccacagtactctagtcaccctcttcaagcttttgggctatgacgtccatgttctatgtgaccagactgcacaggaaatgcaagagaaactgcagaattttgcacagttacctgcacaccgagtcacggactcctgcatcgtggcactcctctcgcatggtgtggagggcgccatctatggtgtggatgggaaactgctccagctccaagaggtttttcagctctttgacaacgccaactgcccaagcctacagaacaaaccaaaaatgttcttcatccaggcctgccgtggaggtgctattggatcccttgggcacctccttctgttcactgctgccaccgcctctcttgctctatgagactgatcgtggggttgaccaacaagatggaaagaaccacgcaggatcccctgggtgcgaggagagtgatgccggtaaagaaaagttgccgaagatgagactgcccacgcgctcagacatgatatgcggctatgcctgcctcaaagggactgccgccatgcggaacaccaaacgaggttcctggtacatcgaggctcttgctcaagtgttttctgagcgggcttgtgatatgcacgtggccgacatgctggttaaggtgaacgcacttatcaaggatcgggaaggttatgctcctggcacagaattccaccggtgcaaggagatgtctgaatactgcagcactctgtgccgccacctctacctgttcccaggacaccctcccacatgatgtcacctccccatcatccacgccaagtggaagccactggaccacaggaggtgtgatagagcctttgatcttcaggatgcacggtttctgttctgccccctcagggatgtgggaatctcccagacttgtttcctgtgcccatcatctctgcctttgagtgtgggactccaggccagctccttttctgtgaagccctttgcctgtagagccagccttggttggacctattgccaggaatgtttcagctgcagttgaagagcctgacaagtgaagttgtaaacacagtgtggttatggggagagggcatataaattccccatatttgtgttcagttccagcttttgtagatggcactttagtgattgcttttattacattagttaagatgtctgagagaccatctcctatcttttatttcattcatatcctccgccctttttgtcctagagtgagagtttggaaggtgtccaaatttaatgtagacattatcttttggctctgaagaagcaaacatgactagagacgcaccttgctgcagtgtccagaagcggcctgtgcgttcccttcagtactgcagcgccacccagtggaaggacactcttggctcgtttgggctcaaggcaccgcagcctgtcagccaacattgccttgcatttgtaccttattgatctttgcccatggaagtctcaaagatctttcgttggttgtttctctgagctttgttactgaaatgagcctcgtggggagcatcagagaaggccaggaagaatggtgtgtttccctagactctgtaaccacctctctgtctttttccttcctgagaaacgtccatctctctcccttactattcccactttcattcaatcaacctgcacttcatatctagatttctagaaaagcttcctagcttatctccctgcttcatatctctcccttctttaccttcatttcatcctgttggctgctgccaccaaatctgtctagaatcctgctttacaggatcatgtaaatgctcaaagatgtaatgtagttctttgttcctgctttctctttcagtattaaactctcctttgatattatgtggcttttatttcagtgccatacatgttattgttttcaacctagaaacctttatccctgcttatctgaaacttcccaacttccctgttctttaagactttttttttttttttttttttttttgagacagagtctcgctctgtcgcccaggctggagggcagtggcacgatctcagctcactgcaagctccaactcccgggttcacgccattctcctgcctcagccttccaagtagctgggactacaggtgcccgccaccgtgcccggctaatttttttgtatttttagtagagacagggtttcaccatgttagccgggatggtcttgatctcctgacctcatgatccacccacctcagcctcccaaagtgttgggattacaggcgtgagccactgcgcccgggcaagacctttttttaaaaaaaaaaaaaaaaaaacttccattctttcttcctccagtctgttctcacataacagagtagttttggtttttaattttttttggttgtttgctgttttttgttttttaaggtgagttctcactatgtttctcagactggtctcgaactcctggcctcaagccatcttcccgcctcagcctctcaaatagctgggcttacaggcatgagccaccacacctggccaggatttggttgtttaaatataaatctgatcacccccctgcttagaacccttctgctttctattacccctcatttaaaatgtaaactcttcaccttggtttatgagaactggttcttgccttccccttgaacctcattaaatggtgatttcttgctaagctccagcccgagtggtctcctctcagcttctaattttgtgctctttcctgcccttttcctgggccttctcagctctccacccccaccactcttgactcaggtggtgtccttcttcctcaagtcttgacaattcccgggcccttcagtccctgagcagtctacttctgtgtctgtcaccacatcttgtcttttcccctcattgcatttattgcagtttatatatatgctacttttacttgttcatttctgtctcccctaccaggctgtaaatgagggcagaaaccttgtttgttttattcaccatcatgtaccaagtgcttggcacatagtgggccttcattaaatgtttgttgaataaaagagggaagaaggcaagccaaccttagctacaatcctaccttttgataaaatgttccttttgacaatatacacggattattatttgtactttgtttttccatgtgttttgcttttatccactggcatttttagctccttgaagacatatcatgtgtgagataacttccttcacatctcccatggtccctagcaaaatgctaggcctgtagtagtcaaggtgctcaataaatatttgtttgggtggtttgtgagccttgctgccaagtcctgcctttgggtcgacatagtatggaagtatttgagagagagaacctttccactcccactgccaggattttgtattgccatcgggtgccaaataaatgctcatatttattaaaaaaaaaaaaaaaaaaa

SEQ ID NO: 1562 - DNA, 896 bp, Homo Sapiens
cgggtgccgggacaaactatacggctaggtacgaggctggtgtgtctccgggacgctgaggggccgaggagacgtgaggctctggcctgcagctcgcgccgccatggacgctgccgaggtcgaattcctcgccgagaaggagctggttaccattatccccaacttcagtctggacaagatctacctcatcgggggggacctggggccttttaaccctggtttacccgtgggaagtgcccctgtggctggcgattaaacctggaaacaaagacagaaatgtcgcctgctccctccagagtggatggatgtagaaaagttggagaagatgagggatcatgaacgaaaggaagaaacttttaccccaatgcccagcccttactacatggaacttacgaagctcctgttaaatcatgcttcagacaacatcccgaaggcagacgaaatccggaccctggtcaaggatatgtgggacactcgtatagccaaactccgagtgtctgctgacagctttgtgagacagcaggaggcacatgccaagctggataacttgaccttgatggagatcaacaccagcgggactttcctcacacaagcgctcaaccacatgtacaaactccgcacgaacctccagcctctggagagtactcagtctcaggacttctagagaaaggcctggtgcaggcggcttgctgggggatgtgagcgctcaggacgtgatgaggtactcgtggttctggagctctagaaacacttctgatgcatgacaccatgtgtgatggtgccaggaatggttcaggatgttgttggggacaccagtttgtgattagtccttaaaacttagcttcctgggacattcttcattcccctctggttctagaaacagcccttgttccccc

SEQ ID NO: 1563 - DNA, 462 bp, Homo Sapiens
aattcggcaccaggctccaacatggagctcttgcagcttacccgctaaaatgttccgggcccagagcaaagcttttatgcctttgaagtgaaggatgcaaaaggaagaactgtttctctggaaaagtataaaggcaaagtttcactagttgtaaacgtggccagtgactgccaactcacagacagaaattacttagggctgaaggaactgcacaaagagtttggaccatcccacttcagcgtgttggcttttccctgcaatcagtttggagaatcggagccccgcccaagcaaggaagtagaatcttttgcaagaaaaaactacggagtaactttccccatcttccacaagattaagattctaggatctgaaggagaacctgcatttagatttcttgttgattcttcaaagaaggaaccaaggtggaatttttggaagtatcttgtcaaccctgagggtcaa

SEQ ID NO: 1564 - DNA, 530 bp, Homo Sapiens
  misc_feature (266)..(266): n is a, c, g, or t
  misc_feature (273)..(273): n is a, c, g, or t
  misc_feature (282)..(282): n is a, c, g, or t
  misc_feature (285)..(285): n is a, c, g, or t
  misc_feature (292)..(292): n is a, c, g, or t
  misc_feature (303)..(303): n is a, c, g, or t
  misc_feature (306)..(306): n is a, c, g, or t
  misc_feature (315)..(315): n is a, c, g, or t
  misc_feature (326)..(326): n is a, c, g, or t
  misc_feature (333)..(333): n is a, c, g, or t
  misc_feature (342)..(342): n is a, c, g, or t
  misc_feature (364)..(365): n is a, c, g, or t
  misc_feature (380)..(380): n is a, c, g, or t
  misc_feature (386)..(386): n is a, c, g, or t
  misc_feature (393)..(393): n is a, c, g, or t
  misc_feature (463)..(463): n is a, c, g, or t
  misc_feature (497)..(497): n is a, c, g, or t
cagtctttaagaaaagctaaggcttgtttggctttttgtttatttttaggtttttggtgtcctcatgacctaacctcatcccagtgagtagagactgggaggggagagcagcagctggagggcaggctgggagcgcttgtgagggagaggagctatggacgtctgcttctctgccaagggagagagtgaggcaggcctgggcccgctgacttcagggtgaggccacagctactgcagcgctttttatttatttatttatttactgngaatggnagctttgtnctntaacccnaagggctgganttncagtggtgnaatctcgggcncactggnaacctctgnctccctgggcttgcagtgattnncctggcgttcaaagnaattcnccctgcntcggccttctgaagtaagttggggattacaaggcataatgccacccacacttgggctaaatttttttggnaatttttaagtagaaatggggggtttcaccatgnttggccaagctggtctcgaactcctgaacctca

SEQ ID NO: 1565 - DNA, 2085 bp, Homo Sapiens
ggctgcagttacagagtgctgccatcaccaagtatgtggcggacgtcctgccggggaagaatcaaagagcagagagcatggccagtgcagcgagggaactggttatccagcggttgagtctggtgaggagtctttgcgagagcgaggagcagcggttactggaacaggtgcatggcgaagaggagcgggcccaccagagcatcctgacacagcgggtgcactgggccgaggcgctgcagaaacttgacaccatccgcactggcctggtgggcatgcttactcacctggatgacctccagctgattcagaaggagcaagagattttcgagaggaccgaagaagcagagggcattttggatccccaggagtcggaaatgttaaactttaatgagaagtgcactcggagcccactactgacccaactctgggcaacggcggttcttgggtctctctcaggcacagaggacatacggatcgatgagaggacagtcagccccttcctgcaattgtcagatgatcgaaagaccctgaccttcagcaccaagaagtcaaaggcctgtgcagatggcccggagcgcttcgaccactggcccaatgccctggctgccacctccttccagaatgggctccatgcctggatggtgaatgtccagaacagttgtgcctataaggtgggcgtggcttcaggccacctgccccgcaagggttctggcagtgactgccgtctgggccacaatgccttctcctgggtcttctctcgctatgatcaggagtttcgtttctcacacaatgggcagcacgagcccctggggctgctgcggggcccagcccagctgggtgtagtgctggacttgcaggttcaggagctgctcttctatgagccagcctccggcatagtgctctgtgcccatcatgtgtccttcccggggcccctcttcccagtctttgctgtggccgatcagaccatttctatcgtccgctgacctctggccacaggaagccaggtccaccgcccaccaccctttcaggccatgtttctactcagtgtgcttttcccaaatgatgtgtgtggtgtttctaagagaaacagggcccataaccagtgggcagctttaggagggatggggatctgtttcagatctaggcataacctgtaaatcacaggtgtccaaacttttggcttccctgggccacatttgaagaagaattttcttgggccacataaaatacactaacgatagctgatgagctaaaaaaaaaaaaaaaagtctgtgtataatttttgtgatatctgccaccacagataagcaaaaaagtccttgcattcaaagggttggagattgctgctttgagtgctgggtacctgtggggaacctactactccctgggccttagtctcccaaatccaccatgcatctgcccctctgagggtgtcttcactttgtctctggcatctagcatggtgcctggtgcatagtgagcatgcaataaatatttggcaggtgagtggatggatagatggataggtgaatgtaggtggacaggtgactgggtggatgttgtggtctctggagaagcactgccattcagcctcctgctccagctgttcacatgcagaaatgctctcttcacaggcagagaagcctgtggctaaagtttccacatcccattaactcagtgcttttgtctttttcatgacatggcacatagagaaaatatttttttctagcacacaagagcaacctgaaaggctgctcctggctaggggactctgtcccgggggaccgtgtcctcccccatgtcctgcctaggccctcagaggaccaggggatcatgtctccaggtaacccgactgtagcccctgctggctgagctccagcctgtgcccactgataatagcagggacggcctttctcttagagcagctgataagtttccctacctgatggccccctctgacataaactgcacacctggggtgatggcttaaagccagaaagagctgagggagttaagagggccaaccttagggcacgtgggcattattaaaggtcttaaaagcattaaaaaaaaaaaaaaaaaaaa

SEQ ID NO: 1566 - DNA, 3720 bp, Homo Sapiens
gctctacagcggaggtggctgtggcggtggcgctggtggctgcggcggcggcggcggcagcggcgctcgagcggttcctgtcagggtcagccggcgggccccctgggtggtccacctgcaaatcgcggagcggcgccccagggatcgatggcgatgaactataacgcgaaggatgaagtggacggtgggcccccgtgtgctccggggggcaccgcgaagactcggagaccggataacacggccttcaaacagcaacggctgccagcttggcagcccatccttacggctggcacggtgctacctattttcttcatcatcggtctcatcttcattcccatcggcattggcatttttgtcacctccaacaacatccgcgagatcgagattgattataccggaacagagccttccagtccctgtaataaatgtttatctccggatgtgacaccttgcttttgtaccattaacttcacactggaaaagtcatttgagggcaacgtgtttatgtattatggactgtctaatttctatcaaaaccatcgtcgttacgtgaaatctcgagatgatagtcaactaaatggagattctagtgctttgcttaatcccagtaaggaatgtgaaccttatcgaagaaatgaagacaaaccaattgctccttgtggagctattgccaacagcatgtttaatgatacattagaattgtttctcattggcaatgattcttatcctatacctatcgctttgaaaaagaaaggtattgcttggtggacagataaaaatgtgaaattcagaaatccccctggaggagacaacctggaagaacgatttaaaggtacaacaaagcctgtgaactggcttaaaccagtttacatgctggattctgacccagataataatggattcataaatgaggattttattgtttggatgcgtactgcagcattacctacttttcgcaagttgtatcgtcttatagaaaggaaaagtgatttacatccaacattaccagctggccgatactctttgaatgtcacatacaattaccctgtacattattttgatggacgaaaacggatgatcttgagcactatttcatggatgggaggaaaaaatccatttttggggattgcttacatcgctgttggatccatctccttccttctgggagttgtactgctagtaattaatcataaatatagaaacagtagtaatacagctgacattaccatttaattttatattatgaaagcaaatcatctgcatgtgcatcaaggccagtcctattcaacctagctttcgaatgctgatatctggttagtatgtcattttgaagttggcacataacttttctaaaaaaaagcagtctttgttgtttgcttcttccctacggatgacttctaaaaatatatgacgggtataaaaaaattagctatattgatcatatcaacactgtaactgctgaaatggcattctaatgtttgctttttattcggacaggccacatgatgcatagagcctctttcatgtgacttgtgtctactgcttaaatctttatgctgtgttgatgatattatattgacatatgaagctgtatatgtgtatgtattttgtggagaaagggattacaagatgtatgagtataatgacttgctaacctttcaggattcagagaaagatgaagaaagaccatatctaaataatacacttcatcattttcatgtgtataaatgcttaaagtaccatctttgttgaggtggttcatgtatccagtttatccagtacagttatttgtcaagcttagctttgatttcaaaggacacgcttaccttgtctggcataagaattaatgctcatgtctgcagtggttgggtaggtcctgcttaggagaattaaaaaattcctctttccgtttggttgaatgttgcagtcaggaaccccaactcacttggaatgtttttatatgtaatcatttcccttgaagcttatactttataagggaagaaagaattcaggtgatatgggaaaactgcttggcagaccttcatcttctgcctcaactgtaaaccacatgtaaatgcttaatggagactgttttcattcttgtgatatttaacattcagaaaattacttcagctttggaaatactcaggctgtttttattctgcaggtaagtgttttgacttaagtactaatattccagaaatttttgaaagcagtaaccttaatttcctatgtatttcattccacttttgcatataggtcaaatagcaatgtgtatgcacattctctttagttaaggcaccaattgttttggttggttttcctaagacatactttaaaaagatgttctataaatttcctagttaaattatggggattttggagtatgtacatgataaattataatacgtatatggttgaagttattttattttttactaatgaattattttaatattccttattgaataaatgctgtaacttgtttgctatggaacttattcttaaagttctagttaaaaataatttttccacatgcatgaaaatatgtattaatcagaggtggcttaattacattgaaattgcttttttgttgttgtttttttactgaaataactcatgtttgtgtagaagaatgcctgtttactcagagtttatattttccttcagttatattttaaatcaaaaggtctgggtaatgtatacttttgattaatatatactttttttaaaaaacaaaaaacaatgtaatggttaatagtagaaatgtgccacacttttcaagttttatataacatatgaaattcagttaaaagaatgtgtgtttcataatgacttttaactggtaaaaatattacttgcacgaagtacttgatgtatggttatcctgaaatttcggagtatttggtgtgttctttgtctaaaaatagtctgttttgtcagtccttcagaatattatttattctgaagattgtccctcttgcacttggcagtttattttcggggatacattgttgggggagaggggtttctgccactctttccagattgagtctgtgctgtttaaggaggactaccatcctgcaactctttttctaattggggcacagaggatgtcgctaaagaaaagttgaagagccctttcagcactttctcatctgtggagaagatggaatcttaaaatacatttggagttttatctgttttacaagtccattgatggcctaagttcctcctgttttctgctgtttgatctctaaggaactcctgttgctaaatatgaagagtatggaacattcatatagtctctgtgaagcatggggggagggaagacatttctttttcttataggctttatgctcaaatgtcatagtctcctttcaaagaattgtgttgcattttaaatgcacccagcttaagtagaagacattgaaggatgcattaattttcaggaactattttgaattatgaaaagattcccaattgaaaaaattattcaacaagtaaaagctaagaaatttcattgaaatcataaggcagtttaagcataaattgataaaaatagctgtgtactactaattaatagaaaatcattcaaccaagagaagagtcaagtgaatatcgtttgtttatttgctagtgagtttctttgtaacgttgattttattaaatgataatatttggttagtatgtcctatgttaataaaaatgaacaaaatt

SEQ ID NO: 1567 - DNA, 5784 bp, Homo Sapiens
acggcatccagtacagaggggctggacttggacccctgcagcagccctgcacaggagaagcggcatataaagccgcgctgcccgggagccgctcggccacgtccaccggagcatcctgcactgcagggccggtctctcgctccagcagagcctgcgcctttctgactcggtccggaacactgaaaccagtcatcactgcatctttttggcaaaccaggagctcagctgcaggaggcaggatggtctggaggctggtcctgctggctctgtgggtgtggcccagcacgcaagctggtcaccaggacaaagacacgaccttcgaccttttcagtatcagcaacatcaaccgcaagaccattggcgccaagcagttccgcgggcccgaccccggcgtgccggcttaccgcttcgtgcgctttgactacatcccaccggtgaacgcagatgacctcagcaagatcaccaagatcatgcggcagaaggagggcttcttcctcacggcccagctcaagcaggacggcaagtccaggggcacgctgttggctctggagggccccggtctctcccagaggcagttcgagatcgtctccaacggccccgcggacacgctggatctcacctactggattgacggcacccggcatgtggtctccctggaggacgtcggcctggctgactcgcagtggaagaacgtcaccgtgcaggtggctggcgagacctacagcttgcacgtgggctgcgacctcataggaccagttgctctggacgagcccttctacgagcacctgcaggcggaaaagagccggatgtacgtggccaaaggctctgccagagagagtcacttcaggggtttgcttcagaacgtccacctagtgtttgaaaactctgtggaagatattctaagcaagaagggttgccagcaaggccagggagctgagatcaacgccatcagtgagaacacagagacgctgcgcctgggtccgcatgtcaccaccgagtacgtgggccccagctcggagaggaggcccgaggtgtgcgaacgctcgtgcgaggagctgggaaacatggtccaggagctctcggggctccacgtcctcgtgaaccagctcagcgagaacctcaagagagtgtcgaatgataaccagtttctctgggagctcattggtggccctcctaagacaaggaacatgtcagcttgctggcaggatggccggttctttgcggaaaatgaaacgtgggtggtggacagctgcaccacgtgtacctgcaagaaatttaaaaccatttgccaccaaatcacctgcccgcctgcaacctgcgccagtccatcctttgtggaaggcgaatgctgcccttcctgcctccactcggtggacggtgaggagggctggtctccgtgggcagagtggacccagtgctccgtgacgtgtggctctgggacccagcagagaggccggtcctgtgacgtcaccagcaacacctgcttggggccctcgatccagacacgggcttgcagtctgagcaagtgtgacacccgcatccggcaggacggcggctggagccactggtcaccttggtcttcatgctctgtgacctgtggagttggcaatatcacacgcatccgtctctgcaactccccagtgccccagatggggggcaagaattgcaaagggagtggccgggagaccaaagcctgccagggcgccccatgcccaatcgatggccgctggagcccctggtccccgtggtcggcctgcactgtcacctgtgccggtgggatccgggagcgcacccgggtctgcaacagccctgagcctcagtacggagggaaggcctgcgtgggggatgtgcaggagcgtcagatgtgcaacaagaggagctgccccgtggatggctgtttatccaacccctgcttcccgggagcccagtgcagcagcttccccgatgggtcctggtcatgcggcttctgccctgtgggcttcttgggcaatggcacccactgtgaggacctggacgagtgtgccctggtccccgacatctgcttctccaccagcaaggtgcctcgctgtgtcaacactcagcctggcttccactgcctgccctgcccgccccgatacagagggaaccagcccgtcggggtcggcctggaagcagccaagacggaaaagcaagtgtgtgagcccgaaaacccatgcaaggacaagacacacaactgccacaagcacgcggagtgcatctacctgggtcacttcagcgaccccatgtacaagtgcgagtgccagacaggctacgcgggcgacgggctcatctgcggggaggactcggacctggacggctggcccaacctcaatctggtctgcgccaccaacgccacctaccactgcatcaaggataactgcccccatctgccaaattctgggcaggaagactttgacaaggacgggattggcgatgcctgtgatgatgacgatgacaatgacggtgtgaccgatgagaaggacaactgccagctcctcttcaatccccgccaggctgactatgacaaggatgaggttggggaccgctgtgacaactgcccttacgtgcacaaccctgcccagatcgacacagacaacaatggagagggtgacgcctgctccgtggacattgatggggacgatgtcttcaatgaacgagacaattgtccctacgtctacaacactgaccagagggacacggatggtgacggtgtgggggatcactgtgacaactgccccctggtgcacaaccctgaccagaccgacgtggacaatgaccttgttggggaccagtgtgacaacaacgaggacatagatgacgacggccaccagaacaaccaggacaactgcccctacatctccaacgccaaccaggctgaccatgacagagacggccagggcgacgcctgtgaccctgatgatgacaacgatggcgtccccgatgacagggacaactgccggcttgtgttcaacccagaccaggaggacttggacggtgatggacggggtgatatttgtaaagatgattttgacaatgacaacatcccagatattgatgatgtgtgtcctgaaaacaatgccatcagtgagacagacttcaggaacttccagatggtccccttggatcccaaagggaccacccaaattgatcccaactgggtcattcgccatcaaggcaaggagctggttcagacagccaactcggaccccggcatcgctgtaggttttgacgagtttgggtctgtggacttcagtggcacattctacgtaaacactgaccgggacgacgactatgctggcttcgtctttggttaccagtcaagcagccgcttctatgtggtgatgtggaagcaggtgacgcagacctactgggaggaccagcccacgcgggcctatggctactccggcgtgtccctcaaggtggtgaactccaccacggggacgggcgagcacctgaggaacgcgctgtggcacacggggaacacgccggggcaggtgcgaaccttatggcacgaccccaggaacattggctggaaggactacacggcctataggtggcacctgactcacaggcccaagaccggctacatcagagtcttagtgcatgaaggaaaacaggtcatggcagactcaggacctatctatgaccaaacctacgctggcgggcggctgggtctatttgtcttctctcaagaaatggtctatttctcagacctcaagtacgaatgcagagatatttaaacaagatttgctgcatttccggcaatgccctgtgcatgccatggtccctagacacctcagttcattgtggtccttgcggcttctctctctagcagcacctcctgtcccttgaccttaactctgatggttcttcacctcctgccagcaaccccaaacccaagtgccttcagaggataaatatcaatggaactcagagatgaacatctaacccactagaggaaaccagtttggtgatatatgagactttatgtggagtgaaaattgggcatgccattacattgctttttcttgtttgtttaaaaagaatgacgtttacatataaaatgtaattacttattgtatttatgtgtatatggagttgaagggaatactgtgcataagccattatgataaattaagcatgaaaaatattgctgaactacttttggtgcttaaagttgtcactattcttgaattagagttgctctacaatgacacacaaatcccgctaaataaattataaacaagggtcaattcaaatttgaagtaatgttttagtaaggagagattagaagacaacaggcatagcaaatgacataagctaccgattaactaatcggaacatgtaaaacagttacaaaaataaacgaactctcctcttgtcctacaatgaaagccctcatgtgcagtagagatgcagtttcatcaaagaacaaacatccttgcaaatgggtgtgacgcggttccagatgtggatttggcaaaacctcatttaagtaaaaggttagcagagcaaagtgcggtgctttagctgctgcttgtgccgttgtggcgtcggggaggctcctgcctgagcttccttccccagctttgctgcctgagaggaaccagagcagacgcacaggccggaaaaggcgcatctaacgcgtatctaggctttggtaactgcggacaagttgcttttacctgatttgatgatacatttcattaaggttccagttataaatattttgttaatatttattaagtgactatagaatgcaactccatttaccagtaacttattttaaatatgcctagtaacacatatgtagtataatttctagaaacaaacatctaataagtatataatcctgtgaaaatatgaggcttgataatattaggttgtcacgatgaagcatgctagaagctgtaacagaatacatagagaataatgaggagtttatgatggaaccttaatatataatgttgccagcgattttagttcaatatttgttactgttatctatctgctgtatatggaattcttttaattcaaacgctgaaaacgaatcagcatttagtcttgccaggcacacccaataatcagtcatgtgtaatatgcacaagtttgtttttgtttttgttttttttgttggttggtttttttgctttaagttgcatgatctttctgcaggaaatagtcactcatcccactccacataaggggtttagtaagagaagtctgtctgtctgatgatggatagggggcaaatctttttcccctttctgttaatagtcatcacatttctatgccaaacaggaacgatccataactttagtcttaatgtacacattgcattttgataaaattaattttgttgtttcctttgaggttgatcgttgtgttgttttgctgcactttttacttttttgcgtgtggagctgtattcccgagacaacgaagcgttgggatacttcattaaatgtagcgactgtcaacagcgtgcaggttttctgtttctgtgttgtggggtcaaccgtacaatggtgtgggaatgacgatgatgtgaatatttagaatgtaccatattttttgtaaattatttatgtttttctaaacaaatttatcgtataggttgatgaaacgtcatgtgttttgccaaagactgtaaatatttatttatgtgttcacatggtcaaaatttcaccactgaaaccctgcacttagctagaacctcatttttaaagattaacaacaggaaataaattgtaaaaaaggttttct

SEQ ID NO: 1568 - DNA, 491 bp, Homo Sapiens
  misc_feature (13)..(13): n is a, c, g, or t
  misc_feature (195)..(195): n is a, c, g, or t
  misc_feature (296)..(296): n is a, c, g, or t
  misc_feature (426)..(426): n is a, c, g, or t
  misc_feature (447)..(447): n is a, c, g, or t
caaatcagttttnttggtgtctttgcagggaatgaaagaagataatgagcagataatcagcagccatttcctttcagttacggtatatgattctgcctgagaaagcaggatttatgggaaggaaaacttgtctaaggctcatcaagatggcctgacccagagtcacctaagagaactcttccaacttaaatgtgnctagggtgtgtaatcagttgcttcttattctgtgtctcagatttcctagtccatgacatttaatagtgagtatagagtaggatattctatacattttagtntttggcccttggaaacaaagttaaataccatgtcactcagaagactcccaaaagtttgtgtataaatggcgaagtatgcactatgagaggattctaatccattcacatcaattctttgagttgtgcaaantacacttggctttggatttcnacttgggtgatccaaaatttgggttatttaaagctgccaggaaa

SEQ ID NO: 1569 - DNA, 346 bp, Homo Sapiens
aaagtcttcacatattcaaactaagctactatatgtaaggccttccaaattcttctaactcttccaaaagccttctgccttagttttttttaaattacaccagtccttttagtagcttttggatgtgatttttaaccaacttccccttctagcttcaagtattcttctaaactatactgattccatcagccctctcatcttttctctctgtgccttcttccaggcactcaaatccttgccattcattcaacttaacttgtaagcagatgactctccagtcctggctgcctctttcagctccagcacctaaatccagctgccttcccggcggaagtatgtagtcacg

SEQ ID NO: 1570 - DNA, 517 bp, Homo Sapiens
  misc_feature (508)..(508): n is a, c, g, or t
tttctgcagcaggaaccgcggctgctggacaagaggggtgcggtggatactgacctttgctccggcctcgtcgtgaagacacagcgcatctccccgctgtaggcttcctcccacagaacccgtttcgggcctcagagcagtctggtgagatgctgttgccgctgctgctgctgctacccatgtgctgggccgtggaggtcaagaggccccggggcgtctccctcaccaatcatcacttctacgatgagtccaagcctttcacctgcctggacggttcggccaccatcccatttgatcaaggtcaacgatgacctattgcgactgcaaagatggctctgacgagccaggcacggctgcctgtcctaatggcagcttccactgcaccaacactggctataagccctgtatatcccctccaaccgggtcaacgatggtttgtgactgctgcgatggaacagacgagtacaacagcggcgtcatctgtgagaacacctgcaaagagaagggncgtaaggaa

SEQ ID NO: 1571 - DNA, 5943 bp, Homo Sapiens
gcagcgtgtagtgcgagtggggcggacgcgcgcagcccgcccgcccggcgaccagcaaggagttggcatcctttggaagagttcgtgaaagctttctgcccagagctcctggaccaatgcatcttcccaccaccttaaaccactgagcagttcagagccccagttgcagacgacttgtcctgccaccaccatgagttctgaatgtgatggtggttccaaagctgtgatgaatggcttggcacctggcagcaatgggcaagacaaagacatggatcctacaaaaatctgcactgggaagggagcggtgactctccgggcctcgtcttcctacagggaaaccccaagcagtagccctgcgagccctcaggaaacccggcaacacgaaagcaaaccaggtctggagccagagccttcttcagcagatgagtggaggctttcttccagtgctgatgccaatggaaatgcccagccctcttcactcgctgccaagggctacagaagtgtgcatcccaaccttccttctgacaagtcccaggatgccacttcctccagtgcagcccagccggaggtaatagttgtccctctctacctggttaatactgacagagggcaagaaggcactgccagacctccaacacctctggggcctcttggctgcgtccccacaatcccagcgactgcctctgccgcctcacctctgaccttcccgactctagatgatttcattccccctcatctgcagaggtggccccaccacagccagccagcccgcgcctctggctcctttgcccccattagccagacgccaccatccttctcaccaccacctccgctggtccctcctgccccggaggacctccgcagagtctcggagcctgacctcacgggagctgtttcgagtaccgattccagtcctctactaaatgaagtttcttcttcccttattggaactgattcccaagcctttccatcagttagcaagccttcatccgcctatccctccacaacgattgtcaatcctactattgtgctcttgcaacacaatcgagaacagcaaaaacgactcagtagcctttcagatcctgtctcagaaagaagagtgggagagcaggactcagcaccaacccaggaaaaacccacctcacctggcaaggctattgaaaaaagagcaaaggatgacagtaggcgggtggtgaagagcactcaggacttaagcgatgtttccatggatgaagtgggcatcccactccggaacactgagagatcaaaagactggtacaagactatgtttaaacagatccacaaactgaacagagatgatgattcagatctgtactctcccagatactcattttctgaagacacaaaatctcccctttctgtgcctcgctcaaaaagtgagatgagctacattgatggtgagaaggtagtcaagaggtcggccacactacccctcccagcccgctcttcctcactgaagtcaagctcagaaagaaatgactgggaacccccagataagaaagtagatacaagaaaatatcgtgcagagcccaagagcatttacgaatatcagcctggcaagtcttccgttctgaccaacgaaaagatgagctcagccatcagccctactccggaaatttcttcagagactcctggatatatatattcttccaacttccatgcagtgaagagggaatcagacggggctcctggggatctcactagcttggagaatgagagacaaatttataaaagtgtcttggaaggtggtgacatccctcttcagggcctgagtgggctcaagcgaccatccagctctgcttccactaaagattcagaatcgccaagacattttataccagctgattacttggaatccacggaagaatttattcgaagacgtcatgatgataaagagatgagacctgccagagccaaatttgactttaaagctcagacactaaaggagcttcctctgcagaagggagatattgtttacatttataagcaaattgatcagaactggtatgaaggagaacaccacggccgggtgggaatcttcccacgcacctacatcgagcttcttcctcctgctgagaaggcacagcccaaaaagttgacaccagtgcaggttttggaatatggagaagctattgctaagtttaactttaatggtgatacacaagtagaaatgtccttcagaaagggtgagaggatcacactgctccggcaggtagatgagaactggtacgaagggaggatcccggggacatcccgacaaggcatcttccccatcacctacgtggatgtgatcaagcgaccactggtgaaaaaccctgtggattacatggacctgcctttctcctcctccccaagtcgcagtgccactgcaagcccacagcaacctcaagcccagcagcgaagagtcacccccgacaggagtcaaacctcacaagatttatttagctatcaagcattatatagctatataccacagaatgatgatgagttggaactccgcgatggagatatcgttgatgtcatggaaaaatgtgacgatggatggtttgttggtacttcaagaaggacaaagcagtttggtacttttccaggcaactatgtaaaacctttgtatctataagaagactgaaaaccatggagattatttttattggaggaggaagcatcattcatgaaccgatctttttagttgagtcagtaggaaaattaatacagtggataaagtaagaagcaaaagacagggacagagaagtgttgtgtttaaaacccaagcctgtctaaggttactgtgtattagacagggccgaactagtgtgctgagcaaaaagaattgaagcaaattgtatttacttagccgcttctgggagccacttcagcctttcccctcccctccacttcttgggtaatctgacctgaagcatagtccaggagcagagttagccagaaatgcctcctgctgccccagccttagagagctcccatctcaatcattgagcctgaaggcttcaagcccaagaatgcaacaagacccccagcctacatttctcagctcccctggagccagctgatcctgtaacgctgctggaggtcagtctgagctaccaagactgtccctagacaaaggtggagtcccccacactgcccaagaccaaatccctcactcaacctgctgaggtgtggatggggaaacagaggcaaaactgaggcacctgatgcattcagcctgctgtgcagcagtgccattgactgccctgatgttcagagagaaacgcacacaaggtttgcccatgagaattggggagcagatggccaagcagataggttatgtctgttttctgagtgatgaagtcaggaagccctgtggctctggaggccacttgtggttcattcttttcccatatccttggcttttagaaatggttaccttcaggacagtgcagctgcatttatcagagcactattgctaagttttcttttctggcttgtgtttttctgggacagtttagaattgggaggcctattctcatagaacaccaaaaatgatgttcagtgattcatttaacatacaccaatgtactctggctgctggggggacaaccataagcaagacatgcccagggtttgccgtggctccagatctactccctgtaggagttcaaggatcacacaaacggtagtaaccagggttgtgaatctgagtacaccctggcaaggcttctcttcagactgaagcagcaattctgccactaccagcagcaaccaggacgtctgttctttgtgggggccagatcagaagagagaggcccctgtgacgcccgggctgcttggtcacaactctgtccaattcaaggatgtttatcggcctctcttagatcctgagtgagacaaatacagaaatgacccattccctgcccaccagaaactcagaggtgattggggagactgacacaggaaaatgaacttaatcaagagagactgtgatatgtgctaagaagggtgtgagggagggagagatgaattttccctggagggatcctagaaagcattgtcatattgccatctccattagctcacttttaaacaactagggtgctggaagaacctttgtctgagggtagttcatagctggaaatacttggaatattttccagagtctctaaactctcatcttcccccacagatacacatccaagctcacaaataggagtagcaattctaggtggtagggttgtgtacggaacccctggctgtctgcatatatctcagaattaccccaggaccattgtcccaaagtctagagtctttacaggtaggcaaaatttgttttcaatgcctgtgcctcagctgctgtcacaaatacccatcttaggatcccatcagcttcccatcccccaccagacagccacagtaccctcactttctccctattgttctttcaaatcctgttctcaggaaagaaactgccactaattcattcacactaaggtgtaaatgattgataataggaatgagttacctcttcccacagacatttgtttttaagtatgacagagcagggccttaatcccaagggaaaaggttatggaactggagggggtgagctttctgggtagaaggagacttcctgaatttccttaaaacccagtaagagtaagacctgttgttttggaaggtctgctccaccatctaagagcactgtttttttttttttgttgttgttgttgttttacggtctctgagggaatatagtaaaaatgcatatgcacgtgcaatttgcacggcagcatttcaccgattgtggactgtattggctaatgtgtttcctggtctttagatgcaaaccattaataacactatcttatctcatagttttttcaggggtgcttcttgattagtagggaattttgaacacctctttaaatacagctagaaaataaaaccaatttgtaaagccacatttgcatatgatgccagcctcacgcatttgtatatctccagaaattcaggtatgcctcaccaatttgcccgtctttaataaaatcttgtgttaaaatttgcatcacgtcgccttcctatgtatgacgaaacaagaaacagagatttccaattgctcttttgtcttcagacatttagtaatataaagtacctatttttatgctgaaatgtttatacaggtttattaatagcaagtgcaactaactggcggcatgccttgcaacacattttgatatattagccatgcttccgggtaaaggcaagccccaaactccttatcttttgcagtctctctgggatcagtaaaagaaaaaaaaaataatgtgcttaagaagtgggactgtaaatatgtatatttaactttgtatagcccatgtacctaccttgtatagaaaaataattttaaaaatttgaatggaagggggtaaaggaagtcatgaagtttttttgcatttttatttaaatgaaggaattccaaataactcacctacagatttttagcacaaaaatagccattgtaaagtgttaaaatttacgataagtattctattggggaggaaaggtaactctgatctcagttacagtttttttttcctttttaatttcattattttgggtttttggtttttgcagtcctatttatctgcagtcgtattaagtcctattgctagaataggttactacaaaaaaggttatattctgaaagaaaaataactgacattatatataaccaattaatttaaagtattgccatttaaattacacactgagagcatgtcctatgcagacatagatttttctgttcatttatttttcttcattgcagtggattgatttgataaatagatgtgttgaattactacatttgctgtacatattatttaataaactttattcagaattgcgtggcaaaaaaaaaaaaaaaaa

SEQ ID NO: 1572 - DNA, 1765 bp, Homo Sapiens
  misc_feature (44)..(44): n is a, c, g, or t
ttacactttatacttccggctcgaatattgtgtggaattgtgancggataacaatttcacacaggaaacacctgcaggtcgacactagtggatccaaagaattcggcacgaggcgacgggcggagcggagcgcggcgcgccggggccgccgccggggggatcggctgcctccccgggccgggtgtagagagggcgggtccccggcctcgggagcacggcggtggaggggacataggaggcggccatggcgacccccggcaacctagggtcctccgtcctggcgagcaagaccaagaccaagaagaagcacttcgtagcgcagaaagtgaagctgtttcgggccagcgacccgctgctcagcgtcctcatgtggggggtaaaccactcgatcaatgaactgagccatgttcaaatccctgttatgttgatgccagatgacttcaaagcctattcaaaaataaaggtggacaatcacctttttaacaaagaaaacatgccgagccatttcaagtttaaggaatactgcccgatggtcttccgtaactgcgggaagaggtttggaattgatgttcaagatttccagaattccctgaccaggagcgcacccctccccaacgactcccaggcccgcagtggagctcgttttcacacttcctacgacaaaagatacatgatcaagactattaccagtgaagacgtggccgaaatgcacaacatcctgaagaaataccaccagtacatagtggaatgtcatgggatcacccttcttccccacttgttgggcatgtaccggcttaatgttgatggagttgaaatatatgtgatagttacaagaaatgtattcagccaccgtttgtctgtgtataggaaatacgacttaaagggctctacagtggctagagaagctagtgacaaagaaaaggccaaagaactgccaactctgaaagataatgatttcattaatgagggccaaaagatttatattgatgacaacagcaagaaggtcttcctggaaaaactaaaaaaggatgttgagtttctggcccagctgaagctcatggactacagtctgctggtgggaattcatgatgtggagagagccgaacaggaggaagtggagtgtgaggagaacgatggggaggaggagggcgagagcgatggcacccacccggtgggaacccccccagatagccccgggaatacactgaacagctcaccacccctggctcccggggagttcgagccgaacatcgacgtctatggaattaagtgccatgaaaactcgcctaggaaggaggtgtacttcatggcaattattgacatccttactcattatgatgcaaaaaagaaagctgcccatgctgcaaaaactgttaaacatggcgctggcgcggagatctccaccgtgaacccagaacagtattcaaagcgctttttggactttattggccacatcttgacgtaacctcctgcgcayctcggacagcatgaacattggatggacagaggtggcttcggtgtaggaaaaatgaaaaccaaactcagtgaagtactcatcttgcaggaagcaaacctccttgtttacatcttcaggccaagatgactgatttgggggctactcgctttacagctacctgattttcccagcatcgttctagctatttctgactttgtgtatatgtgtgtgtgtgtgtgttgggggggggtgagtgtgtgcccgcgtgtgcatttaaagcataaattaattaaacagccacttcggtca

SEQ ID NO: 1573 - DNA, 1128 bp, Homo Sapiens
atcgctgcggttgcgagcgctgtagggagcctgtgctgtgccgcgcagttaggcagcagcagccgcggagcagtagccgccgtgggagggagccatgaagcattacgaggtggagattctggacgcaaagacaagggagaagctgtgtttcttggacaaggtggagccccacgccaccattgcggagatcaagaacctcttcactaagacccatccgcagtggtaccccgcccgccagtccctccgcctggaccccaagggcaagtccctgaaggatgaggatgttctgcagaagctgcccgtgggcaccacggccacactgtacttccgggacctgggggcccagatcagctgggtgacggtcttcctaacagagtacgcggggccccttttcatctacctgctcttctacttccgagtgcccttcatctatggccgcaaatatgactttacgtccagtcggcatacagtggtgcacctcgcctgcatctgtcactcattccactacatcaagcgcctgctggagacgctcttcgtgcaccgcttctcccatggcactatgcctttgcgcaacatcttcaagaactgcacctactactggggcttcgccgcgtggatggcctattacatcaatcaccctctctacactccccctacctacggagctcagcaggtgaaactggcgctcgccatctttgtgatctgccagctcggcaacttctccatccacatggccctgcgggacctgcggcccgctgggtccaagacgcggaagatcccataccccaccaagaaccccttcacgtggctcttcctgctggtgtcctgccccaactacacctacgaggtggggtcctggatcggtttcgccatcatgacgcagtgtctcccagtggccctgttctccctggtgggcttcacccagatgaccatctgggccaagggcaagcaccgcagctacctgaaggagttccgggactacccgcccctgcgcatgcccatcatccccttcctgctctgagcgctcacccctgctgaggctcagcccctcaacccggtggcattctgggggaggagtggggcccacagctctccagcacccggaataaagcccgcctgccccagtcg

SEQ ID NO: 1574 - DNA, 316 bp, Homo Sapiens
  misc_feature (74)..(74): n is a, c, g, or t
  misc_feature (88)..(88): n is a, c, g, or t
  misc_feature (113)..(113): n is a, c, g, or t
  misc_feature (137)..(137): n is a, c, g, or t
  misc_feature (218)..(218): n is a, c, g, or t
  misc_feature (226)..(226): n is a, c, g, or t
  misc_feature (230)..(230): n is a, c, g, or t
  misc_feature (239)..(239): n is a, c, g, or t
tcctgctgctgcctccaccactgctgtaaattcacccatggtgcattggacactggatcttaaactccagagtntgtttagggaggtnagcacagggctgggggaggtgcggnggggcccagaagaccaggccactnagcccgcgctccaggctgtaacggtccaaaccacggcactggagctgcagggtctgcctagtgggctctgcattccccganagcacgantttngcacatggnagaatggagcccgtggagaaccttctgggggtcggggagaatccctgcctccctttaaaggaatcatgaaggacaga

SEQ ID NO: 1575 - DNA, 586 bp, Homo Sapiens
ggcacgagggctagacatcgggcgaccctcgtcccgccaggttttggggtcgcgcaaacgagcgacgggggctggggctccggattcaggtgttctttcttcagcgctcacgggtttctgtccgtacgcgatgcgagcgaacgtcgcggtcgaggctagggccccgaagcccgcagtaatccacgtctcccgcccgctccgggccctcagtgccgccgtcgcgggcggaggcgcgaggtctgggctttggcgccttcgcagccgcaggcgacatcctctttcctagctaaagccccaaacgcccaggtggcttcctgggagagcacggctgagcctccgccttcagatcagaacaggcagagcctccaagggcggcttgggcccagtgcctgcttatcctgcccgtctctccacacttcttctttccctgtccgttggagtccattccttcctggaaaagccaaagccgcgctcccctaagaggcctggatgtgaaggtgagtgagacgccctggcctcttggtgcaaaggccggcgcctgccggtttcaacactcaggaggcgcgtttcagccccgctgggcccc

SEQ ID NO: 1576 - DNA, 344 bp, Homo Sapiens
  misc_feature (238)..(238): n is a, c, g, or t
  misc_feature (284)..(284): n is a, c, g, or t
  misc_feature (289)..(289): n is a, c, g, or t
  misc_feature (321)..(321): n is a, c, g, or t
  misc_feature (325)..(325): n is a, c, g, or t
  misc_feature (337)..(337): n is a, c, g, or t
agaactagtctcgagttttttttttttttttttatagctaattattttattacaatgttttcagaattagatctaggtgacataaaatacacaaaagcataaagccatctgaatagtacagtcaacaagcaacaaccagtacaatcagcaataatagagaacttttaactttgtatgtcacagagaatgtatatacctttttaataaaaagcctgaataaaccaataactattaaagnaatcacaaagctgattaaaaatctactattaaaagtgtcatcaggnttagnttgttttacactttgtcctagctaacttttancaancaaattaattcntaatgct

SEQ ID NO: 1577 - DNA, 3119 bp, Homo Sapiens
cgcggtatctgcatcgggcctcactggcttcaggagctgaataccctcccaggcacacacaggtgggacacaaataagggttttggaaccactattttctcatcacgacagcaacttaaaatgcctgggaagatggtcgtgatccttggagcctcaaatatactttggataatgtttgcagcttctcaagcttttaaaatcgagaccaccccagaatctagatatcttgctcagattggtgactccgtctcattgacttgcagcaccacaggctgtgagtccccatttttctcttggagaacccagatagatagtccactgaatgggaaggtgacgaatgaggggaccacatctacgctgacaatgaatcctgttagttttgggaacgaacactcttacctgtgcacagcaacttgtgaatctaggaaattggaaaaaggaatccaggtggagatctactcttttcctaaggatccagagattcatttgagtggccctctggaggctgggaagccgatcacagtcaagtgttcagttgctgatgtatacccatttgacaggctggagatagacttactgaaaggagatcatctcatgaagagtcaggaatttctggaggatgcagacaggaagtccctggaaaccaagagtttggaagtaacctttactcctgtcattgaggatattggaaaagttcttgtttgccgagctaaattacacattgatgaaatggattctgtgcccacagtaaggcaggctgtaaaagaattgcaagtctacatatcacccaagaatacagttatttctgtgaatccatccacaaagctgcaagaaggtggctctgtgaccatgacctgttccagcgagggtctaccagctccagagattttctggagtaagaaattagataatgggaatctacagcacctttctggaaatgcaactctcaccttaattgctatgaggatggaagattctggaatttatgtgtgtgaaggagttaatttgattgggaaaaacagaaaagaggtggaattaattgttcaagagaaaccatttactgttgagatctcccctggaccccggattgctgctcagattggagactcagtcatgttgacatgtagtgtcatgggctgtgaatccccatctttctcctggagaacccagatagacagccctctgagcgggaaggtgaggagtgaggggaccaattccacgctgaccctgagccctgtgagttttgagaacgaacactcttatctgtgcacagtgacttgtggacataagaaactggaaaagggaatccaggtggagctctactcattccctagagatccagaaatcgagatgagtggtggcctcgtgaatgggagctctgtcactgtaagctgcaaggttcctagcgtgtacccccttgaccggctggagattgaattacttaagggggagactattctggagaatatagagtttttggaggatacggatatgaaatctctagagaacaaaagtttggaaatgaccttcatccctaccattgaagatactggaaaagctcttgtttgtcaggctaagttacatattgatgacatggaattcgaacccaaacaaaggcagagtacgcaaacactttatgtcaatgttgcccccagagatacaaccgtcttggtcagcccttcctccatcctggaggaaggcagttctgtgaatatgacatgcttgagccagggctttcctgctccgaaaatcctgtggagcaggcagctccctaacggggagctacagcctctttctgagaatgcaactctcaccttaatttctacaaaaatggaagattctggggtttatttatgtgaaggaattaaccaggctggaagaagcagaaaggaagtggaattaattatccaagttactccaaaagacataaaacttacagcttttccttctgagagtgtcaaagaaggagacactgtcatcatctcttgtacatgtggaaatgttccagaaacatggataatcctgaagaaaaaagcggagacaggagacacagtactaaaatctatagatggcgcctataccatccgaaaggcccagttgaaggatgcgggagtatatgaatgtgaatctaaaaacaaagttggctcacaattaagaagtttaacacttgatgttcaaggaagagaaaacaacaaagactatttttctcctgagcttctcgtgctctattttgcatcctccttaataatacctgccattggaatgataatttactttgcaagaaaagccaacatgaaggggtcatatagtcttgtagaagcacagaaatcaaaagtgtagctaatgcttgatatgttcaactggagacactatttatctgtgcaaatccttgatactgctcatcattccttgagaaaaacaatgagctgagaggcagacttccctgaatgtattgaacttggaaagaaatgcccatctatgtcccttgctgtgagcaagaagtcaaagtaaaacttgctgcctgaagaacagtaactgccatcaagatgagagaactggaggagttccttgatctgtatatacaataacataatttgtacatatgtaaaataaaattatgccatagcaagattgcttaaaatagcaacactctatatttagattgttaaaataactagtgttgcttggactattataatttaatgcatgttaggaaaatttcacattaatatttgctgacagctgacctttgtcatctttcttctattttattccctttcacaaaattttattcctatatagtttattgacaataatttcaggttttgtaaagatgccgggttttatatttttatagacaaataataagcaaagggagcactgggttgactttcaggtactaaatacctcaacctatggtataatggttgactgggtttctctgtatagtactggcatggtacggagatgtttcacgaagtttgttcatcagactcctgtgcaactttcccaatgtggcctaaaaatgcaacttctttttattttcttttgtaaatgtttaggtttttttgtatagtaaagtgataatttctggaattagaaaaaaaaaaaaaaaaaaa

SEQ ID NO: 1578 - DNA, 430 bp, Homo Sapiens
  misc_feature (320)..(320): n is a, c, g, or t
atgaatgtctacggtctgttttaggtgtttgctaaacttctatggcttccagcgtcttcttacaatgcattcctttaacttgtccctggaagcattgctacccattttcagcttctctgcctctcttctgatacaaggacagaagaattgggtagatattcaccttttaggggtgcaagtatagctttaagtttgtgcaagtgaaaatgttgaaaagtgagtaacctcgatattaaaatcatccttgacatgaaacagggtgaagagaagctgtccgtggcggctggtgttcggtgcgattggcactgggctgtgctganctacgcatttacattccagcgggtaagaagggtcagggcagacacagtcaagaggaggaagtttttgtggacaatgaaagttactttcgtactttctaccaaaacagttc

SEQ ID NO: 1579 - DNA, 7385 bp, Homo Sapiens
ggcgccgccggaccgcgccccaccccgcgcgcccgagcagggcgactgtcattagcttcctggacgggacccggggcgggatcctggtgtcctgaaaggggcccgggcgaccctaagaggaagaacttttgggggcggggtccccggtcccgcgtcccctgggcagccgctattgtctacgcgcctcgctgggcggcgcggggggcgtgatcgcggcggccccgggctctgggtgcggagacccaggcggggctgggcccagggcggcggcgggagaagccggggaagccgaagagcctggggaggaggagctgcgagcgcgggagacgagcaggagccgcgcgggccgcggcgagcgcgatgccggcggcggcgggggacgggctcctgggggagccggcggcgcctgggggcggcggcggcgcggaggacgcggccaggcccgcggcggcctgcgagggaagtttcctgcctgcctgggtgagcggcgtgccccgcgagcggctccgcgacttccagcaccacaagcgcgtgggcaactacctcatcggcagcaggaagctgggcgagggctcctttgccaaggtgcgcgaggggctgcacgtgctgaccggggagaaggtggccataaaagtcattgataagaagagagccaaaaaggacacctatgtcaccaaaaacctgcggcgagagggtcagatccagcagatgatccgccaccccaatatcactcagctccttgatattttagaaacggaaaacagctactacctggtcatggagctgtgccctgggggcaacctgatgcacaagatctatgagaagaagcggctggaggagtccgaagcccgcagatacatccgacagctcatctctgccgtagagcacctgcaccgggccggggtggtccacagagacttgaagatagagaatttgctactagatgaagacaataatatcaagctgattgactttggtttgagcaactgcgcagggatcctgggttactcggatccgttcagcacacagtgtggcagccctgcctacgctgcacctgaactgctcgccaggaagaaatacggccccaaaatcgatgtctggtccataggtgtgaacatgtatgccatgttgaccgggacgctgcctttcacggtggagcctttcagcctgagggctttgtaccagaagatggtagacaaagaaatgaaccccctccccactcagctctccacaggtgccatcagtttcctgcgctctctcctggaaccggatcctgtgaagaggccaaatattcagcaggcactggcgaatcgctggcttaatgagaattacacgggcaaagtgccctgtaatgtcacctatcccaacaggatttctctggaagatctgagcccgagcgtcgtgctgcacatgaccgagaagctgggttacaagaacagcgacgtgatcaacactgtgctctccaaccgcgcctgccacatcctggccatctacttcctcttaaacaagaaactggagcgctatttgtcagggaaatctgacatccaggacagcctctgctacaagacccggctctaccagatagaaaagtacagggcccccaaggagtcctatgaggcctctctggacacctggacacgagatcttgaattccatgccgtgcaggataaaaagcccaaagaacaagaaaaaagaggggattttcttcatcgaccattctccaagaagttggacaagaacctgccctcgcacaaacagccctcaggctcgcttatgacacagattcagaacaccaaagccctcctgaaggaccggaaggcctccaagtccagcttccccgacaaagattcctttggctgccgcaatattttccgcaaaacctcagattccaattgtgtggcttcttcttccatggagttcatccccgtgccaccgcccaggaccccgaggattgtgaagaaaccggagccccatcagccagggcccggaagcactggcatcccccacaaggaagaccccctgatgctggacatggtgcgctccttcgagtctgtggatcgcgacgaccacgtagaagtgctgtctccctctcatcactacaggattctgaactccccggtcagcttggctcgcagaaattccagcgagaggacgctgtccccgggtctgccatccggaagcatgtcgcctctccatactcctttgcatccaactctggtctcttttgctcacgaagataagaacagccccccaaaagaggagggcctgtgttgcccacctccggttcccagcaatggccccatgcagcctctggggagccccaattgtgtgaaaagccgaggccggttccctatgatgggcatcggacagatgttaaggaagcgccatcagagtctgcagccatctgcagataggcccctggaggccagcctgcccccactgcagcccctagcccctgtgaaccttgcctttgacatggccgatggggtcaagacccagtgctaacttgggccagcggggtttggggtatctctagaaaacagcaactgaacagagctccacacatctgtcagggtgtgagcactccaaggcctcgcgtggagcatccttagtcccacctgtagctgaatccacagacccaaagcctgcacaacccaacctcgcttagggacccccagagatgctggaatcgctaggagggttggctccaggggcagccaattcctatcattcagatcttccttcctcccaagtactcaccaaccccttccacttcccacttcccccaggcttggggggaaaacagggcatgagccttctggggcactcagattatggactgttaccagatctttcttcacgctgtgctacatgtgtgcctctcacagcagttggccacagttacagggagagaacaatatcacagtcattcatccaggccacgtttcctctgcggagtgtagcagccctgcctttcatagcagggattacctgaaggccagcaggagccgggggcaggcccaggatcctcagaggaagatggagaggagcttcggaccaagatcaaaccaaacagtggggaccccaacagaagagaaagactgaaggagacactcatttcccaagcaagattttgatagatttttgttgttgttgttgttgaaacatgctaatgattgaattatcttttccaaagattttttttaaatgtgatgtcggtaaattgaaataacataattttttaaaacttggatggagagatgagaagcaattccaccaaactcatgttttcacaggagggttcagtgtggagagcaaaaaagctgactgtggtgatttgctgagtgctgtggcccacaggcagggcaagtctcggtggccctgtgttcatcctgttgtttaaggcatagccctgatccttctggaaggcatagaacacggttacagctggttctgtagaaagagggaaaagatgattgtgacaattcagagcataactcagatggcgagaaggcagcattatctctgtgcgatgctgatttcaagctgcccacagaactggtgcggctcagagctcggcgagtttgctgggagctgggagcaggcttgcctggcagagaacctgttcagatacaggccagtttcttcttcgaggaaagccaagctcctcaaacagggttcagtccacgttgtgttttcacacctttctccaaggatcgaaccaaagatgtgtctccagtattgtgtctgtgcccctgtgtgtgttttgtggacagccgtgttgtctgactgtatccagctggcacttgacagggtgcagtcattggtgagaagaatcagaaaaagaagacccatcagcacaggttggataggggttagtgtaggagaccagttacagaatggcctggagtcttcaacttttgaccggtgcaggtgtgaccagagaccacctctgtggccacctcagatagtcatctcagtccaaggatcccaaaacacaaatctagaattgcaaagccagcctttatttccctggcaggcagccttgccagaaggcagagaggcagttctgaatcattctctcattcaccagtggtgacatccttcagtccctcacatctctgacagagcgggacagaatggatatttggctgaccttggtgagacctggagctgcctgtttcttccctaggggatcaccacggctctagggcattctaggatgaggtcagaccccttggccattggtgttattttttgtatagcttcagactgggttccagaacttaccattgaaaacagagcttttaggccaggtgtggtggctcacacctgtaatcccagcactttgggaggccgaggcaggtggatcgcttgagctcaggagttcgagagcagcctgggcaacatggtgaaagcccgtctctaccgaaaaatacaaaaaaaaatagctgggtgtggtggtacgtgcctgtagtcccagctacttcggggactgaggtgggaggatcacttgaacctaggaggtcgaggctgcagtgagccaagatcatgctactgcactccagcttaggtggcaaagtgagaccctgtctccaaaaaaagaaaatagagctttataagcagagagaagaaaataatcatctaagaccatctctccattcgacatgaagtgtaccttttctaaagacggtttccagctgcaacggctccactttgcaggcttgcagggtgtatacctgcgcattgggaacttgctggaacccctgatgcattttccttgagagcaggggtacttccgccttgccgttagcttgtggagaacgtgcttcttattcctggcaggcttcaagaacagctgcacatgtgccgctaactgaccgcgttgccattggcgacctggactctgaactcaggtttattctaaacccagtgagaggtgagggggagtgatgaaaggggatcagctgtatttgtgtgtgtgtgtgtgtgtgagcacctgacaaatctatgaaaccgagtgaaaggagaaatgttagattctttattattttattatatttatatggaaagctcgactctccctttggtaagtccgaagcatgttgtctgttcgaccgtgactgtcttcctcagtctgtgcctgtgattccagtcaccctgtagttactgacagaaattgactggactgtcattgtgtgaagtctaggaggaaatgtccattttaattgtatgatttggtcataagtaaggactatatttatgtcaccattattagatatatgtacttttgtaatgactgtgaaatacacttttccctcactacgactgcttctttatttgctgataaatcttaaaacaactaagtacgttgcaaataatagtacaggtaccatcttttatgtgaagttctttttctttttttgagacagggtcttgctctgtcacccaggctggagtgcagtggcacaatcacagttcactgcagcctcaacctctccagattcaagtgatcctcccatctcagcctcccaagtagctgggactacagttgtgcaccacaatgcctagctaattttttttgtattttgtagaaatggggtttcgccatgttgctcaggctgatctcaaactcctgggctccaacgatctgcccaccttggcctcccaaagtgctgagattacaggcgtgagccactgtgcctggccttatgtaaagctcttgacctagcatctgactggaaacaagcgggaattgcattggggggcattttctgggccagtttccctgccttattttacctgcaataggtgtgcctacaaaagtctttctgacatacacactgcaggtggcagttcaagaagaatcaacctttttcatttggggatattaggatcttccttggagactctgaaaatggcacacaaagaatggcagttatgaacgtgacttctagattttgtccttgtaggaggccttggtcatggataggggaagagggatgatgggatggaatgggagggtgggatctagatgacctcttgaaattgtcccagttactgcttccttcataactgttcacaaaacgtttttcatatataccaccttgtttcccctgggaagtgaggggacgaagccttagagggtgacatagctagaaagtggagaagctcactgttcactgtgcaaagccccagtagtcggattccggggaaaagaacaagtatctagttttgatgacaatgttttcttgtaagaatcccaacactttagaatagaaaaggacctaagattctctggctcagccccagcctttctgaagaagggaaaactagggacccagatggtttaaggacaccccagagtccccagatgagctggcatttgagctggtctggagcagagtttctccctcaaagaacacagagaaatcagagagtggctgccatggtcagagggggatgtcaacaacagatcaagccgtcatcacaacaggtatttctgaagttcctgcagggactaggtcttgcatttttaagtccttttcaaaactgtgcagcttcctgaaccttatgctgtttgtcccatccactcttgaagctggggaaagacagctttctttgggaactctgtctttctcagttgacttcccaagtaagcagcaaacccctggatagccttgttatctactttaggtattaagaggctattgggttttactagattaaatcaataaaacatttcctatagagccatatcatacactgaagcaaattcagaaagaatgcaaaactgctatcttttgggggagtctggaagcctgttggttagtgtatttattttctttgtggggtcttctgtgagctacaggcacagtaagaataattcagagcggtactgggagttggttcaatttcatgtcatcacttttcaatgaagggagtgcatttcctgagtagtaaatgagtatattatttgtggcagcttttctgttaagggagctttccagacatctggttgcaaagacaaataggatatatatttgtacttcttctctgtggacatgtttttgtgacacacagttatctctaggagttgacgtctgtgggcactaagggactgaggttgggggagaaagctgaggaggctttggaagagaaggtgaggagcatttcaggatttgcagtccccctccacatgtatccacatctgagctggtggtgttccaataatgaggcatttggggcaaccaattttggaaggatagaatagctttatgtggagcaaacttgaggatcaattggagttgagtggtttaaaacttaaagatggcacaggaagctgtatcatttacaggtgaaaaaaataaatgggtctgacttca

SEQ ID NO: 1580 - DNA, 2764 bp, Homo Sapiens
gggtgctcgggctgccgtccgctccgccagaagcaccgagcagccgagccggggcccgccgccctcctcctccatgaggcccgagtgaggcgcggcggctatagccgacccgcggcgccttccccccgcgtcctatcgcgagcgcagcggcagcggcccctggaggaggaggcggaggaggaggagcatgtcggacggtttcgatcgggccccaggtgctggtcggggccggagccggggcctgggccgcggagggggcgggcctgagggcggcggtttcccgaacggagcggggcctgctgagcgggcgcggcaccagccgccgcaacccaaagccccgggcttcctgcagccaccgccgctgcgccagcccaggacgaccccgccgccaggggcccagtgcgaggtccccgccagcccccagcggccttcccggcccggggcgctcccagagcaaacgaggcccctgagagctccacctagttcacaggataaaatcccacagcagaactcggagtcagcaatggctaagccccaggtggttgtagctcctgtattaatgtctaagctgtctgtgaatgcccctgaattttacccttcaggttattcttccagttacacagaatcctatgaggatggttgtgaggattatcctactctatcagaatatgttcaggattttttgaatcatcttacagagcagcctggcagttttgaaactgaaattgaacagtttgcagagaccctgaatggttgtgttacaacagatgatgctttgcaagaacttgtggaactcatctatcaacaggccacatctatcccaaatttctcttatatgggagctcgcctgtgtaattacctgtcccatcatctgacaattagcccacagagtggcaacttccgccaattgctacttcaaagatgtcggactgaatatgaagttaaagatcaagctgcaaaaggggatgaagttactcgaaaacgatttcatgcatttgtactctttctgggagaactttatcttaacctggagatcaagggaacaaatggacaggttacaagagcagatattcttcaggttggtcttcgagaattgctgaatgccctgttttctaatcctatggatgacaatttaatttgtgcagtaaaattgttaaagttgacaggatcagttttggaagatgcttggaaggaaaaaggaaagatggatatggaagaaattattcagagaattgaaaacgttgtcctagatgcaaactgcagtagagatgtaaaacagatgctcttgaagcttgtagaactccggtcaagtaactggggcagagtccatgcaacttcaacatatagagaagcaacaccagaaaatgatcctaactactttatgaatgaaccaacattttatacatctgatggtgttcctttcactgcagctgatccagattaccaagagaaataccaagaattacttgaaagagaggacttttttccagattatgaagaaaatggaacagatttatccggggctggtgatccatacttggatgatattgatgatgagatggacccagagatagaagaagcttatgaaaagttttgtttggaatcagagcgtaagcgaaaacagtaaagttaaatttcagcatatcagttttataaagcagtttaggtatggtgatttagcagaacacaagagagcaagaaaatgtgtcacatctataccaaattaaggatgttgagttatgttactaatgtatgcaactttaattttgtttaacactatctgccaaaataaactttattccctataacttaaaatgtgtatatatatataatagtttattatgtacagttaattctactgttttggctgcaataaaatcgattttgaaataaatgaaatgttgaaaattttgctagttggttagatgcttatcctttaaattctacttttcttgaggggaaaaagtcttcgcctggaaatacatattactgcaaaaatgtagcatccttttttaggtaggagtattatagctttcattttagtttgacatttagtgtcccaatgaattgaatttcaaatatgaatcataatcttgaaaatctttagcactaaagtcttggaatatatcaacaactgatttacatatgcagatgctatttacatatgcagatgctatttgataccaagggctttttaaatgtcatgggggggaaaaacccaacttggttgaactcccagctaaacaaccaagacttcactgaagatttattccaattctagaattgttctttttttattttttattttttcaactgactaacttcattaccttaaagcctagaacattattctgctttatttatatggctttctcaattttattttgtagcatgggttgaatcgaactttttactagagaattttactagatatttgtcattcaagttttcatctgctttataattgatacaccttgagggtcacttttctaatacttttacctataatgtggtacccacctcagcccctaataaataatatttttaccctaatgtcaaatctttttcccaggctaactaaaaactgtgtacaaaaggattgcttgtaaatatgcatgtaaatagttctgttaataacccactgttttacatttggtacatctgtgtctgctaatacagttagctttctcacttttctgcttgtttgttcagtctgaattaaaattagactttgaaaataaagcttaaatagttgtttcctcta

SEQ ID NO: 1581 - DNA, 614 bp, Homo Sapiens
  misc_feature (229)..(229): n is a, c, g, or t
  misc_feature (578)..(578): n is a, c, g, or t
  misc_feature (594)..(594): n is a, c, g, or t
cagattcttaactgccacagactcttgtattatgtaatttatatacagaacacaaagcacttgatttgcttaactgatgtacttgatgatactataaaacctatattatgagaaagcattgctccttcaaaggaatcaagtgatagcaaacactcggtcctgtttccaggttttcctcactgttcattttgcctttgttcttgcaggcggagaatgaaaggggcgagantaaagtgtgttgtcaatgcaagtcaatcattaaccaacaataatttacaaaagaactttatatttgctgtaatcattaaatttagttactaatcccaggaaaagggttagtccttcctcctagtttgtagatttgcaaatggagatgaataattgaatcctattttaatcttttatctgcagtaatctgggcttcttattaccggatatatttgcattttacctccaggccatgttagttcttagaagattattttcctcatgaaccctgttttgttttgcttcctttctgcttcaattctaatgtcacattgcatacctggatgtaacagcagtcagtttctcagacnaatagagcctgtagcnacttggaagacacagaagca

SEQ ID NO: 1582 - DNA, 589 bp, Homo Sapiens
  misc_feature (506)..(506): n is a, c, g, or t
gagctcaaggatccttaattaaattaattccccccccccccgagcggcggctcctgcagcggtggtcggctgttgggtgtggagtttcccagcgcccctcgggtccgaccctttgagcgttctgctccggcgccagcctacctcgctcctcggcgccatgaccacaaccaccaccttcaagggagtcgaccccaacagcaggaatagctcccgagttttgcggcctccaggtggtggatccaatttttcattaggttttgatgaaccaacagaacaacctgtgaggaagaacaaaatggcctctaatatctttgggacacctgaagaaaatcaagcttcttgggccaagtcagcaggtgccaagtctagtggtggcagggaagacttggagtcatctggactgcagagaaggaactcctctgaagcaagctccggagacttcttagatctgaagggagaaggtgatattcatgaaaatgtggacacagacttgccaggcagcctgnggcagagtgaagagaagcccgtgcctgctgcgcctgtgcccagcccagtggccccggtcccagtgccatccagaagaaatccc

SEQ ID NO: 1583 - DNA, 946 bp, Homo Sapiens
cttctgactgggctcaggctgacaggtagagctcaccatggcttcttgtgtccttgtcccctccccatcacagctgtggtgcagtccaccgtctccagtggctatggcggtgccagtggtgtcggcagtggcttaggcctgggtggaggaagcagctactcctatggcagtggtcttggcgttggaggtggcttcagttccagcagtggcagagccattgggggtggcctcagctctgttggaggcggcagttccaccatcaagtacaccaccacctcctcctccagcaggaagagctataagcactaaagtgcgtctgctagctctcggtcccacagtcctcaggcccctctctggctgcagagccctctcctcaggttgcctgtcctctcctggcctccagtctcccctgctgtcccaggtagagctggggatgaatgcttagtgccctcacttcttctctctctctctataccatctgagcacccattgctcaccatcagatcaacctctgattttacatcatgatgtaatcaccactggagcttcactgttactaaattattaatttcttgcctccagtgttctatctctgaggctgagcattataagaaaatgacctctgctccttttcattgcagaaaattgccaggggcttatttcagaacaacttccacttactttccactggctctcaaactctctaacttataagtgttgtgaacccccacccaggcagtatccatgaaagcacaagtgactagtcctatgatgtacaaagcctgtatctctgtgatgatttctgtgctcttcactgtttgcaattgctaaataaagcagatttataatacatatattcttttactttgccttgctttggggccaaagttttgggcttaaacttttttatctgataagtgaatagttgtttttaaaagataatcta

SEQ ID NO: 1584 - DNA, 231 bp, Homo Sapiens
  misc_feature (37)..(37): n is a, c, g, or t
  misc_feature (63)..(63): n is a, c, g, or t
  misc_feature (120)..(120): n is a, c, g, or t
  misc_feature (156)..(156): n is a, c, g, or t
cagccctgacgcttccttggggccacttccttctttntttcctagcaacggcgggtagcgttnttgacatcccgggaggctgtgccgccggcctgagcccagagtttcgcggcctccggnatggcagaggtggaggaaaccttaaagaggatccanagtcataaaggggttattggaactatggttgtaaatgcagaaggtattcccatccgaacaaccttggacaactca

SEQ ID NO: 1585 - DNA, 294 bp, Homo Sapiens
  misc_feature (88)..(88): n is a, c, g, or t
  misc_feature (92)..(92): n is a, c, g, or t
  misc_feature (171)..(171): n is a, c, g, or t
  misc_feature (201)..(201): n is a, c, g, or t
  misc_feature (266)..(266): n is a, c, g, or t
ctttgttccgtggtggcacacaaatcttggcttgctgtaccatcattggcaaacctcatcatatcacagttgggtgtgtttgtatgtntgtnagcactagtgtgtgtgtgtacatattcgtgtgtatgcacactttgtgtacctgtgtacatgtgattgtagatgtacctnttgtgtgtaaactctgttaaaatgaaattngcttcgcatttaatgtgcaactttgaagtagtgtaatatttatctaaaggttttcactacttggntttaatgtcttttgaacgtgtacttcta

SEQ ID NO: 1586 - DNA, 2919 bp, Homo Sapiens
agagtttcagttttggcagcagcgtccagtgccctgccagtagctcctagagaggcaggggttaccaactggccagcaggctgtgtccctgaagtcagatcaacgggagagaaggaagtggctaaaacattgcacaggagaagtcggcctgagtggtgcggcgctcgggacccaccagcaatgctgctcttcgtgctcacctgcctgctggcggtcttcccagccatctccacgaagagtcccatatttggtcccgaggaggtgaatagtgtggaaggtaactcagtgtccatcacgtgctactacccacccacctctgtcaaccggcacacccggaagtactggtgccggcagggagctagaggtggctgcataaccctcatctcctcggagggctacgtctccagcaaatatgcaggcagggctaacctcaccaacttcccggagaacggcacatttgtggtgaacattgcccagctgagccaggatgactccgggcgctacaagtgtggcctgggcatcaatagccgaggcctgtcctttgatgtcagcctggaggtcagccagggtcctgggctcctaaatgacactaaagtctacacagtggacctgggcagaacggtgaccatcaactgccctttcaagactgagaatgctcaaaagaggaagtccttgtacaagcagataggcctgtaccctgtgctggtcatcgactccagtggttatgtgaatcccaactatacaggaagaatacgccttgatattcagggtactggccagttactgttcagcgttgtcatcaaccaactcaggctcagcgatgctgggcagtatctctgccaggctggggatgattccaatagtaataagaagaatgctgacctccaagtgctaaagcccgagcccgagctggtttatgaagacctgaggggctcagtgaccttccactgtgccctgggccctgaggtggcaaacgtggccaaatttctgtgccgacagagcagtggggaaaactgtgacgtggtcgtcaacaccctggggaagagggccccagcctttgagggcaggatcctgctcaacccccaggacaaggatggctcattcagtgtggtgatcacaggcctgaggaaggaggatgcagggcgctacctgtgtggagcccattcggatggtcagctgcaggaaggctcgcctatccaggcctggcaactcttcgtcaatgaggagtccacgattccccgcagccccactgtggtgaagggggtggcaggaagctctgtggccgtgctctgcccctacaaccgtaaggaaagcaaaagcatcaagtactggtgtctctgggaaggggcccagaatggccgctgccccctgctggtggacagcgaggggtgggttaaggcccagtacgagggccgcctctccctgctggaggagccaggcaacggcaccttcactgtcatcctcaaccagctcaccagccgggacgccggcttctactggtgtctgaccaacggcgatactctctggaggaccaccgtggagatcaagattatcgaaggagaaccaaacctcaaggtaccagggaatgtcacggctgtgctgggagagactctcaaggtcccctgtcactttccatgcaaattctcctcgtacgagaaatactggtgcaagtggaataacacgggctgccaggccctgcccagccaagacgaaggccccagcaaggccttcgtgaactgtgacgagaacagccggcttgtctccctgaccctgaacctggtgaccagggctgatgagggctggtactggtgtggagtgaagcagggccacttctatggagagactgcagccgtctatgtggcagttgaagagaggaaggcagcggggtcccgcgatgtcagcctagcgaaggcagacgctgctcctgatgagaaggtgctagactctggttttcgggagattgagaacaaagccattcaggatcccaggctttttgcagaggaaaaggcggtggcagatacaagagatcaagccgatgggagcagagcatctgtggattccggcagctctgaggaacaaggtggaagctccagagcgctggtctccaccctggtgcccctgggcctggtgctggcagtgggagccgtggctgtgggggtggccagagcccggcacaggaagaacgtcgaccgagtttcaatcagaagctacaggacagacattagcatgtcagacttcgagaactccagggaatttggagccaatgacaacatgggagcctcttcgatcactcaggagacatccctcggaggaaaagaagagtttgttgccaccactgagagcaccacagagaccaaagaacccaagaaggcaaaaaggtcatccaaggaggaagccgagatggcctacaaagacttcctgctccagtccagcaccgtggccgccgaggcccaggacggcccccaggaagcctagacggtgtcgccgcctgctccctgcacccatgacaatcaccttcagaatcatgtcgatcctgggggccctcagctcctggggaccccactccctgctctaacacctgcctaggtttttcctactgtcctcagaggcgtgctggtcccctcctcagtgacatcaaagcctggcctaattgttcctattggggatgagggtggcatgaggaggtcccacttgcaacttctttctgttgagagaacctcaggtacggagaagaatagaggtcctcatgggtcccttgaaggaagagggaccagggtgggagagctgattgcagaaaggagagacgtgcagcgcccctctgcacccttatcatgggatgtcaacagaattttttccctccactccatccctccctcccgtccttcccctcttcttctttccttaccatcaaaagatgta

SEQ ID NO: 1587 - DNA, 636 bp, Homo Sapiens
gctgccctgcgtgctggccctagtgcagggtgtgggccgcctcgagtgcccgccagcccccatcaacggcacccctggccccccgctcgacttccttgagcgttttcccgccagcaccttcttctgggcactgactgcccttctggtcgcttcagctgctgccttccagggtcttctgctgctgttgccgccaccaccatctgtacccacaggggagttaggatcaggcctccaggtgggagccccaggagcagaggaagaggtggaagagtcctcaccactgcaagagccaccaagccaggcagcaggcaccacccctggtccagaccctaaggcctatcagcttctatcagcccgcagtgcctgcctgctgggcctgttggccgccaccaacgcgctgaccaatggcgtgctgcctgccgtgcagagcttttcctgcttaccctacgggcgtctggcctaccacctggctgtggtgctgggcagtgctgccaatcccctggcctgcttcctggccatgggtgtgctgtgcagggtccttggcagggctgggcggcctctctctgctgggcgtgttctgtgggggctacctgatggcgctggcagtcctgaacccctgcccgcccctggtgggca

SEQ ID NO: 1588 - DNA, 487 bp, Homo Sapiens
  misc_feature (43)..(46): n is a, c, g, or t
  misc_feature (367)..(367): n is a, c, g, or t
gaaaaaagtagaggtaggagggcgcggcggctcacgctcgtannnncagcactttggaaggccgaggcgggcggatcacgagagggtcaccatgaagttcaatcccttcgttacctcggaccgcagtaaaaaccgcaaacgtcacttcaatgccccctcacacgtgcgcaggaagatcatgtcatcccccgctctccaaggagctgcggcagaagtacaatgtccgctccatgcccatccgcaagacgacgaggtccatggtagttcgaggacactacaaaggtcagcaaattggcaaggtagtccaggtgtacagaaagaaatatgtcatctacatcgagcgggtgcagcgtgagaaggccaacgnacaactgtccacgtgggcattcacccaagcaaggtggttatcaccaggctaaaactggacaaggatcggaaaaaaattcttgaacgcaaagccaagtctcgacaagttggaaaagagaaa

SEQ ID NO: 1589 - DNA, 4620 bp, Homo Sapiens
ccggaggatgtgcagctgcggcggcggcgccggctacgaagaggacggggacaggcgccgtgcgaaccgagcccagccagccggaggacgcgggcagggcgggacgggagcccggactcgtctgccgccgccgtcgtcgccgtcgtgccggccccgcgtccccgcgcgcgagcgggaggagccgccgccacctcgcgcccgagccgccgctagcgcgcgccgggcatggtcccctcttaaaggcgcaggccgcggcggcgggggcgggcgtgcggaacaaagcgccggcgcggggcctgcgggcggctcgggggccgcgatgggcgcggcgggcccgcggcggcggcggcgctgcccgggccgggcctcgcggcgctagggcgggctggcctccgcgggcgggggcagcgggctgagggcgcgcggagcctgcggcggcggcggcggcggcggcggcggcccggcgggcggagcggcgcgggcatggccgcgcgcggccggcgcgcctggctcagcgtgctgctcgggctcgtcctgggcttcgtgctggcctcgcggctcgtcctgccccgggcttccgagctgaagcgagcgggcccacggcgccgcgccagccccgagggctgccggtccgggcaggcggcggcttcccaggccggcggggcgcgcggcgatgcgcgcggggcgcagctctggccgcccggctcggacccagatggcggcccgcgcgacaggaactttctcttcgtgggagtcatgaccgcccagaaatacctgcagactcgggccgtggccgcctacagaacatggtccaagacaattcctgggaaagttcagttcttctcaagtgagggttctgacacatctgtaccaattccagtagtgccactacggggtgtggacgactcctacccgccccagaagaagtccttcatgatgctcaagtacatgcacgaccactacttggacaagtatgaatggtttatgagagcagatgatgacgtgtacatcaaaggagaccgtctggagaacttcctgaggagtttgaacagcagcgagcccctctttcttgggcagacaggcctgggcaccacggaagaaatgggaaaactggccctggagcctggtgagaacttctgcatgggggggcctggcgtgatcatgagccgggaggtgcttcggagaatggtgccgcacattggcaagtgtctccgggagatgtacaccacccatgaggacgtggaggtgggaaggtgtgtccggaggtttgcaggggtgcagtgtgtctggtcttatgagatgcagcagcttttttatgagaattacgagcagaacaaaaaggggtacattagagatctccataacagtaaaattcaccaagctatcacattacaccccaacaaaaacccaccctaccagtacaggctccacagctacatgctgagccgcaagatatccgagctccgccatcgcacaatacagctgcaccgcgaaattgtcctgatgagcaaatacagcaacacagaaattcataaagaggacctccagctgggaatccctccctccttcatgaggtttcagccccgccagcgagaggagattctggaatgggagtttctgactggaaaatacttgtattcggcagttgacggccagccccctcgaagaggaatggactccgcccagagggaagccttggacgacattgtcatgcaggtcatggagatgatcaatgccaacgccaagaccagagggcgcatcattgacttcaaagagatccagtacggctaccgccgggtgaaccccatgtatggggctgagtacatcctggacctgctgcttctgtacaaaaagcacaaagggaagaaaatgacggtccctgtgaggaggcacgcgtatttacagcagactttcagcaaaatccagtttgtggagcatgaggagctggatgcacaagagttggccaagagaatcaatcaggaatctggatccttgtcctttctctcaaactccctgaagaagctcgtcccctttcagctccctgggtcgaagagtgagcacaaagaacccaaagataaaaagataaacatactgattcctttgtctgggcgtttcgacatgtttgtgagatttatgggaaactttgagaagacgtgtcttatccccaatcagaacgtcaagctcgtggttctgcttttcaattctgactccaaccctgacaaggccaaacaagttgaactgatgagagattaccgcattaagtaccctaaagccgacatgcagattttgcctgtgtctggagagttttcaagagccctggccctggaagtaggatcctcccagtttaacaatgaatctttgctcttcttctgcgacgtcgacctcgtgtttactacagaattccttcagcgatgtcgagcaaatacagttctgggccaacaaatatattttccaatcatcttcagccagtatgacccaaagattgtttatagtgggaaagttcccagtgacaaccattttgcctttactcagaaaactggcttctggagaaactatgggtttggcatcacgtgtatttataagggagatcttgtccgagtgggtggctttgatgtttccatccaaggctgggggctggaggatgtggaccttttcaacaaggttgtccaggcaggtttgaagacgtttaggagccaggaagtaggagtagtccacgtccaccatcctgtcttttgtgatcccaatcttgaccccaaacagtacaaaatgtgcttggggtccaaagcatcgacctatgggtccacacagcagctggctgagatgtggctggaaaaaaatgatccaagttacagtaaaagcagcaataataatggctcagtgaggacagcctaatgtccagctttgctggaaaagacgtttttaattatctaatttatttttcaaaaattttttgtatgatcagtttttgaagtccgtatacaaggatatattttacaagtggttttcttacataggactcctttaagattgagctttctgaacaagaaggtgatcagtgtttgcctttgaacacatcttcttgctgaacattatgtagcagacctgcttaactttgacttgaaatgtacctgatgaacaaaacttttttaaaaaaatgttttcttttgagaccctttgctccagtcctatggcagaaaacgtgaacattcctgcaaagtattattgtaacaaaacactgtaactctggtaaatgttctgttgtgattgttaacattccacagattctaccttttgtgttttgttttttttttttacaattgttttaaagccatttcatgttccagttgtaagataaggaaatgtgataatagctgtttcatcattgtcttcaggagagctttccagagttgatcatttcccctcatggtactctgctcagcatggccacgtaggttttttgtttgttttgttttgttctttttttgagacggagtctcactctgttacccaggctggaatgcagtggcgcaatcttggctcactttaacctccacttccctggttcaagcaattcccctgcctttgcctcccgagtagctgggattacaggcacacaccaccacgcccagctagtttttttgtatttttagtagagacggggtttcaccatgcaagcccagctggccacgtaggttttaaagcaaggggcgtgaagaaggcacagtgaggtatgtggctgttctcgtggtagttcattcggcctaaatagacctggcattaaatttcaagaaggatttggcattttctcttcttgacccttctctttaaagggtaaaatattaatgtttagaatgacaaagatgaattattacaataaatctgatgtacacagactgaaacacacacacatacaccctaatcaaaacgttggggaaaaatgtatttggttttgttcctttcatcctgtctgtgttatgtgggtggagatggttttcattctttcattactgttttgttttatcctttgtatctgaaatacctttaatttatttaatatctgttgttcagagctctgccatttcttgagtacctgttagttagtattatttatgtgtatcgggagtgtgtttagtctgttttatttgcagtaaaccgatctccaaagatttccttttggaaacgctttttcccctccttaatttttatattccttactgttttactaaatattaagtgttctttgacaattttggtgctcatgtgttttggggacaaaagtgaaatgaatctgtcattataccagaaagttaaattctcagatcaaatgtgccttaataaatttgttttcatttagatttcaaacagtgatagacttgccattttaatacacgtcattggagggctgcgtatttgtaaatagcctgatgctcatttggaaaaataaaccagtgaacaatatttttctattgtacttttcgaaccattttgtctcattattcctgttttagctgaagaattgtattacatttggagagtaaaaaacttaaacacgaaaaaaaaaaaaaaaaaaaaaaaaaaaaaaaaaaaaaaaaaaaaaaaaaaaaaaaaaaaaaaaaaaaa

SEQ ID NO: 1590 - DNA, 806 bp, Homo Sapiens
tttaaagtctgaagctcggccaggtgcggtggctcacgcctgtaatcccaaaactttggaaggctgaggcaggtggatcacctgaggtcaggaggagttcaagaccagcctggccaacgtggtgaaaccccatctctataaaagtacaaaagggcatgatggcaggtgcctgtaatctcagctactcagtaggctggagcgggagaattgcttgaacctgggaggtggaggtttcagtgagccaagatagcgccattgcactccagcgtgggcgacagcaagagacttcatttcgataaataagtaaataaataaataaagtctgaagctccactggtcactccttttattgattatttgcagctggtctaaccagttacatatgtctggcttgattccatggccagagcaacataaaagccctgctgggaacttctgatttgagctcttccaaaaccaggatggatgcctcacatagatcatgatgattcaatccaaaggcactttgcagtgcagtccacatgtgcataaggaccatggggagcttgtacttgggaattctgagattcctgatgtttaacatacctagtctttctcttgctgccctgtatccctttggcttttatattaaaatcttaagctgaataatgccctgggaaagcccggataaatcctttcaaatatttggctcggcacacatttgggtatttacccgggatcccacacatgtgagctcggggggggaccctcgacaagggaacggtggaaaccgggggaggctaagggggccccaaggggaggtccgc

SEQ ID NO: 1591 - DNA, 445 bp, Homo Sapiens
  misc_feature (2)..(2): n is a, c, g, or t
  misc_feature (219)..(219): n is a, c, g, or t
  misc_feature (368)..(368): n is a, c, g, or t
  misc_feature (380)..(380): n is a, c, g, or t
  misc_feature (405)..(405): n is a, c, g, or t
anctccccacgcatccaaacaagcagacggggtaccagcctcctggtgtgtatcataggatttgttcacatagtgttatgcatgatcttcgtaaggttaagaagccgtggtggtgcaccatgacatccaacccgtatatataaagataaatatatatatatatgtatgtaaattatagcactgagggccctgctgccctgctggaccaagcaaaactangccttttggtttgggtattatgtttcgttttgttatttgtttgtttttgtggcttgtcttatgtcgtgatagcacaagtgccagtcggattgctctgtattacagaatagtgtttttaattcatccaatgttctagttaatgtctaccntcagcaccttcntctttagcctaaatttttgggaggnttgccccaattttgtttctttcaatttttactgggttaac

SEQ ID NO: 1592 - DNA, 580 bp, Homo Sapiens
ccgggaagaagcagaaagctacacggaaaaaggtccgcgagaacccacgaacctgcgctatggaggcctctctaggagggccggagcccaacggagtcataaacgaagaggcgaaagcgggagctacggggaagcgaagaggaagggcgccggcaaatgggggcagggccagtggcgagaacaggcctttcctgtgcttcagctccctggaaactggcactgcagaaggaggcaagggtgttaaaacgaggaggcagtgtcaggacaaaatcccaggatctggaaccccaaatacttggctcgcgggaagtgctcagtaaaccattttaaggtcctggagaaagattcgcgcaaaaagaggtgtagcgcggggggagtgtttcgtcgtgaaaagaaccagcttacattaaggaagaaatgaaagaggcaaattttaaaatgctaataacgcagccttcttgccttgtctctatctctgatccgggtaaaatgtatactcctctgcccatttttctttgtcttcatctcctgaaatgtagacatttaatagtgagcttctccccttgacctcatcactctg

SEQ ID NO: 1593 - DNA, 217 bp, Homo Sapiens
  misc_feature (41)..(41): n is a, c, g, or t
  misc_feature (116)..(116): n is a, c, g, or t
  misc_feature (122)..(122): n is a, c, g, or t
  misc_feature (124)..(124): n is a, c, g, or t
  misc_feature (127)..(127): n is a, c, g, or t
  misc_feature (169)..(169): n is a, c, g, or t
ccctgctgtacccaagccagagctgagacatggctccccanatggactggctgtggtcaggaaaggcctgtagagggagctgagggctcagaaaatacctgctccgggtgcctggnctcaantnctnattccatttctttaatgccactggccactgtatctccttttntaaaaacctccaaaaagttatacatcaggtatctctagtcagcttcct

SEQ ID NO: 1594 - DNA, 489 bp, Homo Sapiens
ggcacgagggaggtgcaacgaacccggggggcaaacggactggggccaagagccgggagcgcgggcgcaaaggcaccagggcccgcccagggcgccgcgcagcacggccttgggggttctgcgggccttcgggtgcgcgtctcgcctctagccatggggtccgcagcgttggagatcctgggcctggtgctgtgcctggtgggctgggggggtctgatcctggcgtgcgggctgcccatgtggcaggtgaccgccttcctggaccacaacatcgtgacggcgcagaccacctggaaggggctgtggatgtcgtgcgtggtgcagagcaccgggcacatgcagtgcaaagtgtacgactcggtgctggctctgagcaccgaggtgcaggcggcgcgggcgctcaccgtgagcgccgtgctgctggcgttcgttgcgctcttcgtgaccctggcgggcgcgcagtgcaccacctgcgtgggcccgggcccg

SEQ ID NO: 1595 - DNA, 248 bp, Homo Sapiens
  misc_feature (14)..(14): n is a, c, g, or t
  misc_feature (47)..(47): n is a, c, g, or t
  misc_feature (50)..(51): n is a, c, g, or t
  misc_feature (53)..(53): n is a, c, g, or t
  misc_feature (56)..(56): n is a, c, g, or t
  misc_feature (59)..(59): n is a, c, g, or t
  misc_feature (62)..(68): n is a, c, g, or t
  misc_feature (70)..(70): n is a, c, g, or t
  misc_feature (239)..(239): n is a, c, g, or t
ttacggcgcggcanttccgtttccaaaggacttcggctacggcgtgnagnngnagnaanagnnnnnnntngatgtcacccaacgagaccctctttttggaaagtaccaacaagatttataaggatgacatttccaatagctcctttgtgaatttccagatatgggattttcctgggcaaatggacttttttgacccaacctttgactatgagatgatcttcaggggaacaggagcattnatatacgtc

SEQ ID NO: 1596 - DNA, 420 bp, Homo Sapiens
  misc_feature (366)..(366): n is a, c, g, or t
tcggaaaataggttaatgcatattgcttctaacaagtgcatgaagaaatagaagaagctatgtagctttcagttctgacagaaaagggtgaaggagggtatcatttcaagaaaaaaaatagctatcacgcaatggttatctctgaaaatatttgtattaagatgtgtatacatggccaggcatggtggctcatgcctgttaatcccagcactttgggaggcaggtggatcacgaggtcaggagatcaagaccatcctgggccaacatggtgaaaccttcatcttcttacttaaaaatacaaaaatgaggcggggtgtgggtggcccatgcctgttagtccccagctgcttcggggagacttgattntctttgagcctgggggaagccagaggtttgccattgaacttgagttccgcttca

SEQ ID NO: 1597 - DNA, 6477 bp, Homo Sapiens
cactgactggactgaaaacagggccaagaaaactgctgctgcagggggtcctgaaaacagctggaacccggcagtgatgtgggacctaacttgaagttaacctgtggtggtgaggttggaaccagttggattatgatttattttctacactcttgtacggaatgcagagctgttgtatcctgatgaatctactgctaaatatagtcatttggaataattttaagtattgatcttaaaacttgtaccacaacaagagtgtctaaaaagcacggcaagctcattacgttcttacgaacattcatgaagtctcgtccaacaaaacagaagctgaagcagcggggaatcttgaaagagagggtgtttggttgtgacctgggggagcaccttctaaattctggttttgaagtgccgcaggttcttcaaagctgcacagcattcattgagagatatggcatcgtggatggaatctatcgcctttctggtgttgcctccaatatccagagactacgccatgaatttgactctgagcacgtccccgacctgacgaaagaaccgtatgttcaggacatccattctgtgggttccctatgtaagctgtacttccgggaactcccaaaccctctgcttacctaccagctgtatgagaaattttctgatgcagtttcagcagcaacagatgaagaaaggctgataaaaatccacgatgtcatccagcagctccccccaccacactacagaacactggagttcctgatgagacacttgtctcttctagctgactattgttccatcacaaatatgcatgcaaaaaatctagcaattgtttgggctccaaacctgttaagatcaaaacagatagaatctgcctgcttcagtggaacagcagctttcatggaagtgaggattcagtctgtggttgttgagttcatcctgaatcacgttgatgtgctgttcagcggcagaatcagcatggccatgcaagagggggcagcttctctatcaaggcccaagtccctcctggtatcctctccatccaccaaactgctgacattggaagaggcccaggcacgaacacaagctcaggtcaattctccaattgtgacggaaaataaatatatcgaagtaggagaaggacctgctgcacttcaggggaaatttcataccataattgagttcccacttgaaagaaagaggcctcaaaataagatgaaaaagtctcctgtgggtagctggcgttcctttttcaacttggggaaatcatcatctgtttctaaacgaaagctgcagcggaatgagagtgagccttcagagatgaaagccatggctctgaaaggtggcagggcagaaggaaccctccgttcagctaaaagtgaggagtctcttacatctctccatgcagttgatggtgattctaagctcttccgacccagaagacccagatcttccagtgatgcactgtctgcctcttttaatggagaaatgctggggaaccgctgtaactcctatgataatctgcctcatgacaatgagagtgaggaggaaggagggctgcttcatatcccagcccttatgtctcctcattcagctgaggatgttgacttgagcccaccagacattggagtagccagcctggattttgatccaatgtcatttcaatgtagtcctcctaaggccgaatcagaatgtctggagagtggtgcttcctttttagattcaccaggatactccaaggataaaccaagtgccaataaaaaggatgcagaaacaggtagtagccaatgtcagactccaggaagcacagcaagctctgaacctgtctctcctcttcaggagaaactgagtccattctttaccctggacttgagcccaactgaagataaatcatctaagccatcctcctttactgaaaaggtcgtctatgctttctctccgaagataggacggaaattaagcaaatcaccttctatgagcatatctgagccaatttcagtgaccctaccaccacgggtgtcagaagtcattggtacagtctcaaataccacagctcagaatgcatcatcttcaacctgggacaaatgcgttgaagaaagggatgccacaaatagatcccccacccagatagtaaagatgaaaacaaatgagacagttgcccaagaagcatatgaatctgaagtccagcccctggaccaggtggctgctgaagaagtagaattgccagggaaagaggatcagtctgtctcaagcagtcagagtaaggctgtagcttctggacagactcagacaggagcagttacccatgacccccctcaggattccgttcctgtcagttcagtctctcttatcccaccaccaccgcctccgaaaaatgttgcccgaatgttggcgctagcattagctgagtccgcacagcaagcctcaactcagtcattgaagagaccagggacctctcaggctgggtatacaaattatggagacatagcggtggctacaactgaagataatctgtccagttcttactctgcagttgctctagataaggcctatttccaaaccgatcgaccagcagagcagttccacctccagaataatgcaccaggaaactgtgaccatcctctaccagagacaacagctactggggatcctacccattccaacacaactgaatctggggagcaacatcaccaagtagacttaacagggaatcagccacatcaagcatatttatctggggacccagaaaaggccagaattacttcagttcccttagactcagagaagtctgatgatcatgtaagtttccctgaagaccagtctgggaagaacagtatgccaactgtctccttcttggatcaggaccagtctccaccccgtttctacagtggagatcagcctccttcttatcttggtgcaagtgtggataaactccatcaccctttagaatttgcagacaaatctcccacacctcctaatttacctagcgataaaatctaccctccttctgggtcccccgaagagaataccagcacagccaccatgacttacatgacaactactccagcaacagcccaaatgagcaccaaggaagccagctgggatgtggctgaacaacccaccactgctgattttgctgctgccacacttcagcgcacgcacagaactaatcgtccccttccccctccgccttcccagagatctgcagagcagccaccagttgtggggcaggtacaagcagcaaccaatataggattaaataattcccacaaggttcaaggagtagttccagttccagagaggccacctgaacctcgagccatggatgaccctgcgtctgccttcatcagtgacagtggtgctgctgctgctcagtgtcccatggctacagctgtccagccaggcctgcctgagaaagtgcgggacggtgcccgggtcccgctgctgcacctgcgcgccgagtctgtccctgcgcatccctgtggctttcctgcaccactgccccccaccaggatgatggagagtaagatgattgctgccatacactccagcagtgcagatgccaccagcagttcaaattatcattcctttgtcactgcttcatccacctctgtggacgatgcattgcctttaccacttcctgtcccacaacctaagcatgcttctcagaaaacagtttactcctcctttgctaggcccgatgtcaccactgaaccctttggtccagataactgtttgcatttcaatatgactccaaactgccagtaccgtccccagagtgtacctccccatcacaataaattggagcagcaccaagtgtatggtgccaggtcagagccaccagcctccatgggtcttcgttataacacatatgtggccccaggaagaaacgcatctggacaccactccaagccatgcagccgggtcgagtatgtgtcttctttgagctcctctgtcaggaatacctgttaccccgaagacattccaccgtaccctaccatccggagagtgcagtctctccatgctccgccgtcttccatgattcgctctgttcccatttcacggacagaagttcccccagatgatgagccagcctactgcccaagacctctgtaccaatataagccatatcagtcctcccaggcccgctcagattatcatgtcactcagcttcagccttactttgagaatggccgggtccactacaggtatagcccatattccagttcttctagttcctattacagtccagatggggccctgtgtgatgtggatgcctatggcacagtccagttgagaccccttcaccgccttcccaatcgagactttgctttctacaatcctaggctgcaaggaaagagcttgtacagttatgctggtttggctccacgtccccgggccaacgtgactggctatttctctcccaacgaccataatgtagtcagcatgcctccggctgctgatgtgaagcacacctacacctcatgggatcttgaggacatggaaaaataccgcatgcagtccatccggagagagagccgtgctcggcagaaggtgaaagggcctgtcatgtcccaatatgataacatgaccccggcggtgcaggacgacttgggtgggatctatgtcatccatctgcgtagtaaatcagatcctgggaaaactggacttctctcagtggcagaaggaaaggagagccgccatgcagccaaggccatcagtcccgagggagaggaccgcttctataggaggcatcccgaggcagagatggacagagcccaccatcacggaggccatggtagcacgcagccggagaagccatccctgcctcagaagcagagcagcctgaggagcaggaagcttcctgacatgggctgcagtcttcctgagcacagggcacaccaagaagcaagccataggcagttctgtgagtcaaagaatgggcccccttatccccagggagctggccagttagattatgggtccaaagggattccagacacttctgagccagtcagctaccacaactctggagtaaaatatgctgcatccgggcaagaatctttaagactgaaccacaaagaggtaaggctctccaaagagatggagcgaccctgggttaggcagccttctgccccagagaaacactccagagactgctacaaggaggaagaacacctcactcagtcaatcgtcccaccccctaaaccagagaggagtcatagcctcaaactccatcatacccagaacgtggagagggaccccagtgtgctgtaccagtaccaaccacacggcaagcgccagagcagtgtgactgttgtgtcccagtatgataacctggaagattaccactccctgcctcagcaccagcgaggagtctttggagggggcggcatggggacgtatgtgccccctggctttccccatccacagagcaggacctatgctacagcgttgggtcaaggggccttcctgcccgcagagttgtccttgcagcatcctgaaacacagatccatgcagaatgagccctgcgagcaatagagttgaagcagcctctgctggacagtggactgttctatttttttcaataaccaaaaagattaaacaaaaaatactataaaacccctgaccacatttaaaaaatgataataaaagtaaacaaatcagcatctttttccccttccctgcttcattaccccctcttccatctatagactttgtcatttttgtctttagaaaagatctgaaggatggtaaagccccgtgctgaaacccagtagagaaacctgtctcaggacacacttgccatctagggctagcttgaaagagcctgaggactgcctttaactgaatttgaattcagcattgtcctttcttcttagtatttgctgcataattgagagcagttcacatcgatttcctggtaggcgtctgcattccctgttgtgttcctgcttctccttcagtagctgcacaacttgcgcagatcgacacactgttgtcacttcattctccccgtctgagaaggatcttgtgttcagttagagtcgtggaaaaatccctgatccttcaaggtcagtcagacagttggcaacattataattaaaaataagaaattaagactttaaattaaacatttggtagagtcatcataaaacaccagaccacttagactcaggctgaaccatactctttctattcttatttttcatccttgttcctcacggttcagtgaacaggctcatatcatgacagaatggacttttaaaagttagtacttaaggaaacttctttaggtggaagaaagtaaagttcttattgtcagtgaactttattagcaccagaaatctctattgatgcttttaatgcattgcctgccttcaggttttcttcttaccccacccctcaataagatttggtgaattgtaattctagtaaaacatgtcataccattggttttcctaaattatcaactttctttcatt

SEQ ID NO: 1598 - DNA, 2685 bp, Homo Sapiens
caggcgtgtcccagggggagccccgctctgcagccctgtgcgccgtagagagctggacttaggctggcagcatggccgagttcagggtcagggtgtccaccggagaagccttcggggctggcacatgggacaaagtgtctgtcagcatcgtggggacccggggagagagccccccactgcccctggacaatctcggcaaggagttcactgcgggcgctgaggaggacttccaggtgacgctcccggaggacgtaggccgagtgctgctgctgcgcgtgcacaaggcgcccccagtgctgcccctgctggggcccctggccccggatgcctggttctgccgctggttccagctgacaccgccgcggggcggccacctcctcttcccctgctaccagtggctggagggggcggggaccctggtgctgcaggagggtacagccaaggtgtcctgggcagaccaccaccctgtgctccagcaacagcgccaggaggagcttcaggcccggcaggagatgtaccagtggaaggcttacaacccaggttggcctcactgcctggatgaaaagacagtggaagacttggagctcaatatcaaatactccacagccaagaatgccaacttttatctacaagctggctctgcttttgcagagatgaaaatcaaggggttgctggaccgcaaggggctctggaggagtctgaatgagatgaaaaggatcttcaacttccggaggaccccagcagctgagcacgcatttgagcactggcaggaggatgccttcttcgcctcccagttcctgaatggtctcaaccctgtcctgatccgccgctgtcactacctcccaaagaacttccccgtcactgatgccatggtggcctcattgttgggtcctgggaccagcttgcaggctgagctagagaagggctccctgttcttggtggatcacggcatcctctctggcatccagaccaatgtcattaatgggaagccgcagttctctgcggccccaatgaccctgctataccagagcccaggctgcgggccgctgctgcctctcgccatccagctcagccagacccccggcccaaacagccccatcttcctgcccactgatgacaagtgggactggttgctggccaagacctgggtgcgcaatgccgagttctccttccatgaggccctcacgcacctgctgcactcacatctgctgcctgaggtcttcaccctggctaccctgcgtcagctgccccactgccaccctctcttcaagctgctgatcccgcacacccgatacaccctgcacatcaacacactcgcccgggagctgcttatcgtgccagggcaggtggtggacaggtccacaggcatcggcattgaaggcttctctgagttgatacagaggaacatgaagcagctgaactattctctcctgtgtctgcctgaggatatccggacccgaggagttgaagacatcccaggctactactaccgtgatgatgggatgcagatttggggtgcagtggaacgctttgtctctgaaatcatcggtatctactacccaagtgatgagtctgtccaagatgacagagagctccaggcctgggtcagagagatcttctccaagggcttcctaaaccaggagagctcaggtatcccttcctcactggagacccgggaagccctggtgcagtatgtcaccatggtgatattcacctgctcagccaagcatgcggctgtcagtgcagggcagtttgactcctgtgcttggatgcccaacctgccacccagcatgcagctgccaccacccacctccaaaggcctggcaacatgcgagggcttcatagccaccctcccacctgtcaatgccacatgtgatgtcatccttgctctctggttgctgagcaaggagcctggagaccaaaggcccctgggcacctatccggatgagcacttcacagaggaggcccctcggcggagcatcgccaccttccagagccgcctggcccagatctcgaggggcatccaggagcggaaccggggcctggtgctgccctacacctacctagaccctcccctcatcgagaacagcgtctccatctaaatcccaggggaacacaggcccagatgacatccctttgaccacatcgctctaggataactggcacccagagaaaaggactcctcagaaaaaacaggcccccatgtgcctctcctgggacaaccagactctgtaactcacccccaccaccatacacacacacaaaaacagaaacaaaatcaaaacagagaaagcagaaaatctaccaagaacagagtctcaggacagaaccactgagtcttttggaggctccaagcctcaaagtgcccgcagagcccaccttgagggttttgctagttggttttgttttgcgtttacagccgtggggggaagcacataatcccgccccagggcccactagcatccactgattggaccttatggtcacccaactcaaggacagccaccaagaagtggctgccaaagagactgggcgcagtggctcatgcccataatcccagcactttgggagatggaggcgggaaaatcatttgaggtcagaagttcaaggccagcctggacgacatagcgagactccacctctaccaaaaaataaaaattaaaaaacaaaaaaaaaaaaaaaaaa

SEQ ID NO: 1599 - DNA, 5655 bp, Homo Sapiens
aaaaaatcctgcggtgcagtttttataccagaaactgataggttggctaaatgaagatcaaaggaaggattttggtttcctggtggacattttgtacagtgctctccggtgctgtgacaatgatatggaaagaaaaaaagtcttggatgatctaaccaaggtggacttgaaatggaattctcttcttaagattattgaaaaggcatgtcctagttcagataaacatgctttagtaactccttggctcaaaggcgatatccttggtgagaaattggtcaacttggcagattgtctttgtaatgaggacttggaatccagggtatcttcagaatctcacttctcagaaagatggactcttctaagcttggtattatcccaacatgttaaaaatgattacttgattggagacgtatatgttgaaagaatcattgttagacttcatgaaactttattcaaaacaaagaaattatcagaagctgaaagcagtgactcatcagtgtcttttatctgtgatgtggcctataactatttcagctcagcgaaaggatgcttgctaatgccatcatctgaagatttattattaactctctttcagttatgtgctcagagcaaagaaaaaacacatttgccagattttcttatctgtaaactgaaaaatacttggctctctggtgtaaatttattggttcatcaaactgacagttcatataaagagagtaccttcctacatttgtctgctctgtggctgaagaaccaagttcaggcttcatctttggatatcaacagtctccaagtcctcttgtctgctgttgatgatttgctaaatacacttctagagagtgaagattcttatcttatgggagtttatattggaagtgtaatgccgaacgacagtgaatgggaaaagatgaggcagtctcttcctatgcagtggttacatagacctcttttagagggaagattgagtttgaattatgaatgtttcaaaacagattttaaggaacaggacataaagacacttcccagccatttgtgtacttcagcattattgagcaaaatggtcttaattgcactgagaaaggaaacagtcttagaaaataatgagcttgagaaaataattgcagaactgctttattcactgcagtggtgtgaagaattagataacccacctatttttctaattggattttgtgaaatacttcaaaaaatgaatattacgtatgataacttacgtgtacttggtaatacgtcgggccttttgcagctgttatttaacaggtccagagaacatggcacactgtggtctcttattattgctaagttgatcctttcccgaagcatttcatctgatgaagtaaaaccacattataagagaaaagaaagtttttttccactaactgaaggcaatttgcataccattcaaagtctatgtccatttttgtcaaaagaagaaaagaaagaatttagtgctcaatgtatacctgctcttttgggctggactaagaaagatctttgcagcactaatggaggttttggacatcttgccattttcaattcttgtctgcaaaccaaaagtatagatgatggagagctattacatggaatattaaaaatcataatatcctggaagaaagagcatgaagatatttttcttttcagttgtaatctatcagaagcaagtccagaggtactgggtgtaaatatagaaataatccggtttctttccctgtttctgaaatactgctcatcccctttggcagagagtgagtgggacttcatcatgtgctccatgttggcttggttggagacaacaagtgagaatcaggcattgtattctattccacttgtgcaactgtttgcctgtgtcagctgtgatttggcctgtgacctcagtgctttctttgattccacaactctggataccattggcaatcttcctgtaaatctaatcagtgaatggaaagaatttttttcccaaggcatccacagtttgcttttacctattttggtgactgttacaggagaaaacaaagatgtgtctgaaacatcctttcagaatgcaatgctgaaacccatgtgtgaaacattaacgtatatctcaaaggaacagctattgagtcacaaacttcctgcaagattagttgctgaccaaaaaacaaacttaccagaatatctccagactttgttaaatacattggccccattactcctcttcagagctaggcctgtgcaaattgctgtttatcatatgctatacaaattgatgcctgaattaccacagtatgatcaggataatctaaagtcatacggagatgaagaagaagagccagccttgtcaccaccagcagcactgatgtctcttcttagcattcaagaggacttactagaaaatgttttggggtgtattcctgttggacagatagttactattaaaccactgagtgaagacttctgttatgttctgggataccttctcacttggaaattaatactaactttcttcaaagctgcatcatcacagcttcgggctttgtattccatgtatcttcggaaaacaaagagtttgaataaattgctctatcacctgttcaggcttatgccagaaaatccaacctatgcagagacagcagttgaggtcccaaataaggaccctaaaacattctttactgaggagctccagctgagtattagagaaacaacaatgcttccataccacattccacacttggcttgttcagtctatcatatgacattaaaagacttgcctgccatggttaggttgtggtggaatagcagtgagaagcgtgttttcaatattgtggatagatttacaagcaagtatgtcagcagtgttctttcttttcaagaaatatcttctgtacaaacaagtacacaactatttaatggcatgacggttaaagctcgagctactactcgagaggtaatggctacttatactattgaggacatagttattgaacttataatacaactgccttcaaattatccactgggttcaataatagtagaaagtgggaaaagagtaggagtagctgttcagcagtggcggaactggatgctgcagttaagcacttacctcacccatcagaatggaagtattatggaaggcttagctttatggaaaaataacgtagacaaacgttttgagggtgttgaagattgcatgatctgtttctcagtcattcacggtttcaactattcccttcccaaaaaagcctgtagaacatgcaagaaaaaattccattcagcctgcttgtacaaatggtttacatctagcaacaaatccacttgtccactgtgtcgtgagacgtttttctgagatttttttcactggaagggatccctgaagtacatcaaacaaaggcattggatttggatccgtctgaaagtgtggatgtggggaagccagtgagcattacttttaaataggaccttctctggaaaattattttggttaatgtaataatcctaaaatcaggtttacttaactttagattgctttgtaaatgtttggaaactttcttttacaaaagaatattacatatttgagagaaaatatttctattaatggtttaatttctttgtatatttaaaaataaatatgaaaaacccctaaattacagaattggaatttgtgaaaagattgcacaactatattattgataaacccattccgtttgttgatctgtgttttagaatagtccaagtgaagcaaaacgaactgagagagctgatttacatctatagatattttaagccttatttattagttatgacaataaattagtattctgatatttgtagattattttaatgataaaaatgacactaagctattaatacggcttgtcttaagatatctggaggcatgctctgaaatcctatataaaagagtttaaactgaactttaaggtgcctccatttatcaagggttatgaaactcagaaaattaaattcttgatgctgacctttttgcttgtgggagaattatttctatatattagtgaaatttgaattgtaaacttgtcagtgaatttatcactctgagcgagtctctagagggtgagaatttgagagaaatagtaatttgattatttcattcatgaagcggagtggtagttatccttctattgagagggaagaaataaatgagtattactgaaacttaaagatcagtggaaaaaaaaaacatttaaaaatgttgtaggagactttcaattttggaagcaaactgagctattcttaccagccaaagttatactaaataagagacttgggggagcaaatgtttttcagccttcagaaatgaaagttaaggattttagcactaggtaaaattcagtataataggctgaagtggagtaagtgaaaacctgccttttgccactcttaaaaattgtgcccaaaatataaaagtgtggaactttagaacttggaataattttattgcagtcttccattacatggaaatagcatatctaatatctaggttacttgagagaccagctaatcatctctgttgcacatgtttaattggcaaaaagcaattcatgataaataaaattactgctttccatctactgggtaaaatgactattgaaatagtatgaatgtggtcagaggattatagttgagagtgaagtactatgtgtgagttatagatctctcgaattatatttatagatgcagtgtcctgcccagttttgtttgcctcctacattttactgtaaaatatttattgtcttctagccttgagcctctgagggtcagtaagtgaagtacagatagcaaaattttactacctcgttaacccttttcttaaaatattctctatctttctatgtctctttctgacatagtaatcccaaaggattgtgttactccccgtgaaagttattacttttcctttaaaaatggttttataataagactgtttaaaacctttccagtattggtacatcttggcttctggcccaaaccccaagcagaaaagaaaatggaataatggagcattgtttttccacattagtattagggcatcagattcttggtgaaacactataattaagtagttataattaaataactgttcttcatacttaggactcttaatacatttctttaagacttgtaagtataattgtaaagcttgttaactgtttatatactaaagaaaaagctttacaagataagactgaaattcagaataccacattaaagttttatctgtacagcgttgacaactctaactaaaaggattacagcccttaaaattttagcttaaggacattttaaaattgcatgagattagcaaaattattaatttaaaaccccaaagtaaattgcaaattttaaaatttatttttgactcttttatcacatgctccaatgtatgtacataagtgtctgtggcttaaataatatgttgttatttgatacatttttgtggtgcaagtaattaatgttattatttgattgttataccatatgtgcccattaaaattctttttaattaaaaatatttcaaatatgcagaaaaataataatataaatgcccttgtacccttcacatactattttgccatatttgcttctgatttttaaataaataaaatgttactcttttgtacttct

SEQ ID NO: 1600 - DNA, 400 bp, Homo Sapiens
ctgccctcccttgtttccgctgcatccagacttcctcaggcggtggctggaggctgcgcatctggggctttaaacatacaaagggattgccaggacctgcggcggcggcggcggcggcgggggctggggcgcgggggccggaccatgagccgctgagccgggcaaaccccaggccaccgagccagcggaccctcggagcgcagccctgcgccgcggagcaggctccaaccaggcggcgaggcggccacacgcaccgagccagcgacccccgggcgacgcgcggggccagggagcgctacgatggaggcgctaatggcccggggcgcgctcacgggtcccctgagggcgctctgtctcctgggctgcctgctgagccacgccgccgccgcgccgtcgccca

SEQ ID NO: 1601 - DNA, 6246 bp, Homo Sapiens
cgcccggtggcagctgtggggtctagggctcagacgggggccattttgccagaggctgcctcccggagttgggggcggcctggcggcaggctgaagctgttcttttgcctcttctgcagcttggggcttggagaggatctggaagtctgggctccatcgagccctttggagacggcaatggtttcttccaaccaccaccacctgacaaccctgcatggcggctgccccctccgcgctgcttctgctgccgccctttccagtcctctctacctatcggctccagagccgcagtcgtccttccgccccagagaccgatgatagtcgagttgggggcattatgagaggagagaaaaactactacttccgtggagctgcgggggaccacggttcctgccccactacaacttcgcctctggcctcggccctcttgatgccctcggaggcagtctcaagcagctggtctgagtctggaggcggtttgtcagggggagatgaagaggacactcggctccttcaactcctccgcactgcccgggatccttctgaggccttccaggctttgcaagctgctttgccgcggcggggcggtcgacttggcttcccccgacgcaaggaagctttgtatcgggcactgggccgagtgcttgtggaaggaggtagtgatgagaagcggctctgcttgcaacttctctcggacgttctccggggtcagggggaggcaggccagcttgaagaggcctttagcttagcacttttgcctcaactagttgtctcgttacgggaagagaatccagccctgcggaaagatgcgctgcagatccttcatatatgtctgaaacgtagtcctggagaggtgctgagaacgcttatacaacaaggactggaaagtaccgatgcccgacttagagcttccacagcactactgcttcccatcttgcttactactgaggacttgttgcttggtctggatctcaccgaggtgataatatccctagcccgaaagcttggtgatcaggagacagaagaagaatctgagacagctttctccgcacttcaacaaattggggagcgacttggccaagacaggtttcaatcttacatttctcgtctgccctctgccctgaggagacactacaatcgccgcctggagtcccagtttggaagtcaggttccttattatttggaacttgaagcctctggatttcctgaagatccccttccctgtgcagtgactctttccaacagcaatcttaaatttgggattattcctcaggagctgcattcacgattattggatcaggaagactataagaaccggacccaggccgtcgaagaactaaagcaggtgctgggaaaatttaaccctagttctactcctcattctagtcttgttggcttcattagtttgctatataatttgttagacgattctaacttcaaagtggtgcatggcacacttgaagtcctgcatttactggttattcgccttggagagcaggtacagcagttcttgggaccagttatagcagcttctgtcaaagtgctggcggacaacaagttggtgatcaaacaagaatacatgaaaatcttcctcaagctaatgaaggaagtaggacctcagcaggtgctttgtttactcctgaaacatctcaaacataagcattccagagtgagagaggaggtggtgaacatttgcatctgctccctgctgacctatcctagtgaggattttgacttgcccaaactgtcctttgatcttgccccagctcttgtagatagcaaacgcagggtacgccaagcagctttagaagcttttgccgtattggcatcatcaatgggctcaggtaaaaccagcatcctttttaaagctgtggatacagttgaactgcaagataatggagatggagtgatgaatgctgtgcaggccagattggctaggaaaaccttaccaaggctcacagagcagggatttgtggaatatgcagtactgatgccatcttctgccgggggtaggtcaaaccatttggcacatggagcagatacggactggcttttggctggtaacagaactcagagtgcacactgtcactgtggtgaccacgtgagggatagcatgcacatttatggatcttacagcccaactatctgtacccgaagggtattaagtgcaggaaaaggaaaaaataaattaccatgggaaaatgagcaacctggaatcatgggagaaaaccagacctccacttccaaggatatagagcagttttcaacatatgatttcatcccatctgcaaaattaaagctttctcaaggaatgccagtcaatgatgatttatgttttagcagaaaaagagtatcaagaaacttatttcagaatagtcgggattttaacccagattgtcttcctttatgtgctgctggtactactgggactcatcaaacaaatctttctgggaaatgtgcacaacttggattttcacaaatatgtggtaaaactggcagtgtgggttctgacttacaattcctagggacaactagcagtcatcaagaaaaagtgtatgctagcctcaattttggcagtaagacacagcaaacatttggtagtcaaacagagtgtacttcctcaaatggtcaaaatccaagtccaggagcttacatccttccatcctatcctgtctcatcacctcgaactagtccaaagcatacatctcctcttattatatctccaaagaagtctcaagataattctgttaatttctcaaattcctggcctcttaaaagcttcgaaggactatcaaagccaagtccacagaagaagcttgtcagccaaaaatcgtctgatcctacgggtagaaatcatggagaaaattctcaagaaaaacctccagttcagcttacacctgccttggtgagatcgccatcttcccgacgaggtctaaatgggacaaagcctgttcctcccataccaaggggaataagccttttgcctgataaagctgatttaagcacagtgggacacaaaaagaaagagcctgatgatatttggaagtgtgaaaaagatagtcttccaattgatctttcagaattaaatttcaaggataaagatttggatcaagaagagatgcatagctctcttaggtcccttcgtaatagtgcagctaagaaaagagcaaaactgagtggcagtactttagatcttgaaagccctgattctgcaatgaagctcgacttgacgatggactccccgtctctgtcttcctcaccaaacatcaattcttacagtgaaagtggagtttacagccaagaatcattgacttcttctctgtctacaactccccaggggaagagaataatgtcagacatatttccaacatttgggtcaaaaccttgtccaacaagactttcttctgcaaagaaaaaaatttctcatattgctgaacaaagccccagtgcagggtcatcatcaaatccacagcaaatttccagttttgacttcacaaccacaaaggctttatcagaagactcagtagtagttgttggaaaaggcgtatttggaagtttaagttcagcaccagcaacctgcagccaatcagtgatatcttctgtggaaaatggggatacattttcaattaaacaaagtattgaaccaccatcagggatttatggaagatcagtccagcaaaatatttcatcatatcttgatgttgagaatgaaaaagatgctaaagtttctatttctaaatctacttataacaagatgagacaaaagagaaaagaagagaaagaactgtttcacaataaagattgtgaaaagaaggaaaaaaattcctgggaacgaatgagacatacaggaactgagaaaatggcatctgaaagtgaaacacctactggagctatttcacagtataaagaaaggatgccttctgtcactcatagtccagaaataatggatctgtcagaactacgaccattctctaaaccagaaatagcactgacagaagccctgaggcttttggctgatgaggattgggagaagaaaattgagggactgaattttattagatgcttagctgcttttcattctgagatactgaacacaaagttgcatgaaacaaattttgcagttgttcaagaggtgaaaaatttacgttctggagtttctcgtgctgctgtggtctgtttaagtgatcttttcacttatttgaaaaagagcatggatcaagagctagataccacagtaaaagttttgttgcacaaggctggtgaatcaaatacatttataagagaagatgttgacaaagcattgagagctatggttaataatgtaactcctgcacgtgcagttgtttctcttatcaatggtggacaaaggtattatggtcgaaagatgctgttcttcatgatgtgtcatcctaactttgaaaaaatgcttgaaaagtatgtcccatctaaagatttgccatatattaaggactctgttagaaacttacagcaaaagggtttgggggagataccattagatactccttcagcaaaaggaagacgatctcatactggcagtgttggaaatacaagatcatcatctgtttctagagatgctttcaattcagctgaaagagctgtaactgaagttcgtgaagtcaccagaaaatcagtccctcgtaattccttagaaagtgctgagtaccttaaactcataactggcttattaaatgcaaaagactttcgtgatcgtattaatgggattaagcagcttttatcagatacagaaaataatcaagaccttgttgttggaaacattgtgaagatttttgatgcttttaaatctcgacttcatgattctaatagtaaagtaaatctggtggctctggaaacaatgcacaaaatgattcctctacttagagaccacttatctcctataatcaacatgctaattccagcaatagtggataacaatctgaattccaagaatccaggcatctatgcggctgctacaaatgttgttcaggcactgagtcagcatgtagacaattacttacttctacagccattttgcacaaaagctcagtttttaaatggaaaagcaaaacaggacatgacggaaaagcttgctgatattgttacggaactttatcaaaggaagccgcatgccacagagcagaaagtgttggttgttttatggcatctcttaggaaatatgacaaatagtggctctctgcctggagctggaggaaatatacgaacagccacagctaaattatcaaaagcactctttgcacagatgggtcagaatctgttaaatcaggctgcatctcaaccaccacatatcaaaaagagtttggaggaattactcgatatgacaattttaaatgaattatgaatcttcgataaaatactgtatgatgaacaaaagtgtttacatgatgacaaatggaactttctaaaagttatgttatcagtgcctgcacttcacatccagcaaattaagtcaatggctatttttatttgcagcctatgagtacacatctgtcctatatcaaccttaccacttatattcatcacataaaaacctaaaatattcatgaataattcatgaaatctgagtcacatgggatgaattcaattttaatatttttgagaaaagtcctgctcatttgcactattctatagaaactacaatttgttgccctatatgtaaaattagaattgtaattaaaaatacacattttattatgtaatcatgttctggtatgtctcatttctcagccttattttataacgtggaagtcattgaactatgttatcagaaactaagtttgtatattatttgtgaaaaacatgtatttctgaatcagtccgctaatatgattgtgcagtattagcttgcttttgctgctgtgttaatgtcatatatttgcttaccttttgggttcaattatctacataattgtgaaatttaacaagttataataaagcatgacaaccaaagttttagaaaacattaaacattttaaatgcacgtttaaaaaacgtgttgaatgtaacccccctatttttgtgtgcaaacactaaattttattgctttatgttttgacctttataaaggtgttattctgctgcccagttttgtaattctcaaaaatagtgccaggtcttctatagcttttttcagaattcatgggcttacaagtactgtatgcatctttaaaaagaaaaggaatgttataaaataaaaggatttatttcttt

SEQ ID NO: 1602 - DNA, 2076 bp, Homo Sapiens
aggttgctcagctgcccccggagcggttcctccacctgaggcagacaccacctcggttggcatgagccggcgcccctgcagctgcgccctacggccaccccgctgctcctgcagcgccagccccagcgcagtgacagccgccgggcgccctcgaccctcggatagttgtaaagaagaaagttctaccctttctgtcaaaatgaagtgtgattttaattgtaaccatgttcattccggacttaaactggtaaaacctgatgacattggaagactagtttcctacacccctgcatatctggaaggttcctgtaaagactgcattaaagactatgaaaggctgtcatgtattgggtcaccgattgtgagccctaggattgtacaacttgaaactgaaagcaagcgcttgcataacaaggaaaatcaacatgtgcaacagacacttaatagtacaaatgaaatagaagcactagagaccagtagactttatgaagacagtggctattcctcattttctctacaaagtggcctcagtgaacatgaagaaggtagcctcctggaggagaatttcggtgacagtctacaatcctgcctgctacaaatacaaagcccagaccaatatcccaacaaaaacttgctgccagttcttcattttgaaaaagtggtttgttcaacattaaaaaagaatgcaaaacgaaatcctaaagtagatcgggagatgctgaaggaaattatagccagaggaaattttagactgcagaatataattggcagaaaaatgggcctagaatgtgtagatattctcagcgaactctttcgaaggggactcagacatgtcttagcaactattttagcacaactcagtgacatggacttaatcaatgtgtctaaagtgagcacaacttggaagaagatcctagaagatgataagggggcattccagttgtacagtaaagcaatacaaagagttaccgaaaacaacaataaattttcacctcatgcttcaaccagagaatatgttatgttcagaaccccactggcttctgttcagaaatcagcagcccagacttctctcaaaaaagatgctcaaaccaagttatccaatcaaggtgatcagaaaggttctacttatagtcgacacaatgaattctctgaggttgccaagacattgaaaaagaacgaaagcctcaaagcctgtattcgctgtaattcacctgcaaaatatgattgctatttacaacgggcaacctgcaaacgagaaggctgtggatttgattattgtacgaagtgtctctgtaattatcatactactaaagactgttcagatggcaagctcctcaaagccagttgtaaaataggtcccctgcctggtacaaagaaaagcaaaaagaatttacgaagattgtgatctcttattaaatcaattgttactgatcatgaatgttagttagaaaatgttaggttttaacttaaaaaaaattgtattgtgattttcaattttatgttgaaatcggtgtagtatcctgaggtttttttccccccagaagataaagaggatagacaacctcttaaaatatttttacaatttaatgagaaaaagtttaaaattctcaatacaaatcaaacaatttaaatattttaagaaaaaaggaaaagtagatagtgatactgagggtaaaaaaaaaattgattcaattttatggtaaaggaaacccatgcaattttacctagacagtcttaaatatgtctggttttccatctgttagcatttcagacattttatgttcctcttactcaattgataccaacagaaatatcaacttctggagtctattaaatgtgttgtcacctttctaaagctttttttcattgtgtgtatttcccaagaaagtatcctttgtaaaaacttgcttgttttccttatttctgaaatctgttttaatatttttgtatacatgtaaatatttctgtattttttatatgtcaaagaatatgtctcttgtatgtacatataaaaataaattttgctcaataaaattgtaagcttaaaaaaaaaaaaaaaaaactcgagactagtgc

SEQ ID NO: 1603 - DNA, 443 bp, Homo Sapiens
  misc_feature (238)..(238): n is a, c, g, or t
  misc_feature (333)..(333): n is a, c, g, or t
  misc_feature (337)..(337): n is a, c, g, or t
gctccaagaaggggaaaaaaatgaagattttgatacttggtatttttctgtttttatgtagtaccccagcctgggcgaaagaaaagcattattacattggaattattgaaacgacttgggattatgcctctgaccatggggaaaagaaacttatttctgttgacacggaacattccaatatctatcttcaaaatggcccagatagaattgggagactatataagaaggccctttatcntcagtacacagatgaaacctttaggacaactatagaaaaaccggtctggttgggggtttttaggccctattatcaaagctgaactggagataaangttntatgtacacttaaaaaaccttgcctctaggccctacacctttcattccatggaataactactatagggacatgaggggggcatctaccctgatacacaccagattt

SEQ ID NO: 1604 - DNA, 1851 bp, Homo Sapiens
tggagcccaggccagtctgtggacctttttcttttgattttcacttagctcactcactgaggatagtattattgtatttggttggctaccaaactattaatgatcttaaaattgactttttttctcttagacccagacacatgcatgaaaatactcttcagatccaagagtactcagtcatgcaatgtgagtgtgtaatcacttaacaagtatattgaacaccaagcagcagtggctcatgcctgtaatccagcactttgggaggacggtcatcttgaggtagagttcaagaccagcctgtgcaacatgtgaaaactcatctacaataaatacaaaattagccagacgtggtggtgcatgacctgtgatgtcgctactccacaggcggagacaggagaatcacttgagccgggaagcgagaggttgcagtgagcccagattacgccattgcactccagtctgggtgacagagcaagactctgtctcaaaaaaaaaaaaaaaaaaaaaaagaagaagaagatgtattgaatcagcagatactcagacacaagtgtatgttttcaactttatcaatatcaatatatcaatatcaacaccatgttgacatggaacactaaagacccaacagggaggcaattaacaagcatttgaggaggaatagacctcacctattccaaccacacggccaactctggcagccaaaacgtgggcaacagcatcctaccagcttctatttattgttgcattgctatggtgctgatcccctttgtatccatggtatttagaacctcggggattgggctggtgaccattctttagatctgagaacagaaggagcagaggaacgttgagcaactctagaggggtgtgtatgtggcagtttagggacagtttgagctttcaggtagaggcagcctagggaaactggcataaagcagtttctttctctattccatggaagttgcatgcttgtgaaaagggccagctatcttctgtcttgccatacaagtgggcagacgtgcctgggaataccaggtgggttaaggaatcatgcccttaaccttaaggtggagggcagcaagggggagagagagagcaagagagagaagagattggggaggaggggagaggaggggaggagatctgcaagaaagaggtcaaggtccagaaaaagagagagagatctgcaaggaggcaaggttccaaaatctatgggctgggacagcaaagatgtggcctacgaagagaaaggtctggagaatcagaaggccttcaaatggtggttccaaatccctccagcaaagcccatccatctttagagctcacccgtctccagctacaccccccacccctcccggcccagatcaggcagcggggtcgccctctccaggactctcaaggcagctaaggctggaggcgccggcgagcctggagagggaggagttcactaaattgtgttggatggaaggcgtcgaggaccggaggagatgtaatccgatgtggggaaggcggacggggctacgaggaaaaaagagggggcaatgtacactcagccttttcatcactcggcggggagatggatggttttccggaccggcgtcccagcgccccggttagctatagggagacgtcagagcgctctggtccgcgatagaagagccccccagcccccccgcccgggcttccatataaagtaggggccctagtggaggccgcagcagtagcaccagcggctgcggcggcggagctcctccgaggtccgggtcaccagtctctgctcttcccagcctctccggcgcgctccaagggcttcccgtcgggaccatgcgcggccgtgagctcccgctggtc

SEQ ID NO: 1605 - DNA, 617 bp, Homo Sapiens
ttgaatttaggtgacactatagaagagctatgacgtcgcatgcacgcgtacgtaagcttggatcctctagagcggccgcctactactactaaattcgcggccgcgtcgacggtggcatcagggttctcatcacaggcgatgacctctggagccatccagtagggagtcccaatgaaagtgttccgtctgcccacggtgcggtccagctgagcactcaccccaaaatccactagcttgacctcagcattctctgtcagaagcacattctgccccttgatgtctcgatggatcaccttgtgggcatggagatgggccagacccctgaggatctccctgcagatataggcgatacagtcctccttcagggcgttgccttttgtgttctttaccaggtcagtcactgaaccagcaccacagaactccatcaccagccagagctggtcatcgtttcccggggggctcttcttgatgaaggctccgtagtaggtggcgatgttggtcgacgcggccgcgaatttagtagtagtagtcgacccgggaattccggaccggtacctgcaggcgtaccagctttccctatagtgagtcgtattagagcttggcgtaatcatggtcat

SEQ ID NO: 1606 - DNA, 420 bp, Homo Sapiens
cacgaggactactgcgcctgcttgaccttctgggagccagcggagccttcacaggaaacgacgcgcgtggaggatgccacagagagggaggaagagggggatgagggaggccagacccacctgtctcccacagcacctgccccatctgcccagctgtttgcaccgaagacgctggtactggtgtcgcgactcgaccacacggaggtgttcaggaacagccttggcctcatctatgccatccacgtggagggcctgaatgtgtgcctggagaacgtgattgggaacctgctgacgtgcactgtgcccctggctgggggctcgcagaggacgatctctttgggggctggtgaccggcaggtcatccagactccactggccgactcgctgcccgtcagccgctgcagcgtggccctgctcttc

SEQ ID NO: 1607 - DNA, 507 bp, Homo Sapiens
  misc_feature (3)..(3): n is a, c, g, or t
cgntttacattaaggaggtgtagataagggtgttagctccttcatcagtctgagggtagcaaggacagttccactgcagaagcagtggcagagaggctttcagttgcccctggaggctctctccagggagtggctgagttgctactggctcaacagttctggtagggggggttaggtagaggtccaggcctgcaagacttgcctagtgagaagatataggaatgggaacccaggtaacagtctggccacttttccatagggctgctgcagtatgcccagggcccgctccagtctctagtagcctcagattttccagtacctggagttatcatcagtgaagcctgtgaaacagcaaagatggcagcctaccgctccctttggaagctttgccctagggaggtatgaatgaacttgttgctggcccaaacacacctgtaggaggtggctggagaccccagtttggaggttttgcccagcgaggaggaatggcattgggaaagtgctcaa

SEQ ID NO: 1608 - DNA, 468 bp, Homo Sapiens
cctcggatgtttaatcgataagcttgattggggaggggggtcgtggtgagaagcgtcaatcaggagtagaaattggtatgcttagaagcagattctaaagcagttctcttcagaaatcttttttcataccacttgataagcatcttgaaacaccatggctgtagcttcagtaaaatgggtgatgttaaagagaactatctgaaacatttatttccagtccattttggagctttatattgtgtttgtcataaatctacgtattctcctctaccagatgactataattgcaacgtagagcttgctctgacttctgatggcaggacaatagtatgctaccacccttctgtggacattccatatgaacacacaaaacctatcccccggccttcccaatcgaattcctgcagcccgggggatccactagttctagagcggccgccaccgcggtggagctccaacttttgttcc

SEQ ID NO: 1609 - DNA, 379 bp, Homo Sapiens
  misc_feature (324)..(324): n is a, c, g, or t
gtcatcacttttcaaggtgtcttgacttctacacaaagtatatatattcaggactttaaaaaatagcagtacacatttaacagtagcgaattacaccaaaatgatttactttgagatttgaataatttgcatagcagtaaaatgtgttttgtgtaacatacaaatagaaaaatgacccagtatcttaattgatacttactagagagtatcagaattacccagcagctcttacagaatgccataaattctttaagactaaatattgaaatcaattatttgaagtaatgtttctgatttactgttaaaagttgctgagctcagttnttggagatatcatttctgcctgcctgttcccttatgacagtgaggccttcttggc

SEQ ID NO: 1610 - DNA, 2309 bp, Homo Sapiens
  misc_feature (2255)..(2256): n is a, c, g, or t
tttgtcttcaagagtttttcgagaccagggaagaaggaaggaaatgcccagtttgatcgtgggagtggtaaaatgataaagtagatctgggtggggtttgtagcaccagagcataatggagaaacaccttggttttgtaatcaagactggatctaccagtgacttgctgaataacttcggtgattcctttctcttcttgggtctcactgtatttcaaaacatgaagaatttcattgtaatgttacctaataagtgagccagcacttctactctgtgagaaagtaggaaaactcttgggacaatcagagatgatgtgatgtaatgtccattagttcttcctgtgaataatcctgagggaaagcccccaggtccctcccagaatggggtggatatttcccaatacagctaaggaattatcccttgtaaataccacagacccgccctggagccaggccaagctggactgcataaagattggtatggccttagctcttagccaaacaccttcctgacaccatgagggccagcagcttcttgatcgtggtggtgttcctcatcgctgggacgctggttctagaggcagctgtcacgggaggtgagtgaacaggtgacctgctgggctgggttggactaaggggagaccctctggacaccctgggccaggacagggagcactactgaagcagtaggcagcactggagcccagatttcagctttctgttctttgccatcatattcagaaaaaataggactttggctggtggactccacgtgctttccacctcagtgactgagatatcaggactgtttgtggaagtaatgttggtatgtggccttggcctcagatgtcaatacctgtgcagaatgtgcaataaaataatgaactccaggattttaaaccttgggtgtggacacagtccccgtttctctgccccataaaagcactggagtaatcagtactctaaaaggaggttaagaaacaacaagccttcaggaatcatgttgtttgaggacccccattttataaggagggaaccaaaaatgtagaaatgagtgagcaattgccaaggtaattcccagagccaggatggggctcaagtctcctagtatgtggctcagggttctttcctactccaatgcacttcctaacaaatgacaatgtgtcctcttcactgctgggtgtcaccccagtctgaccactgctcctgagagacttggagtggaggaagggggaagaaacaaatactcaagggaactctggtcctgtagaccaccccaaaaaaggaagagccttccaagagtgtagctcccagaggtgtaccttccctactcaggccatggtttgaggatgctgcagtaagcagtggatggacccagacccagaggaaagacatggcagctgaagcagaggcttactgggtataaatgtgggctcgtttcttcttttaacagttcctgttaaaggtcaagacactgtcaaaggccgtgttccattcaatggacaagatcccgttaaaggacaagtttcagttaaaggtcaagataaagtcaaagcgcaagagccagtcaaaggtccagtctccactaagcctggctcctgccccattatcttgatccggtgcgccatgttgaatccccctaaccgctgcttgaaagatactgactgcccaggaatcaagaagtgctgtgaaggctcttgcgggatggcctgtttcgttccccagtgaggtgagcactagctggagaacgaggagacccctgaagacacaaaagaaggctgagcggtggggaagcatcccaggttggtgggagggaggttgtgggaggtgacagaaagactgggagactgaggggtctgagaggctataaccagagtgcctagaaggatgatctgtcttcctcactgcctctgagtgctttgatgtgctgactctcacctctgatactcttctcttccacagagggagccggtccttgctgcacctgtgccgtccccagagctacaggccccatctggtcctaagtccctgctgcccttccccttcccacactgtccattcttcctcccattcaggatgcccacggctggagctgcctctctcatccactttccaataaagacttccttctgctccacttgtttctggttcctatgacttctgggctcctggatgctttggggaaatggatgtagaattgggacttcttctctccagtgaagaggggaaacggtcccatggtgaaagagagcaggnnggaggaaacaaggaggcacatgctagggcttcatattacaatccaataatcag

SEQ ID NO: 1611 - DNA, 3794 bp, Homo Sapiens
ccaagttctacctcatgtttggaggatcttgctagctatggccctcgtactcggctccctgttgctgctggggctgtgcgggaactccttttcaggagggcagccttcatccacagatgctcctaaggcttggaattatgaattgcctgcaacaaattatgagacccaagactcccataaagctggacccattggcattctctttgaactagtgcatatctttctctatgtggtacagccgcgtgatttcccagaagatactttgagaaaattcttacagaaggcatatgaatccaaaattgattatgacaagccagaaactgtaatcttaggtctaaagattgtctactatgaagcagggattattctatgctgtgtcctggggctgctgtttattattctgatgcctctggtggggtatttcttttgtatgtgtcgttgctgtaacaaatgtggtggagaaatgcaccagcgacagaaggaaaatgggcccttcctgaggaaatgctttgcaatctccctgttggtgatttgtataataataagcattggcatcttctatggttttgtggcaaatcaccaggtaagaacccggatcaaaaggagtcggaaactggcagatagcaatttcaaggacttgcgaactctcttgaatgaaactccagagcaaatcaaatatatattggcccagtacaacactaccaaggacaaggcgttcacagatctgaacagtatcaattcagtgctaggaggcggaattcttgaccgactgagacccaacatcatccctgttcttgatgagattaagtccatggcaacagcgatcaaggagaccaaagaggcgttggagaacatgaacagcaccttgaagagcttgcaccaacaaagtacacagcttagcagcagtctgaccagcgtgaaaactagcctgcggtcatctctcaatgaccctctgtgcttggtgcatccatcaagtgaaacctgcaacagcatcagattgtctctaagccagctgaatagcaaccctgaactgaggcagcttccacccgtggatgcagaacttgacaacgttaataacgttcttaggacagatttggatggcctggtccaacagggctatcaatcccttaatgatatacctgacagagtacaacgccaaaccacgactgtcgtagcaggtatcaaaagggtcttgaattccattggttcagatatcgacaatgtaactcagcgtcttcctattcaggatatactctcagcattctctgtttatgttaataacactgaaagttacatccacagaaatttacctacattggaagagtatgattcatactggtggctgggtggcctggtcatctgctctctgctgaccctcatcgtgattttttactacctgggcttactgtgtggcgtgtgcggctatgacaggcatgccaccccgaccacccgaggctgtgtctccaacaccggaggcgtcttcctcatggttggagttggattaagtttcctcttttgctggatattgatgatcattgtggttcttacctttgtctttggtgcaaatgtggaaaaactgatctgtgaaccttacacgagcaaggaattattccgggttttggatacaccctacttactaaatgaagactgggaatactatctctctgggaagctatttaataaatcaaaaatgaagctcacttttgaacaagtttacagtgactgcaaaaaaaatagaggcacttacggcactcttcacctgcagaacagcttcaatatcagtgaacatctcaacattaatgagcatactggaagcataagcagtgaattggaaagtctgaaggtaaatcttaatatctttctgttgggtgcagcaggaagaaaaaaccttcaggattttgctgcttgtggaatagacagaatgaattatgacagctacttggctcagactggtaaatcccccgcaggagtgaatcttttatcatttgcatatgatctagaagcaaaagcaaacagtttgcccccaggaaatttgaggaactccctgaaaagagatgcacaaactattaaaacaattcaccagcaacgagtccttcctatagaacaatcactgagcactctataccaaagcgtcaagatacttcaacgcacagggaatggattgttggagagagtaactaggattctagcttctctggattttgctcagaacttcatcacaaacaatacttcctctgttattattgaggaaactaagaagtatgggagaacaataataggatattttgaacattatctgcagtggatcgagttctctatcagtgagaaagtggcatcgtgcaaacctgtggccaccgctctagatactgctgttgatgtctttctgtgtagctacattatcgaccccttgaatttgttttggtttggcataggaaaagctactgtatttttacttccggctctaatttttgcggtaaaactggctaagtactatcgtcgaatggattcggaggacgtgtacgatgatgttgaaactatacccatgaaaaatatggaaaatggtaataatggttatcataaagatcatgtatatggtattcacaatcctgttatgacaagcccatcacaacattgatagctgatgttgaaactgcttgagcatcaggatactcaaagtggaaaggatcacagatttttggtagtttctgggtctacaaggactttccaaatccaggagcaacgccagtggcaacgtagtgactcaggcgggcaccaaggcaacggcaccattggtctctgggtagtgctttaagaatgaacacaatcacgttatagtccatggtccatcactattcaaggatgactccctcccttcctgtctatttttgttttttacttttttacactgagtttctatttagacactacaacatatggggtgtttgttcccattggatgcatttctatcaaaactctatcaaatgtgatggctagattctaacatattgccatgtgtggagtgtgctgaacacacaccagtttacaggaaagatgcattttgtgtacagtaaacggtgtatataccttttgttaccacagagttttttaaacaaatgagtattataggactttcttctaaatgagctaaataagtcaccattgacttcttggtgctgttgaaaataatccattttcactaaaagtgtgtgaaacctacagcatattcttcacgcagagattttcatctattatactttatcaaagattggccatgttccacttggaaatggcatgcaaaagccatcatagagaaacctgcgtaactccatctgacaaattcaaaagagagagagagatcttgagagagaaatgctgttcgttcaaaagtggagttgttttaacagatgccaattacggtgtacagtttaacagagttttctgttgcattaggataaacattaattggagtgcagctaacatgagtatcatcagactagtatcaagtgttctaaaatgaaatatgagaagatcctgtcacaattcttagatctggtgtccagcatggatgaaacctttgagtttggtccctaaatttgcatgaaagcacaaggtaaatattcatttgcttcaggagtttcatgttggatctgtcattatcaaaagtgatcagcaatgaagaactggtcggacaaaatttaacgttgatgtaatggaattccagatgtaggcattccccccaggtcttttcatgtgcagattgcagttctgattcatttgaataaaaaggaacttgg

SEQ ID NO: 1612 - DNA, 443 bp, Homo Sapiens
tttctggtgggagaagacattttattgttcctgggtctctggaggcccattggtggggctgggtcactggctgcccccggaacagggcgctgctccatggctctgcttgtggtagtctgtggctatgtctcccagcaaggacagaaactcagaaaaatcaatcttcttatcctcattcttgtcctttttctcaaagacatcggcgaggtaatttgtgccctttttgtcacaggcactaaggaagttggggaagttctccttcatcatcgtcagcaggcttggcttgtcaatcttgtcatcacgtctggtgtatttgtgaaacatgtcgatcatgcctattatggacctctcagcttgagtgttgctcatctttgctttcaaaaagcttcccaaagcagatctttcagccagtagtcagtctgggctggcctgcaccccaagcc

SEQ ID NO: 1613 - DNA, 623 bp, Homo Sapiens
cagatagcccaccaggggtggggagggtgagcagggacagggcgcccccactgacttgggaccctcctcctccaggcccacacctcagcacccaggacatctgggccccccgcccccagcgctgtctagtttggttgcctggccgtcactcccagcctggttcccactcctgtgtcttctggggatggccctcaaggacagcatgttgacacatcaggcccagctctatcactggggagggagataggctgccagggacagaaagggctctttgagaaggccactctgcctggagtgggggcgccgggcactgtcccccaaggtcgcggcagaggagataggggtctgtcctgcacaaacaccccaccttccactcggctcacttaaggcaggcagcccagcccctggcagcacccacgatgcgggacctgcctctcaccagcctggccctagtgctgtctgccctgggggctctgctggagactgaggccctcagagcagaggagccagctgtgggcaccagtggcctcatcttccgagagacttggactggcctccaggcatcccacaagagcctctgtgcctggtggcactggggcgggacagcaatggcagcagctccc

SEQ ID NO: 1614 - DNA, 5190 bp, Homo Sapiens
tgggaatccaactgaagagcagccagaggagagctgaagagaggagggggaggccgatgacctgggctctgggcctctgaaggtctggcgtattctgacaggacacagtgagcatctgtagaggagaggcttgaaataaaggaggagcacgaatattccctggatttctggaggcctgctttaaggctggccagttctgcaagaaaggcaaggaggaggagactggctcacacctctggaggacccccttctgtcagctgtggggcttgacactacttgaacaagaaaaggagggggaaactgcaccacataagtgaagatccacctccagtggctgctctgctggtggtggggttgctgctgacaaccaccctcaacgggtctgcacccatccaggaaatctctgtcttcctcaagcttggttgtgcctgttctacactctatctgtattattgaattactgactgagactgtgtttgggaaggaggctgagtgactactggactggatattgactctaactcttgtttccaagcttatatcctcaatcacctaaagatcagagtgtgaagaaacaaacctgtgacagatctgtggttgaggtttagactgggggaggagtatagtactggactttctttgtaacttgtaccatgactggggcagagattgagtctggtgcccaggtcaagcctgaaaagaagcctggggaagaggttgtaggtggggctgagatagagaatgatgtccctctggtggtcagacccaaggttaggacccaggcccagataatgcctggggcaaggcccaagaataagtccaaggttatgcctggagcaagcaccaaagttgagacaagtgcagtgggtggggcacgccctaagagtaaggccaaggcaatacctgtttcacgatttaaggaagaagcccagatgtgggctcagcccaggtttggtgctgaaagattgtctaagacagagagaaactcccagaccaatatcatagcctctccacttgtcagtactgattctgtcttggttgctaaaacaaagtacctgtctgaggatagagaactggttaatacagacactgagagctttcctagaaggaaggcccattaccaagcaggattccagccttcttttaggtcaaaggaggagaccaatatggggtcctggtgctgtcctaggcctacatccaaacaagaagcctctcctaattctgatttcaaatgggtagacaaatctgtgagttccttgttctggagtggagatgaggtcactgcaaaatttcatcctgggaatagggtaaaagacagtaacagatccatgcacatggccaatcaagaggctaataccatgtctaggtcccaaactaaccaggagctctatattgcatctagttctggttctgaggatgagtctgttaagacaccctggttctgggccagagataaaaccaatacctggtctgggcccagggaagatcccaatagcaggtccaggtttaggtctaagaaagaagtctatgttgaatcaagttctggatctgagcatgaagaccatttggagtcctggtttggggctggaaaggagggcaaattcaggtccaaaatgagagctgggaaggaggccaataacagggccaggcacagggccaagcgagaagcttgcattgatttcatgcctgggtctatagatgtaattaaaaaagagtcctgtttctggcctgaagaaaatgctaataccttttcaaggcccatgatcaagaaagaggccagggccagagcaatgacaaaggaagaggccaaaaccaaggcccgagccagggccaagcaagaagccaggtcagaggaggaagccctcattgggacctggttctgggctacagacgagtccagcatggcagatgaagccagcatagagtccagtctacaagtggaggatgagtccataattgggagttggttctggactgaagaagaggccagtatggggactggggctagcagtaaatccagaccaaggactgatggggagcgtattggtgattccttatttggggctagggaaaagaccagtatgaaaactggggctgaggccacctctgaatctatactagcagctgatgatgaacaggtcattattggttcctggttctgggctggtgaagaggtcaaccaagaggctgaggaagagaccatttttgggtcgtggttctgggtcattgatgcggccagtgtggaatctggtgttggggtcagctgtgagtccaggacaaggtctgaggaagaagaggtcattggtccctggttttggtctggagaacaagttgatatagaggctggaatcggagaagaggccaggccaggagctgaagaagagacaatattcgggtcctggttttgggctgaaaaccagacctatatggattgtagggctgaaactagctgtgacaccatgcaaggggctgaggaggaggagcccattattgggtcctggttttggaccagagtagaagcttgtgtggagggtgatgtcaacagcaagtctagcctggaggacaaggaagaggccatgataccatgttttggagccaaagaagaggtcagtatgaagcatgggactggtgtcagatgcagatttatggcaggggctgaggagaccaataataagtcttgcttctgggcagaaaaagaaccctgtatgtatcctgccggtggaggaagttggaagtctaggccagaggaggaagaggacattgtcaattcgtggttctggtccagaaaatacacaaagccagaggccattatagggtcctggttatgggctacagaagagagtaatatagatgggactggagaaaaggccaagttactgactgaagaggagaccataatcaattcctggttctggaaagaagatgaagccatttcagaggctactgacagagaagagtccaggccagaagctgaggagggggacattgttggttcttggttctgggctggagaagaggacagactagagccagctgctgagactagagaagaagacaggctagcagctgagaaagaaggtattgttgggtcctggtttggggccagagaagagaccattagaagagaggctgggtcttgcagcaaatccagtcctaaagctgaagaggaagaagtcattattgggtcctggttctgggaagaagaggccagtccggaggcagtggcaggagtcggctttgagtcaaagcctgggactgaggaggaagaaatcactgttgggtcctggttctggcctgaagaagaagccagtatacaggctggatctcaggcagtagaggaaatggagtcagagactgaagaggaaaccatttttgggtcctggttctgggatggaaaagaagtcagtgaagaagcaggaccatgctgtgtatccaagccagaggatgatgaagagatgattgttgagtcctggttctggtctagagacaaagccattaaggaaactggaactgtggccacctgtgagtccaagccagaaaatgaggaaggggccattgttgggtcttggtttgaggctgaagatgaggtagataacaggactgacaatggaagcaactgtgggtccaggacattagctgatgaagatgaggccatagtggggtcctggttctgggcaggagatgaggcccattttgaatcaaatcctagccccgtgttcagggccatttgcaggtccacgtgttcagttgaacaggagcctgatccttcacgcaggcctcagagttgggaggaggtcactgttcagttcaagcctggtccatggggtagggtcggcttcccatctataagcccctttagatttccgaaagaggcagcatctttattctgtgaaatgtttgggggcaaacccaggaacatggtacttagcccagaaggggaagatcaggaatctttgcttcagcctgatcagcctagtcctgagttcccatttcagtatgatccttcctacaggtcagtccaggaaattcgagagcatcttagggccaaggagagtacagagcctgagagttcatcctgtaactgcatacaatgtgagctgaaaattggttctgaagagtttgaagaactccttttattaatggaaaaaattcgggatccttttattcatgaaatatctaaaatcgcaatgggtatgagaagtgcttctcaatttacccgagatttcattcgagattcaggtgttgtctcacttattgaaaccttgcttaattatccgtcctcccgagttagaacaagttttttggaaaatatgattcgcatggccccaccttatccgaatctaaacataattcagacatacatatgtaaagtgtgtgaggaaacccttgcttatagcgtggattccccggaacagctgtctggaataaggatgattagacatctcactactactactgactatcacacactggttgccaattatatgtctgggtttctctccttattagctacaggcaatgccaaaacaaggtttcatgttttgaaaatgctactgaatttgtctgaaaatcttttcatgacaaaagaactactcagtgctgaagcagtgtcagaatttataggcctctttaacagggaagagacaaatgacaatattcaaattgttcttgcaatatttgagaatattggcaacaatatcaaaaaagaaacagtgttctctgatgatgatttcaatattgagccgcttatttctgcattccacaaagttgagaaatttgctaaggaactgcaaggcaaaacagacaatcaaaatgaccctgaaggggaccaagaaaattagtaatggttaattgctggcctcagattgtccttatgttcctgagttatgatccttgagtaatgctttgattttaatagttggttctgtgttgcaacatatatctttagtgctgacactaactttgtccaactctgtctgtaagctggagcatttttctgatgccagctgaatattagagctgaaaacacatttgttgatatttgtcttgtccacattgtgatgttcagtatttgagcttatagtgaactgagcaatcataaataagccacccttctgattgtcgttctactgtatatatatatatatttgagtgttgtttgtgtttcaataaagtcctatgttaaagttg

SEQ ID NO: 1615 - DNA, 536 bp, Homo Sapiens
  misc_feature (228)..(228): n is a, c, g, or t
  misc_feature (287)..(287): n is a, c, g, or t
  misc_feature (365)..(365): n is a, c, g, or t
cagaaatgtcactggcagtgcctctgcccaaatggagtttgcagacatgtctgggaaagagaaggagaaaagccccactgctttttgattacactgtagcactgacccatggagtgagcctggcaggaaggtgccaggacctgttctctccacaggacccagctccagatggccaaagagagcagaggcacatgtgaaatgcaatttagagcccactcactgcctgtngctgaacagtcaaaacatgctataccaaagcaagtatgatgtaaagaaattggaaattnttagactctggaatgtttctgtattatcagatttatgctctccaaagaaaccacgagtttggcttatccatgcttaanttgattaacgtcgacagatggtgacataaaggacacccatgccatttcacctccacgctttagtggttatagcacagggacgatctgcttttttgaaatgttaaggacatatttttcagttactgctgagtgaagaaaggacatagctccccctcattccctgcgtaagaa

SEQ ID NO: 1616 - DNA, 418 bp, Homo Sapiens
cagttcacgtttctggaagagcccataaaacagaaacagtataaaccatagtgccattcattatcttacccagaagtttaacggtcatattttaacatcaaatagggactcagtgttctgagttccctgctcgtctcagagtcttcaatccaccccccaccccaccggaacaagccgtttctcaagtgagctctttaaggccaaggcactgtgggctccaggacctccagcaatggccaggctgggcttgctgcagaggagcacgacgggcaccagcagatgtggccccgtgtgacccctcagccttgctgtcctgcctgcaaccaggggctctccacggagctctgacgaagacatcagtgagacccgccgcatctccaggcagcacccctgctttccggcaggacggggctgtcag

SEQ ID NO: 1617 - DNA, 4597 bp, Homo Sapiens
cgacattttaactgaactgcgggataaagtgaaatctttccgtgcagctctacgagaggaggaaattgttcctcgtctgataagacaacagtggagaaaggacgcatgctgtttcttagggacacggctgacttccagatatgaccatgtatttgtggcttaaactcttggcatttggctttgcctttctggacacagaagtatttgtgacagggcaaagcccaacaccttcccccactgatgcctaccttaatgcctctgaaacaaccactctgagcccttctggaagcgctgtcatttcaaccacaacaatagctactactccatctaagccaacatgtgatgaaaaatatgcaaacatcactgtggattacttatataacaaggaaactaaattatttacagcaaagctaaatgttaatgagaatgtggaatgtggaaacaatacttgcacaaacaatgaggtgcataaccttacagaatgtaaaaatgcgtctgtttccatatctcataattcatgtactgctcctgataagacattaatattagatgtgccaccaggggttgaaaagtttcagttacatgattgtacacaagttgaaaaagcagatactactatttgtttaaaatggaaaaatattgaaacctttacttgtgatacacagaatattacctacagatttcagtgtggtaatatgatatttgataataaagaaattaaattagaaaaccttgaacccgaacatgagtataagtgtgactcagaaatactctataataaccacaagtttactaacgcaagtaaaattattaaaacagattttgggagtccaggagagcctcagattattttttgtagaagtgaagctgcacatcaaggagtaattacctggaatccccctcaaagatcatttcataattttaccctctgttatataaaagagacagaaaaagattgcctcaatctggataaaaacctgatcaaatatgatttgcaaaatttaaaaccttatacgaaatatgttttatcattacatgcctacatcattgcaaaagtgcaacgtaatggaagtgctgcaatgtgtcatttcacaactaaaagtgctcctccaagccaggtctggaacatgactgtctccatgacatcagataatagtatgcatgtcaagtgtaggcctcccagggaccgtaatggcccccatgaacgttaccatttggaagttgaagctggaaatactctggttagaaatgagtcgcataagaattgcgatttccgtgtaaaagatcttcaatattcaacagactacacttttaaggcctattttcacaatggagactatcctggagaaccctttattttacatcattcaacatcttataattctaaggcactgatagcatttctggcatttctgattattgtgacatcaatagccctgcttgttgttctctacaaaatctatgatctacataagaaaagatcctgcaatttagatgaacagcaggagcttgttgaaagggatgatgaaaaacaactgatgaatgtggagccaatccatgcagatattttgttggaaacttataagaggaagattgctgatgaaggaagactttttctggctgaatttcagagcatcccgcgggtgttcagcaagtttcctataaaggaagctcgaaagccctttaaccagaataaaaaccgttatgttgacattcttccttatgattataaccgtgttgaactctctgagataaacggagatgcagggtcaaactacataaatgccagctatattgatggtttcaaagaacccaggaaatacattgctgcacaaggtcccagggatgaaactgttgatgatttctggaggatgatttgggaacagaaagccacagttattgtcatggtcactcgatgtgaagaaggaaacaggaacaagtgtgcagaatactggccgtcaatggaagagggcactcgggcttttggagatgttgttgtaaagatcaaccagcacaaaagatgtccagattacatcattcagaaattgaacattgtaaataaaaaagaaaaagcaactggaagagaggtgactcacattcagttcaccagctggccagaccacggggtgcctgaggatcctcacttgctcctcaaactgagaaggagagtgaatgccttcagcaatttcttcagtggtcccattgtggtgcactgcagtgctggtgttgggcgcacaggaacctatatcggaattgatgccatgctagaaggcctggaagccgagaacaaagtggatgtttatggttatgttgtcaagctaaggcgacagagatgcctgatggttcaagtagaggcccagtacatcttgatccatcaggctttggtggaatacaatcagtttggagaaacagaagtgaatttgtctgaattacatccatatctacataacatgaagaaaagggatccacccagtgagccgtctccactagaggctgaattccagagacttccttcatataggagctggaggacacagcacattggaaatcaagaagaaaataaaagtaaaaacaggaattctaatgtcatcccatatgactataacagagtgccacttaaacatgagctggaaatgagtaaagagagtgagcatgattcagatgaatcctctgatgatgacagtgattcagaggaaccaagcaaatacatcaatgcatcttttataatgagctactggaaacctgaagtgatgattgctgctcagggaccactgaaggagaccattggtgacttttggcagatgatcttccaaagaaaagtcaaagttattgttatgctgacagaactgaaacatggagaccaggaaatctgtgctcagtactggggagaaggaaagcaaacatatggagatattgaagttgacctgaaagacacagacaaatcttcaacttatacccttcgtgtctttgaactgagacattccaagaggaaagactctcgaactgtgtaccagtaccaatatacaaactggagtgtggagcagcttcctgcagaacccaaggaattaatctctatgattcaggtcgtcaaacaaaaacttccccagaagaattcctctgaagggaacaagcatcacaagagtacacctctactcattcactgcagggatggatctcagcaaacgggaatattttgtgctttgttaaatctcttagaaagtgcggaaacagaagaggtagtggatatttttcaagtggtaaaagctctacgcaaagctaggccaggcatggtttccacattcgagcaatatcaattcctatatgacgtcattgccagcacctaccctgctcagaatggacaagtaaagaaaaacaaccatcaagaagataaaattgaatttgataatgaagtggacaaagtaaagcaggatgctaattgtgttaatccacttggtgccccagaaaagctccctgaagcaaaggaacaggctgaaggttctgaacccacgagtggcactgaggggccagaacattctgtcaatggtcctgcaagtccagccttaaatcaaggttcataggaaaagacataaatgaggaaactccaaacctcctgttagctgttatttctatttttgtagaagtaggaagtgaaaataggtatacagtggattaattaaatgcagcgaaccaatatttgtagaagggttatattttactactgtggaaaaatatttaagatagttttgccagaacagtttgtacagacgtatgcttattttaaaattttatctcttattcagtaaaaaacaacttctttgtaatcgttatgtgtgtatatgtatgtgtgtatgggtgtgtgtttgtgtgagagacagagaaagagagagaattctttcaagtgaatctaaaagcttttgcttttcctttgtttttatgaagaaaaaatacattttatattagaagtgttaacttagcttgaaggatctgtttttaaaaatcataaactgtgtgcagactcaataaaatcatgtacatttctgaaatgacctcaagatgtcctccttgttctactcatatatatctatcttatatacttactattttacttctagagatagtacataaaggtggtatgtgtgtgtatgctactacaaaaaagttgttaactaaattaacattgggaaatcttatattccatatattagcatttagtccaatgtctttttaagcttatttaattaaaaaatttccagtgagcttatcatgctgtctttacatggggttttcaattttgcatgctcgattattccctgtacaatatttaaaatttattgcttgatacttttgacaacaaattaggttttgtacaattgaacttaaataaatgtcattaaaataaataaatgcaatatgtattaatattcattgtataaaaatagaagaatacaaacatatttgttaaatatttacatatgaaatttaatatagctatttttatggaatttttcattgatatgaaaaatatgatattgcatatgcatagttcccatgttaaatcccattcataactttcattaaagcatttactttgaatttc

SEQ ID NO: 1618 - DNA, 286 bp, Homo Sapiens
ttcggtacccgagctttctccttcagcctcgtgttgttcgtccacaaggagctgttcctgtaaaagatatgccttcaattcctgtcttgaatgctgccaaaagaaatgtcttagatagtagttctgacttcccttcaaggtactcacgtccccaggctcattcttcagcctcaggaggaattagaaggtcttcatctatgtcttatgttgatggcttcatagggacatggcccaaagagaaaagatcatcagtgcatggcgtatcatttgatatttcttttgataa

SEQ ID NO: 1619 - DNA, 4826 bp, Homo Sapiens
tctcactatagggctcgagcggccgcccgggcaggtctgaccacagtggttccggggagaagccttccaggacccatgtgtaggcacaactgttttccctgatcaggatacttccggcactcaacagaggaaagaaattcctaagggaacactgctcagaaagtactgcagcatgtcttcaaatgcctgaggatcaagttggaaaactagaagcaacagaaaacacaataagcgcaatggcggcggccgcggcggagcagcaacagttctacctgctgctgggaaacctgctcagccccgacaatgtggtccggaaacaggcagaggaaacctatgagaatatcccaggccagtcaaagatcacattcctcttacaagccatcagaaatacaacagctgctgaagaggctagacaaatggccgccgttctcctaagacgtctcttgtcctctgcatttgatgaagtctatccagcacttccctctgatgttcagactgccatcaagagtgagctactcatgattattcagatggaaacacaatctagcatgaggaaaaaagtttgtgatattgcggcagaactggccaggaatttaatagatgaggatggcaataaccagtggcccgaaggtttgaagttcctttttgattcagtcagctctcaaaatgtgggactgcgggaagctgcccttcacattttctggaactttcctggaatttttgggaaccagcaacaacactatttagatgtcatcaaacgaatgttagttcagtgtatgcaagatcaggaacacccgtcgatcaggacgttatctgctagagctacagctgcatttatacttgcaaatgagcataatgttgctctgttcaaacattttgcagacttgctaccgggattcctacaggcggtaaatgactcgtgctaccagaatgatgattctgtcctaaaatccctcgttgagattgcagatactgttccaaagtatttgcgtcctcacttggaagcaactctacagctaagtctaaagttgtgtggagacactagcctcaacaatatgcaacgccagcttgcccttgaagtgatcgtcaccctctctgagactgcagctgctatgttaagaaaacataccaatattgttgcacagactattcctcagatgttagcaatgatggttgatttggaagaagatgaggactgggcaaatgcagatgaactagaagatgatgattttgacagcaatgcagttgcaggcgagagtgctctagatcgaatggcttgcggacttggtggaaagctcgttctgccgatgatcaaggaacacattatgcaaatgcttcaaaatcctgactggaaataccggcatgcaggattgatggccttatctgccattggtgaagggtgccaccagcaaatggaaggaattctaaatgagatcgtaaattttgttttactttttctccaggatcctcatccaagagtaaggtatgcagcctgtaatgccgtgggacagatggctacagattttgcacctggtttccaaaagaaatttcatgagaaggtgattgcagctctgctgcagaccatggaagaccaaggcaatcaacgtgtgcaggcccatgcagctgctgccctcattaactttactgaagactgtcccaagtcactacttattccatacttggataatttggtgaaacatctgcattccattatggtactgaagcttcaagagctgattcagaaaggcaccaagttagttttggaacaagttgtgacatccattgcatcagttgccgatactgcagaagaaaaatttgtcccctactatgatttatttatgccatcactgaagcacatcgttgagaatgcggttcaaaaagaactgagacttctgagaggaaaaactattgaatgcattagcctcattggtctggctgttgggaaggaaaaattcatgcaggatgcatcagatgtgatgcagcttttgttaaagacccagacagacttcaatgatatggaagatgatgatcctcagatctcttacatgatctcagcatgggccagaatgtgcaaaatccttggaaaagaatttcagcaataccttccagtggttatggggcctttaatgaagacggcttcaattaagcccgaagtagcccttttagatacccaagacatggagaatatgagtgatgatgatggttgggaatttgtgaaccttggagatcagcaaagctttggtattaaaactgcaggactagaagaaaaatcaactgcttgccagatgttggtttgctatgctaaggagttaaaggaaggctttgtggagtacaccgaacaggttgtcaaactgatggtccctttactgaaattttatttccacgatggtgttcgagtggcagcagcggaatccatgcctcttctcctggagtgtgcaagagtccgtggtcctgagtatctcacacagatgtggcattttatgtgtgatgctctaattaaggccattggtacagaaccagattcagacgtcctctcagaaataatgcattcttttgcaaagtgcattgaagtaatgggagatggatgccttaataatgaacactttgaagaactgggaggtatattgaaagcaaagcttgaagaacattttaaaaatcaagaattacgacaagttaaaagacaagatgaagactatgatgaacaggtcgaagagtcactacaagatgaggatgataatgatgtttatattctgaccaaagtgtcagatattttacactcaatattcagtagctacaaagaaaaggtgttaccatggtttgaacagctgcttccattaattgtcaacctcatttgtccacatagaccatggccagacagacaatggggattatgcatctttgatgatgtcatagaacactgtagtccagcctcatttaaatacgcagaatatttcttaagaccaatgctccaatatgtatgtgacaacagcccagaagtcaggcaagcagctgcatatggcctgggagtcatggcacagtacggtggagataattatcgccctttttgtacagaagcacttcccctgctggtaagagttattcagtctgcggattctaagaccaaagaaaatgtcaatgctacagagaactgcatctcagcagtagggaaaatcatgaagttcaagcctgactgtgtaaacgttgaagaggtccttccacactggttgtcttggcttccactacatgaagataaagaagaagctgttcagactttcaattatctgtgtgacctgattgaaagtaatcatccaattgttcttggcccaaacaataccaatctgcccaaaatatttagtataattgcggaaggagaaatgcacgaggcaattaaacatgaagatccttgtgccaaacgtctggccaatgtcgttcgccaagtacagacttctggaggactgtggactgagtgcatagcacagctcagtcctgagcagcaggccgccattcaggagctcctgaactctgcgtgaagggccttaatgtcacccaccagaaaactaactccaaataaacgcttaccctttcctttaggtttctttgttttgtttttgagcaaaagagatcggtagtgttgtgtgtaggccattcttctggagagccacaagcaggaagagcagcgctgtgttgcagaatggagtttccatggatttctaccagaccactgaaggagttcctggaagccctgcgtacgtagcactgaagactatttttctattggtataacccgcccacctgaaggggaaagggaaatcaaattaatttttctcgttagacataaggaaatttaaggaaaaacagctttaagaacagttactcagcgtagatgtgtgttcacacaaattgccttgcattcagtgttcattgtgaattgggagtgtgagtctttctgtagggtacaaagaagcctcctacccagcaaaccagtagacccaaaagttgaaaaaaactggatgacagacaacaagcatgaagatggcatatttgatgtcactttggttctttttcccagaaggcttatacagtgactcagtcgggaagctttccagcttcagcccttgaatgtgaagtgtcattggcatgtctggcagtagtctctcattcactcccaataaacaacattgaatacaaaagaggcttgtgtaaaaactcagtactgtctggcttggattcatttcatgttttttaatataagaatgatctaatatttttttaaagtaatagctatcagtaatagctgagtgttttttcccctaatattttccttgtgcaattcagacttaagcatcgagtttttaccatcttccactttaagctaagttatgatacctattccattcacaattggtgttctttttaaggtttgcaaatttcagccaattttgtagctaagattgttctgatcagctcaaaaagatttggcttagtgttttcattgcaaattataattgctgtagagccacacacaacttttgaacttttaattataagtgttatggctaaagttatttactgaaaatttcagtaaaatgtgtgaatgtttctttatgtattaacctcatagcagtaaatgacttgctgttgtttaatttttctaaggcatcttaatagacttctcttggaaaaacctttccaaggtgttaacatttttatagtttgtactaaatttaaccgtgatataaaaatgaattttatgcatagatcagaattttaaattaaaggttttttctttaaaaaaaaaaaaaaaaaaaaaaaaaaaaaaaaaaaaa

SEQ ID NO: 1620 - DNA, 1597 bp, Homo Sapiens
tgaaccccagctctctcacttcggtcccacccttcccaactccccacgcccaagtctttcagtggaacccaagactgtaagaacgtaggccttgtgagagtgaaggaaggatgctcgaacttgcccaggactcaggcttcagcttcacaatcccgaggaaaggaatgacatttccaaactgtcacctttgtagcgctgggtcaaagtctaaagaggacaaataaatagagacttctgtggcctcgttgtgcctattgaacaggagagctgcatgtcacaatcaatgagacctgcacagcttgtgaatcatcactgagactagttgtgtttttaatacctttaaaatgaagccacagcatctattctggaaatgtggcgtaggcttaaaaaccttgctccaaagaggatatcgtttcagccagcatgcagtgaatatctgtggctacacaaaaaaacaaactgtcccgaatgctggaggaggaaatatgacattgtgatgccaggcagttttctgtgacactcaggaatctcttcaatagagatgtacagtgacacttagagccccagaacacaaggtctgtcactagtaatttacataagataaggataaattattgactgggatacatcttactcatccccgacatctgcttggctgtggggttggtcatgtagataaatatccttcccagaaaggatatttggccttcaaaaaagtctctgggctcagagtctggtcccttggggttacatggaatgaaacccagcactttattgctttgactgcctactcttgtcccttcactgcaaagccatcatgctattaaataagcctaacaaacagtaggtgaagcagaaaagaccgatctctttttcctcttggctcttcttccctcctccccctttaggcacagagtaccaagacattgagactgagaaaacctgccccgaatcacattcaccttcagaagactcctttgtgagaagctgagggcctggccctcttcctcttcctggagagaacagcccaccaccacccacagacctcgcgggcctcacttagcgcgctcctccctgtccgagaacccgagggtccccatgtggattatccagccagtgtgtggtcctttgaggccccaagcgcaggcctgtgatgaggaccaaagaggtgacttatggtcaggagtactccaaacagctctcagagtaggcatctttcctgggtctctaaagagtcatgctgacctggtgtgcaaattcccttccacccatccctctacctcctctggggatggcttgccgacatgctttagaaactcccctcttgggaatgctcctctgactgagggctccaacagctttaatgaaatcagccgagagggtaaaaaccaacctgttgcatagaatggaggggggaaaaagcacatactcaatagatttttgagtgtggtactctgtatttttgcagcatttattttccaaatgagcagtttagaaatatgtgatgtaaagtacatactgtacgtttgctgaaaattatattaaaagcactattttaattcttaaaaaaaaaaaaaaaaaaaaaaaaaaaaaaaaa

SEQ ID NO: 1621 - DNA, 408 bp, Homo Sapiens
  misc_feature (23)..(23): n is a, c, g, or t
  misc_feature (27)..(27): n is a, c, g, or t
  misc_feature (31)..(31): n is a, c, g, or t
  misc_feature (33)..(33): n is a, c, g, or t
  misc_feature (35)..(35): n is a, c, g, or t
  misc_feature (75)..(75): n is a, c, g, or t
  misc_feature (80)..(80): n is a, c, g, or t
ccccgtcccgagcccgccgcggncatnggancncncgcccggctgctggccccgctcctgctcctctgcgcgcanagctnccgcggcaccagagcgatgaatgacatcggcgactacgtgggctccaacctggagatctcctgggctccccaacctggacgggctgatagccggctacgccgcaacttccggcctggcatcggaggcccccccgtgaatgtggcccttgccctggaaggtggccagcatcgaccacatctcagaggccaacattggagtacaccatgacggtgttcctgcaccagagctggcgggacagcaaggctctcctacaaccacaccaacgagaccctgggcctgggacagccgcttcgtggacaagctgtggttgcccgacaccttcatcgt

SEQ ID NO: 1622 - DNA, 2156 bp, Homo Sapiens
cgggcccgttgcaagatggcggcggccatgctgggccccggggctgtgtgtgcgcagcgggcggcggcgcggcccggaaggctggcgcggcgacggcgttagcccggccctcggcccctctttgcggccgctccctccgcctattccctccttgctcgagatggatctgcccgtgggccccggcgcggcggggcccagcaacgtcccggccttcctgaccaagctgtggaccctcgtgagcgacccggacaccgacgcgctcatctgctggagcccgagcgggaacagcttccacgtgttcgaccagggccagtttgccaaggaggtgctgcccaagtacttcaagcacaacaacatggccagcttcgtgcggcagctcaacatgtatggcttccggaaagtggtccacatcgagcagggcggcctggtcaagccagagagagacgacacggagttccagcacccatgcttcctgcgtggccaggagcagctccttgagaacatcaagaggaaagtgaccagtgtgtccaccctgaagagtgaagacataaagatccgccaggacagcgtcaccaagctgctgacggacgtgcagctgatgaaggggaagcaggagtgcatggactccaagctcctggccatgaagcatgagaatgaggctctgtggcgggaggtggccagccttcggcagaagcatgcccagcaacagaaagtcgtcaacaagctcattcagttcctgatctcactggtgcagtcaaaccggatcctgggggtgaagagaaagatccccctgatgctgaacgacagtggctcagcacattccatgcccaagtatagccggcagttctccctggagcacgtccacggctcgggcccctactcggccccctccccagcctacagcagctccagcctctacgcccctgatgctgtggccagctctggacccatcatctccgacatcaccgagctggctcctgccagccccatggcctcccccggcgggagcatagacgagaggcccctatccagcagccccctggtgcgtgtcaaggaggagccccccagcccgcctcagagcccccgggtagaggaggcgagtcccgggcgcccatcttccgtggacaccctcttgtccccgaccgccctcattgactccatcctgcgggagagtgaacctgcccccgcctccgtcacagccctcacggacgccaggggccacacggacaccgagggccggcctccctcccccccgcccacctccacccctgaaaagtgcctcagcgtagcctgcctggacaagaatgagctcagtgaccacttggatgctatggactccaacctggataacctgcagaccatgctgagcagccacggcttcagcgtggacaccagtgccctgctggacctgttcagcccctcggtgaccgtgcccgacatgagcctgcctgaccttgacagcagcctggccagtatccaagagctcctgtctccccaggagccccccaggcctcccgaggcagagaacagcagcccggattcagggaagcagctggtgcactacacagcgcagccgctgttcctgctggaccccggctccgtggacaccgggagcaacgacctgccggtgctgtttgagctgggagagggctcctacttctccgaaggggacggcttcgccgaggaccccaccatctccctgctgacaggctcggagcctcccaaagccaaggaccccactgtctcctagaggccccggaggagctgggccagccgcccacccccacccccagtgcagggctggtcttggggaggcagggcagcctcgcggtcttgggcactggtgggtcggccgccatagccccagtaggacaaacgggctcgggtctgggcagcacctctggtcaggagggtcaccctggcctgccagtctgccttcccccaaccccgtgtcctgtggtttggttggggcttcacagccacacctggactgaccctgcaggttgttcatagtcagaattgtattttggatttttacacaactgtcccgttccccgctccacagagatacacagatatatacacacagtggatggacggacaagacaggcagagatctataaacagacaggctctaaaaaaaaaaaaaaaaaaaa

SEQ ID NO: 1623 - DNA, 479 bp, Homo Sapiens
gagagaatagtgggtaggagttaaccaggaaagcaaggatgaaagcgtgttgcgtttagataaaggataggcttcaaggtcagggaacgttgctgggtggtgagatggaaccctgatgtggaggctcagcaggaagaagcaggaaggacactgggcccccggtggttttagttccagaaacaaatgtgggccccagggctctgcaatggtaaggctggaactactcaacataagagctccacctttaactgtgccccctaagagtacctgatgatccccctatctccttgtcaatgttgctgttcttctccagaatctatttcaacccttctctgatttcaaaccaccagtccctttacctctcagagaaaacagcaaccacaaaagcctctccacttcctactatcttaatattgacaacttccagatcagggagctgagatatctcaagctcaggtttctcttctgagcttcagacg

SEQ ID NO: 1624 - DNA, 494 bp, Homo Sapiens
  misc_feature (68)..(68): n is a, c, g, or t
gttaaggcagtcaaatttagcacagggggattatatgccaactttagtgacactaatgttaataagtnctggtaacccactaccatcagaccaacgtagttagtttttgaagaatcctaaagccatgctgtatggtggggaaaaattaatttagcttatgacaaagcattatccttcaagcctctgaataatcagcctcttgctttacaaacacttcttgtgtctgacagctctgccatgcctttagcaatagctatcatttactgaccacagtcattcattcattcagtattcattttagcacttagtgggcacctgctctgtgccaggtaccatcctaggtgctggggatacagcagtgaacaaaccaaacaaaaccctctttaggcaccacactggatgattctatttcactgagacctcacaatgtatctgcatgtaggtattattatctccattttagagatgagggaactaaggcttatatgttaagg

SEQ ID NO: 1625 - DNA, 2841 bp, Homo Sapiens
ggaaagcatcagagctggaaagactggcactctggcctggactagcagcctctcccagcacagtccacagcaagccagtctcagatgtggctcgaccggcctggcttgggccaaaagcctggcatgaatgtgagatgttagagctgctgcccccatttgttggcctgtgtgcctccctggcaggccactccagtgcttggcaggcttacctgtcactgtcatccacagtgctgggtcctgcacctgggccagggcctgagccactcagcctcctccagaagctgatcctgtggcgcgttctgcgacctgagtgcctggcaggtgccctggcagacttcaccactagcctcctgggtcggcccctggatgaaaacacgtatgctcccaccatgccctttaaacatagtcaggctactcagcccatgctgatcttgttgccaccgcctggccacccctcagccactctgcatcctctgactgtcatccagaaactggctgccaagtatcagcaggggcagaagcaactgcaggtgatagccctgggctctgaagcctgggacccagtctcagttgtggtcagcactctatcccaggctatgtatgaggggcactggctggtgctggacaactgtcatctgatgccccattggccgaaagagctgctacagctcttgctggaactgttaggcagagccaaggtggttgcagacctggaatcagaacagcttttagaccaacctgaaagcaggaatgtaagcactgttcacagagattttcgtctttggcttattgtgcctgcagagtctagtgcttctttgccagctgtgctgactcagcactccatgcctgttttctggaaccagtccctggagctgggccatgttttgattgacagtgtggagctagcccagcaagtactctacatgcaaccccccacccaggcactacctctgctcctcctccatggcctcctgctacaccggcagctctatggaacaaggctgcaggcacacagggggcgctggagtcaagtgactctaacccaggttcttcagacccaagaccagctgtgggcaagtcttagcaatccccgtgctgccatgcaagagctggctggtgagacccttcctctcccccttggagtcatcagcccccaggagagcctggaagagggtgggggtgggatacaattcacagctttggttttggcggtggtggaaactgaaggtactggaactgagagactctaacctcatcttcagcttcagttttctacgggggtcctctgggggacactgaggacagggaggccctgattagcctcacacaagcctgcctgagccccagtagtgggagctgggtccagccacacacacctcagtctttgctggccacgctcatgcccctcccaggtaagcctcactcaggtatctgttttggggtagggaatagtgcaatgcaatgccaccccccacagaaatgtggacagcagtctcaataaaggtatatgagggggtaatattcatactgttatgggggtgatggcagtaaaggctcagaggaaggcctactctctcgagtctagggtggggagagtccatcttgtccctcacccctcacctctatccccaagagctaagggagctggatgcaatggcagagtgcaaggcccagatgcacctactgccctcaccacctgaaccccggctctgcggactgagtgagggcccccaagcctggctgttgcgacgccagagtcgcgctctcttgagtgcgctgcagcggagttcacccgtgtgggttcctgagtctcgaagaggcgcccagcttgcggaaaggcgactgcgcaacgcctagtgcaagtcaacccgaggctggagtcactgcaggatctgctgacccacgtgattcgccaagacgagtccgacgccccgtggtcagtgctggggccaaatgcacggcggcctctggagggcgtcttagagaccgaggctctagaactgagccagttggtgggcacgctacaacgcgaccttgattgcctgttgcagcagctgaagggcgcacccccgtgcccctcccgccgctgtgctgcggtggcccacgctctctggactggccgcctacccttgccttggcgacctcatgcgccggccggtccgcagccgccctggcactggctgcgacagtttgtcgcgccgtgggcaactgttggttcgttacttgggcgtgggcgcggacgcgagcagtgatgtaccagagcgcgtcttccacctgtcagcctttcgccacccgcgccgcctgctgctggcattgcgtggggaagctgccctggaccagaatgtgcccagctcgaatttccctggtagccgaggctcggtctccagtcagctccagtataaacgtctggagatgaacagcaaccctctgcacttcagggtggagaatggtccaaatcccacggttccagagagagggctgctgctgatcgggctacaggtcctacatgcggagtgggacccaatagctggagccttgcaggacagtccttccagccaacccagccctctgcctcccgtcagcatcagcacacaggccccgggcaccagtgacctgccagccccagccgacctgactgtgtactcgtgtcctgtgtacatgggagggccccttggcaccgctaagctgcagagcaggaacatcgtgatgcatctgcctttacccaccaagctcacccccaacacctgtgtccaaaggagggtccatgtgtgcagcccacccctgtcttgagcccgtctaccaaaataaagttgtagtgattccatgaaaaaaaaaaaaaaa

SEQ ID NO: 1626 - DNA, 170 bp, Homo Sapiens
gcacgaggctcttggtacctcagcgcgagcgccaggcgtgcggccgccgaggctatgttcgagtccgatttccgcactgagttctacgaggtggtccagagccagagggttcttctcttcgtggcctctgacgaggatgctctgagagcgtgcaagatccttcaggcctt

SEQ ID NO: 1627 - DNA, 473 bp, Homo Sapiens
aaagacacaagcacgtaaatgtttattgcagcattattcacaatagtaaagacatggaatcaacctaaatgcccaatgacaggttggatacagataatatggcacattgtggagcaaaatttaaatattaaatttgaactctattgaacagggacagaaacaatggtcactaagtcctggaacgagttgtgtgagccccttgaggcattcatccagtgctgtttcggagaactagttattgaaaaacaacagacaatggcaaaaacaagttgtcctttttgtattccttgagcccagtcaggaagggctctcatgaccgggcctcctgacaaacaacttgttacaaaaagagctcggttcccagactgcgccgaagtttcatgggacctctcctcgtctgtgcacggactactggtcaattctggagcccaggctgttgcttcctggtctgttgatgaatcctccatagtctg

SEQ ID NO: 1628 - DNA, 229 bp, Homo Sapiens
ccctttctcatcagacacccccacatccaggaggacaatgacatcccgttgtacctgaagggcggtatcgttgacaacatcctgtaccgagtgacaatgacgctgtgtctgggcggcactgtctacagcttgtactcccttggctgggcctccttccccaggaattaagaccaagaagcctggggggcctgagagacttgaacaagtgtcaataaacgctggcctctga

SEQ ID NO: 1629 - DNA, 239 bp, Homo Sapiens
  misc_feature (57)..(57): n is a, c, g, or t
  misc_feature (116)..(116): n is a, c, g, or t
  misc_feature (139)..(139): n is a, c, g, or t
  misc_feature (156)..(156): n is a, c, g, or t
  misc_feature (164)..(164): n is a, c, g, or t
  misc_feature (198)..(198): n is a, c, g, or t
  misc_feature (214)..(214): n is a, c, g, or t
cgttctgtgaagagttcggtgctaacctccctcacgcggcggtggctgccgggaccntagcaggtttcagctggagcggcggcggcggcaacatggcagagaccgcggccggagtnggccgcttcaagaccaactatgntgtggagcgcaaaattnagcctttntacaagggcggaaaagcacagctggaccagactngccagcacctcttctncgtctgtggcaccagagtcaacatt

SEQ ID NO: 1630 - DNA, 2211 bp, Homo Sapiens
ttgggggtttattctcttcccttctaacttgacagggtcttgctctgtcattcaggcaagagtgcagtagtgtgatcacttcttactgccgcctcaagcttccagcctcaactcaagcaatcctcccacctcagccacccaagtggctgggactacagattaagaatgacccaaaataaattaaagctttgttccaaagccaatgtgtatactgaagtgcctgatggaggatggggctgggcggtagctgtttcatttttcttcgttgaagtcttcacctacggcatcatcaagacatttggtgtcttctttaatgacttaatggacagttttaatgaatccaatagcaggatctcatggataatctcaatctgtgtgtttgtcttaacattttcagctcccctcgccacagtcctgagcaatcgtttcggacaccgtctggtagtgatgttgggggggctacttgtcagcaccgggatggtggccgcctccttctcacaagaggtttctcatatgtacgtcgccatcggcatcatctctggtctgggatactgctttagttttctcccaactgtaaccatcctatcacaatattttggcaaaagacgttccatagtcactgcagttgcttccacaggagaatgtttcgctgtgtttgctttcgcaccagcaatcatggctctgaaggagcgcattggctggagatacagcctcctcttcgtgggcctactacagttaaacattgtcatcttcggagcactgctcagacccatcattatcagaggaccagcgtcaccgaaaatagtcatccaggaaaatcggaaagaagcgcagtatatgcttgaaaatgagaaaacacgaacctcaatagactccattgactcaggagtagaactaactacctcacctaaaaatgtgcctactcacactaacctggaactggagccgaaggccgacatgcagcaggtcctggtgaagaccagccccaggccaagcgaaaagaaagccccgctattagacttctccattttgaaagagaaaagttttatttgttatgcattatttggtctctttgcaacactgggattctttgcaccttccttgtacatcattcctctgggcattagtctgggcattgaccaggaccgcgctgcttttttattatctacgatggccattgcagaagttttcggaaggatcggagctggttttgtcctcaacagggagcccattcgtaagatttacattgagctcatctgcgtcatcttattgactgtgtctctgtttgcctttacttttgctactgaattctggggtctaatgtcatgcagcatattttttgggtttatggttggaacaataggaggactcacattccactgcttgctgaagatgatgtcgtgggcattgcagaagatgtcttctgcagctggggtctacatcttcattcagagcatagcaggactggctggaccgccccttgcaggtttgttggtggaccaaagtaagatctacagcagggccttctactcctgcgcagctggcatggccctggctgctgtgtgcctcgccctggtgagaccgtgtaagatgggactgtgccagcgtcatcactcaggtgaaacaaaggtagtgagccatcgtgggaagactttacaggacatacctgaagactttctggaaatggatcttgcaaaaaatgagcacagagttcacgtgcaaatggagccggtatgacacactttcttacaacaacagccactgtgttggctggagagggatggggtgggcccaacggggacacaaggaggcagaggagctaacccctctactccactttcaaaactacattttaaagggaatgtgtatgtgaagagcactaccaacatcgcttttgttttgttttgttttgttttaagctttttttttttgcttgtttttaaagccaaaacaaaaaacaaccaagcactcttccatatataaatctggctgtattcagtagcaatacaagagatatgtagaaagactctttggttcacattccgatattaaaatagtgacatgaactggcaaagtggttttaaaagctttcacgtgggataaatgattttctttttttcttttctttcttcctatggtcttgtctgaataaactactctcctgaataaaacaacatccaacccaggtcattgaaatgaaattggccagtc

SEQ ID NO: 1631 - DNA, 508 bp, Homo Sapiens
tcgtgataaaatttttattactgtttcttttaataacatatcaatgagatctatttagagtactacctacaaatacacattctctcatgattcagtgagaatattaagttattgaatacatttttttactctcatggcacttacatttggtaacactaataaggtaaatttagataacacttaaatcatgattatgaatgtttaattgaatattttcctttctgtagctgtgaaatgtaaagcttagatttgcttccatcaggcctcttaaaccaaacttcatcatggttaattgttgtaattacagcacttgtaggacattcatcttttttatcaatacatattgtttgtccacgtagataccattcaccatcataatatagtcttccctcttcagatctagcactgtgcagatgttttgccagtttcacaggtggttccgttttcactctgtgtggccccaatgtagccattgccttcctaattgttgtccagtcttcaagaatat

SEQ ID NO: 1632 - DNA, 4627 bp, Homo Sapiens
tcacttgcctgatatttccagtgtcagagggacacagccaacgtggggtcccttctaggctgacagccgctctccagccactgccgcgagcccgtctgctcccgccctgcccgtgcactctccgcagccgccctccgccaagccccagcgcccgctcccatcgccgatgaccgcggggaggaggatggagatgctctgtgccggcagggtccctgcgctgctgctctgcctgggtttccatcttctacaggcagtcctcagtacaactgtgattccatcatgtatcccaggagagtccagtgataactgcacagctttagttcagacagaagacaatccacgtgtggctcaagtgtcaataacaaagtgtagctctgacatgaatggctattgtttgcatggacagtgcatctatctggtggacatgagtcaaaactactgcaggtgtgaagtgggttatactggtgtccgatgtgaacacttctttttaaccgtccaccaacctttaagcaaagagtatgtggctttgaccgtgattcttattattttgtttcttatcacagtcgtcggttccacatattatttctgcagatggtacagaaatcgaaaaagtaaagaaccaaagaaggaatatgagagagttacctcaggggatccagagttgccgcaagtctgaatggcgccatcaaacttatgggcagggataacagtgtgcctggttaatattaatattccattttattaataatatttatgttgggtcaagtgttaggtcaataacactgtattttaatgtacttgaaaaatgtttttatttttgttttatttttgacagactatttgctaatgtataatgtgcagaaaatatttaatatcaaaagaaaattgatatttttatacaagtaatttcctgagctaaatgcttcattgaaagcttcaaagtttatatgcctggtgcacagtgcttagaagtaagcaattcccaggtcatagctcaagaattgttagcaaatgacagatttctgtaagcctatatatatagtcaaatcgatttagtaagtatgttttttatgttcctcaaatcagtgataattggtttgactgtaccatggtttgatatgtagttggcaccatggtatcatatattaaaacaataatgcaattagaatttgggagaagcaaatataggtcctgtgttaaacactacacatttgaaacaagctaaccctggggagtctatggtctcttcactcaggtctcagctataattctgttatatgaggggcagtggacagttccctatgccaactcacgactcctacaggtactagtcactcatctaccagattctgcctatgtaaaatgaattgaaaaacaattttctgtaatcttttatttaagtagtgggcatttcatagcttcacaatgttccttttttgtatattacaacatttatgtgaggtaattattgctcaacagacaattagaaaaaagtccacacttgaagcctaaatttgtgctttttaagaatatttttagactatttctttttataggggctttgctgaattctaacattaaatcacagcccaaaatttgatggactaattattattttaaaatatatgaagacaataattctacatgttgtcttaagatggaaatacagttatttcatcttttattcaaggaagttttaactttaatacagctcagtaaatggcttcttctagaatgtaaagttatgtatttaaagttgtatcttgacacaggaaatgggaaaaaacttaaaaattaatatggtgtatttttccaaatgaaaaatctcaattgaaagcttttaaaatgtagaaacttaaacacaccttcctgtggaggctgagatgaaaactagggctcattttcctgacatttgtttattttttggaagagacaaagatttcttctgcactctgagcccataggtctcagagagttaataggagtatttttgggctattgcataaggagccactgctgccaccacttttggattttatgggaggctccttcatcgaatgctaaacctttgagtagagtctccctggatcacataccaggtcagggaggatctgttcttcctctacgtttatcctggcatgtgctagggtaaacgaaggcataataagccatggctgacctctggagcaccaggtgccaggacttgtctccatgtgtatccatgcattatataccctggtgcaatcacacgactgtcatctaaagtcctggccctggcccttactattaggaaaataaacagacaaaaacaagtaaatatatatggtcctatacatattgtatatatattcatatacaaacatgtatgtatacatgaccttaatggatcatagaattgcagtcatttggtgctctgctaaccatttatataaaacttaaaaacaagagaaaagaaaaatcaattagatctaaacagttatttctgtttcctatttaatatagctgaagtcaaaatatgtaagaacacattttaaatactctacttacagttggccctctgtggttagttccacatctgtggattcaaccaaccaaggacggaaaatgcttaaaaaataatacaacaacaacaaaaaatacattataacaactatttacttttttttttttctttttgagatggagtctcgctctgttgcccaggttggagtgcagtggcacgatctcggctcactgcaacctcacctcccgggttcaagagatcctcctgcctcagcctcctgagcagctgggactacaggcgcatgccaccatgcccagctaatttttgtatttttagtagaggcggggtttcaccatgttggccaggatggtctcaatctcctaaccttgagatccaccctccacagcctcccaaactgctgggattacaggcgtgagccaccgcacgtagcatttacattaggtattacaagtaatgtaaagatgatttaagtatacaggaggatgtgaataggttatatgcaagcactatgcccttttatataagtgacttgaacatctgtgcccgattttagtatgtgcaggggggcgatctgggaatcagtcccctgtggataccaaggtacaactgtatttattaacgcttactagatgtgaggagagtctgaatattttcagtgatcttggctgtttcaaaaaaatctattgacttttcaataaatcagctgcaatccatttatttcatttacaaaagatttattgtaagcctctcaatcttggtttttcagttgatcttaagcatgtcaattcataaaaacaagtcatttttgtatttttcatctttaagaatgcttaaaaaagctaatccctaaaatagttagatctttgtaaatgcatattaaataataaagtatgacccacattactttttatgggtgaaaataagacaaaaataatagttttagtgaggatggtgctgagtaaacataaaaactgatttgctctcagctgatgtgtcctgtacacagtgggaagattttagttcacacttagtctaactcccccattttacagatttctcactatatatatttctagaaggggctatgcatattcaatgtattgagaaccaaagcaaccacaaatgcataaatgcataatttatggtcttcaaccaaggccacataataacccagttaacttactctttaaccaggaatattaagttctataactagtactcaaggtttaaccttaaaattaagatttccttaaccttaaccttaaaattgatattatattaaacatacataatacaatgtaactccactgttctcctgaatattttttgctctaatctctctgccgaaagtcaaagtgatgggagaattggtatactggtatgactacgtcttaagtcagatttttatttatgagtctttgagactaaattcaatcaccaccaggtatcaaatcaacttttatgcagcaaatatatgattctagtgtctgacttttgttaaattcagtaatgcagtttttaaaaacctgtatctgacccactttgtaatttttgctccaatatccattctgtagacttttgaaaaaaaagtttttaatttgatgcccaatatattctgaccgttaaaaaattcttgttcatatgggagaagggggagtaatgacttgtacaaacagtatttctggtgtatattttaatgtttttaaaaagagtaatttcatttaaatatctgttattcaaatttgatgatgttaaatgtaatataatgtattttctttttattttgcactctgtaattgcactttttaagtttgaagagccattttggtaaacggtttttattaaagatgctatggaacataaagttgtattgcatgcaatttaaagtaacttatttgactatgaatattatcggattactgaattgtatcaatttgtttgtgttcaatatcagctttgataattgtgtaccttaagatattgaaggagaaaatagataatttacaagatattattaatttttatttatttttcttgggaattgaaaaaaattgaaataaataaaaatgcattgaacatcttgcattcaaaatcttcactgac

SEQ ID NO: 1633 - DNA, 385 bp, Homo Sapiens
ccaacgggctatggtgcctgcctgcattgtgggggaaagagaaggcaatggaaccttctgatgcgggggaagactgtaatagcggcggccgggcgaccccaaaagctgcagcagtaagcggttccgcggcgtggccccagaactgggggtccagccgcacagtgcccggaccccgccataccctgtagtcacgctgttgcgacgagcgggagccgggccagatcgcgaggtcactcgtggagttccgggtacctcctgcaaggccgtccaccggagcctcgagtcccgcccatggggctacattctgagcccgtcgcgcacagacgcgccacatagtgccaccaaccccccacaccccaaaaccaacgccgtctccggagtgacc

SEQ ID NO: 1634 - DNA, 2764 bp, Homo Sapiens
ggagccagtcttgggcgctggagggcctgtcctgaccatggtccctgcctggctgtggctgctttgtgtctccgtcccccaggctctccccaaggcccagcctgcagagctgtctgtggaagttccagaaaactatggtggaaatttccctttatacctgaccaagttgccgctgccccgtgagggggctgaaggccagatcgtgctgtcaggggactcaggcaaggcaactgagggcccatttgctatggatccagattctggcttcctgctggtgaccagggccctggaccgagaggagcaggcagagtaccagctacaggtcaccctggagatgcaggatggacatgtcttgtggggtccacagcctgtgcttgtgcacgtgaaggatgagaatgaccaggtgccccatttctctcaagccatctacagagctcggctgagccggggtaccaggcctggcatccccttcctcttccttgaggcttcagaccgggatgagccaggcacagccaactcggatcttcgattccacatcctgagccaggctccagcccagccttccccagacatgttccagctggagcctcggctgggggctctggccctcagccccaaggggagcaccagccttgaccacgccctggagaggacctaccagctgttggtacaggtcaaggacatgggtgaccaggcctcaggccaccaggccactgccaccgtggaagtctccatcatagagagcacctgggtgtccctagagcctatccacctggcagagaatctcaaagtcctatacccgcaccacatggcccaggtacactggagtgggggtgatgtgcactatcacctggagagccatcccccgggaccctttgaagtgaatgcagagggaaacctctacgtgaccagagagctggacagagaagcccaggctgagtacctgctccaggtgcgggctcagaattcccatggcgaggactatgcggcccctctggagctgcacgtgctggtgatggatgagaatgacaacgtgcctatctgccctccccgtgaccccacagtcagcatccctgagctcagtccaccaggtactgaagtgactagactgtcagcagaggatgcagatgcccccggctcccccaattcccacgttgtgtatcagctcctgagccctgagcctgaggatggggtagaggggagagccttccaggtggaccccacttcaggcagtgtgacgctgggggtgctcccactccgagcaggccagaacatcctgcttctggtgctggccatggacctggcaggcgcagagggtggcttcagcagcacgtgtgaagtcgaagtcgcagtcacagatatcaatgatcacgcccctgagttcatcacttcccagattgggcctataagcctccctgaggatgtggagcccgggactctggtggccatgctaacagccattgatgctgacctcgagcccgccttccgcctcatggattttgccattgagaggggagacacagaagggacttttggcctggattgggagccagactctgggcatgttagactcagactctgcaagaacctcagttatgaggcagctccaagtcatgaggtggtggtggtggtgcagagtgtggcgaagctggtggggccaggcccaggccctggagccaccgccacggtgactgtgctagtggagagagtgatgccaccccccaagttggaccaggagagctacgaggccagtgtccccatcagtgccccagccggctctttcctgctgaccatccagccctccgaccccatcagccgaaccctcaggttctccctagtcaatgactcagagggctggctctgcattgagaaattctccggggaggtgcacaccgcccagtccctgcagggcgcccagcctggggacacctacacggtgcttgtggaggcccaggatacagatgagccgagactgagcgcttctgcacccctggtgatccacttcctaaaggcccctcctgccccagccctgactcttgcccctgtgccctcccaatacctctgcacaccccgccaagaccatggcttgatcgtgagtggacccagcaaggaccccgatctggccagtgggcacggtccctacagcttcacccttggtcccaaccccacggtgcaacgggattggcgcctccagactctcaatggttcccatgcctacctcaccttggccctgcattgggtggagccacgtgaacacataatccccgtggtggtcagccacaatgcccagatgtggcagctcctggttcgagtgatcgtgtgtcgctgcaacgtggaggggcagtgcatgcgcaaggtgggccgcatgaagggcatgcccacgaagctgtcggcagtgggcatccttgtaggcaccctggtagcaataggaatcttcctcatcctcattttcacccactggaccatgtcaaggaagaaggacccggatcaaccagcagacagcgtgcccctgaaggcgactgtctgaatggcccaggcagctctagctgggagcttggcctctggctccatctgagtcccctgggagagagcccagcacccaagatccagcaggggacaggacagagtagaagcccctccatctgccctggggtggaggcaccatcaccatcaccaggcatgtctgcagagcctggacaccaactttatggactgcccatgggagtgctccaaatgtcagggtgtttgcccaataataaagccg

SEQ ID NO: 1635 - DNA, 3932 bp, Homo Sapiens
gtcggagcaggcgagcgcgccgctggccaaggacaagcagatcgaagagctgcggcaggagtgccacctcctgcaggcgcgtgtcgcctcgggtccctgcagcgacctgcatactggaaggggcggcccctgcacccagtggctcaacgtcagagacttagaccgcctgcagcgcgagtcccagcgggaagtgctgcgcctgcagaggcagttgatgcttcagcagggcaacggtggcgcttggcccgaggcgggcggccagagcgcaacctgcgaggaggtgcgacggcagatgctggcgctggagcgcgagctggaccagcggcggcgcgagtgccaggagctgggcgcgcaggcggccccggcgcggcgacgtggcgaggaggccgagacacagctgcaggcggcgctgctcaaaaacgcctggctggcggaggagaatgggcggctgcaggccaagaccgactgggtgcggaaggtggaggctgagaatagcgaagtgcgcggccacctgggccgcgcgtgtcaagagcgcgatgcctccggcttgatcgccgaacagctgctgcagcaggcggcgcgcgggcaggacaggcagcagcagctgcaacgcgacccgcagaaggccctgtgtgacctccatccttcctggaaggagatacaggcgctccagtgtcggcctggtcaccctcctgaacagccctgggagaccagtcaaatgccggagtcccaagttaaaggtagcagaaggcccaagttccacgcacggcctgaagactacgcagtgtcacagcccaacagagacatacaggagaaaagggaagcctccctcgaggagagcccagttgcccttggggagtcagccagtgtcccccaagtttcagagacagtccctgccagccaacctctgtccaagaaaaccagctcccagtcaaactcctcctctgaggggtcgatgtgggccaccgtgccgtcctcccctactctggacagggacacagccagtgaggtggatgacctggagcctgacagcgtgtccctggccctggaaatgggaggctcggcggctcctgctgcccccaagctcaagatcttcatggctcagtataactacaacccatttgaggggcccaatgatcaccctgagggtgagctgcccctcacagctggggactacatatatatcttcggggacatggatgaggatggcttctatgagggggagcttgaggatggccggcgggggctggtgccctccaacttcgtggagcagattccggacagctacatcccaggctgcctgcctgccaaatcccctgatcttggccccagtcaactcccagcggggcaggatgaagctctggaggaagacagcttattatctgggaaagcccagggagtggtggacagagggctgtgccagatggtcagggtgggctccaagacagaagtagcaacagagatcctggataccaagacggaagcctgccagctgggcttgctgcagagcatggggaagcagggcctctccagaccccttctggggaccaaaggggtgctccgtatggctcccatgcagctacacctgcagaatgtcacagccacatcagccaacatcacctgggtctacagcagccaccgccacccccatgtggtatatcttgatgaccgagagcatgccctgaccccagcgggcgtgagctgctacaccttccagggcctgtgccccggcacgcactaccgggcgcgggtggaggtgcggctgccacgggacttgctgcaggtgtattggggaactatgtcctccaccgtcaccttcgacacactcttggcaggacctccctacccaccgctggatgtgctggtggagcgccatgcctcgccaggtgtcctggtggtcagctggctccctgtgaccattgactcagctgggtcctccaatggagtccaggtcaccggttatgctgtgtatgcagatgggcttaaggtttgtgaggtcgccgatgccactgctgggagcaccctattggaattctcccagctacaggtgcccctcacgtggcagaaggtctcagtgagaaccatgtcactctgtggtgagtccctggattcagtgcctgctcagatccccgaggacttcttcatgtgtcaccgatggccagagactccaccctttagctacacttgtggcgacccatccacctacagagtcaccttccccgtctgcccccagaagctgtcactggctcctccgagtgccaaggccagcccccacaaccctggaagctgcggggagccccaggccaagttcctagaagcattctttgaagaacccccaaggaggcaatccccagtgtccaacctgggctcagaaggagaatgtccgagttcaggggctggcagccaagcccaggagcttgcagaggcctgggagggctgtagaaaggacctgctctttcagaagagtccccagaaccacaggccaccttcagtcagtgaccagcctggggagaaggaaaattgctaccagcacatgggcaccagcaaaagccctgctccaggattcatccatctacgcaccgagtgtgggcccaggaaagaaccgtgtcaggaaaaggctgcccttgagagggtacttcggcaaaagcaagatgcccaagggttcacacctccccagctgggtgccagccaacagtatgcatctgacttccataacgttttgaaggaggagcaggaggcactgtgcttggatctgtggggcacagagaggcgagaggagaggagggagcctgagccccacagcaggcaaggacaagctctgggggtcaagagagggtgccagctccatgagcccagctcggcactgtgtccagctccatccgccaaagtcatcaagatgcccaggggtggcccccaacagctggggacgggggccaacactccagccagggtctttgtggccctctctgattacaaccccctggtgatgtctgccaacctcaaggctgcagaggaggagctggtcttccagaaaaggcagttgctaagagtgtggggctctcaggacacccatgatttctacctcagcgagtgcaacaggcaagtgggcaatatccccgggcgcctagtggctgagatggaggtggggacagagcagactgataggaggtggcgttctccggcccaagggcacctgccttctgtggcccacctcgaggactttcaggggctcaccatcccccagggttcctccctggtgctccaggggaactccaagagactcccactgtggactccaaagatcatgatagcagctctggactatgatcctggggatgggcaaatggggggccaggggaagggcaggctggcgctgagggcaggagacgtggtcatggtttacgggcccatggatgaccaaggattctattatggagagttgggcggccacaggggcctggttcctgcccacctgctggatcacatgtccctccatggacactgagcaagcatccttgcccaggtagtggcctctggctgctcacaccctgccagaggagaagcaagcgttcagaccctcacaccagcacccctcctcaccaccataagtagcatgtgctccaagtgccactgtgttaaactgatggtagtccttaagtgtcccctaggctctgaaagtagcaggacttaagcctgagttatttgcaaaagcaaacacaacaagccaacccctgagagtctgagaagccatttcaaagttgctgataactatggcaggtatacggagaagcgcctttttctgtggccaatgtgtgttttctctgggaggttaaggttatctgtccattgccttgtacgaaagtctcaagaaaagtctacatcttaaaaaagaaaaaaaaaaaaaaaaaaaaaaaaaaaaaaaaaaaaaaaaa

SEQ ID NO: 1636 - DNA, 453 bp, Homo Sapiens
  misc_feature (41)..(41): n is a, c, g, or t
  misc_feature (45)..(45): n is a, c, g, or t
  misc_feature (47)..(47): n is a, c, g, or t
  misc_feature (362)..(362): n is a, c, g, or t
  misc_feature (384)..(384): n is a, c, g, or t
  misc_feature (398)..(398): n is a, c, g, or t
  misc_feature (446)..(446): n is a, c, g, or t
ggaaaacttgtctctgcggttgtggggaggacgcgcgctcnggantnttttcaagcgtaggcccccgggaactcgagctgccatgagcctctgggtggacaagtatcggccctgctccttgggacggctggactatcacaaggagcaggcggcccagctgcggaacctggtgcagtgtggtgactttcctcatctgttagtgtacggaccatcaggtgctggaaaaaagacaagaattatgtgtattctacgtgaactttatggtgttggagtggaaaaattgagaattgaacatcagaccatcacaactccatctaaaaaaaaaattgaaattagcaccattgcaagtaactaccaccttnaagttaattcccttagtgatgnggaaatagtgaccnagttagtcattcaggagatgttgaaaacagtggcacaattcacagcantgaaaca

SEQ ID NO: 1637 - DNA, 418 bp, Homo Sapiens
gccacgctgcgccggcttcgggaggcgccgcggcacttactggtttgcgagaaatccaacttcggcaaccacaagtcgcgccaccggcatcttgtgcagacgcactactataactacagggtttcatttctcattcctgaatgtgggatactatcggaagaactgaaaaacctggtcatgaacactggaccctattactttgtgaagaatttacctcttcatgaattaattacacctgaattcatcagtacctttataaagaaaggttcttgctatgcactaacatacaatacacatattgatgaagataatactgttgccctgctaccaaatgggaaattaattttgtcactggataaagacacttatgaagaaactggacttcagggtcatccatctcagttttctggcagaaaaa

SEQ ID NO: 1638 - DNA, 482 bp, Homo Sapiens
  misc_feature (473)..(473): n is a, c, g, or t
tttttttttttttttttcctttctcgctctttaatctcactctgctctcttgacacagttccagcaatgcagccccaggcaccagctccgagaaggatgcggtggggcggggtggggaacctgcccagggggcccagctctggggcggggcgggggcgcctccttccggcccgcggtccgggcggccctcgcagctgtccaggccccggcaagcccgggcgtggtgtccgagcggacgaataaataggggcggtcagtggtcaggtgggtcaggtgggcttgtgatccgggtggcttttgagcgtgtggaacttgacgctgtccagcttctcgaagcgcttcccgcagcgatcgcacgtgaagttgtactgcacctccgcagtgtgcttcttcatgtgccagttgagcgacgcgcgctgccggcactggtagccacagatctcgcacctgccgggagcccgtggcgggacggngcggggtca

SEQ ID NO: 1639 - DNA, 6110 bp, Homo Sapiens
gctctgccaaaaaatgagatagtgtatagaaaatgttaatagatcttggccaatgtgacccgaaagccaggtgtgcccccttggaagaaggtgtttcctcatcatagtaacctgttgagcatcatactgaggatttgcttaagaatgaagtgtagacaggccagctctggaatcccatggagtaagtgtccacactggaggtggagagtagggtggggtgaaggtgaaggctgtggattcattccttagtataatgatcatcaccagcaatgttgggaaacagtgtcctaccaaacttaggagtcaaatgacctgaatttaaatctgacttttcccacttgctgctttcttcatttctttgaatttcagttccctcttctgtaattctggagtcacagcaaacagctcgttgagttgttggcaggattatatgtgatttaaaacacaaagacttgatagagtggtggtcccgtggtgtgggctcactaaacggtaacaattgagatggtgaccagtgatcttcacaactgtgtgatttatgaggcagcgttgcaatttcgacctcagattctgtgaggcaagctgaaaaatgtaccatcactaccactttacagatgggagaacacagtcagagaggtgaagttagttgcctgaggacccacagttggtcaggagtagaggtggaattttaattccatggacccatgggcctgaacggccaaggcaaccctgggacctgacttgaaactaggaccacaagcttcccttcatgggaagctctaaggaatcatggtgctgtggacaagagccttgtctcctctcccaggaagacaaggaagaggaggccagggaaatgggcttgggctggtttgtgggaaatttaggttaagactcagaggcaacctgataatacctctgagagttcaacacatcatagcctgagcctgacctggggaagcccttgtagaatttgcagtcagatgagtacaagagcatacaaaaccccaaagaattgatttaaatgccacctatgtcctaatgacccacaaagttgtgtctccagccctaatctgactcctaaaatccactatctgctctacatctccacctggacctcacaaacatctcatgttgaacttgcttaaacagaacctcgggccaggcacagtagctcacacctataatcctagcgctttgggaggctgaggcaagaggatcacttgagcccaggagtttgagaccagcctaggcagcatagtgagacccaatttctacaaacaacaacaacaaaaccaaaaacaaaaacaaaaacacaacaacaaaaaaaacaggcatggtgtcacgtgcctatggtcccagctactcaggaggctgggaagatcacttgaggaggtattcccacctcctcaaagatcacttgagctggggaaattgaggcttcgttgagtgacagtgggaaaccctgtctcaaaaacagaaaaataagctcaacataaacataaaccagtacctcttaccatcactcccctaacgcaaaccggttctatccatgcttctcatcttggttgaaaaacttcacaatcacagttgatgcctctctttatcaattaacatccattaagttagttaggaaataattttagttctaccttgaaagtagatcctaaatctggtaaaaccttaccacctccgcagctgccaccctgatctgaagagccatcttcttacttggattaccccaacagcctcttaaaaggtctccctgcttctatcctccttacaatctattataaacacaatagtcacaatgaccctttcaaaacatgagtcaggccatatcacttctctactgagaacagtgtgatggatccccatttcattctaagtaaaaccaaataccctaaaatggcttacactgatttgtgtagatttcacataattatcctcattttacagagaaggaaactcaccaagtagcaggactgggactttaccatggggcttaaggcaccaagcccagcatgctctctaccatatcccatgatatgatgagacatttcattcttccacagcctactggagatggatagggtagggtgaaccaagttgcagaaagggatactagctttgaagagaaggaaaggctctttgaagggtggtgggatgggggtggggttttaagaagctcacatctgctcttattttagttaaggatggacaatgcccactcttccctttcactgaacgtaaggagtgtccaccttcatgtcacagtgacatcgattgtccccagacagacaaatgttgtgaatccaggtgtggctttgtttgtgccagggcctggacaggtaaggattggggatatacctcccaaatctattgggcatgtgccaaggatgtcatgctgtctccatggagtggggggtgtcttgaacctcagatgctccttgggctcatctttgaggatctttgggaaccccttttaatgcccaacaagttatattgacctcttgacctctgaagactattgtgctgttcttcaaagccagtaattcatagcattgctctctattcttccccaagaaaacttattttttctgagactcattcctcaatgacttgcaaggtgacaatattcaccgattcataaaaaattcataaccatgaggtgtattcctaataagccctcatgtctgcacagaacttcaaagcatgcacatcatattcatatcctgtaagatgggctggggaaaacattagtagcaaatgatgttggatagaagccaactttcctgcctcctctaaggcaggtgtttacttccccatgtagtcccagggattgtccaggtgtggctttaaggttctaaggttcagtatagtgtggtggcaggagtccaaggcttttcaacctacttcaacttttctactggctttctatgtggcattgggcaactcatttccctctaaatacgcctcaatgcctacaatttgtaaaacaagaaggttctgtgtgctaatactcctgccacctgtggtactctggggttatataacccagatccattaattctgtaggagcagacaggaatcctatcagatggtacaagtcagagatggtaagacttttcttgatgctcctcaagttattagtcgtagaaagttgatactctgcctcctccagtctattgttactgtagggggaaaggtaagaagcttaatcagaataaaaccttgtttgagattcccaagattcctcaaatttgtctcaaattatgaccaagtatttcaaggtcaagtgttttcttttaccccataaagtcaaaaaaggtttctgcccacgcaagcccttgctatgtaccaagattgataaacccaagtgcctgcaggatgaggagtgcccattggtggaaaagtgctgctcacattgtggactgaaatgtatggaccccagacgttgaatagtaagtagaaaatattatcatcaaaatcattaattatgagtagcatgataaagagctgtcagttttgtcttgtatccaacttgccaaattatcttaagtatcacaatattgaatgatgttactttgattttatatataatcccatcatctgaaagtgatgatatatttggctttttttcaacttcatgactttattttcttgtcttcttgtattgtgtagaacctccaaaataataatgaaaataaaggcaatggcatccatccttgtctagttccttattttaaagtcaatggctcctgcactataaaaagatatttgttgttgaatttggaatacataagttttattgcacttaaattattttctttttccttttctttctttctttcttttttttttttttgtgagacggagttttgctcttattgcccaggcgcaatctcggctcactgcaacctctgcttcccgggttcaagtgattctcctgcctcagcctcccaagtagctgggattacaggtgcccaccatcatgcccagctaattttttgtatttttagtagagatggggttttaccatgttggccaagctggtcacaaactcctgacctcaggtgatccacccacctcagcctccgaaagtgctgggatcacaggtgggagccactgtgcctggccagttatttcctttttaagcctatttcctatccatttatagctactactgaaaatgactactgaattttatcaaataccttttaagcatacagtcacataatgatttttctcttctaatttgttggcataataaattactaaattttcttgagccatccttgcattcttaataaacttaattgcagactgcgtgtatcaatatattattggttctttttagctaatagtatagtttgaattttcacatctatagtcaaaagaaaaataggtctttttaaatttgttttttctatttgggtcatattactttcaaaaaatgagtatgggaactaattgggaaacctagctactttttctatgctctgaaatattttacataatatagcaattcagcattttttgaaggctaccaaaattcagctccaaaagcatctagatcaggttctttctagtggtatattttagtaatttttaaatatttcatcttatagtctgcaggttttctacctcctcttctgcaaattttggtcttttgtattttggtaaaattgatccatttttcctatattttcacatgtattactttagagtagcataaattgttctctatataattcttttatatctttaactttggttaatgctttcatttgtacattcatgtttccacccacctatttactaactattcaatccctttactcacctatccattcactcaacacatatgcaaatacccaatccccactcacctatccctcctttccttccactgacacacttttcaacttagctatttgcctactccatatgtctatccacttacttttcttactcatctttcttctacagacccacttgcccatctagcctttaattcatcttcctattattgacctctctcttccccctttctctgcacacacacacatgcacacactctttcatacccatcaaaatacatattcatcatttctatacctaactccctccatccccctaccaatgcactcctccacctttcattcaaacagcctccatcaataggcccacatatcccatcactaccctatccatctttatattcaatccaatccacttattcacccaatcatccacccatccataatccatgcattcatgtacccaaacatccatgctttcctcactaatccctctccctgctcaaccatcttcccacttatcacactctaccagccacccatccatccacatagctacctacctattcacacacctaccaatcccccccacctaccttgctcttccagcaagatgtactgagtgtttatttggggcctattcatgttttaagcactgcgttctagacacagacctgtttaatggagttcagagcttacttgggggagcaaacatgtaacttagtaatagagttagaggcagagggaacaacataggaagccagtgacagagaatcagtccatgtgacagatcttgggctaatgaaaaagcaggaggtgccaggtagaggctgatcttgttggttctcgttggagtcccctgttctaagcacaggattgttcctgggagagaattggcctggaggcagaggtagggcaccatgccctcaatgagaaaggatgaagaaaggagaggcaaaaccccaggtgggtccttacccagccttctccaagaaattattggagagaaggggccaaaaccatgatttatcccaagtcccaaagacataaattttatttcacctgcttggaaagtgagatgcttggatgggcctgaaaattaggcaagacagaatggaatgaagcaaccagaaagatagttaatttattttcaataaaatttacgaaaaaatgcagccttaattggggaccctgggtaccatttagaaatttactgactttggtgagccaagtttgcgccactgcactccagcctgggtgacagagtgagactccgtttcaaaaaaaaaa

SEQ ID NO: 1640 - DNA, 515 bp, Homo Sapiens
  misc_feature (478)..(478): n is a, c, g, or t
  misc_feature (501)..(501): n is a, c, g, or t
agatgcgaaggctccccgaatgagaaagaatactcggaatcagcggtgaattgcagtgatctttcagagaaagcgcctgttcaactttgtcctctctcagagactcagagccttggggcactgagggatgccagttctgcctgttcatctggaacctggatctaaggagggaagaggcgttgcccctgctggcatagtcaggtaccagcccagccaggtattgaacgggctgagcttttcatgatggttcctgctgacctggaaacatcttaaatggaaggttagcttctatgagtcactgatactctttttattgctatttctaaatttccttggcttgaaaattacttctgctttgcagaaattatctgcttgcagctgtggataatttataacaatctctggtgaacctcagaaaagagatatgcttttgtcttagatggatgtcagcagctgctgcagaacccggtgaaaacancccccgggtagcacgaggctctncgagccgtaactcc

SEQ ID NO: 1641 - DNA, 475 bp, Homo Sapiens
ttttttccagagtagagtttattagaacaataactggtgataatgataaatattgatcaaagactgagcctaggaagtgggttttttgaggctgcatatactcaaggcaattcttcagaaccacagagggctcattggatcctattaaaagctgagagttaatgaataaacagataaaacagagacctgagtagacggtagtcgatattcttgtacatgtattctacctctagattccatagaaagaactaaaagtacatgaatttcactaccaacatctccatcagttaccagctgtatcaccttggatcagtcaggtaacctcccgcgaatctggttgcttccggggcaggggatccgcgggctgcaggtttgagcctgggagccggcagggtggagcagttggagggccaagcctttgagctccagggggggtggccgggacagtgggtagtgccagccgatcggcgtcctg

SEQ ID NO: 1642 - DNA, 505 bp, Homo Sapiens
gcggcgctcgggtttgaagtgccgatcggctgctggggccaaagggggcgccgggccgctctagccggtgaggccggcgggctctctgtggctgcggctgggaaaccgcgcggaggaggtgcccggccggggaccagccctggtccagcgcctccctctctcagcatggacgaggagagcctggagtcggccttgcagacctaccgtgcgcagctgcagcaggtggagctggccttgggcgccggcctggattcgtctgagcaggctgacctgcgccagctgcagggggacctgaaggagctcatcgagctcaccgaggccagcctggtgtctgtcaggaagagcagcttgttggccgcgctggacgaagagcgcccgggccgccaggaagatgctgagtaccaggctttccgggaggccatcactgaggcggtggaggcaccagcagcggcccgtgggtccggatcagagaccgttcctaaagcagaggcggggccagaatctg

SEQ ID NO: 1643 - DNA, 1619 bp, Homo Sapiens
gtcatggaatacgcctctgacgcttcactggaccccgaagccccgtggcctcccgcgccccgcgctcgcgcctgccgcgtactgccttgggccctggtcgcggggctgctgctgctgctgctgctcgctgccgcctgcgccgtcttcctcgcctgcccctgggccgtgtccggggctcgcgcctcgcccggctccgcggccagcccgagactccgcgagggtcccgagctttcgcccgacgatcccgccggcctcttggacctgcggcagggcatgtttgcgcagctggtggcccaaaatgttctgctgatcgatgggcccctgagctggtacagtgacccaggcctggcaggcgtgtccctgacggggggcctgagctacaaagaggacacgaaggagctggtggtggccaaggctggagtctactatgtcttctttcaactagagctgcggcgcgtggtggccggcgagggctcaggctccgtttcacttgcgctgcacctgcagccactgcgctctgctgctggggccgccgccctggctttgaccgtggacctgccacccgcctcctccgaggctcggaactcggccttcggtttccagggccgcttgctgcacctgagtgccggccagcgcctgggcgtccatcttcacactgaggccagggcacgccatgcctggcagcttacccagggcgccacagtcttgggactcttccgggtgacccccgaaatcccagccggactcccttcaccgaggtcggaataacgcccagcctgggtgcagcccacctggacagagtccgaatcctactccatccttcatggagacccctggtgctgggtccctgctgctttctctacctcaaggggcttggcaggggtccctgctgctgacctccccttgaggaccctcctcacccactccttccccaagttggaccttgatatttattctgagcctgagctcagataatatattatatatattatatatatatatatatttctatttaaagaggatcctgagtttgtgaatggacttttttagaggagttgttttggggggggggtcttcgacattgccgaggctggtcttgaactcctggacttagacgatcctcctgcctcagcctcccaagcaactgggattcatcctttctattaattcattgtacttatttgcctatttgtgtgtattgagcatctgtaatgtgccagcattgtgcccaggctagggggctatagaaacatctagaaatagactgaaagaaaatctgagttatggtaatacgtgaggaatttaaagactcatccccagcctccacctcctgtgtgatacttgggggctagcttttttctttctttcttttttttgagatggtcttgttctgtcaaccaggctagaatgcagcggtgcaatcatgagtcaatgcagcctccagcctcgacctcccgaggctcaggtgatcctcccatctcagcctctcgagtagctgggaccacagttgtgtgccaccacacttggctaactttttaatttttttgcggagacggtattgctatgttgccaaggttgtttacatgccagtacaatttataataaacactcatttttcc

SEQ ID NO: 1644 - DNA, 394 bp, Homo Sapiens
  misc_feature (66)..(66): n is a, c, g, or t
acaggagagagggcagagaagaggaggggtgtctagggggactggcagagtgtgagagggaccgtnagggggctcttgatgggagtggaagaagtgctgagggtctgagaggggagatgcatgcttgtccaggctgaagatgcccctatattctgtcaaaggttggcggggggaggtgttggggtcctttcatctggctccgtttctggtgcttctggaagtctctgctcagcacagggaagaactaacacgactaacctaggcctaccctgaatgcttcttgctaaccaggccgagaggcacaacacttgcccccccatccccacaaaccaggtaatgccattttgccagcagctatttgcctatagagatgagtctgtccggtcataactgt

SEQ ID NO: 1645 - DNA, 458 bp, Homo Sapiens
  misc_feature (292)..(292): n is a, c, g, or t
  misc_feature (345)..(345): n is a, c, g, or t
  misc_feature (419)..(419): n is a, c, g, or t
cgtcggggacagccggaacagagcccggtgaaggcgggaggcctcggggagcccctcgggaagggcggcccgagagatacgcaggtgcaggtggccgccggatcccagccgcacttctggcgtgagtatccggactgcaggggccgggacgaggtcggtgttcgaatcttcccagctctggttggcccgcagcctggttagcaggtcctcgtagcgtttccgcaactctcggaatctggagtccttcgtgtgcaactctgagggtccccggaaacttgcgcggctcgcctcnggcagagacagggcgcccccatgcggcagccacgagagcacccagcacaccangagcatctgagagccattcacgttctgagttcttgcccggcattgctgtgagcgtgtggcctctggcccattcngcacgaggctcgtgccgatcttggctcgaggccaatccc

SEQ ID NO: 1646 - DNA, 512 bp, Homo Sapiens
tttatagctctatgtattcagaaattgacagtactttaaacaaaaccgaaaaaaaacctagatatcccttcatcttccttaaagatgacctctccgcgctctctccaacaattttccccatcaacgttgccaagacacttatccattgtatgaaggacctagttttacgtttactggttacctaccgtttccatgacactgggctaggagctaggacaaatatacaaaaaggcctaaaataagcattcatatttctctccgaattcccaacacccggcactgcagtaaatatttaacgggttactttaagggataaaccgtttgctattaaaacctatgaggtgagggctgaggaagggaacggcatttgatggggagacgaggtaagaagaacgaggtattaatatccgacatcaaaatgggcttctaggtctcaacgtcttagacctcaccaccagagccagtaccaaattacacccgtggcacaattttcggctcaatactgttctcgg

SEQ ID NO: 1647 - DNA, 1551 bp, Homo Sapiens
cctgagctcaggagtttgagaccagcctgtctctactaacaatataaaaattagctgggagtcacggtgggcgcctgtaatcccagctactcgggaggctgaggcaggagaattgcttgaacccaggagacagaggttgtagtgagctgagatcgcaccactgcactctagccttggcaacagtgcaagactgtctcaaaaacagcaacagagagcaggacgtgagacttctacctgctcactcagaatcatttctgcaccaaccatggccacgtttgtggagctcagtaccaaagccaagatgcccattgtgggcctgggcacttggaagtctcctcttggcaaagtgaaagaagcagtgaaggtggccattgatgcaggatatcggcacattgactgtgcctatgtctatcagaatgaacatgaagtgggggaagccatccaagagaagatccaagagaaggctgtgaagcgggaggacctgttcatcgtcagcaagttgtggcccactttctttgagagaccccttgtgaggaaagcctttgagaagaccctcaaggacctgaagctgagctatctggacgtctatcttattcactggccacagggattcaagtctggggatgaccttttccccaaagatgataaaggtaatgccatcggtggaaaagcaacgttcttggatgcctgggaggccatggaggagctggtggatgaggggctggtgaaagcccttggggtctccaatttcagccacttccagatcgagaagctcttgaacaaacctggactgaaatataaaccagtgactaaccaggttgagtgtcacccatacctcacacaggagaaactgatccagtactgccactccaagggcatcaccgttacggcctacagccccctgggctctccggatagaccttgggccaagccagaagacccttccctgctggaggatcccaagattaaggagattgctgcaaagcacaaaaaaaccgcagcccaggttctgatccgtttccatatccagaggaatgtgattgtcatccccaagtctgtgacaccagcacgcattgttgagaacattcaggtctttgactttaaattgagtgatgaggagatggcaaccatactcagcttcaacagaaactggagggcctgtaacgtgttgcaatcctctcatttggaagactatcccttcgatgcagaatattgaggttgaatctcctggtgagattatacaggagattctctttcttcgctgaagtgtgactacctccactcatgtcccattttagccaagcttatttaagatcacagtgaacttagtcctgttatagacgagaatcgaggtgctgttttagacatttatttctgtatgttcaactaggatcagaatatcacagaaaagcatggcttgaataaggaaatgacaattttttccacttatctgatcagaacaaatgtttattaagcatcagaaactctgccaacactgaggatgtaaagatcaataaaaaaaataataatcataaaaaaaaaaaaaaaaaa

SEQ ID NO: 1648 - DNA, 737 bp, Homo Sapiens
tccccccctcccccattccgctaggtacgaggctgggtgttgcacgtgtcttagggtagcgcgcgcctgtctctcttcgggtctcgggcccttgggcgcagcggggcgcgcgccatggcgaaggcgaacgaaggtcggggcgcgaagtgatggcctccggggcgccggcgtggagcgcgagggggcccggcgaaggccaactccaatcctgttcgaggtgaaacgttaacaggcagaagttccagatcctgggccggaagacgcgccacgacgtgggactgccctggggtgtctcgctgcactgggccctcaggaagcgtacacagactttactaaaagagtacaaagaaagggataaatccaatgtattcagagataaacgcttcggagaatacaacagcaacatgagccccgaggagaagatgatgaacgaggtttgctctggaacagcacgcgacactcatgagaaaacaaagcatctacaatctaaatgaagatgaagaattgactcattatggccagtctttggcagacatcgcagaagcataatgacacttgtggacagtgacagcgatgctgaggatcgaggaacgttgtctgctgagctgactgctgcccactttggaggaggcggctgggctccttcacaagaagactcaacaggaaggcgaggagcgggagaaaccgaagtcccggaacagagctgattgaagagctcataggcaagtcaaaacaag

SEQ ID NO: 1649 - DNA, 3890 bp, Homo Sapiens
cctctgaagatggaaacatcaggaatgacaacaccgtcactgaagacagacggtgggagacgcacagccacatcaccaccccccacaacctcccagaccatcatttccaccattcccagcactgccatgcacacccgctccacagctgcccccatccccatcctgcctgagagaggagtttccctcttcccctatggggcagacgccggggacctggagttcgtcaggaggaccgtggacttcacctccccactcttcaagccggcgactggcttcccccttggctcctctctccgtgattccctctacttcacagacaatggccagatcatcttcccagagtcagactaccagattttctcctaccccaacccactcccaacaggcttcacaggccgggaccctgtggccctggtggctccgttctgggacgatgctgacttctccactggtcgggggaccacattttatcaggaatacgagacgttctatggtgaacacagcctgctagtccagcaggccgagtcttggattagaaagatcacaaacaacgggggctacaaggccaggtgggccctaaaggtcacgtgggtcaatgcccacgcctatcctgcccagtggaccctcgggagcaacacctaccaagccatcctctccacggacgggagcaggtcctatgccctgtttctctaccagagcggtgggatgcagtgggacgtggcccagcgctcaggcaacccggtgctcatgggcttctctagtggagatggctatttcgaaaacagcccactgatgtcccagccagtgtgggagaggtatcgccctgatagattcctgaattccaactcaggcctccaagggctgcagttctacaggctacaccgggaagaaaggcccaactaccgtctcgagtgcctgcagtggctgaagagccagcctcggtggcccagctggggctggaaccaggtctcctgcccttgttcctggcagcagggacgacgggacttacgattccaacccgtcagcataggtcgctggggcctcggcagtaggcagctgtgcagcttcacctcttggcgaggaggcgtgtgctgcagctacgggccctggggagagtttcgtgaaggctggcacgtgcagcgtccttggcagttggcccaggaactggagccacagagctggtgctgccgctggaatgacaagccctacctctgtgccctgtaccagcagaggcggccccacgtgggctgtgctacatacaggcccccacagcccgcctggatgttcggggacccccacatcaccaccttggatggtgtcagttacaccttcaatgggctgggggacttcctgctggtcggggcccaagacgggaactcctccttcctgcttcagggccgcaccgcccagactggctcagcccaggccaccaacttcatcgcctttgcggctcagtaccgctccagcagcctgggccccgtcacggtccaatggctccttgagcctcacgacgcaatccgtgtcctgctggataaccagactgtgacatttcagcctgaccatgaagacggcggaggccaggagacgttcaacgccaccggagtcctcctgagccgcaacggctctgaggtctcggccagcttcgacggctgggccaccgtctcggtgatcgcgctctccaacatcctccacgcctccgccagcctcccgcccgagtaccagaaccgcacggaggggctcctgggggtctggaataacaatccagaggacgacttcaggatgcccaatggctccaccattcccccagggagccctgaggagatgcttttccactttggaatgacctggcagatcaacgggacaggcctccttggcaagaggaatgaccagctgccttccaacttcacccctgttttctactcacaactgcaaaaaaacagctcctgggctgaacatttgatctccaactgtgacggagatagctcatgcatctatgacaccctggccctgcgcaacgcaagcatcggacttcacacgagggaagtcagtaaaaactacgagcaggcgaacgccaccctcaatcagtacccgccctccatcaatggtggtcgtgtgattgaagcctacaaggggcagaccacgctgattcagtacaccagcaatgctgaggatgccaacttcacgctcagagacagctgcaccgacttggagctctttgagaatgggacgttgctgtggacacccaagtcgctggagccattcactctggagattctagcaagaagtgccaagattggcttggcatctgcactccagcccaggactgtggtctgccattgcaatgcagagagccagtgtttgtacaatcagaccagcagggtgggcaactcctccctggaggtggctggctgcaagtgtgacgggggcaccttcggccgctactgcgagggctccgaggatgcctgtgaggagccgtgcttcccgagtgtccactgcgttcctgggaagggctgcgaggcctgccctccaaacctgactggggatgggcggcactgtgcggctctggggagctctttcctgtgtcagaaccagtcctgccctgtgaattactgctacaatcaaggccactgctacatctcccagactctgggctgtcagcccatgtgcacctgccccccagccttcactgacagccgctgcttcctggctgggaacaacttcagtccaactgtcaacctagaacttcccttaagagtcatccagctcttgctcagtgaagaggaaaatgcctccatggcagaggtcaacgcctcggtggcatacagactggggaccctggacatgcgggcctttctccgcaacagccaagtggaacgaatcgattctgcagcaccggcctcgggaagccccatccaacactggatggtcatctcggagttccagtaccgccctcggggcccggtcattgacttcctgaacaaccagctgctggccgcggtggtggaggcgttcttataccacgttccacggaggagtgaggagcccaggaacgacgtggtcttccagcccatctccgaggaagacgtgcgcgatgtgacagccctgaacgtgagcacgctgaaggcttacttcagatgcgatggctacaagggctacgacctggtctacagcccccagagcggcttcacctgcgtgtccccgtgcagtaggggctactgtgaccatggaggccagtgccaacacctgcccagtgggccccgctgcagctgtgtgtccttctccatctacacggcctggggcgagcactgtgagcacctgagcatgaaactcgacgcgttcttcggcatcttctttggggccctgggcggcctcttgctgctgggggtcgggacgttcgtggtcctgcgcttctggggttgctccggggccaggttctcctatttcctgaactcagctgaggccttgccttgaaggggcagctgtggcctaggctacctcaagactcacctcatccttaccgcacatttaaggcgccattgcttttgggagactggaaaagggaaggtgactgaaggctgtcaggattcttcaaggagaatgaatactgggaatcaagacaggactataccttatccataggcgcaggtgcacagggggaggccataaagatcaaacatgcatggatgggtcctcacgcagacacacccacagaaggacactagcctggcgcgcgtgcacacacacacacacacacacgagttcataatgtggtgatggccctaagttaagcaaaatgcttctgcacacaaaactctctggtttacttcaaattaactctatttaaataaagtctctctgactttttgtgtctccaaaaaaaaaaaaaaaaa

SEQ ID NO: 1650 - DNA, 219 bp, Homo Sapiens
aacatttttgaaagatcactcagctttaacacaccttggctgggtctggataaaaaaaaagtgagcactgcaaatttctagaagaaaacatcaggagaagaaagagagagggggatttattcaaagttgtttccaattccttcaaaacctcaaaccaggtggctatggtatggatgtaaccaagaaaaacaaacgagatggaactgaagtcactgagag

SEQ ID NO: 1651 - DNA, 415 bp, Homo Sapiens
cacgaggggttaggcggctgtagcggagctcgaaaagagtggcgcagggtcgcgcggccccgcctccttccccgcccagcgaagctctctgaccacccctcttttctagagttctgcctcgcttcccggcgcggtcgcagccctcagcccacttaggataatggcgacagctgaggtactgaacattggtaaaaaattatatgagggtaaaacaaaagaagtctacgaattgttagacagtccaggaaaagtcctcctgcagtccaaggaccagattacagcaggaaatgcagctagaaaaaaccacctggaaggaaaagctgcaatctcaaataaaatcaccagttgtatttttcagttattacaggaagcaggtattaaaactgccttcaccagaaaatgtggggagacagct

SEQ ID NO: 1652 - DNA, 693 bp, Homo Sapiens
aaaacttaggctagtacgaggctgggtgtcgggagtgcagtggcgtgatctcagttcactgctgctttccctcctgggctcaagcggttctcccacctcagcctctcgactaacagggactataatcttgcagcaccatgccgagctaattttattttttgtagagatgagctctcactatgtcacccaggttcgtctcaaactcctgaaccctagtaattctcctatctcagcctcccaaagtgctagggttacagacatgagccactgtgcctgtctagacttgtactttcaactgtccatttctccctgtctgtcccatgggcactcatgaaaaaacagaatgctcccaactttattcatcttccaagcctgtagctcttggtatactcactgttgcaagtcagaagcttgatttcatcattgatgtttttctcacgtttcacatctcactcatcaccaagtcatgtaggtgttaatttctgattaacccttgaatttaccgtcttctcatcctctgtacaaaagcctcaagtgagggtcaaattcaacattatcctgatctagacagcccccattctcaatccacccttttccaagttgattgcccaaggacttctaacaataaactctcttttgcaccacagacttctttgacaatatacatgctgttgaccctctctgtagaaaacg

SEQ ID NO: 1653 - DNA, 86080 bp, Homo Sapiens
gatcagagtagtaaagggtgaggcagcatggtaaaatggggagagtacaagccttgaagtccaaaacccaagatccaaggccagcctctgcgagttgtgtgaccttgggccggtagcagtgcctctctgagccatttcttcatctgtgggattggacctgtctgtggggtctccctcacagagagaccatggtaaatgggaacccgggtataagtcacctagcttgtgctgggtacacagcgttggtgcttggcaagaggaatgtcccgtctttgaaccatggtaaggggcaggggataggaggagaaagtgacaggtaggccactgtttactgaaccccatgacgtgccacacactgtgctaagcattttaacatgatctcatctagtgctcctcctatgaggtagcaacgattatccccacttgactgcagagctttgtaaattataaaggtctatactcactctgtcaccaaggctgatgtgcagtggtgctattatagctcactgcagcctctatctcctgggctcaagtgatcctcccacttcagcctcccgagtagctgggactagaggtgcaccaccacccctggctttttttttttttgtatttttatagagatggggtttcaccatgttgcccaggctggtctcgaactcctaggctcaggggatccttccaccttggtttcccaaagtgctagaattacagtcatgaggcaccatgcccacccatgttgatgattcttattattaatcctgactggagggaagttgggacagacagtccttggggcacctgtccagatggaaaaatgtatggagggatggaggagaggaggatgtgcatttggaggagaaataatcattgaaagcaaagatccttctctgaaagttaccttctccagggaaagggtgtttggattcactttttttgaagtaaggagtaggcaggggaaggttctttaagtggtaaaaggacagctggccccttcctagagctcagtgaagaaatctggtcatctggggagtaaaggggtgggcagaccaagtccagagggagcccaacctgagaatccacaaggtgcaggctgggcactggggagtaggcaaggcttgtagacagtggctacgtggacagaaagagcaccaagacaaccgatagcaggctctggggccaggaaaggggggctggacaccaaggaatgcagatggacagtggcaactgggctgcccccttcccctatatatagacattcccaaggaaagctcagcagggctgggccaagctaaataaggcctcccccaggcaggcagggtgccaaagggtgagggagacccatgggattccaatttagtttttattgttttttggttttttggggttttgtttttgagacagactctcactctgtcacccaggctggaatgcagtggcacaatctcggctcactgcaccctccgcctcctaggttcaagtgattctcatgcctcagccttctgagtagctaggattacaggcacataccactacgcccagctaatttttgtttttggtttttttttttttttttttttgagacagagttttgctcttgttgcccaggctggagtacaatggtgcaatctcggctcaccacaacctccgcctcttgggttcaagcaattctcctgcctcagcctcccgagtagccggaattacaggcatgagccaccatgcccggctaattttgtatttttagtagagacagggtttctccatgttggtcaagctggtctcaaactcccaacctcaggtgatccgcccacctcagcctcccaaagcactgggattacaggtgtgagctaccacacccggcaaattttttactttttgtagagacaaggtttcatcgaccgggcacggtggctcaggcctgtaatcccaccactttgggaggctgagatgggcggatcacgaggtcaggagatcgagaccatcctggctaacacagtgaaaccccatctctactaaaaatacaaaaaaattagccgggcatggtggtgggcgcctgtagtcccagctacttgggaggctgaggctgaggcaggagaatggtgtgaacctgggaggcagagcttgcagtgagccgagatcacaccactgcactccagcctgggcaacagagcaagaccccgtctcaaaaaaaaaaaaagtttcatcatgttggccaggctggtctcaaactcctgacctcaagtgatccgcctgcctcagcctcctaaagtgctaggattacaggcatgagcccctgagcccagcctttgttcttttgtttattcaagggattaggtaaggcccaaattgcttaatgtagccaagcaaggtcccattggcccttctaatctcactccttccctccacatcatgttgctgtctgctctgatcagactttaaaatactgctctaggctgggcacggtggctcatgcctgtaatcccagcattttgggaggtgcaggctggcagatcacgaggtcaggagttcgagaccatcctggccagcatggtgaaaccctgtctctactaaaaatacaaaaaattgctgctgggtgtggtggtgggcgcctgtagtcccagctacttgggaagctgaggcagaagaatcacttgaacctggcaggcgaaggttgcactgagccaagatcatgccactgctctccagcctgggcgacaaaaggagactgcatctcaaaaaaaaaaaaaaaaaaaaaaagactactctaaacaccaccttctatgaaccttcaagcctttgcacatgctgtttttttctgccagaaactcccatctttcctctcttcatctgtctacttccctatcatctttctaagctctaacatcacttcctcggggatccttcccccactgtgtccagaccagggagtccaaggtggtctctagtagtttcctcaatcatagcactgagcataccttatgctcacaacccattctatgttctacagatcatcacatttcccagtgctcagcacttgctatgtagcaggtgttcaacagatattatattctacataagaataactgaactggatggtatttagttcaatataagggggaacttcctaatagtcatagttgaacaataatgggaacaggtggcctcaggaggtaatgagctccgtatcactgagtatacccaaacaggagctagatgaccatttctcagggaggctgtagggagatatccatacagaatttaagaatgggggcagtggctcacacttttaatcctagcacattgggaagctgaggcaggtggatctcttgagcccaggagttcaataccagcctgggcaacatggcgagacgctgtctccaattaaaaaattaaaataaaacaaagaatggtgggtggtagctcatacttgtaatcccagcacattgggaggcagaggtaggaggatctcttcaggccaagagttcaagatcagcctgggcaacatgcaaccccacctttacaaaaaataaaatactagccaggcatggtgggcacatatctgtagtcccagatacttgggaggctgaggtgggagaatcacttgagcccaggagtttgaggctgcagtgagctatgatcgcacccctgcactccagcctcacaacagagtgagactctgtctctgaaagaagaggccgggcacggtggctcatgtctctaatcccagcactttgggaggctgaggcaggtggatcatttgaggtcagcagttcgagaccagcctggccaacatggtgaaaccccatctctactaaaaatacaaaaattagccgggtgtggtggcacatgcctgtaattccagctacttgggattacttgtaattccagctacttgggattacttgaggcaggaaaatcgcttgaacccaggagatggaggttgtagtgagccaagagtgtgccattggactccagcctgggtgatggagtaagactctgtctcaaaaaaaataaaataaataaaaataaataaaaaaggaagaagaagcaggaggaggaagaaggaagcaaaaagaagaagaaataataatagtggagaatgcgcaaccttcagatctcctagttctgactgtttatatgacccagcataagcccttcccctcactaagcctcagactacctatctgtaaaatggaggtgataggccagatttctgaggggccctcctgctctaacaacccatggtttcatgaagaccagctttgtgcccagacatgtaaggcatataccgaaggacaagttattttttaaccaatggttggtgaatgagtgagtgttgaattaatgaatgaagtatgccttttttgtcccaatatcttgcccataagccaaatgaagagtaattcgaggtttgaaattgtgcaaactggccaggcacagtggctcacgcctgtaatcccagcactttgggaggtagaggcaggtggatcacttgaggccaggtgttccagatcagcctggccaatatggtgaaaccccacctctactaaaaatacaaaaattagccgcatggtggcacatgcctgtagtcccagccactcaggaggctgaggcaggagaattgcttgaacctgggaggcagaggttacagtgagccaagattgcatcactgtactccagcctgggcgacagagcaagactctgtctccctctctaaaaataaataaataaataaataaaattgcacaaacttaggcttaaaatcccagcccctctatttcccagatgtggatcttggggaagtcactttgcctcagtttcttcatcttgaaaatggaccattaatgtccagttacagcctcttccccaggacgctgtgagggagagatgtgacagtaaagtgcctagagcaggatgtagaaagtggaccctcagaaaataagaaccccagcctttctgctcacatgggagggcagggagctgaaataccttctgcttatcccaaggcattttcccccacccttctctcctgtgccactcagaaagggtaggagctactttggagagattttgattttatttattgtattgtataactatcaaaatctgccctaacaactgatacctaggctttgtgacaggaagccacaataactttttcttgacctgcagctgccctgcggataaaagataaaacaaagctggggagccactgagattatcaggcctgctgcacaggaaaagggcagtatgcagcaggggacctgggctccaggccccatactcagaaacctctgagggaggcagaggcaggtggatcacttgagcccaggaattcgagaccagcctgggcaacatggccaaatcccatctctacaaaaaatacaaaaattagctgggtgtggtggcgaacgcctctattcctagctactggggaggctgaggtgggagggatgacctgagcccagggaggcggaggttgcagtaagcagagatggtgccactgcactccagcctaggtgacagagtgagactccatctcaaaagagaaagaaagaaagaaagagagagagagaaagaaagaaagagagagagagaaagaaagaaagaaacctctggcaagctgtgtggttaagccaagtaactcaccctctctggtcctcagtttccctgtttgcctacttcccatgtgtgaggttcaaatcagattgtgcaagcctgtgaacactgtagaaacaataatcattatgtaagtgatcatttcgtcagcctttgctctatgccaggcacgggacgagcgttcttacaagagctgcaaaattagttttagcagtattgttcctgttttacatatgagaaaacctaggctcagcgaggtcagattccaaccaacccaaatcacgcatcttctcctggcccttcgttttctctcgggagacatggcctccctactattgcataattactttgtgaagttaaagagcgttgggtggaaatgagtgggacagattggagatgacgtgggtggggtgggaggattcaaggagggtacgcgcctggccggactgggatgactctgcggcaggcctgggactccctcaggccgacccaggcttcccaagtccctcctggagccaagggcccgggattctcgggcggctcgggcgagcgggcggggcaggaggcggggcggcggcaggaagctgcccgagcggcgctctgagcggcctgagcccggcggagccctgcagaacccggccgacctccatgggctgcggggggctgcacccggacccctggggcgcggcgcgcccctgaatgcaccgtgggacgcaggaggtagaggcgcacgaggcggcgcaagagacatcgggagggtcctgagcccctccggggaggaacgcggtcctaggctgagtgggttggggggaaagcgatgctggctgggtcccctggttcgcaagacctcggactgccagggggtggggcctcaccgcgcccctccctctccggttcgggccccgcccctcctcctcctgcgccgggctggggtacccctcctccgggatccggtacacagcgtcgcgcgctccccccagggtgccatggcctcccggctcctgcaccggctgcggcacgccttggccggcgacggccccggggaggcggcggccagtccagaggccgagcagtttccggagagctcagagctggaggacgacgacgccgagggcctgtcctcccgactcagcggcaccctcagcttcaccagcgccgaggacgacgaggacgacgaggacgaggacgacgaggaggctggccctgaccagctgcccctcggggatgggacgtcaggagaagacgcaggcgagtgcaggaggacggaggcgggaaccctggggctcgattaggcctccatcccagccgcgttcccagagcatccagggcgctaagttgatccagctgaaactcccacacttcttaaagcgcctgggccacctcttggctgtgtgaccttgagagagtcttaacccccctctgagccaagttttcccttgtgtcaagtgggagaactcactctcatctcagaattgctgcaggcattaaatgtacagggcttgggatccgaatggaaatgatgtattaacgatattttgagggtggagctattaatttagcccctactgtctgccaggcacggtgtttggctcctcggtgcctctctgtccctcagtttccatttctgtaaaaagggggtaagtcctgcctcacactgggaggatgagtgaggccacgtcagtggttgatgtcgaccctggccctaggcccattgatatgactggtcatgtgtctgcagaacggagccccccacctgatgggcagtggggcagtcagctcctggcgcggcagctgcaggatttctggaagaagtcccggaacaccttggcaccccagcggctgctcttcgaagtgaccagcgctaacgttgtcaaggacccgccctccaagtacgtggtgagtgagggtctagaacccctgggctgtgagtccagaagtatggctaggagcaagtagggaagaccccaacttcctgaggggtctatgtagttataaatggttaccttgtttacaaatggggaaactgaggtcagaaaggggatgtaacttgagcaaatcctcacacaagacttagtttccttgagactgactgaagtggggattaaggaccttcctcttaacctggttttgagactaagagaactggtgtgtgcacttccccacccagcccacaaggtttttgcaaattgtagcaagatgtgagatacagagagacagatgttatctgggtcaaacttgagatccaagttgcatgggctggtagttaaggaaataggctttcgatccagaccaatcttgactcccacttatttccagttgtttgactctgggtgagttgtttaaccttggtcatcttccgtttcctcattatagcaatggggaaaatgcagaagattacagcaggagttaaatgagacaatggacaaaaagcccttagcagtgtgcctggcattatgacgtggtcaatgaaatggtagctatgtcatcattatttaactttgggttgaaaatgtttgtcatctagggcctgctgtgtccttataacgcacaggtcaatcagttctcaagcacccgaccttgtccctaagggctagacttagagggttggtggaggttaggatgaagagcaatgttggggaggaccttggagtcccttgctgttttccttgctgttgagagactgacttggagaatgaggtctgctcctttaatgcccacagcgactcctgctccagtcccttttcaggccaggcctgaaagccagctgagctggccactcctgtcagtggcagctctccatctctcactcccctcctcttcaccacccttctccacctctgactcagcaggagggggcctggagcccagtcccacatctgggcctctccacccttttctgttgctgttagtaagcaagggccacacccatggggtgactactccaatttcagcagggaccgactccgattattgagtcttttaaaaaaatttttgaggccgggcgtggtggctcacgcctgtaatcccagcactttgggaagccgaggcgggcggatcacgaggtcacgagaccatcctggataacacggtgaaaccccgtctctactaaaaatacaaaaaaatagccgggcatggtggcaggcgcctgtagtcccagttacttgggaggctgaggcaggagaatggcgtgaacccaggaggcagagtttgcagtgagccgagatcgagccactgcagtccggcctgggcaacagagcgagactccgtctcaaaaaaaaaaaaaaaaaaaaaaaaaaattttgagacagggtctcgttctgtcactcaggctggagtgcagtggtgcagtcataactcactacaacctccaactgggctcaagctatcctcccacctcagcctcccaagtagctaggactacagctgtgcaccaccacgtgtggccaatgatgaagtctgaagtggcaaaggtctcagaactctgggttcatacactggaaggggacaccaaggaatagttcagaggctgagaggaatgggggtgactgtgggtacctggatgggaagggatgacaagatagagcaggatggccaagtatgccccggcctgtgtctggagaagcaaggcacctcctgtgtacaatggggaccctaattccccactcaacttgtgggggtgaagagcacaggctttggaatcagatcaacctgagtttaaatcccagctgggctgttttccagctgtgtgacttacggcaagtctttgagcccttttccccctctttgagcctgcttcctcagctgtcagagataaggaccttccttgcagtgctgttgtgatgattaaatgaaatcacagatgtaaagagtgcttggtacaacaggaggcacagggtaaatgcttgggtaatggaactactgtcattatcacccatctggctgcatgttacaaggtcaatgagataatggatacaaaatgtaaactagatgaacataaaggcttattatatagaccagtgtgtcctgaagaaaactggtgtcctaaagtgtgtcctgcagaaaactagttccctggaatgttaatagctgtttctaaataaaggttttgcaggcaatatgttttgagaatgcagagttaaatgagaatacaataagtttctttattgttaaagtatttaatccctaatagtgatatacactgtgaatcttcaagaggacagagtaagcaaacctaactgaccaggagtggctagagtattgtcagttccacagaacaaatgtgagagaaagatctggatttggtgttagggtgcctttaacatctaacactggttaactctccttttaaacctgttggcttggcattataggttaatccatattcaggttctcagacctgggaggcggggaacttcgtgatcatcttgttcagtgttttccaaacctcagtcattccaatacctccctgattcttgtcctatctaaaaatgccacttgtgtccttttcttcttaacatttttctttaaatgaacctatttttttttctttatctttttttttttcttttttgagacagagtcttgctctgttgcccaggctggagtgcagtggtgcaatctcagctcactgcaacctccacctcctaggttcaagcaatcctcccgcctcagcctcctgagtagctaggattacaggtgcccaccaccatgcctggctaacttttgcattttcagtagagatggggtttcactgttggccaggctggtcttgaactcctgacctcaagtgatctgccgcctcagcctcccaaagtgttgggattacaggtgtgagccactacgcccagccgaacctattttttttcttaaataagtttatcgagacggagtcttgctctgtcgcctaggctggagtgcagtggcgtgatcatagctcactgcagccttgaactcgtgggctcacatgattctctgcctcagcctcctgagtagctgggaccacaagtgcccaactaattctttttctttttctttttcttttttttagagacagggtcttgccatgttgcccaggctggtctcgaactcctggccttaagctgttctcctgcctcagcctcccaaagtactgggattacaggtatgagccactgtgcccatcctttaagtaattttaaaagacaacttcatagcactaccgtacgtggaaagtctcacttgccaccgagagaagctagccataaaaataaaaggtgaggcacggtggctcacacctgtaatccccgcactttgggaggctgaggtgggcagatcacctgaggtcaggagttcaagaccagcctggccaacacggtgaaaccccgacactactaaaaatacaaaaattagccggatgtggtggtaggcgcctgtaatcccagctactcgggagattgaggcaggagaattgcttgaacccaggaggcagaggttgcagtgagcggagattgtgccactgcatgccagcctgggcgacagggcgagactaaataaataaataaagtaaataagtaagtagtgaaaatgaaacgtcattaaatcttgcctagatgttgttgcctgaaggaggccctgacctgagatccactttctgactcttttctaaaaatggagatgagaagtgttagagaagtactttttttttttttttttgagagagagtttcactcttggtgcccaggctcgagtgccatgagcaatctcggctcaccacaacctccacctcccaggttcaagcaattctcctgcctcagcctcccaagtagctgggattacaggcatgtgccaccacgcctggctaattttgcatttttagtagagacagggtttctccatgttggtcagcctggtctcgaactctcaacctcaggtgatccacctgcctcagcctcccaaagtgctgagattacaggtgtgtgtgtgagccactgcaacctgcccaagaagtcctttttttaaaaccaaactgagagctggccaggcgcggtggctcacacctataatcccagcactctgggaggcaaaggcgggcggatcacaaggtcaggagatcgagaccatcctggctaacacagtgaaaccccgtctctactaaaaaatacaaaaaattagccgggcgtagtggcaggcgcctgtagtcccagctactcgggaggctgaggcaggagaatggagtgaacccaggaggcggagcttgcagtgagccgagatcgtgccactgtactccagcactccagcctgggcaacagagcgagactccgtctcaaaaaaaataaaaaaataaaaaaaccccaacaaaaccaaactgagagcttctcaatttgtagtcagaaagattaaaaaacaattaggctgggtgtggtgctcatgcctgtaatcttagcactttgggaagcctagctaggaagattgttcaaggccaggagttcaaggccagccctagcaacatagtgagaccccccctcatctccatacaaaaaaaaaaaaaaaaatttttttaaatagctgagtgtggtggtgcatgcctatagtcctagctacttgggaggctgaggcaggaggaatgcttcagcccaggaggttgaagctgcagtaagctatgattgtaccagtgtactccaacctggccaacagtgagaccctgtctcaaaaaataataattaaaaggggaccaacctcctgatacagtgatatttactctagtgcacaccacctaaaaacctcaggtaccaatacttgtacatgtctcatttttggacaaacactgacttgaccgagcacttccttcactagaaacagaagtggacccagagggggactcccttgcctgggtcacacagagaaggagtagctgacctggggttagaacttgagtcctaggccagtatacttttcacagttatggcagttgtggctatctacagacctgtcctctgggtctagtttggaaaagcctgaccagggatgtggaggccaggtgtccaaagtggaacaagctccaagctggtcctaaaggagccccaagagattggctggggtttcagcttatgtctggttttccagagggggctgtcagaagaactaatgctctatgggaagggagtacaaaaaaaggggcagcagccccgggcactgaagctcatctctgtctttctctcttcttgctgccttgggcctgggtcatttcagacaaacctcaggtaagatgggactgggcttccccgccactgcgcagcagctcccgccctcctgggtgctgtcccaggggtgaaaggaagaggtggggaggtacagctgggagtgtgggggatggggaaggatggggagggaacgggcccgtggacaacttgcatttgccctgacacccaccctccctgcagctctacaccctcgccgtgatcggcccaggaccgccagattgccagccagcccagatctctcgccgttactcggactttgagcggctgcaccgaaacctgcagcggcaattccggggcccaatggctgccatctccttcccccgtaagcggctgcgccggaattttactgcagagaccattgcccgccgtagccgggcctttgagcagtttttgggtcacctgcaggcagtgcctgagctgcgccatgccccggacctgcaggacttcttcgtgctgccggagctgcggcgggcacagagcctcacctgtactggcctctatcgtgaggctctggcactctgggccaatgcctggcagctgcaagcccagctgggcaccccctctggcccagaccgccccctgctgaccctggctgggctggccgtgtgccaccaggagctggaagaccctggagaggcccgggcatgctgtgagaaggccctgcagctgcttggggacaagagcctccaccctttgctggcaccctttctggaggcccatgtccggctctcctggcgcctgggcctggacaaacgtcaatcagaggctcggctccaagccctgcaggaggcaggccttacccccacaccaccccccagtctcaaagaattgctcatcaaggaggtgctggactaacccttgcctagatttaaggccactgtgaggagaggggttgccccagaaggcaggggaaggacctgatgagaacagaatagctgggaggctgcagagggtgctgggagcccctagaagttccaaaagagaatgtgaagcagatcaaggaaacttctgttgagctaggctcagggtgagctttggctggggttgcccttgtgtagtacagggaagtctgacacagcctctccagcctataaacagccggggggctgtggcacaggttggggcaatgttcccttgttggtgggcccccaagctggcaaggcctcttggctgaaggccagggactctgcccctggagtcctggagttaagggatgaaggcaaggctgcaggtctggcccaggggaattaaaagccagccactccagtggtatcagtctctttattggatgtgagggccaaaagggactgtaactcctgtctcaggaatggggatagatgggaggttcttgaagccccaggcgaagctggtacctctggctacagcttgctctctgagacctggggcttcactcggatcacgccctcctgggcacaggtcacagctaggactccatcctgacgccacagccgcccatggaccagcccccgagagccacctgtgggtgaggtgaagggtgatgatggcctgcttcagaacagccaaatacactttttttttttttcctgaaacagagtctcactaagttgccaggctggtctcaagcgcctgggttcaagggatcctcccgcctcagcctcctgagcagctgggattacaggcgcacatcaccatgcccaacctccaagtggacttcttgcaaagggtctggcccagggcagggctgccccacacaagggtgcactgagtgtcgtggctgctccaaatgccccttcatgagcttattatggaccgtcattgaggggtaactcctcccacaggaaccccagttgacagtttaaaagcactttcacacctctcctcgcttcctcaaaaagatcacagagggaggagctctgagaacagtctccttcaacagttcggccaagcagaactgctgtacctctgaccacttgtgttaggaaaactatcggctccctgtataataaatcaagccaggtcctccaagtggtaattcatgaaaaatatccccactaccaccaccaaggggaagaaaggactcagaagagaggacttgaggccatgaggtctggcctcttccctccccatctggagactctttctcccttgctggctttgggcccaagtttgatgtttatgaggatgattgctggtttcccttacacatagcagagctcactcagttctcacagtagccaaatgaagcagttatgtgttgtccagttttccagaccaggactgaaatccagagagggtcaggaatttggccccatgatgaagccaaatctgaacccatgtcctcacttcaaggttatcaatcttggattgtgatgctattggtacttgagaataccccttatctgagtataaagaatccttgagttttgtccttggtttatcaagcaaagcttttcttcatttgaaatgtactcccttggaaaggaggtcagggttctgaagctagacattgatgaacgagtcttgtttctctcccctgcaaggaaggtccaagcaggcccttagggaccactgaatgccccgatcccaatcaggttaatcagaatcacttagagaacttaaaaatacagtttcctggaccttatccaagacctactgagtgagaatcttgagggtggaatcagaatctattttgaaaaggcatccccaaatggcagtctgatggactgcgggtttggataccactgctgtaatgtaaccctctttgtttagatgaggaaactgaggttcagatggaagatatgatttgcctattgtaatacaaagaatctgaactggttttgggactagaactgggtccctgggagaaggtgaatcacatttccagcacattctagaaatttagagcagagcaggtgtcccggcctcaccctctcattttgaagatgaagatgccaaagcctgggagggaaggaaaggaagtgacctgtgcagcgccacacaggaagtcgggaaatcagcatcacccaagaaagcaggctcctgccactcaaggtcagtgcccttgtcccacacggccccacactcaccggcccaggggctctcgcattcatagagcatccagtggtcagctcggaagggggcgtggaaccacatggaatggtccagtgagaccatgaagtgcaccttgtgctgccactggtgaggcagcagtgcagtgcccaagaaggcatagtcggagatataggcggccacgcagcagtgcatcttcatgtcgccctcgcctgcaacaggtccccatcagccctgggctcctgggctttccagctcaggacctgcacggaggtagggggaaaagggactcccgtgcatgggtgtgcagactggttgctgcacaagagcgcttggcctacagtgtgtgtgtgtgataggggagaagtgagatggcgacttggggagggcaggggtgagcagggactgaaattcagtcttcaccacccaagtctcccactctaggccccaaaaggggtgtcttcttccaatttgcacaaagatactttatagttagcagcaaagctggacaacaaccccagcgaggtgccttttgccttcctcagaaaggccttgtgtcgggattatagtcatctccaccttctccccatgcaaagggctgagagggcccaggtgagaagctaagccaacttccccatcatgcagataaggaaacaggcccagagaagggaactcatgtgcccaaggccacacagcaaatgagtggtagaccccttggagagtggtttcctcccatccatggggtactcttaccaatatagccccgggctcgcacccagaacatctgtttgggctccattctctgcagctggctcaggggggatgggtttactggcttgatctcaatggggacctcctgagcagcaattcggttgagcgccaatgggtacctcttttggaggttagggtccctgaaagtaaagggaagagggtcggggtgagacccaggaagagagggagtcacatctgcattgcctcttctgactcccctcattcttccacagggacccctgatatccccaaagctcccctcccctgtggcaggcaggatagtgcagcgtttgaatcccttcttggccacttacgagccatgtggtctcgtgctaattagtaatctgagtctattttcccatctgcaaaatgtggataatgatagtaacctacctcataaccaacactgtgaagacaagatcatgaatatctaaccaacacatcatagtaataaggcataccctgtaatatgcactgttctaagcattgtacatacaatagtattcctcacaacaaccctgtgagataggtactattatcacccccatttcatcagtgaaataagcacagagtccaggtagcttgcttaaaaattggagagacaggatttggactcaggcaatctgggtccacagtatgattattttctatttttttagagacaaggtcgtcttctcacccaggctggagtacagtggcgcaatcagctcactgcagtctccaactcccaggctcaagccatcctcttgccttggcctcccgagtagctgggactagaggtgtacgccactgtgcctggctaacatttttattatttctttattttgagacggagtctagctctgtcacccaggcttgagtgcggtggtgcaatctcagctgactgcaacctccgcctcccaggttcaagtgattctcctgcctcagcctcccgagtagctgggattacaggcgcctgccaccatgcccagctaatttttgtatgtttagtagagatggggtttcactgtgttggccagggtggtctcgaattcctgacctcatgatccgcccgcctcagcctcccaaaatgctgggattatttttacttttttttgtagagatggggtctctttatgttgcccaggctggtctcaaaatcctggccttaagtgatcctcctacttcagcctcccaaagtgctgggattacaggagtgagctgctgtgcccagccacttcattattttaaacactcaagaaacaggctgcctgacttggcctgagttaccaaaccctacacagtagggaacattgcatccccccagggggaggagcccattccaaggaactcccttcaatacagtgacaaccacccatagtgctctgcacaggtcctgccattttcacccctatcctctggagtgctgttggacagaacctcctatgatgatggaatgcctatctgcacagcacactatggtagccactagccacatgtgactatggagcacctgaaatgtggctaatgcaactgaggaacagaattgttcattctactgactttggtttttttttgtttttttttttttaagacggaatctcgctctgttgcccagtcaggagtgcagtgactcaatcttgcttactgcaacctctgccccctgggtccaagcgactctcctgcctcagcctcctgagtagctgggattacaggcacgggccaccacgcctggctaatttttttgtgtgtgtatttttaatagagatgaggtttcaccatgttggccaggctggtctcaaactcctgaccttgggtgagccacccgccttggcctcccaaagtactgggattacaggcatgaaccactgcgcccggacctatttaattttaattaatgtaatatagccacgagtggctagagactaccttattaacagcacagatctaaattcaaggtcctttaacaatgtcttcctttcatttcagcaaacatttgtcgaactgcaaccacacaccaggccctgtgttttttctgttaatagtgatataactacaattcactgccattgtgctagttagtactagcacgctaagtgccttttctctcttatttaatcctcacagcagccttatgaggtaggaatatgattagcaccattttataatggtgagtactggctcagagtgggaaagcaacttgcccaaactcacacagctagtagggacaaaatctagaattgaatccaggcctttcaggttcccaaacccacatccatcccgtcatactctgctgcctccccagtatctaacacgagatagagacattctctccttatgatacagctaagaagtaggcagggcagaaatgagcattcccattttttagaagaagaaactagggccctggggagttgggcactgtcccacagcaggtgagcattcacagaggcacagccctggacagaatccatgtgtctatcctttgtctggacccagagctctttcccctgtaccagcatttttcaaacttgattaggtgtgatccaaataaatatattttaccaggtattcaaaatatctaacatgctccctggtggtctaatggttaggggaaaatacatatttgtatttttgtacatatgttttatatacataaaacatgtggccgggcacggtggctcacgcctgtaatcccagcactttgagagaccaaggcaggtcgatcacttgaggtcaggagttcaagaccagcctggtcaacatagcgaaacctggtctctactaaaaaaatacaaaaattagccaggcatggtggcatgtgcctgtaatcacagctgcttgggaggctgaggcacgggaattgcttgaacctgggaggcagaggttgcagtgagccgagatcatgccactgcactccagcctaggcaacagggcgagactctgtctcaaaacaaacaaacaaacaaaaacatgcactaatgcaaaggcagtgaccaaacataggccatagcgctgcagctctccagaggacactcactcctggtgtgcattaagtcctaagttgctggaccaggggcctgggggagagagggaatcacttagggggctggggaggtggtacttaacaagtggttacggaagtatttctatatacatatatatataaaatatatatatggttttttttcccaggtatggtggctcatgcctataatcccagcactttaggaggtcaaggtgggtggatcacctgagatcaagagtttgagaccagcctggatagcatggtgaaacgccatctctactaaaaatacaaaattagctgggcatggtagcaggtgcctgtaatcccagctacttgggaggctgaggcgggaggatcacttgagtctgggagtcagaggctgcagtgagccgagatggtgtcactgcactccagcctgggcaacaagagcaagactccatctcaaaaacaaacaaacatgtatatatataaacaacaacaaaatatatattctttttttcttttttcagacagagtcttgctcttgttgcccaggctggagcacagtaacacgatctcggctcactgcagcctccacctcccaggctcaagtgatccccccgcctcagcctcccaagtagctgggactacagacacatgccccgacacccggctaatttttgtattttttatagagacagggtttcaccatgttgcccaggctggtcttgaactcctgggctcaggtgatcctcccacttgggcttcccaaagtgttattataggtatgagcccccacacccagccccagccttatttttaaattagagatggagtcttgctatgttggcgaggctagtatccaactcctggtctcaagcaatcctcctgccttggcttcccaaagtgctgggattataggtatgcgccactgcacccggccaagcccttcattttataccatgacccagtacagacacacaccagaaacacacatgactaaacctcaagtttcacaaaaggattcttgcccttaatacatacatattattcactccagtatcttcttttctaatctgtattttaaaaatgctggtcaagacccactaaaggattctatgacccacaaacagatagcagctgcattttgaaaagtctgccatggagcctccaggtctctcaccttaaatactggtcaatgagggtctcacagtcaagcagctcttctggtggtggcacagtgggcatggagaactggtgctgcatggggctgggctgggcctgctggaaggaggcctggcagatgaagatgggcttcccatgttgcacggccttcacagagcgcaccgagaagctcgaccctgttcgtgtccgctccacttggtacagtactggcagcttcgggtcccctgcagtgggcacaaggacacagtgggtccacaggccctgtcatcatcacaacgcctgacaggcactctactactcatcttccattccatttcatctcagtgactactaactgaggtctgctaaggtccaggcccagggatacagagaccaccaggccctgtcatcaggcttctccctgtgcaggtggagcttttctctaacagcacaaacagcagagacattgacagattccttgcattcaaatcctggctccaccactcaccagccgtgtgacccttcacttctctgagcagtgtgcttatttgcaaactggggatcatcatggtgctcatcgcttacaggattttaatgataatgaaatgaatccgtagttgtaaagtgtttagaataatatctggcacatagtgagggctctatatgtgtttgttaaataaaattaatactccttgcttctatcttgctccatctatgcctgggatcttgtcatcagtccaaaaccattattctagatcagggagcagtaaatctagcctgcagcctgtttactgtttattctgttgttgttttcttttttgagaacaaacaaaggctatttattcagcgcttgttcttttttttgtttgtttgagatggagtcttgctctgtcacccaggctggagtacagtggtgtaatctcggctcactgcaacctccacctctcaggttcaagcgattcctgtgactcagcctcctgagtggggggggactacaggggtgcatgaccatacccagctaattttttttttttttttgagagacagtttcgctgggtcaccgaggctgaagtgcagtggcgctatctgggctcactgcaacctctgcctcccaggttcaagccatgctcatgcctcagcctcctaagtagctgggactacaggcgtgcgccgctacacccaacaaatttttgtattttttgtagagatggggtttcactgtgttgcccaggctggtctcaaactcctgacctcaactgatccacccaccttggcctcccaaagtgttgagattacaggcatgagccactgcgcccagccaatcagagcttgttgtagcaggaagtcaaccaccatcacttgcttttggcagagacttagaggcaggcaaaggaatgggaatgctctgtagtggaaaaaaaggcttcagggatgctcccattgcaggctgttggcatggggaagctgttggtgggctaactagaagcatgacacctggctgggcacggtggctcacacctgtaatcccaacactttgggaggctgaggcgggcagatcttctgagaccaggagttcaagaccagcctggccaacatggcaaaaccctgtctctactaaaaatacaaaaaattagccaggcctggtggcacacacctgtaatcctagctactcgggaggctgcagcaggagaattgcttgaagctgggaggtggaggctatggcaggagaactgcttgaacctgggaggtggaggctgcagtgagccgaaattgcaccactgcactccagcctggggaacaagagtgaaactctgtctcaaaaaagagtgggacatcctatgtgattggttaggagtacatatttggctttctccggttggtcctaagttggaagcaggggcaaaaattagggcagctatcagttattaatcaagtcctggctttggaggccaattgttacagtggtcattatttggcttgctggactggttggtaaagatagtggtctgacttcctacaagtctgacttgtggatagtaggctggcttcctgtgctggttgctgctattgtgcgtcagagttctgtttttctacatggtctagccattgtctgtttgtatattcagcctctcccaggcaagggccactgtcagtcacttcacccctgatgtatatggaagccatttggtccttcactgtcaggtgtctctgctccaaagcagagtggaagagcctaggcaacacagggagaccctgtttctacaaaaaataaaaaataaaaattagctggacatggtggcatgtgcctatagtcccagctaatcaagaggctgaggcggaaggatcacttgaggccaggagatcaaggctgcagtgagccatgactgcgtcactgtgctccagcctaggtgacagagcaagaccttgtctcaaaaacaacaagaccaccaccaccagagtagaaggcactggccagggataaggcagccaacaacaagcaggtgagggaagatttggagaggaagagaacttccctggtttccctgaagttctcactttgtctgagtcaggctgaccttgaggaaccctgacatctgggccatgagacatcttggggatgactttcaaccttcagatgaaagaagcaggtctagagaagtgttgcttccttcactctgatccaaatggggagtcaaccaggcaccagggctcaatcaacagcaataaacatcactgtctgaggtcaactggcttgctcagctctctgttatcaggcactgccaccagcagcacttctatcagagtgcgagctcctcaaggttaaaggcatttgagaagggcttaccaagagtccagacactagacaaagttacttgtgcagtctgctttcagacactgggaatgaagtcttcctccctaccaccaaacttggggggaaaaaacaaaaaaaaacctctaatccaatccttggtctgcaggtaagctaaagtgcagattcctgaggaggatcacagaaacttcagtactctggtctacctttcagtgtgaatgagttccagccctattcttgaaaattgttattggaacagagcaggtaggccctgaggcatattgaagggagttaatgattatggagtgatgcagggtgcctgacagcattggacaggagggtatgttttctcatgttggtctcacaataactatgtagagccactcttacccccattgtacagatgaggaaactgttgccttaaaatacaatttttttgtaataaagtcatgctaatttgtttacatattgtctatagttgctttcactggcaaaacctaaaatgtttactatctggccctttctagaatgtttgctgaccttgttctgaattcttcaagctctaaatttacctctgtagagaaaaactaaaaacaaaacaaaaacccaactaattcacattctttcctgggcttttagaaaaagaactgatttgataaatggccaaggaccaaccctccccctcccccataacatcttttatttttaaaatgtaattgaaacatctcttttttgttttgtttttttgagatggagtctcgatctgtcgcccaggtgggagtgcagtggcgcagttttagctcactgcgacctccagccgccgggttcaagcaattctccttgcctcagcctcagcctcagcctcccgagtagctgggatcacgggctaaggtcaccacgcccagctaattttcctttttttttttagatggagtcttgctctgtcacccaggctggagtacagtagcacgatctcagctcactgcaacctccacctccagggttcaagcgattctcctgactcagcctcctgagtagctaggactacaggtgtgcaccaccacacctggctaatttttgtgtgtgttttttttttttagtagagatggagtttcgccacattgtccaggctggtctcgaactcttgacctcagccgatctgcccgcctcggcctcccaaagtcctgggattacaggcataagccacatgcccagccaaaaaacagcattggttttaatatctgatatagctggcagagtcacaccacaaacagataagagctctcccctttttgccttgcagccaggaagctcagaactaaaccttgtatgaaactgcaacaatatggcttagccaaattttttgacatgatcgcttctcccaaatcccattactactggcctaatgtcctttgacttttaatattcccataataactaccaattattttagctatcttgcagcctttcaagacacaagcaagggcacaaataattatttttatttatttatttatttttgatggagacaagagtctcgctctgtcgcccaggctggagtacagtagcatgatctcagctcactgcaacctccgcctcctgagttcaagcaattctcctacctcagcctcctgagtagctgggactacaggcacatgccgccatgcctggctaatttttagtattttagtagagactgggtttcaccatgttgcccaggctggtctcgaactcctgagctcaggtgatccgcccgcctcggcttcccaaagtgctaggattacaggcatgagccaccacgcccggccaaataattatttattttgaaatggtggcttggacacagctcatttcacgctgctcctggatgaagactttccaagaaagaggatcttttccccagaacctgggatgggtaccctggcagctctctcattgtttagaattattgcccaagagcgaagcaaagaagcaggaaagagtttggcactcaaagacacataaaccaggttcaaatcctggctctgcctccttgggcactgtgggagctggttccaaacctcttcaggtcccagtttccttaggtaagaatgatggcaggaatgcctgccacccatgtttacttatgaagactaaacaagataatgcacacaactatgctctgtatcatgcaaattttaattattcccataagttaatcatcaaaaactaataatatttatggaaaactagattatgccaagccctgcactagatactttactggcaaagactcattgaattcttccatcacaggatgaagagattcagagttcaagtaatgcccccacccacacaaaagaaaacagccaggtatttcactaggctggaaggattacaatatcaaaaggctggtacttacaaacaaattaaagaaacaaagcacatatttactcccaactagcataaagataagaacctggctgagcccaaggtaagtattcaaatactttatagcagtgactgggggccgagaagaggggggccaatcaatactcctcagggatgaggagtaagagacacgggacagtatgaaaaagtgtatttaccattacagggataactttcatatttacaaaatgaagggggaaaccccatggttttcttaatacaaatcacatactgtaaaggtccacaaactcttctcagctggggatctacgcagaacacatgagggcatctgctctgggggtaacagggaaggaaagaaaacagtgagggttttttttgtttgttttttagcataggttttgcttttattttccttttatttatttttttgtagagacaaggtctcgatttattgccctggctggtcttgaattcctgggttccaacaattctccgcattggcctcccaatgtgcggggattataggcatgagccaccacacataggttttttgtttttgagacagagtctcgctctgttgcccaggctggagtgctcgcccaggctggagtgcagtggcacgatcttggctcactgcaagctccgccttccgggttcacaccattctcctgcctcagcctcccgagtagctgggactacaggcacccaccaccacacctggctaatttttttatatttttagtagagacggggtttcaccgtgttagctaggatggtcccgatctcctgacctcgtgatccgcccgccttggcctccaaagtgctgggattacaggcgtgagccaccgcgcccggcctcacacataggttttaagttacattatctgaccccagagctgtaagaagctgtagagatcatcccactaaaatacccttggtcccacccttctccattttacagctgaagtaaaccaaactgtagggcggggaggtaacctcacaaggctgcatggtaaattatggacaaaactgaagctaggccctacatctttggtttgtttttattgaccctatgctcagttgacaaaagaagccttagatcccttgactctcaggctggtgctctcttctccaacccaagctgccctacctccacacctctagcacagaggtcacagcacactgagaacctagcacagcgctccgcaccaggagctatgttaagaatggaagaacaaaagcccacaaggagcagttaagcaacaaagtcttgtgtcattatcagccagacatcaggtacccagtgagtcccagcaggtgtgaggtccaaggctcattgttagccccagacctcgttccaccctagacacctcttagggtggtagtgtccgccacccctccccttgtcttccagtctccctctcttcccttttgacctcagcccccaaggccagaaatggctgctgggccaccagggttgggttggggcaggaagtggggggtttacctgcccgaacaaagtagcagtgcagggagtgcacgtggacgtcttcactcacagacttggctgcagccaccagggcctggcccacgatctgaccaccaaacagcctcttggccggtacccagtaatgccttcctctgtagggagagggggaaagagggaaagacttgggaactgggccaaattctactaccctcactaagactctaatgcatgatctcttcaccatattggggtttaagatccttttgagaatatggtaaaagccataggtcctttccccaggcaaatatccttatgcataaaaatcctctgggccgggcgcagtggcttacatctgtaatcccagcactttgggaggccgaggcaggtggatcatttgagatcaggagttcaagagcagcctggccaacatggtgaaactccatctctactaaaaatacaaaaattagctggacgtggtggcatgcacctgtaatcccagctactcaggaggctgaggcaggagaatcacttgaacccaggaggcagaggttgaggtgagccaagatcgcaccactgcactccagcctgggtgacagagcaagactccatctcaaaaaataaaattaaataaatgtataaatgaataaataacaagagccctcagacatcaagtctaactccttcagtgtacagatgagaaaactgcagcttggccccagagatgaaaatgcttgcccagaatgtaggcccattggaagctgaataattatgtctctagcctcccacgtcccagctgtttggcattttctgtaacaatgagttatgaacagccctccatgacctggcaggtggctctcgcctgtaatcaatcccagcactttgggaagccgaggtgggaggatcgcctgagcccatgagttcaaaaccagcctgggctccaaagtggggcctcatgtctactaaaaataaaaaagttagctggatgtggtggcaagcgcttatggtcccagctaaacgggagactgaggcagaagggtcacttgggcccaggaggtcgaggttgcagtgagccatgttcgtgccactgcactccagcctggacaacagggccagatcttgtcttcaaaaacaaaaatcaaatagccctccaagaagttatttacaattccttaagtggaaggaagggagctcaaagtaagataacttccagtaaagccaggagaagccttggaggtcaaagctgttagaagccttgctgcagggggctgggcgcggtggctcatgcctgtaatcctagcactttggcagaggtgggcagattacaaggtcaggagttcgagaccagcctggccaacacggtgaaaccccgtctctactaaaagaagttaaaaaattagctgggctgtggcgcgcctgtatgtcccagctaatcaggaggctgaggcaggagaaatgcttgaacccgggaggcggaggttgcactgagccgagatcgcaccactgcactccagcctgggcaacagagcaagactccgcctcaaagaaagaaagaaacccttgctgcagtcaagaacttcagcgatgctgggaaagaaaaaaacatgcttaggcctcagaataagtaatgagaaaccagacccaccaaatggtactgggggcgggatattgtgagaagaaaaggatactgaagacacaaggagctgcggcgtcggttttaaggctgatccatcagctgtgtgcccttgggcaaatcactgccctctctgggctagctcccccgtgaaggcttagggcaggctgccgagcagggtctctcaggtcaccactatatttgctcagctgtgcagacctcgcagcgcggagaggaagggaggaagccagagcagagaggacagctctgttgggggcgagttctctcctaatcgtggcagagggtgcatcccacgcagagccatactagtcccggagccaggggccccgggcggcggcagtcaagatcaagtttctgccctaaaggaggggatgctgggcaggagctgccggctacctgaagagatcctcgtccagcggctcgaggttgagcacggtcgtgaccaagacgctacggaggtccccagggggatcgccgcggtcgccacagccctgcccatcttctggggcctgcggggacgacatctagttcaatgctgcaggccctgcacacccgctccgcggaagacgcggagacatacacagaacctgactcttccggcagattgccctagtaaccggaagtctcctgcagaccccgggaaggaggaatctaggttatgattggtcaggactcctgtcagtccgctggtggctgtggccctctttctctagcaattggagaaaatgaatgccaatctgcgaatcctgtgtgtgactggatatgtcgctgaggaggcggaacctcgggactggataatatggactgagtgtcatttcccctgtcagatagcaaatacacccccttcctcttgtaacccggtcaggcctagggttcctccctgagttccagaataggccacccagttggggcggacccttaaggcattctgggcccacgcctgcctataaaccctcatagtgtgacctttgacccctggtgtgatcttgggcccgggctgggaccagcccctagtgtgggttgtgggggcggccatggagctgggcagctgcttcaagacctatgaggacttcaaggagtgcttcagcgcctacaaaagggagaacaggtgctccttcattctcagggactgcgtctccgtccgcttccacaacctcaaccatggcacctccatccgcgaagacatcctgtaagggcgggcggggcggggcgggccaagagggtggggaggaggctggacctccggagggctgcctggaggaggaggggtgcataggcacgcattgggctgcgtggccattcattcaacaggcactcattgagcacctgctgtgtgccttgtgaagagagctaagcctccacggccattggtttttgaccacccactccactttcactccattcacaggcttttctggaatttataactgcagtttctcccattgttttgagcagctgcagcaacccaaatacaaagtatggctttcataaacggataaaaacaccttggcgataatttccttcatcagtctcctctttacaaaacagtcacatggtcgttggaatgttcgttcattcattcattcagtttttagttcttatatatttgttgaaacagggtctcactctgtcccccaggctggagtgcagtggcacaatcagctcactgagccttcaactgctgggctcaagcgatcctcccacctcagcctctcaagtagttggaactggaggtgcacgccaccatgcctggctaattatttgattttgtacagactgggtcttgttatgttggctaggctgttcccagactcctggactaagcgatctttcggcgtctcaaagtgttaggattacaggcatgagccactatgcctggtctattcattcattttgtaaatggtttttgagctccttatattaaccgttttcaaacactttccatgtgccaggcagtgttctctatgcatgctttaccctgcagggcttttttttcagaattatagataaatgttatttttttgcatttgacagatgagaagatttgacagatgagaagtcaggcttagaggttaagacaggagttgaaaactcaaatgccttcagggattaggtgaaacaacccaatgtaagaaagttttaactttgaattttactttaagaaaaagaatgatgaaatagcaaccaacaccaggtctttgtgctagggacaacagaagtgtgaaatgggccaaatggagagtagatgccatctaatcagctccagctgatggctgccatatgaaaataaagatctagtgttgccagaattttgggcaagagttgtcagaaatccacactttatgtggattttcccatttaaaaaaattgaatcagttcaaattttaactcagagcatgcgggccaactcagagttaaagcatatccgagtttgagacttggattgagatgctcaaccaaagctcctcaattagacagccaggctatattctttccactgttctgaagtccagtgctatgctgggtataggtgacataaagatgaataagtgttcaaactatccccagagaactaggataaacttgaactcaagcaaactggtgtgtgataaatgctttaaaaggaatgtggaaaaaaaaaaaaaaaaagaaatgtacggagaaagaaatgaatgacaaatgcctgggaggtgggggaagtcttcacactggaattgatggtttccctgggctgtgaatgaatgtagagtgctagagtagatctgtggttaattactgagtaccatggaggcatttgaccagaagttgctgtgcagaaggacctacaggagcaaagacaaagatacatgaaagaaggttggcatgttagagtaacagtgagggataccatgtttggcaggagatgaagtcatttgcagtctaagggtctttagggaccattgtgaggtgtttggaccttgtcctttatgggtaggaccttgctaagcaatgagaggaatacaaaaaaaaaaaaaaaaaaaaaaaaccacagttgcccgtaaacacccttcaggaagaccatctcaggtggctagcacaaggtgtggcccatagcaggcattaaataattattgaatgagtgagttatcaagtactaaccatgtgattcagggaaataggtgctgcgggaactcagaagagaaaaatcactgcgagctagagacgtaagagtgaaagggaggcttgagctgggcccccaaagatggagagctgtcagaaggtgtattggttttctgtttgccactctagtgaattaccacaagtttaatggtgcaaagcaacacaaatttattatcttagagttatttaggttagaagtcaggcacaggtcttagcaggctaaatcaagatgtctgcagggctgtatttctttctggagtccctgggtaagaatccatttcccgccgggtgcagtggctgatgcctgtaatcccagcactttgggaggccaaggtgggcagatcacttgaggtcagcagttcaagaccatcctggccaacatggtgaaaccccgtctctactaaaaatacaaaaattagctaggcgaggtggcacatgcccgtaatcccagctactcaggaggctgaggcagcagaattgcagccgggaggtggaggttgcagtgagccaagatcgtgccattgcactccagcctcggcaacagagcgagactccatctcaaaaaaaaaaaaaaaaaaaaaaaaagaatccttttcctttccttttccacctcctagaggctgcccaacacaccttgggtcatggcccccttcctccatcttcaaagccagcagtagcaggttgagtcatcacatcactctgaccttgcttctgtcatcacgtctctgactccctcttctgcctccctcttccacttttaaggatccttgtgattatattgggcccacccagataatcccagataatttccctattttgaagtcagctgatagccaccttaattctatctgcaaccttaattctcctttgccatgtaacctaacgtattcacagagtctaggattaggacaaggacatcttcaagggaccattctgcctgccacaagaagattaataacctggaggtaaaaatggtgtgagtcagtacagacgtaaacatgacgtgcttctattagaaaacagtgatgggctgggcacggtggctcacacttgtaatcctaatactttgggaggctaagacagggagattgcttgaaatgaagagtttgagaccagcccagactataatcctgggcaacaaaatgagatccccgtctccacaaaacaaaatttaaaattaggggccaggttgtggcagctcacacgtataattccagcactttggtaggctgaggcaggcagatggcttgaggccaggcattctagaccagcctgggcaacatgccaaaacctcatctgtacaaaaaatacaaaaagtagccaggcatagtggtgtgtgcctgtagtaccagctactctggaggctgcggcaggaggattgcttgatcccaggagtcagaggttgcagtgagctatgatcgcaccactgcacactacattttagcctgggcaacaacagagtaagatcctgtctctaaaaaaaaaaaaaaaagcaagcagtgatgtatgtttgcacgcacatacaaaagccatgaggagacctgcttagctagaaggaaggatttatgctggagcagcaggaaaggaaattggagggttgataagcaggttggtgggttgggatttgttttgtttgttttaggagacaaggtctcgctctattgcccaggctagagtacagtgggagggtcatagtttactgtaaccttgaaatcctggcctcaagtaatcttactacctcagcctcctaagtagctaggactacaggtatgcacccccatgccaggctaatttttttttttcaattttttgtgtagagacagggtcttgccatgttgcccaggctggtcttgaactcctaggctcaagctgtcctcctgcctcagcctcccaaagtgttgggattacagatatgaaccaccatgctggacctgtttttgtttttgaaggtgaacaattttaaaagtgtttttgggccaggcacaattcaatcacttgaacccaggaggcggaggttgcagtgagtcaagatcatgccactacactccagcctgggcgacacagcgagactctgtctcaaaataaataaataaaaagtgtttttgtgtttgagtggttaacataattaaaaatattttcaaaaagtacagaagggactaaaagggtcacctccactgcattagcttttggttttttttggttttttttttttttgagagatggagtttcgctctgtcgccaggctggagtgcagtggcgcgatcttggctccccgcaacctttgactccctggttcaagcgattctcctgcctcagcctcccaagtagctgagattacaggcacgcaccaccccacccagctaatttttgtatttttagtagagacagggtttcaccatgtttgcgaggaaggtctcaatctcctgacccggtgatccacccgcctcagcctcccctgctgggattacagatgtgagccaccgtgcccagtctgcattatcttttttatctatttatttatttcatttttatttatttacttacttacttacttattttgagatggagtcttgctctgtcacccaggctggagtgcagtggtgcaatcttggctcactgcaacctctgcctcccgggttcaagtgattctcctgtctcagcctcccaaggagctgagactacaggcatgcaccaccacgcctggctaattgttgtatttttagtagagacagggttttgccatgttggctaggctggtgttgaactcctgacctcaagttatacacccatctcagccttccaaagggctgcgattacagctgtgaggtgccacgcccagcctatgtatttatttatttttatttttgtagaggtgaggtctcactatgttgcccaaactgatattgaactcctaggctcaagtgatcctccctcctcggccttggaaagtgctaggattacaggcatgagccactgtgcctggcccactgcattattatatagaggcaatcagcgttaccttcctgagagatactgaggctgaacaaacatgtcttgtatatgcatttgcatctttttgttgttttaacacaagtggcagcatgctatttagacatagccttctgtacctgctgtacctggctcttctcacttaccaatatatcttggaaattatgccaccgtatgggcaatttgatttgactttcattgatttccttgtttttttttttgtttgtttgtttgtttttttgtttgttttttgcagttgttaactaaaaagttactccatgctggtgtctggagatacgttgttgaaaaatataaattgaatctctgctcttgtggagacaaatactaatctataatcacagaaataataatttccttaaagtggtagtagagctccaaaggaaaaacccagggtgccctgtggaggggtgatggtgacacttattctgattgtcaggaacagggtgggggtgctggttgacaccctaaaccaatgcaggctcttgctcagaaaaaactgtcagccctgagattttgcagatactttacaaagcacattcacctttattacctgacctggttctctgaataaccttgtcagaggcaaattttgctgttcccactaaattagttaatacatgtaaagtgcttacagcagtgccttgtagatggaaaatagtccacaaatattgtattgttttacagatggggagacagagccaggagaagtcaaacattaagagacaaatagtttagggccaggcgcagtggctcatgcctgtaatcccagcactttgggagaccagggcagacagatcacctgaggtcaggagttcgagaccagccaggccaacatggtgaaaccctttctctactaaaaataaaaaaattagccaggcatggtggtacgtgcctgtaatcccagctactcaggaggctgaggcaggagaatcactttaacccaggaagaggaggctgcagtgagctgagatggcaccactgcactccagcctgagcagcagagcgagactctgtctcaaaacaacagcataaataactgaaaattagacccagcctatttactgacagagctcttaattgttgtacttagccactgggctctaatagttttctaatgtcacttgtccatttttccctcaacaaacttgtggtaagaggctaagtgtttaccatgggccaggagtacaaagatgagctggagtacaaagatgaggaaattgtaggctccacccctgaggacaatagcggactgagatagcttaggaggcggtgaattcatgagcagcacaggtctttagcagaaacaagttgactgctggttgtgatgttataaaggacattcttggatcatttattgcaaactggctctgtgcagagctcactgtcttgggctttttgagtgatacgtgggtgtcttgggggactggagggttggtgggggaaatgtttttaggaggtaatttagtacatgtttctgcagccaaatacacatattactgggtggtcaggtgagatgatattaatacttatgtgaaaatgtagacataaagttccttgataagcaaagtaaagcaagtgaactaatttaaagaaaaccatttacagctggatgttgctcacgcctataatcccaacactttgggaggtcgaggcgggcggatcacttaaagtcgggagtttgagaccagcctgcccgacatggtgaaaccaactctactaaaaatacataaattagccaggcacggtgatgggcatctataatcccagctactcagggggctgaggcaggaggatcccttgaacccgagaggcggaggctgcagtgagctgagatcacgccactgcactccagcctgggtgacagagtgagactccatctcaaaaaaatttttgaaaataatggtgcagggccgggcgtggtggctcacgcctgtaatcccagcactttgggaggcccaggtgggtggatcatgaggtcaggagatcaagaccatcctggctaacacggagaaaccctgtctctactaaaaatacaaaaaatttatccaggcatgtagccggggcgcagtggctcacacctgtaatcccagcaatttgggaggccgaggcgggcggatcacttgaggtcaggagttcaagaccagcctggccaacatggcgaaaccccatctctactaaaaatacaaagaatagctgggtgtggtggcgcacacctgcaatcccagctacttgggaggctgaggcaggagaatcgcttgaacctgggaggcagaggttgcagtgagccaagatcatgtcattgcactccagcctaggcaacaagagcaaaactctgtctcaaaaaaaaaaaaaaaaaaattatccaggcctggtggcgggcgcctgtagtcccagctactcagaaggctgaggcaggagaatggcgtgaacccgggaggcggagcttgcagtgagccaagatcgtgccactgtactccagcctgggtgacagagtgagactccatttcaaaaaataaaaagaaaagaatagtgcaaatattatatgggtggctatggcagatgtaaaggtgattggcaattctttttctggaaaagctggcccaagggttaaaaggaagagctctggagtgaaagagactgcctttgcccttgaccttgggtaaaacttaacctcttcacatagtttcatcctttacaaaatgagaagggtgtggcaatgattaagaaaaattcagggctgggcgtggtggctcatgcttgtaatcccagcactttgagaggccgaggcgggcagatcacgaggtcaggagattgagaccatcctagctaacacggtgaaaccccatctctactaaaaatacaattagctgggcgtggtggcaggcgcctgtaatcccagctactccggagggtgaggcaggagaattgctggaacctgggaggcagaggttgcagtgagccgagatcacgccattgcacttcagcctggatgacagagtgagactctgtctcaaaaaaaaaaaaaaaagaaaaagaaaaaaaaaattcaggctagggggcatgcctgttatcccagcacttgggaggccaaagtgggaggattgcttgagcccaggagttcaagaccagcctggccaacatggtgaaaccgtctctactaaaaatacacaaattagtcgggtgtggtggtgggcacctataatcccagctactcagggggctgaggcaggaggatcatttgaacccggcagaggttgcagtgagctgagatctcaccactgcactccagtcttggtgacagagcgagactccatctcaaaaaataaaattgaaaataatagtgcaaatattatatgggtggctatggcagatgtaaaggtcattgggaattctttttctacaaaactggcctaacggttaaaaggaagagctctggagtaaaaaagacccccccttgcccttgaccttgggcaaaacttaacctcttgacacagtttcatcctttacaaaatgagaagggtgtggggatgattaaggaaattcaggctaggggcagtggctcatgcctgtaatcccagcacttgggagaccaaggtgggaggattgcttgagcccagaagttcaagaccggcctgggcaacatagcgagaccccatttctacaaaaaataaattaactggtcgtggtgacatgttcttgtggtcccagctactcaggaggctgaagccggaggatcacttgagcccaggagtttgaagctacagtgagccatgcttgcaccactgcactcctacctgagcaacagagaccctgtctcaaaaaaagagagaaagaagaaaaggaaaggaaaatgctcgtagcacctaaaacagtgctcagtaaatgtttgctgaagctgtaactatagtatgtagtagaaagtggtagttatttgaaagagagtcaaagatacgtgctctgggaattaccactaaatgaccaaaagttcacgtcaaaaaaataaaatcagatcaagttagaaatttttttttttttttttttttgagacagaatctcactcttgtcacccaggctggagtgcagtgacgctatctctgctcactgcaacctccgccttccgagttcaagcaattctcgtgcctcagcctcctgagtagctgggattacaggtgcccgtcaccacgcccagctaatttttgtagttttagtagagacagggtttcaccatgttgggcaggctggtctcgaactcctgacctcaagtgatccacccacctcagcctcccaaagttctgggattacaggtgtgagccaccgcacctggccagaaaaaattttattatgcacacaaaagaacagttggagattagtcagatgctccagtcactgtagtgagggcagtgttaataaagcctaaggaaggattttgaccttttttgtgattggctgttatacattaacaatctgtttacagccagtagagctgttcaaactgttttgtctatagttgattcctttaattttactgaattatgctgacaaggatgtaaagctttgtgttctgtttatgattgattagagctacatttcagggaatcaggatatcttaaattccggctatgtggctgtgggcagttggccttggagtatatctaaactgtggcctccactttcatttttcttgaaacattgctatcaactgggaagagtatgtgactttatgcccagtttcccctctcagatttttatgacggttgtttttctttttgttatgccatttgagggattgatgtttcttaaactatgaagtacttggctgtctctctccattgctgttcaggttaacagccaccatttgtaaacactttgttggagctcattccttctctgctaggaactttacaagaattgtctcaatcctaccacacctttggcaggacccttgttatcagagttttcattatccatgtatccatagttacaaggctatatagaaaagcaaaagtcatcacacaagaatcttgctaacaaactacttataaaattagtcactacttaaccatccctctgcttatccctgccagtcccattaacatgtttggtagtcaatttctggctgatgaagagatacattaagcatcaaggtaatgcaaatgtaaataaaactgactgtagactgaaatggcacatctcccaaaacttgtaggactaggcgaaatccctgcaagtgatgatagaaaaccttcagccttataccagttaacaaaggaagaagggaaatcaacaaagatgatgagatggtaaaaacttgaaaagtagaggatttgcctaggaaaaattaagcccttcggaaacttagtaaagctaaggaatattttggcaaaaccatcttttgtatgttgcaaaagtgagacaggaaatgaagtatagtgtttgggaattttttttttttgagatagagtcttgctctcctgtccaggccggagtgcagtggtgcgaccttggctcactgcagcctcagcctcctgagtagctgggattacaggcatgcgccaccacacccggctaatttttgtatttttagtagagacagggtttcaccatgttggccaggctggtcttgaactcctgacctcaggtgatccactcgcctcggtctcccaaagtgttgggattacaggcatgaaccactgcacctggcctagtgtttgggaaaactatactaggaaaagaatagttgctttaagtcattctttgattattctgagaattggcatatagctgccattataacctacttttgctaaatataataataataatcattatttttattttttgagacagggtcttgttttgtcaccccggctggagtgaagtggcgcaatctcggctcactgcaacctccacctccgggtgcaagcaattctcctgcctcagcctcttgagtagctaggattacaggcacaagccatcatgcccagctaatttttgtatttttagtagagacagggtttcaccatgttggtcaggctggtcttgaactcctgacctcaggtgatccacccgcctcggcctcccaaagtgctgggattacaggcgtcagccactgtgcccggccctgctaaatataatattaactttataattttagtctcattttccacccagatcttgtttatcactatctgggtggtagtgataaagttccacccagatcttgtttatcactattccctatgaaatgtttctgggtggccgggcgcagtggctcatgcctataatcctagcaatttgggaggccaagacaggtggattgcttgaggcccggagttcaaaaccagcctggccacatggtgaaaccctgtcactactaaaaatacaaaaaattagccaggcatgatggtgggcgcctgtaatcccagctactcgggaggctgaggcaggagaatcacttgaatctgggaggcaggggttgcagtgaggcgagatcatgccacggcactccagactgggcaataagagcaaaactccgtctcaaaagaaaaaaaaaagaaatgtgtctgggtatgtttttggctgcaattagctgaaaaccctgactcaaaatggcttattgcagatacttagaagcccagaggtgggcctccaaaggtcattgtctcagtggcctggactctgcatttttccactctgccatgttcaggtctcagctttgtccttaggaaggctccccatgtggcacaaatgcaggagtcacatccagaagaagaagcctttcttgccgggcgtggtggctcacacctgtaatcccagtgctttgggaggctgaggtgggtggatcacgaggtcaggagttcaagaccagcctggccaacatgatgaaacccccatctctactaaaactacaaaaattaaccaggcgtggtggcgggcacctgtaatcccagctactcgggaggctaagccaggagaatcgctggaacccaggaggcggaggttacagtgagtcgagatcttgccactgcactccagactgggcaacagggcaaaactccgtctcaagaaaaaaaaaaaaaaaaagaaaaggccaagcgtggtggctgtaatcctagcactttgggaggctaaggcaggcagatcacgaggtcaggagtttgagaccagcctgaccaacatggtaaaaccctgtctctactaaaaatacaaaaattagccgggcacggtagcatgcctgtagtcccagctactcgggaggctgaggcaggagaatcgcttgaacccgggaggcggaggttgcagtgagccaagaccgtgccagtgcattccaacctgggtgacagagggagactccgtctcaaaaaaaaaaaagccttccttggtttcctgccaatttcctgtcatgtttctttgtcccgaattgggccaatatccatgcccattcctaatacaattaccttaattgacttagattagccctgaagcatgtagtgatgtgggggaggaatgacaactgaagaaaatagaaaagaagggacaaaggttgttgagttggcaaccaacaattcctgttatagctttttaaattaattcactttaagtggtactgattattcatattgttatttccatgtatagagagagaagaaattggaggcttagaggaagtgaagtgacttgtccaaggtcacatagctaagtggaatttattttttttttttttacttttctgagacaaagtctcactctgtcgcccaggctggagtgcagtggcgtgatcttgactcactgcaacctctgcctcctgggttcaagtgattcttctgcctcagccacccgagtagctgagattacaggtgtgcaccagcatgcccggctaattttttgtatttttagtagagatggagtttctccatgttggccaggctggtcatgaactcttggcctcaagtgatccacctaccttggcctcccaaaatgctaggattacaggtgtgagccacggcgcccagctactggaagtcatgatgcaagctgttgtttgaatcatgaattccaaacttaatgagtgctaggttgaagttattttttttctgtttcccttaatcttctattgagatataacatgtattgaagcacagacatcttttgcaagaattcattgagcactatagttatattcatctgtacttactgtctccctggtaaaggcataaactcccttcaagatggggacatggttttatactttcctgaatctcctttagtgcttatatctaacagcacttaaccaggatctggagggggtcaaccagtcttgcttccttccaatctactctgtagatgtttgtgtttttctactgtaactatagaggtaaaggagccaatggtgtttccagtgtctggcacataataggtgctctatgaatgtcaaatgaatgactgaggcataaaaagttcttcctatgacataagtagtataataggaagatcactgggatagaattttcttagaagacgtggctcctagtcctagcactattactcttactgactataactttggacaagtcatttgtttaatttcaaacatttactgaattctgtgtaccaaatactgtacaagttgttcaaaaggctacagagtctctactctcaaagtctagtcaggggagagattacacaggagtgaaaccccatctctactaaaaaaaaaaaaaagaaagaaaaaaatagccaggcatggtggcaggcacctgtaatcccagctcttgggaggctgaggcagaagaattgcttgaacccaggaggcagaggttgcagtgagtcaagatcacactactgcactccagcctgggcaacagaacgaatatctgtctcaaagaaaaaaaaaaaaagaaaaaaaaagtatgtttagagatccttaaggaagttttgaacctatccaatatgttgggagtcaagatgaggagggtaaaagtaggaattcagagaaaggataaatattttgaaggaaggcagcataatggttaactagtcagactgcagacaaacaagcagtacaaatcccatgttcccaggtcttagctggaggattaaatcccagattctcatccttgagaacctctttaagcttgttttcccatctgtaaaatgtagatgataatagaatccttttcctactgtaaaatgatgcacattgggggcttcatgtagccagatatataataaatcctcaatacatgtagcagtggtaggggagaactaaaagacttgttaacatattggatgtaggtgagaaagaagaatcaaaaagaatatccaggttcccgccctgggaggggcagacataaatggagccaggaatggtacaaggagctttgtggtgggcactcactagtacctttctttggaatagctcaacaaatgttcactaagtacacataaagtcaatataacttgatgagctagagttaggctaagatgttgagttagcagaagagtagtacccaactaagggcttgaggaaggcttcctagaaaagataatgggtgcacgtagtcctgaaggatgagcaaggcttgcgaggagggaaggtaggaagggcattccagacaaagggacaaacatgcacaaaggtgagacagagcatggtgaacacacaaagttgtaggcattttgtctttctaggacacaaaaaacaaggtgatgaaaacaaggctggagagacaagcggagaccacaagtggtcacccctcactggcctcgctgtactactggactgctccagcccttcctggcccagagctagagatggcaccacccccgcactgtgcacacaataggtacagacactctcagccccaaacccctccagcctgttactgtgagactcacacatcctgttttcccaagcttgccccacagggtgagcaaactggaccagctggattagagtatttggaaaagtgcaggtggagtttctaggctatgccacgtcaggccagggggtgagatttttttcccttcccctggtctttgggctggggcactccctgaggagggaggggtgtgacccatcccacccattggtggtccatgatccattcatccagtacatcatccataagcatctgctgagccgggcgcagttgctcacgcctgtaatcccagcactttgggaggccgaggtgggcggatcatctgaggtcaggagttcaagaccagcctggccaacatggtgaaaccccgtctctactaaaaatacaaaatttgccgggcatggtggcgcatgcctgtaatcccagctactcgggaggctgacacaggagaatcgcttgaactcaggaggcagaggttgcagtgagtcgagatcgagccatcgcactccagcctgggcaacaagagtgaaacgccatctcaaaaaaaaaagcatctgctgaaggcacagtattgtgttagaggcttggactaccctgaggaataatagtcctgacacttgaggacatccccatccaattggaaaggcactggataaacatctaagaaaatgtcacaaggcataaaagctgtaataataatagctaacttgtatttagggtaaacaaaaggctgaatcaggctttggactaaatattttgcctgtggctcatttaatcttaataacaaccataagattatctcattttatgatgaggaaactgtatacagagaggtgattgacttgcctaaggttgaacagcttatgagtagtagagccagtattcaaatccagtcagcctccagtgtcccctctctttagtcattagatatagtgctacccagagaatctgctaagccttatagataaatgctatgaattcagaggcaggagcaattactgtggcttgggggcatccacaaagactttctaaggtggtgacacctgatttgggccttgaaactggttgaatagagataagaaaagaacagataatcaatttaactgccgttgtgttttgaatcatcactttaagcctagaatgacaaagctggaaaagaccctaaatatcatctagcccagtggttatcaaattttcttaggatgtggacatttttctttaaatgaaacatgagtagaagccagatgcagtggctcatgcctgtaatcccaactacttgggaggctaaggtgagaggattgctcaagcccagaagttggacaccaacctgggcaacggtgagaccttgtctcaaaaaagaaagaaagaggccgagggcggtggctcacgcctgtaatctcagcactttgggaggctgacgcgggtggatcacttgaggtcaggggttcgagaccagcctggccgacatggtgaaaccctgactctactgaaaatacaaaaattagtcaggtgcagtgctgcatgcctgtcatcccagctactcgagaggctgaggcaggagaatcgcttgaaccccagaggtggaggttgcagtgagctgagattacaccactacactccagcctgggtgacagagtgagactttaatttcaaaaagaaagatgagcagtaatcttgtctcttaaaaaggaggaccaaacattccctagccccaaaacattccctgaaaagttcagttgagaaccactgatctagtccaatgtcctgggatcctcgcttttatctttgctatctggagaaggaagagacagcggtagttcccaaaagacacaaacaatggggacattttaaacgggagtaaccagctaagcactctgctgctgctgcttgtctatttgccctcttgtcctgcctcagggtgaattgttggcagctacaaatggcaaccaagagagaatggagttggggcttagaagtgcggtagaggaatatgaagggggctggagttggagaggctcttaaagaaagagctgactatattgggactggagagttaatgtaaatctcttcttggttcatggggattttgttgttattgtttttttccccatgacacaactctcaggagatcctgagaacacgtgccctgatttggggggggttttaattttaactttttttttttttttttttttttgacagagtctcactctgtcacccaggctggagtgcggtggcgccatcttggctcactgcaagcaagctccgcctcccgggttcacgccattctcctgcctcagcctcccaagtagctgggactacaggcgcctgccaccacacccagctaattttttgtatttttagtagagacggggtttcactatgttagccagaatggtctcgatctcctgatctcgtgattcacccgcctcggcctcccaaagtggtgggattacaggcgtgagccactgtacctggccaaaatttttttttaattagagacagtctcttgctgtgttgcccaggctgatctcaagcagtcctcccaccttggcctcccaaagtgctgggattacaggcgtaagctatagcacccagccttccttctttccttaattctatttttttttttgtttgtttgtttatttgtttgcttttgagatggggtcttgcactgttgcctgggctggagtacaatagcgtgatctcggctccctgcaacctctgcctcccaggttcaagggattctcctgcctcagcctcccgagtagctgggattacaggtgcctgccaccatgcctggctaattttttgtatttttaacagagacagggtttcactatgttggccaggctagtctcaaactcctgaccttgtgatctgccctccttggcctcccaaagtgcggggattacaggcatgagccaccatgcccagccttccttaattctattaatatatgaatccttttcttttttttaaaaaaaagagatagactcttgatctgttgcttaggctggagtgcagtggcacaaatcagagctaactgcagcctcaaactcctgagttcaagcaatcctccagcctcagcctcccgagtagttgggaccacagttgggaaccactacacttggccctactacgggtttttcctgtttgtttgttttttgtttttttgtttttttgtttttttgttttgagacggaagtttgctctcgttgcccaggctggagtgcaatggcgcgatctcagctcactgcagcctccgcctcccgggttcaagcgattctcctgcctcagcctcccgagtagctgggactacaggcatgcactaccatgcccggctaattttgtatttttagtagagtcggggtttctccatgttggtagtcaggctggtcttcaactcctgacctctggtgatccgcccatctcggtctcccaaagtgctgggattacaggtgtgagccaccgcgcccagctgtttgtttttttgagatagggtctcactctgttgcccaggctggagtgcagtggcatgaacatggcttactgcagccttaacttcccaggctcaagcgatcctcccttctctgcctcctgaatagctgggaccacaggaatacaccaccacacctggctgatttttaaattttttgtagagccagggtctctccatgttgcccaggctggtctcagactcctgggctcaagtgatcctcccacctcagcctcccaaagtgctggggttataggcatgagccactgtacccagcccccttcagggtcttatctttataaggggtggggggtggtcagcacctttctcattgttacctctaccttccctaggtatgtgcaggtgaaatttgtctgcattcggacccaatcaaacaggaagagaacgcgggaggcagacatgtgcccagcgtacttgctcctaaggtacaacgagagactagatagactatttatcagtgaactaaacacacagcacatacatggtgactctaaagtggctagtcctggaggagacaccactggcaaatctcaaaagacaatgtgcctgcagagactccagcctgtgcagcccacaaccaaaaaagaccttgacactgccgagaagtccctggttgagccatcgttttgcctagataaggtacaagtgtcctcaaagccagagcaggaaggcatcactccttctgacctggccaagatagcaaaagtgatgaagaactttcttaaggtagatgagggttccatggcttccttcagtgtgggtgacagccagcacctggaccggctcagcttccagagcagtaagatgaccgacctgttcatccgcttcccagagaatctcttgctacaccgggtggagaacacccagggccacatcctctatgctttcttggtggagaacaaggaacgagaaagtcgagtggtgcactttgctgtgctcaaggcggagacagtcacctctgtggccaagatgctgagcatcttcacagagttcaactccgattggcccaaggtcaaggtggtctttgtggacccttcattccattaccgggctatcctgcaggagatctttcctgctgcccgcatcctcctttccatctaccacacaacccgactcttggagaagaagttgcatcgtagttcagcaaatccatcctttaaaaggctcatgaaggaagccctgcgggaggccgtgtttgtcacttctgaagccagcctgaaaaatctctgccagatgtcccaggccgtactggatgaggatctcttcaacttcctgcaggcccactggttcacctgtgaactgctgtggtacatgcatgttaggaagggcctgcttgcgtgtaacacctacatggacagcctagacattgtcaccagcaaggtgtcaagcctctttcgggaacagcagtcgctgctggactgcatcctctgctttgtggattacatagacttctttaataccaaaggcttgaagaacttgcccacacctcctcccaaattaaagagagctcggccggcaagcatgccactgaagtccaagaaggcttttggaatctgtggagagagccttaccagcctccctgcagaagagaccaagccagacgcacagcaggtacaggtacagcagcagtcacaagtgccgccctcgcaggttggcatgctggacaccttgcaccagagtggctctgaactagcctacaagctgtgccacaatgagtgggaggtggtacagaactccacccacctggtggacatggctggctcttcagtggacgttcagctgctagaggactctcaccaggttagcaaagatggctgtagctgcagctgttcctttcaacaatggtaccacctgccatgccgacacattttggctctgctgcacaccagccagcagccggttggtgaagccatggtgtgccgccggtggcagaagaagtaccagtacctccttgggcccaatggggagctccaggatcgtggtatggtcccaaacacaggccagcctgagaagcaaggacggaacgacatgattcaggacctaagcagggagttagcaaacctgctcatgcagaccgaggggccagagctggaggaacgctactccaccctgcgcaagattgtggatatctgggctggcccctcccagccatctgagctctttcagcagccaggagactttaaggacgtgggccgcctccctttcctctggggaaagcaagaagaaggggagggattccctcctgctacagctgtgatgcattattgaagcactttagctgaagcattggaccacaaacacttctccttggaagtgtgagagtttaaagtgggcaggacatactagggtttagcattttagccaatgtcttcctaggtggggctaggaatattgttacagtagagaggaagggaactccactgtgtgacagtcctttcaatctgccccttttcagccctacttttggcattccttgggagcctcagttgttgttcaaggccaaagttatctccgtgctgcaaggtcaccctcttcctcccccagcccctgagatcagatcttatttgctctgcaaagatgaatccctgcctcaggttagggtgagacaaaatcggtctggtaaaagggcctgttttcagggacaaagggaatgaggatgatctttggctgttgctgctctttatgaagaatcttatttgtaactttttattcatattaaagttgtttttaataaaattaaacaagggaaatgtgttctgcttgatcagggaaggaagaggaattgcatagcaataggactcgactttacagttaggaagtggctgctctaggtggatttattaattttaaagaaaattgaggccaggcgcagtggctcacactcataatcccagcactttgggatgtcgaggcgggtggatggatcatctgaggtcaggagttcgagaccagcctggccaacatggcgaaaccctgttctactaaaaatacaaacattagccaggcgtggtggcgcacctgtaatcccagcttcttgggaggctgaggcaggagaatcgcttgaacccaggaggcggaggttgcagtgagcctagatcgtgccaccgcactccagcctgggtgacagagtgagactctatctcaagcaaaaaacaacaacaaaaaaaaaagaaaagaaaattaagtattagcaacctaatggggttgtggagccaaatagaacctgatgcctcacattcaaggatttggcaatctgcgtcttaatttgcctccttcctacaactaagccttcaaggttgatttcaggtttccttatattctagcgggaagaggccaaatagactggagggtgtgggggaaaaacctgaatcttagacttgactgccagcaacttgctggggaactgtgggcaatttctttgacctcagtttcctctgtaaaaattagcatgttggcctgttctaatcccagatttcccctctaggtttacataagcacctttttgttttttgttttgagatggagtttcgctcttgttgcttgttgcccaggctagagtgcaatggcagaatctcggctcactgcaacctctgcctactgggttcaagcgattctgcctcagcctcttgagtagctgggattataagcatgtgccaccacgcctgcctaattttttgtatttagagatggggtttcaccatgttggtcgggctggtcttgaactcccgatctcaggcaatccacctgcctcagcctctcaaagtgctgggattaaagggatgacctactgcacccagcccaataacattttcgatgcgtaagtaccaacactgatttgatgttgctagttggtaatcttaatcctccaaggcctggtaaacacccagttttctaagtctgccatcttcaagggaactgaggacaagagaccagttagtaggcccttgcactactgtagtaggaccctaaataagtcatggcatcattctgtagaatactggagggggttgggctagagaatgccaagttttggcttgtttaaggggatctggatttcctcagctctaaaagttgggctcctgatccccgaaggaggagtagaatttgagacctggaactcagtttccccataaggtagaatatgcgttatgactatatatgcactgtttcctaaattccaggggctttagagtttcacacacacacacacaacaaaacaaaacccgcggtggctcacgcctgtaatcccagcactttgggaggctgaggtgggcgaatcacgaggccaggagttcgagaccagcctggccaacagggtgaaaccccgtctctactaaaaatacaaaaaattaactgggcgtggtggcgggtgcctgtaatcccagctactcaggaggctgaggcaggagaatcatcgcttgaacctgggaggcggaggttgctgtgagtcgagatcttgccactgcactccatcccaggcgacagtgcgagactccatctcaaaaaaagaaaaagaaaaaatatatatataactgctatttattttccttttcattttctgcttttgagggagtttccatagtaacgtgtccttccagtcgcctagcctgaagggaagccccggagctccagcttcaaggctcagctctcccagatgcaagtatctttacctccagccagctccttgtaaccctggcaacacggcccgcccgcgaatcgtcacgctacgattggtccgtggtgctaaagcctgaaagcgaattcctcagacattggtccgagtcactgcgatgctgacgctgtggttggtgagtttggatgtcagtcagagtcggaggcagggtcaaatagggagaaatggcgacggagcctggctgtgggtgagtgcttcctgaaggggtgaaagtgtgagacagcggatcaccgcagttagccgtcacacagctcccaaagggatgggagggaggttttcttctcatccggctccagctggactctgggaatgtcagacatccacatctcccacccaggttagaggtgagaggtcaaaggccgtattccctctgttggtttttggaccccaggtactgtggacagcagtcaggatcccgaaccaaagactcaactttcagctacttacagagtaatggtgggcaagtcacttagcttctttgagccttagtttatcatctgtaaaatgaggacagtaactcggtctggggccaaatagaggaaacaatggaatagagtattgctgctaaaagagggatatagtagaggcaggagaagctatgcacatttgttagccatattttatggtggaagggattgaggctcagagagggtcattgacttgcccaagataacacagcaagtttggagcaattgcagttctcttatacataccaggaccaaaggaaagaatggatgccaatcagtcatttataaatataaaatcgtatttttattttattttattttttgagacagagtttcactctgtcacccagagctggagtgcagtggcgcaatctcggctcactgcaacctcagcctcctgggttcaagcaggtctcctgcctcagcctcccgagtagctgagactacaggcatgggccaccatacccggctaattctttttgtatttttagtagagacgggttttcaccatgttggccaggctggtctcgaactcccaacctcaagttatctgcccaccttggcctcccaaagtactgggattacaggtgtgagccactgcacctggctagaatgctatttttttaaaaggccatatgcagctctggccatacctatttaaatcccctggaaccatatctttccatagctaacttcttatcatttagatttcagctccaatgtcatccttctcccctgagaggccttccattaccactttaactaaagtatccctcccttccccagcttactctctgacatgttactcaggtttatggtctttgtaagcttcattattggatatatatttgcttatttgtttacatgtttattgtgtatcttcccctagaacagtgctgacatatagtaagtgttcaacaaatattgtgtggatgaataattgaagagccaggtccctgctgtctccttaaacctctgttactctccataggcccatctttggaaaaaagatctgggaatgattgtctagcctccagcctcaacttacttgatgcttgagagactcaaagccccgtggtcagctgccctgcaaagaaagtattttgaccttggcatttggacagctcccatctctcccatggccctgacaatgctgaatgggctcctgattaaggactcaagcccacctatgctgctgcaccaggttaacaagactgcccagttagataccttcaactaccagagctgctttatgcaaagtgtctttgaccatttccctgagatcttatttatccaccggacctataacccaaggggtaaggtcttatataccttcctggtggatggacctcgggtgcagctggagggtcatcttgcccgagcagtctactttgccatccctgccaaggaggacactgaaggcctggcccagatgttccaagtattcaagaagtttaatccagcatgggagagagtctgtaccatcctggtggatcctcatttccttccactgcctatcctagctatggagttccccacagctgaggtccttctctcagccttccacatttgtaagttcctccaggccaagttctatcagctgtcccttgaacggcccgtggaaaggctgctcctgacctccctgcagagcacaatgtgctcagccacagcaggcaacctgagaaagttgtatacactcctgagcaactgcatccctccagccaagctgcccgagcttcactcacactggctgctcaacgaccgcatctggctggctcaccgctggagaagccgagctgagagcagccactacttccagagcctcgaggtcaccacccacatcctcagccagttctttggtaccaccccatctgagaaacaaggtatggcttctctgttccgttacatgcagcagaactctgcagacaaggcaaacttcaaccagggcctgtgtgcccagaacaatcatgctccctcagacaccatccccgaaagccccaaactggagcagctggtagaatcccacatccagcactccctcaatgccatctgcacagggccagcagcccaactgtgcctgggcgagcttgctgtggtccagaaatccacacacctcattggctctggctcagaaaagatgaacatacagatcctggaagatacccataaggtgcagccccagccccctgccagctgcagctgctactttaaccaggccttccacctgccctgccgccacatcctagccatgctcagtgcccgccgccaggtgctccagcccgacatgctgccggctcagtggacggcaggctgtgctaccagtctagacagcatcctgggcagcaagtggagtgagaccctggataagcacctggcagtgactcacctcaccgaggaggtgggtcagctgttgcagcactgcaccaaggaggagtttgagcggaggtatagcaccctgcgggaactggccgacagctggattgggccttatgagcaggtccaactctgattattctcgatgcccagagatgctcatgcacctgtgcacactcacatccacccatacacacacacacacacacacacacacacacacacacactcccttacactgttgtacttccgtgggccctccttccagaacaaggacaacaaggacaaggttgaagggtcttctcatctaccatggcctgctacctagcatgtgtctagctcaatgagacaggagtcagcaaatcttaatctgtttagtttactcaggtggccacatacagtctctgttgtatattcttggttttgttttaatattttttttctttttttttttttttttttttttgagaaggagtctgtctccgtcacccaggctggagtgcagtggcgcaatctctgctcactgcaagctccacctcctgggttcacaccattctcctgcctcagcctcccgagtatctgggactacaggcgcccgccacaatgccgggctaattttttgtatttttagtagagacggggtttcaccgtgttagccaggatggtctcgatctcctgacttcgtgatctgcccgcctcggcctcccaaagtgctgggattacaggcgtgagccatcgcacccggcctgttttaacattttcataaggtaaaaacctttcttagctcaaaggtctttaaaaaagcaggcaatccagctgggcatggtggctcacgcctgtaatcccagcattttgggaggctgaggtggacagatgacttgaggtcaggagttcaagaccagcctggccaacatagtgaaaccctgtctctactaaaaatacacaaattagccaggtgtggtggcgggggccctgtaatcccagctactcgggaggctgaggcaggagaatcgcttgaacctgggaggcagaggttgcagtaggccaagatcctgctgccactgcactccagcctgggagggtgagactccatctaaaaaaaataaaataaatggcaacccctggtctaagataagagataaaacatcaggtggtgaggttgaggtttggggcttggtagcagttgccccagtcatgagatgactcacttaacccgtctcctttaagtgagctgggctgggaggcttcctacaggggaagaggcccctctggggagctgactcagccaggctccctgaacttttttccttgtcccatcctggggtcaataaaactgaatgttgcatattctagcacttgtctagttttttttttgttccatagaaggcagtttagggtatatcatggagagaatagactttagagtgttatacaacatgtgaatcctggttggttccttccctgcttgatttttgtgcctggttctgccttttactagctatgagacttattaggataagttacccctctaaacctcaacctgattatctgtaaaaatggggatctccacagggtatgttcacagagcaggcatacctagtgggtgctcaattaagtattaattttccttccttgcctatggtcctatgacctgccttcaacatgctgggaaatttaaggcaagaggagaattcaaatacctaggacttaatataagaaattctggccaggcatggtggctcacacctgtaatcccagcactttgggaggccgaggcaggcggatcacctgaggtcgggagtttgagaccagcctgaccaacatggtgaaaccgtgtctctactaaaaatacaaaaattagccgggcgtagtggcaggcacctgtaatcccagctattcgggaagctgaggcaggagaatcacttgaacctgggagacggaggttgcagtgagccaagatcatgccattgcactccagcctaggtgacagagcaagactctgtctaaaagataaaaattaaaaaaaaaaaattctgggtaggccaggtacggcgtctcacgcctctaatcccaacaccttgggaggccaaaacaggcagattggagcagcctgggcaacatggcaaaaccccttctgtacaaaaaatacaaaaattagctggatgtagcacgtgcctgtagtcccagctactcaggaaggctgaggtaggaagatcacttgagcccaggaggttgaggctgcagtgagctgtgattgtgccactgcactccagcattggtgacacagtgagaccctatctcaaaaaaaaaaaaaattctgatcaagtcttcaaaacaacataaaagcagccttaactctccaagcaggggcccctacctcagataatttccattgtatctacctgacaaaacctatctcctgtcttagtggtatctggagaaactttagggtctggaagtccctgatgaaggactggaatttgtcagaatggctcaaccaccagctctatccccatccctgccataggccctcctcccaaccctgtctgcccaagaaccatacggagaaaccaccctacatatctggtgctatttcatccatctacaagcaggagccaggaggctggccccttttagatctcactaggggcatcttcccagaggctgtgtgggcatgtgcctgctcccaccgcgccccctccacagcaccctctggctccggatgggccatcatgaaagcttgagcggcccagatcaggtcctcttcccgaactcctgggacgggcacggtggggatgccagcgatcatcatggcgagggtgaggatgcagatatcaggctgggagctggcctccttccccactgcctcagagggtaccggtagaacccgtggtgacagcccacacagcatcaggggcctaggcctgctggggccacccaggtcaggggctctgcttctggagtagccattgtcccagcccaagctctccagctgcctcacatgcgggaatttgtggcagtttcggctgtattccttccgtagtgtctcccagctagtccccccagggcagcccctggcttgtggcattgccagggctgggccccaggcctgggcagcaggtgccacctgctcagctttctggctcagtgggcctgttccaccagaggccaccaccactggctctacaggactacagaggccaagggacaagcctggagaagcagccccacctgcagagacaggaatgaaatggaacgttattctcagttctttgaggagggggccctgaggggcagggcatgggagcagagcttgggggcgtaactaagaccagccccagcggactgtctagaggttgggaactaggtgttactcatatccacactcccagtccccaacacggagtaggtgatggagaagcgtttgttgaattaatgaatagtgagcaagcgggtagttattgattggcaaggatgtttggaatggcttttcttctaaaagaattgattctagggccagcccccaaatgcccagcagaaccgccacctccccagagccagaaagcaacttctcaggggaagctgccgcactccctccaattgcaggtgccccccgctcaccttggccggaaggcagaggacctggatgagtttgtggagtcctgaagtaggacatggcttccccaaagccccggtttgtgagggaatagtgatctgccgcctgtcctcccttcttcacccttctagaatgtcacctcatagaccctccccttcacacttggaatccactttacagcgttgacctattcattctagaacctggacatgacaataggatgaggttaaaagagcaccagaccaggagctgggtgttctaggttcttgccctaaccttgaacgagtcacccagatagttttgttccttgatatccttatctgtaaagtgtgtctgatgactgcccactacctcattaggagttttgaggatgaaatgagatcatttgtatggaagcagatgaccagagatggaaacacaggagccaagtgcttcgtgccttgtagagtaagacttcgggtcagacccagtattggtatttttctttttctttttttgagacagagtctcactttgtcgccatgactggaaggctggagtgcaggagcaagacctcagctcactgcaacctctgcctcctgggttcatgcaattctcctgcctcagcctcccgagtagctgggactacaggaacctgccaccacacctggctaacttttgtatttttagtagagacagggtttcaccatgttggccaggctggtctcaaactcctgacctcaagtgatctgcccacctcggcctcccaaagtgctgggattacaggccaggtattggtatttttcaaaattcctcaagtgattataatatatgacaaagttggaaccttttttctagggacatacttctcaaccctggctgtacatgagaatctcttgagaagcttttacaaaacacaatgtctaggcctaatttcccaacaaatcaaatacgaatccctagggatgggatgtgggacaccagcactctttacatatcctaagatgactctaacaagcagccagcctagggacccctgctcttttgctccgacctgctgacctgcagtgattctaaacgaagtgactctcataggctgtaggggcaaggagaccttccagtgatcaagatgtcagcatcggctgtttatttctggtcttggctggcagcaatgtggccaacttcggaccagccagccacaggtctggggctccaggatgcagctgtgctctggtgcactgtgggtcttcactcatacttgcagaaatccttaagttctttgggcaggtggagcccatcaatggccagccggtgcaccatgctcctttgtatcactaggcggcacagagtctgcagggatggcactgtgggaagaagactgtgaaaggcaaactgaactggagggtgggtctgaggccaagatccagaaggtctaggtcatggtccccactttgtcattaaatgtgggcaagtccttactgctctctgggcccagcctgcttcatggggctgagagaagcacctcttcctgagagctgccacaaagctgcagccctgtttatatcataacacttagcacaatcccttccccattcacttagcagcttctgggggcaggggtagtgtctgatttgcctgtgcaactgaagcctccagcacaggcctggcacaaagagggttctggtgcattgagttcatgaaatgtgatgagaggtataactgcaatgcttaccagggctataatgaatcatactcagcattaagaagctctcagtctggggtttgttatgcctcgaagccaatagccaatatgcccaagtctatgagcatgtttctttcttttctttctttttttttttttatttaaagagagagggtcttgctctgtcacccaggctgaagtgcagtgctcagtgaactgcagccttcaattcttgggctcaagcgatcctcctgccttagcctcccaaatagctgggactacaggcatgcaccaccatgcccagataattatttaattttttgtacagatggggtctcactttgttgcccaggcttgagctagctagcttgcttgcttgcttgctttctctctcttcctctctctctctctttcttttttttttcagagtcttgctctgttgcctaggctggagtgcactggtgagatctcggctcattgcaacctccacctctcgggttcaagtgactctcctgcctcagccttctgaatagctgggattattggcacatgccaccacacccagctactttttgtatttttagtagagacaggctttcaccatgttggccaggctggtctcgaactcctggcctcaagtgatctgcctgcctccccctcccaaagtgctgggattacaggtgtgagccactgtgcccggccaagcatgtttctaagaaaagggcaaacaattctcaaagaggcccctaatatctaaaattggtttagaatccctgccctaggtgaatacaggaaacactatcaaaactaaaagggaacttgtagggcatcttaatcaatcaaccaagataggtaccaaggcccaaaaccatgtagaggcttgtgcaagatcacaagcagaggtgcaatttgaagctagattctcccactcttaaactagtgccggacagacgaaggcctagcacatgggctacggagccctagtagattccagtccccacactgagccaggaggggtcgctgcccagggatacctacagccatactcgagctggacaaggcgcacgctctttgtggaagcaaacacgtccaccaccgcgtagaggggctgcgcagctggcagtccccgggcgctcgggcccatgtcctcgccgttgatgatgatgtgcatgtcggccgtgccatcggggcgcgggcaaaagaggacacccaggcggctacggcgcgcggtcggaggcagcacgttcagctcatagagctggtccaagagatggctgtagagccctggccggctgcggcccaccaggcggtcccggggaatgcgaaactgctcaatgcgcagatatggttccacgaggagggttggaggtcggctgggggccgctgcctccgcctccgggcggccctcccggggcacgcggttgtggtggcgcgtgatggcgaagacccaggtgtggcccaggttgaccagatcgggcagagaaaactcgggaacgggggccagactggcggggtccagcgcggtcagaccgagacgcagatgtccgcaccagcccagctctttctcctcgatctcgaccaggaagacctggcccggggccagcggctcgcggctgaagcacacgccgtgggcgaagctctccacgcgtgtggcccgcgtcccagaggggtccacgcggatgttggcaccgtgcacccgatggaagcgggtgggagggggctccgggcgctcgagtccccagagtgcacccgaatccacgggctcggaggcagcagccatctctcggccatagggcaggccagctggcgccgggggctattttgggcggcgggcaatgatggtgaccgcaaggcgaccttgtaaggcatttcccccctgactcccttccccgagcctctgcccgggggtcctagcgccgctttctcagccatcccgcctacaacttagccgtccacaacaggatcatctgatcgcgtgcgcccgggctacgatctgcgaggcccgcggaccttgacccggcattgaccgccaccgccccccaggtccgtagggaccaaagaaggggcgggaggaagactgtcacgtggcgccggagttcacgtgactcgtacacatgacttccagtccccgggcgcctcctggagagcaaggacgcgggggagcagaggtgagctggcaccggaggctggaggggatccccgagcccgggatcggtgcgcggcagaggaggctcgcgggtgggagctggcgctggggccggggcttccctcgcggaggcgccgccagcaactccccgggggctgctgcacggaagcgctgaggagcgagtcaacagcccctctgctgcctcccgtagatgatccgagccgcgccgccgccgctgttcctgctgctgctgctgctgctgctgctagtgtcctgggcgtcccgaggcgaggcagcccccgaccaggacgagatccagcgcctccccgggctggccaagcagccgtctttccgccagtactccggctacctcaaaggctccggctccaagcacctccactactggtctgccgccctgccttctgggcgggattgggagaagagatgacggatgagggatggggggtagttctgcagacccctgaggatgcctgggagccgggagggctggaaagggcccctccaactgcgccaaccctgccctgacccccctcccaggtttgtggagtcccagaaggatcccgagaacagccctgtggtgctttggctcaatgggggtcccggctgcagctcactagatgggctcctcacagagcatggccccttcctggtgagtggacagcagggggaaagcacagttcccaaagtaaaaggctggggaaagcgagagaggggctttgtgattttccaaaaagtttccttccttctaagcctcgggattttcctctatgccattggctttgctgcctgtacctctcagaggttttacccacatgtaaagtgcctctcatggtggccctttccctccacccagctggcccttgggacttactcagccatctctttcctcctcaggtccagccagatggtgtcaccctggagtacaacccctattcttggaatctggtatagctggagctgtgggtgtgtctgggcacttggatggggtggcatttagctaatttttccctcccctctagattgccaatgtgttatacctggagtccccagctggggtgggcttctcctactccgatgacaagttttatgcaactaatgacactgaggtgagtctggtgcctgcccatctgccccaggctccccggtcctccatccatggcatgatgctgggagagagagcatggccttggagtctacttttcgctctgtcatatgctattgtggtatggtggccagtcacttcctcttgcacaaatagggtgggttaatgtcattatctctgaagttctttccagttcaaataccaaagcttcctgattccctctgtcttgctctgccatccccaggtcgcccagagcaattttgaggcccttcaagatttcttccgcctctttccggagtacaagaacaacaaacttttcctgaccggggagagctatgctggcatctacatccccaccctggccgtgctggtcatgcaggatcccagcatgaaccttcaggtgcagggtagctgcaggagggaagggaggtagcttgaggctgtggccttacagttagcaaggtcagactgactggtcaatgtccccatccaacccagcttcctgcataacctccccaccaccggctgccctaggtctgtctgtgtgcctcccacacaggaaactcacctgtcaggctgccagctctgtgttttgcattgagtggcctctcatacccaccggcctacataaaccaccctgggtttcagcttccggattgctgaaggtctgggtggtagggtgagggaggctcttcctttttgccctccacatgagctgagcaccctgggtgtttcacaggggctggctgtgggcaatggactctcctcctatgagcagaatgacaactccctggtctactttgcctactaccatggccttctggggaacaggtatgggatagggcagttgggcaatctctggggtgaggcaggtcacatgatctcaggtctgtcctccaggcacatgatatgacaggcccagcccaggtttatgagcagcaggtgggttgcagaaagaacctagtgctgaaaggccaaagaatagagatcagtttttctttctttcttttttttttttttgagacagattcttactttgtcacccaggctggagtgcagtggcacgatcttagctcactgcaacctccacctcccaggttcaagcaattctcatgcctcagactcccaggcagctgggactacaggcgcgtaccaccacacctgcctaattttttgtatttttagtagagatggggttttgctgtgttggccaggctggacttgaactcctggcctcaaatgatcttcccaaagtgctgggattacaggcatgagctacagcgcccagccagaaatcagattttaaaggaactaaggaggcctgtctgtatgaccctggggcacctctttgggagctagcttagatgacatacagaccacaccctgtgatatctttcccagtctcctagggtcagggaggttggtgggaggtggggggtatgctcgcctcctctgccttcctcttcccaccagcagctgatgcgcttttcactctcatctcctacaggctttggtcttctctccagacccactgctgctctcaaaacaagtgtaacttctatgacaacaaagacctggaatgcgtgaccaatgtgaggttctgccatcactttgcatgagctctcccatccctaatcctgagaacaggaccacattccctccttggggactccttgttctccgtccctcattgctttcttgcacctttaagcaatttagtgttctctgggacatgtgtctaagtgtgtattcccaccaccacctcctatggtggcaaatcccataacctccgtgaggagaaaggacttcttcacatttatcaaacacctgcaacgtggcaggcactgtgctgaactgtgtctatgtagattatttaagcttcaagattccccctcaaatgagatcatactacccacattttccagataaggaaactgagggctatgaattttgaaatcactgtctgaagtcacagtgttgggaggcagtgatgctaggatttggacccaggtctgggaagattcctgccactgagcctcagtttccctacctgtgaaaaaaagtgggtgaagaggtgaaatccaagagcagtaaatcttgggacaacttggtggggtcgtggagaggctggggatctgtaaagcatggtggcttggtgtatcattgcagcttcaggaagtggcccgcatcgtgggcaactctggcctcaacatctacaatctctatgccccgtgtgctggaggggtgcccagccattttaggtaggtgctgctgggtgcccctggagccaaccccagccccatctggaggctccacacccattcccccacctcacattgcaggtatgagaaggacactgttgtggtccaggatttgggcaacatcttcactcgcctgccactcaagcggatgtggcatcaggtgtgcgagggcgtgggcttcctcctggtgaggtgggggcagggggaggggcagggaagcagaggccctgacccactgtctgtgccttccaggcactgctgcgctcaggggataaagtgcgcatggaccccccctgcaccaacacaacagctgcttccacctacctcaacaacccgtacgtgcggaaggccctcaacatcccggagcagctgccacaatgggacatgtgcaagtgaggttccgtggccacctgtgacttggggtggtgggttgctggggcttgtgggcatcggcaggtttctcagggatcttctgtgtagagtttctcaatgagatgagctgtagaggatgtttaacatccatccctgacccctcagtggattgagagtcagccaattcattcttttatcttttttaaatttaaaatttttttgtttgagacaaggtctcactctgtcacctaggctggagtgcagtggtgtgatcatagctcactgcagcctcaaactcatgggctcaagcaatcctcccacctccccagtagctgggactacagacgcaccaccacccccaacaagtttttgtattttttgtacagatggtgttttaccacattgctcaggctggttttgaactctggggctcaagtgatctgcccatttcagcctcccaaagtactgggattacaggcatgagccaccccgcccagccccatttcattacgtagccacattggttgttgtttcacagttcactacagcctcaacctcctaggctcaagcgatcctcccaccttagtctactgagtagctgggtctacaggcacatgccaccattcctggctaatttttaaaaaatttttttgtagagacagggtctcactatgttgtccaggttggtctcaaactcttggtctcaagcaatcctccctccttggcctcccaaagtgctgggattacaggcgagggtccccacacccggccatcacattggttaataactattacttccgactgggcgcagtggttcacgcctgtaatcctagcacttttggaggctgaggtgggggaatcacctgaggtcaggagttcgagaccagcctggccaacatgaagaaaccccatctctactaaaaatacaacaattagccaggtgtgctgttgggcacctgtaatcccagctattcaggaggctgagggaggagaatcgcttgaacccaggaggcagaggttgcagtgagctgagatcatgctactgcactccagcctgggcaacaaaagtgaaactccatctcaaacaacaataacaaactgttaacttccatgtccagtctcctgtggccacccccccccacaaccccaagtaaaagggtaacactgggcccagcagggctgctcaggtccattttgattggtcagtgctcacactctaccctgttgtatgttgtgactcccacacctgctggcccctagacactaaatgccagatgcatcccagtcctcgtaacaaccaaaatgcgtcccttgtacatttctttttctttttttttttgagatggagtcttgctgtcactcaggctggagtgcagtgctgcgatcttggctcactgcaacctccgcctcccgggttcaagtgattctcctgcctcagccttctgagtagctgggactacaggcacgcaccaccacgcctggctaatttttgtatttttttttttagtagagacggggtttcaccatgttggtcaggctggtctcgaactcctgacctcgtgatccactcacctcggtctcccaaagtgctaggattacaggcgtgagccaccacgcccagcatccctgtacctttctaaatggtggtgagttgaggctgtctgaatcccagcccatccagcccaacatccaagtcagtcctagagaggtggcccccccccaaaaaggggagtggaacccagctgtctgccttctgggttggagcttggagataggagagaaggtctgatctgttgactacttttcgccccgacctggtcttcctggggcctgctcgtatgttcccggcagctttctggtaaacttacagtaccgccgtctctaccgaagcatgaactcccagtatctgaagctgcttagctcacaggtgagtggggagagcacagctggatcaccagcagccttaggaccccagagtagcacagcaagctgggggcccttgagacttcctgtcaggacaagggaagctgaaactccgaaaggcgaagcccagggtcctgtgattggtggggtcagaatttgaacctgggtttgtccccacccatgctgtcctgctataggaggcctaggggtctgcatcagccacggagtcttaagggtgagaagagcttcattcatgccaaaaatgggccagcagaggtccagggtgggaggagaccttgcacaaggtgatataggaagcactggcagggccaagttaggactaggttctgtccagcacagtggttaatagcatgggctctggagtcacatggcctgggtgcaagtccctgtactagccacataatcttgggcaaatttcttaaatatgagcctcaggttctccatctgtaaaatggggataataatgatatctaccttcacagataaaacatttagtagaatactggacatgcagtaagtcgttagaaaacatgaaaattccctggttcgtgttatctagcttggccccttgaatttcctgaggggtaggccttgaactagggaagggctggggactgggcttgttccacacccctcatttttaccccatcctgctttagaaataccagatcctattatataatggagatgtagacatggcctgcaatttcatgggggatgagtggtttgtggattccctcaaccagaaggtaaggtagagattcctggccctgggataggggctgctgtggaggattgggagcgggtatgcctgggagtggccagctggctgcctggctctggcccacagagggcaagtgtggaggaattcccagccctaaggtcttgctggtagctgtgagcaaggatgcagctgctgtaggctgatgtctttcctggtggggcagatggaggtgcagcgccggccctggttagtgaagtacggggacagcggggagcagattgccggcttcgtgaaggagttctcccacatcgcctttctcacgatcaaggtagggactgggcctgctgagagataactgggccggaggcaaaggagcaggacccacccgtcctttccctctggctgccttttaggctgggtcatgggtcaccatctggcccctgtatgggcaagtttttttggagaggggtggggagggttctgggaagaataaagggtttgggatgaaggaattgcccccgagtgagcagttatatggggaggagggaatggtggggtcaggagctcacgaacattgctcctcagggcgccggccacatggttcccaccgacaagcccctcgctgccttcaccatgttctcccgcttcctgaacaagcagccatactgatgaccacagcaaccagctccacggcctgatgcagcccctcccagcctctcccgctaggagagtcctcttctaagcaaagtgcccctgcaggccgggttctgccgccaggactgcccccttcccagagccctgtacatcccagactgggcccagggtctcccatagacagcctgggggcaagttagcactttattcccgcagcagttcctgaatggggtggcctggccccttctctgcttaaagaatgccctttatgatgcactgattccatcccaggaacccaacagagctcaggacagcccacagggaggtggtggacggactgtaattgatagattgattatggaattaaattgggtacagcttcaaatcccgtcttctctgtggcactgggggttagagggggcactacaggctatgaatgtgggaaaagaggggctgagaggggttggggtcctgaatgacagctgccagcttggggattgagggctcagacagctgctgtggacggtgtgggggcagtggacgccctgacatcagcaggccggttcttctcaatcacctctcgcagccctttggcaaagtggagatcagccccgatggtgaggaatccctgtgttggggagaggggagcctcatttattcattcagttattgaggccagagtttagagatcaagagacagagtgtttgtctttcaggaactcaatctaatggataattccatgtcaaggtgttaaaatgaggctgtaggagtgtagactatgggtgtcaaggagggcttcttggaggaggtgacctctgagctaagacctgaacaattagtaggtattgggatgggagaagagtgctccaagaagtcacagtgtgtgcaacggcttttaggagtctaagattaaaatgggaggggcgactggtaatgggggagctggggtcaggtaatggagggcactggggagctatagagagaggggaaggccctccctccttccccatcctgcccccactcaccgcatggttcgtcaccacctcatgcacaaagttgatgccctcaggtagtgggatctgcaccccacgccaggtccgctctgtgggtgggagcaccccgctcagtctgggcccgcccagttcacccctcctttcttcctccatcctcacaccccagccttaccattgagcatgggcatcaccccaatctgcagcatggtcttcagaggggcctgtaatgggatcagctgggaggggcgagggcggaaacagggcagtgagtcagggttgggtttgcctttagctgcccgcaggtgagcagttatatgaggagggggggatggtgagggtcaggatctcacgaacccagcccagcccacccacccttccccactcacagccagcgactccagtgcagaatggttggaatagattcggaacctgcgggaaagaaaggagccctgtgggcaggaagcctggaagctccccttcctcaggccacccaggcctacctgccagaggtgtctgagttgcaggctcagatgcccacctaggcacctttccaagtgctacaactttccaggtatcctcggggcagtcattgctgccacttgggtctccttttctccaagactgctactttttatttattgagcacctcttttttttttttttttttttttttttttgagacagagtctcgctgtgtcgcccacgctggagtgcagtggcgcgatctcggctcactgctccgtctcccgggttcacgccattctcctggctcagcctcccgagtaactgggactataggtgcccgccaccaagcccagctaattttttgtgtttttagtagagacggggtttcaccgtgttagccaggatggtctcggatttcctgaccttgtgatccgcccgtctcggcctcccaaagtgctgggattacaggcgtgagccaccacgcccggcctttattgagcacttctaatgtgccagacttctgctggtagctttgcaggtgttatttattttatgtaacaaaacttcacattgcttagttcctgtcagacactaagcatatttattttctttttttatttttatttatttttgagacagcgtctcactgtgttgcccaggctggagggcagtggtgtaattttactcactgtggctttgacctccagggctcaagtcagcctcccacctcaggcttccaagtagctgggaccacaggcgtgcatcactatgaccaactaacttttaaatttttttgtagagacaggatctcactttgtagctcaggctggtatcgaactcctggcctcaagcgatctacccgccttggtctcccaaagtgttgagattacaggtgtgagccactgcacccagccaacgtgtttaaaaagttaatattagtaaactgttttaaaatacagtaccaactggtttagtcctcaaaacaagcccaaggagtgggcactattaggatttgcactaatttatagatgaggaaaatgaggccctgcaaggttaagtaatttgcctgaagtcacacagctggaaagtgtcagaagctgcctctagaacctagggtcctaacctacattatctcctttaaccttagaacagcactgtccagtcagattttctgtgaaacgttttgtatctgcaccgtctactatggtagtcactagccacatgtggctaatgaaatgtggcttagtgcaactgaaaaactatttaattataattaatttaaatgtaaatagtcacatgtggctagtatctaccatattggatagcacagccctagaaggcagatgctacttttgcctgtattaaacacatggagaaaatgaggcctagaaagacaaaatgggctgggtgcggtggctcacgcctgtaatcctagcactttgggaggctaaggtgggacgatcacttgagcccgagaattggagaccagcctggacaacaaagtgagaccccatctctacaaaaaataaaatagtcaggcatggtagtgcatgcatgcagtcccagttactcgggaggctgaggctggacgatcacttgagcccaggaggtcaaggctgcagtgagctatgattgcaccactgcactccagcttgggcaacagagtgagactctgtctcaaaaataaataaatacaataaaataaggccaagcacagtggctcatacctataatcccagcactttgggaggccggggcaggtgaatcacctgaggtcaggagtttgagaccagcctgaccaatatggtgaaaccctgtctctactaaaaatgcaaaaattagccgggcgtggtggcgcacacctgtaatcccagctactcaggaagctgaggcagaattgcctaaacccgggaggcagaggtggcagtgagtcaagaccacgctattgcactccagcctgggcaacaagagcgaaactccttctcaaaaaaaaaaaaaaaagaataataacatttttaaaaaagataaaatggcctcaaggtcacaaagctgtgttgtgctgaggtttttgtcaaaacccatgttctgatctttgctgtgtgactgtgggcatgttatttaacattgctggacccatttgttcatctctcataatacctgccctgcctgcctctgggacatgtgagaatgcagaggagtcagactttaccaaagcactttggcatgcattaacaaagacagaccccagctctcagtggcttacaggtatcactgtactttaagcgcaacatccctgtggacaggtgtgattgtcctccaatcactgaggtgcagggaagtgcgcctgcctacctgcgcaggtccagctgcgtgcgcagggccttcccccggagagccatcttggcgctgagacgggcgtcctgcaggaacatggggaggaggatgttactgacccagaaggtcagtaacccacagcccatttttccctgacccccagccagcagcccccactctgggacccgtaccatagtcatgctggacagctggacctcaggctggtctggtgggaccagggcaatggtgacgctagcagtgacagagatggtggtgccagagggcttgatggtgcagcgcggtggggccaggacccgcagctccagcttcaatggggagtcaatcactgctgggctctgggggatgagcagcaggggcgggtcaagtccctgccatttcctttggagcccccagggaagaaggggaaggaaggcaggtgcagcttctgtcctctggggactctcatattgcaaatacagagggagctctggcttccaaaactctcacatctgcatctagccttcatgcctttgccacacaaagaaacaggaatgtgttcttctctttctgcttcctaaatacatctcaatattcaggtctatctccaatccagactctttgtggatgtcctttttgcattagtatctcagcccttgccatgtcttctgtttttgatatggagtctcactttgttgcccaggctggagtgcagtggcacaatctcggctcactgcaactctgtctcccaggttcaggcgattctcccgcctcagcctcccaagtagctgagattacaggcacctgccgccatgcccggctaagttttgtatttttaatagaaacggggtttcgccatattggccaggctagtgattcgcccacctcggcctcccaaagtgctgggattacaggcatgagccaccacacccaaaccccttgccatatctttttgctctctctctcctttttttttgagacagggtctctgttgcccaggctggagtgcagtggcatgatcacggctcactgcagcctcaacctcctcagctcaaattatcctgccacatcagcctcctgaacagctgagaccacaggttcatgccatcacgcctggcttatttttgtatttgttttttgttttggtttttgcttttgtgttttcgtagagacggggtttggccatgttgcccatgctggtctcaaactcctgggctcaagtgatctgccggcttcagcctcccacagtgttgggattacaggcgtgagccaccgtgcctggccatatcttctttctctaaactgctatgccttcttctataggcagtgaaggaatactataagatgcaactgcctaatcttcaccaaacatgattctaaacactgtatatgtgttggttcctttaaacctcataataaccatgtgaggccgatattattactgccaattttgttgttgttattttttacaaatttatttttcaggctgagtcgtcatggcagagaattgcttgaacccgggaggttcaattgcagtgagccaagattgcgccactgcactccagcctgggtgacagagtgagactttgtccccccaccgaaaaaaaaagatctgactaaaaatttatttttcaatagagacagtgtctcactgtgttgcccaggctggtctcaaactcctgggctcaagcaattttcctaccttgacctctcaaagttctcagagtataggcgtgagccatcatgcccagccatatccccatttttgagatggggaaattgaggcacagataggttaagtaacttgtagaggttatgtagttactcagtttcagaactaggcttgaagcccaggcagtctgacaatagagaccctgccctgccataaattggatgatgataatgactgaattatttcttttaaaatttgtaattctgctaggtgcggtggctcacacctgtaatcctagcactttgggaggccaaaaatgggtgatcacttgagcccaggagttcaaggacagcctgagcaacataatgaaactctgtctcaacaaaatataaaaattagcggggtgtggtggcacaagcctgtaattccagctactcaagaggctgaagcaggaggatggcttgagccctgggaggcagaggttgcagtgagcctagattgtgccactgcattccaacttgggtgacaaagtgagactcttgtctcaaaaaaaaaaataaataaaatgtgtaactcttactctcctccccaatacacaaataaacaaaagtatatgtgaattattattaaagccctcacacttgcaaagcttgggttctcactaatcctcacagcagctctgcgaaggagatggggcaggaaggagcaggaaggagcagaccgcttcacagacaggaacagccatgacaaggcgagggggattggccacagacaagaggccagggccctgtctgcgtggctgccactgggggccccacctgcacccctccttggtctcactggtgtgcaggtggccctatccctgcccccgccagcactcaccagcaggacaatgctcccaaagtaggtggccctcagcagcatgtccaggtcgtggggcacctgaacaggggaatcaggagtgagggagtgagctctgtcacagaccttctcttgcccatcccacaaacaggccatgacataccttgtcccccaccagcaacagctgcagggcccccgcccggaagtagctctccatggcagagtcgaagaagaactcagagaaggccacatacaccatccgctcttcctcctgcagctggggctccactgcccggttggggaggctccagttcctctcagtcagggggaagaaggccccctggggtggggcattcacagtcagggtcaaggcagactggcctggcacctggactgacagcaggtgtctcccagccccgtgctaggcactgtggggggatggtgggaacccagctgctgttcttggaggattcacaagcacatctcttaaaaggcattggaaggaggacacctgctaccagggggcgagcccgtcagactggaggagggagggtcaggaaaggtttcagggaagaggtgacatctgagtgggccttgaaagctagaggcagtaacaacagctactgtttacatatattgtgcatactcatgcttctttgccaagtactctaagctcttcacatagatcgacttctttaatctgcataacaacgtgtgttttcttactagattatttccatttacatgttaggaaactggccaactgaaaacttatgcttagggccgtgcagctagtcagtggcagagctaggatttgaacttcaggcattctttttctctttgtagagaaggaggtctcactatgatgcccaagctggtctcaaactcctgggctcaagcgatcctctcgcctgggcctcccaaagtattgggattacaggcatgagccactgcacccgactgattctagctcccgagtctgcactctgaaactgctatactcctctgggagaccaaaggtagtggctacacactggctatgtggccttgggcaagtgacgtcacctctatgagtaagtctccacattcctaaaattaggatgatgttagtacctgactcacagggttgtgagagaatgaaatgagattatttgtatagaaatttatgtccagctccttcgggggagttggggaaaggccgtgcatgagcaaaggccctgaggtgggaagccagggtccaatttgggaaagagcagctgcaaagaaacaggatgagatataaaaggtggggccaggtaagattaacaggggctcaaatgccagacccaggaggctgaacctaattctgtagtaacagggagccatagcattctcagtaatgggagtggcctcatcagagctgtgctttaagaagtaaaatcttgcaacttagcagagaaagaggtcttgttaggaagtcagaggtcatacaccagcccaagcagctcacccggaagtccatgtccaggttgctggtggaagccacaggatccttcatgagggaatagtcaatgccaacaagctcgtccacagaactgcgcactgcaggaaggggctcaagtcactcacggctgtgtgatgtgggataaggtgcttaacctctccaggctcagaggcccacccataaaatgaggatacatccttcacagggttgtcatgagggtcaaattagttttatgtggaaagcacttagggcctggtgtgtagttaggtgctcattaatgttagttattattattactaccactatagaggtttcaaaaaaataactaaacaagatggcatgggggggccgcgcatggtggctcacacctgtaatcccagcacttagggaggtcaaggcgggcggatcacctgaggtcaggtgttcgagaccagcctggtccaccacggtgaaaccccgtctctactaaaaatacaaaaattagttgggcatggtggtgggcgcctgtaatcccagctactcaggaggctgaggcaggagaatcgcttgatcctgggaggtggaggttgcagggagccaggattgcaccactgcactccagcctgggtgacagagcgagactccatctcaaaaaaaaaaaaaaaaaaaaaagatggcatgaggttcctttcccttggtttctcctacctcctccttcgcttcccatgcctgtgtgttaggtgtgatgggaaaatacctttgccccacagtagacagaggtcatggcttagaaaaagggaattcatggccaggcacagtggctcatgcctataatcccagcactttgggaggccaaggtgggcagatcaggaggtcaggagatcgagaccatcccggccaacatggtgaaaccccgtctctactaaaacacaaaaaactagttgggcatggtggtgcacgcctgtagtcccagctactcgagatgctgaggcaggagaattgcttgaacccgggaggtggagattgcagtgagctgagatcgcgccactggactccagcctggcaacagagtgagactgtaagactccgtgcaaaaaaaaaaaaaaaagaaagaaaaagaaaaagggaattcatgttaattgagcacctattagatgctaggtgatgaagacaaatgggatgccagtgatcagcatgcacatattgaggaccttgacaactattctctcagataatcctcacagcaaccccaggaggaggcactgccagccaagtgaggaaacaagcactttgcccagacagaaatgagcacttcacccaaaatcgcacaacaagtcagctccaggggccacatttgaacccaggactgttcaacagcagggctcggaaggggcctgctctgaggtgctgcatgacagctgcacacccagactcacccgccaccaactcaccaggcacggtgtccaggagggagttgagcaggaccgtccctgcgtggtagaggacagggcagatctgcgaggtgggagccagagtcagggccttctcaaagtgagagcatgcccacccttgccaccctgcgacctgtcgctgcccacacctgctggttgaggaggaagcgcatccctgaggtgatgaacgtggagagaaaatcatacaccttcctgtgaggagaggagaggccggatgagcccagaacctgcctccaccccagtccaggtccaggagaaatcagtgactagggaaatagtggcagtaggagtcctcagcttcagcctgaataacagctcctccacgtaggttttccaagaaccaggcccaaattccctctccagtctaattctcaagacctcctgacctactctctggtcccatcagtcaaatgaatccacccacattgcctcaaacccactctgagcatccccacatccatcggcttactgatgccctcccttccgccctctgcattcctactctgtattttcccatctgagctcagatgcttcctcttccaggcagtcttcccagattcccctcctctgaatccccaaagcattttcttagtccttctctccaggccctgatatcaaatgttttttgctccagataggctctgagctccttcctgcatcctcagggactggcatacactttgtttgatgaataaataatactgacagtgtaccaacaccaggttataatccatcatcttctctcccccatcctcttccagaacaagaacaatatccccttctcagcagcaaaaataaaaaaataggccgggcacagttgctcaggcctgtaatcccagcactttggtaggccgaggcggacagaccacctgagatcaggagtttgagaccagcgtggccaatatggcgaaaccctgtctctactaaaaatacaaaaaaagtagttgggcatggtggtgcatgcctgtagtcccagctacttgggaggctgaggcaggagaatcgtttgaacccaggaggtggaggttgcagtaaaccgagatggcgccactgcactccaggctgggtgacacagtgagactccctctcaaaaaaaaaattattatttttgttattattatttagagataccaattattgagaatccagtacatggccaaatgtgcatatcagatagtcctcacagttactcttatctaagtggccagcacttaaatatacatttatcatatgccaggtgctgttctaaatttttttttttttttttttttgagatggaatcttgctctgtcaccaggctggagtgcagtggcacgatctcagctcactgcaacctccgcctcccgggttcaagcgattctcctgcctcagcctcccacgtagctgggactacaggcacgtgccaccacgcccagctaatttttgtatttttagtagagatggggtttcaccatgttggccaggatgatctcgatctgttaaccttgtgatccgcccgcccagacctcccaaattgctgggatttcaggcatgagccaccacagccagccttgttctaaatattttttacatataccaacacaaataatcctgacaacgatcttataaaataggatcttataaaatgaggatattgaggcaccaagcttcagtgacttggccacgttcacacagccaggaagtgacagagctgagctttggacccagttggtctgattcccaggcctatgcactttgcattgcgctaggcagatgagctgtggggctcgaaaagggtgagctggggttggggctggggcttacttgaaggttcccccgaaggccgcgtgcattctggagacagaggcctggcaggagacattggacactttcatccgtccagcgggatcccgggagagctccagaccagtgcggatggacacaccctcagctgaggcgttgatgtagcccccatcatagctgccaggggggttaatattcactccaggtaggagctcaattgagtcttcagtgcccccatgcatcaccatacctcttaataaggtttcacctctttccacacatcctaccaaaccttcctatcaactcgtatgaaatgcatatgcctgtttctgttacacagatgaagaaacggaaactcaggaaggctaagggggctgcccacagccccacagcacctccagccctcctgacccactctccactcccctgagggtgctgggtccttacaagaaccagtagagcagctgtctccggaagcgcagccccaaggaggcattggtgatttgaagcatcagctcctgctgtggctggaaatcgagctcggaagatgtcagttgcagctctgtgaccttcaccctacaggaggcctcagggtcagatccagggccaagaagagggaacttcccccaacgacaggaaatttgtctgctcccctttcaagtccaggcctggggaagcgggagtgggtggaatgaattcttccattgtccctcaagtgcccaacttagacttgggtggctcaaagttgaacttgggtggctgagagaggaggtcttcctgatccaggtgttaaaaatgagcttcaccccatcgcttaaaagtcttgtttgtttgtttgccaggtgcggtggtggctcatgcctgtaatcccagcactttaggaggccgaggagggcggatcacttgaggtcaggagttcgagaccagtctggccaacatagtgaaacccgtctctaccaaaaatacaaaacttagcagaccgtggtggcacgcgcctgtagtcctagctactcgggaggctgaggcaggaaaatcgcttgaactcgggatgcggaggttgcagtgagccaagatcgcgccactgcactctagcctgggcaacagaacaagactccctctcagaaaaaaaaaaaaaaaaagtcttgtttgcttgcaccccctcccctcccacaccctggggttgctacacccggtcttttaatagagtccgttcactttgcctccatcacctaagctccgtctcacatctcaattccttattccccctccctcatcctaaaccatacttagagccttcagtttctccacccctccgattaactccaccccgtgcccgagactccactctcatctattgggaagttccttgactccacctttctgttgttcttcgaccacgcctcacatccactggtcctgcttccttcttggccccctctacattttcaaggccacgcccatctgcctggtcccgcctatgatgactggcttggcctttatcttttcggccccatccggtttcttaagtcttgcctcatcgatttggccacgccccatcccactcagcctccagtctcccgagaccctgagatttctcgggccccgcctccaccgccgaggccccgccccggatcgcgaggccccgccccccacttactcagagatgttgtagtagaagtggccttctttgccccgcaggtccggaatggtgatagtctccagctcttgctccagaaagcgcagcccctcctgcttcactgaagcagcagagaaacccttacttagctcccgtgcccactgttggggcgaccccaaccccgtccgctcccgtccgtccctgtctgcccctgcgccttacccagctccagcgccttggaggtgacgcggatcttgcagcctgggaactctgcatgtgcgcctgccagcagcgctaggaagagggccccgaagagggccatggcgagcgggcctgggggtggggtggggtcgcaggagttatctgagccgcttaaacccattccttggacgtccaaccataagtgggaactagcctggatcgttaccctccagataactcttcggggaacttggaaccaataatcttgcctccatatggcagatgtggaaactgaggctcagagaggcgatgcgacttgcgttctggctcccagaggatttgggacacgggggaggggacgttcccagttccctcgtgctaccgccgcgtgatgagtttggacctccaggggaccagcccccacacccccaacaacctcccctttcctttagcggtgggcccatgcaggcttgcacgttgccacggcaacgactgcacgcgcattcttggagggtggcttgcggtctcataggcctcgcgcccggggaggagaggaggtggccgaccagaccgtgggctcccgggtctcccggctccctcaggtcctaaatctctcccattagagattctgcctggagcccccatgttagcgttctccttcatcggctctcctccccacgccggcttcagtgcaccacgcggctcggcgagggactgggaacgggatagggacgcgccccaactcactcagcggtggagctggggggcggcgcggtcacgtgggatggcgggcagctcaggggatccgggcgacggggtctggcgggcagggttgttccagccgcctttataaagccggcctccccgacccctcctcctctctgcagctctcccctcctcccttgggggctgggaggggacggggcgggacgctggcagccgggagagtggaaaaggctgcacagagccccgtgacaagcccggccgctgtctggacaagtgggagacccaagcccagggagagggaaggaaatgcaggagccggcccactcagccccaacaatcccactttgctgggaccttggttcaaattacaattatccatgtcttcctgcatgatcttgggcaagtcacttcacttgggtcactgaccctcagtttcttccttcagcgaaatgtgcacgatgataggaactacctcttgggcctttattacaaccaggtccaggcacaaagtcaaggaatattttttctttccctgccacccacaatcatctcgggacctccttgcctggctttgctatgggcccccctacctgtctctgtgtcaccacctggggaccttaaggtcccagagacctttcccacttgggaaagcaagactagacaagtgctgtcagcccaggaacataccacaccggctgaaatcagaaggaggtctgccatttatcgtggctggtggattgttttttctattttttttatttttattttttgagacggagtctcgctctgtcccccaggctggagtgcagtggcgcgatctcggctccctgcaagccccgcctcccgggttcacgccattctcctgcctcagcctccccagcagctggggctacaggcgcacgctgccacgcccggctaattttttttgtatttttagtagagacggggtttcaccgtgttagccaggatggtctcgatctcctgaccttgtgatccgcccgcctcggcctcccaaagtgctgggattaaaggcatgagccaccgcgcccggtccactggtggattttttaatgaacccttggagcaaggtgctctgaacagcatccccgcccccacccccacccccacctccatctactgcttacagggttcccggaccctaggacagggcacagagtgggtgcttgccacctttttgttgccaaatggacgaaagaaaggggaagcaataatcatgtctgctgagcatgtatttagcaccaaacactcatctaggaaggatgactaactcatcctgatttgcctaggactttccccattgtgtcttttttttctgatataatccacagattcacaaaaatagttccatttccttttttatttaattaattaattaatttttttgagacacagtcgtgctctgtcaccaggctgcagtgcggtggtgtgatcttggctcactgcaacctctgcctcctgggttcaagtgattctcctgcctcagcctcccaagtagctgggactacagccatgtgccaccacacctggctaatttttgtatttttagtggagacagggttttgccattttggccaggctggtcttgaactcctgccctcaagtgatc

SEQ ID NO: 1654 - DNA, 339 bp, Homo Sapiens
  misc_feature (2)..(2): n is a, c, g, or t
  misc_feature (255)..(255): n is a, c, g, or t
cngtgtctcgcagcggcgcgcggccccggacaagcgctggggattcccgtttgaggcgtcactactgtcactgccatcaccccacggagccacttctagaggggagtagacccggcccttcgccgggcagagaagatgttgcccctgtccatcaaagacgatgaatacaaaccacccaagttcaatttgttcggcaagatctcgggctggtttaggtctatactgtccgacaagacttcccggaacctgtttttnttcctgtgcctgaacctctctttcgtttcgatagcactgccattttggctggactggcagcttctgttatttcaaaatggagag

SEQ ID NO: 1655 - DNA, 688 bp, Homo Sapiens
taggctagggtgcgggctgggtgttgaatcggccgaggcatgaaggcactcctggccctgccgctgctgctgcttctctccacgcccccgtgtgccccccaggtctccgggatccgaggagatgctctggagaggttttgccttcagcaacccctggactgtgacgacatctatgcccagggctaccagtcagacggcgtgtacctcatctacccctcgggccccagtgtgcctgtgcccgtcttctgtgacatgaccaccgagggcgggaagtggacggttttccagaagagattcaatggctcagtaagtttcttccgcggctggaatgactacaagctgggcttcggccgtgctgatggagagtactggctggggctgcagaacatgcacctcctgacactgaagcagaagtatgagctgcgagtggacttggaggactttgagaacaacacggcctatgccaagtacgctgacttctccatctccccgaacgcggtcagcgcagaggaggatggctacaccctctttgtggcaggctttgaggatggcggggcaggtgactccctgtcctaccacagtggccagaagttctctaccttcgaccgggaccaggacctctttgtgcagaactgcgcagctctctcctcaggagccttctggttccgcagctgcactttgccaactc

SEQ ID NO: 1656 - DNA, 329 bp, Homo Sapiens
ggcacaaggcgccggttaaggaaagcggccagccaaggaaattccggcccagggccccgacggcagtcggcaaccgttcaattctctggcgttggatcgcgagcggagtctgcttgtcccgccgagggctcccaggacagggcagggatctagggggtttgcgcacctgctttttaatgccccgcccccctttttttttttaaagaggagggggggaaagtgagggacgagaatggacagaatactgactggaacggtaattcgagcatttcatatgcgaagagcgcaataaccgttccgaattcttctttcagtttctccattagatt

SEQ ID NO: 1657 - DNA, 614 bp, Homo Sapiens
tacggctaggtacgaggctgggtttggtgcgggcgcggcagcgaacaaaggagcagggcgccgcgcagggacccgccacccacctcccggggccgcgcagcggcctctcgtctacgggcaccatgaccgccaacggcacagccgaggcggtgcagatccagttcggcctcatcaactgcggcaacaagtacctgacggcctgaggcgttcgggttcaaggtgaacgcgtccgccagcagcctgaagaagaagcagatctggacgctggagcagccccctgacgaggcgggcagcgcggccgtgtgcctgctgcagccacctgggccgctacctggcggcggacaaggacggcaacgtgacctgcgagcgcgaggtgccctggtcccgactgccgtttcctcatcgtggcgcacgacgacggtcgctggtcgctgcagtccgaggcgcaccggcgctacttcggcggcaccgaggaccgcctgtcctgcttcgcgcagacggtgtcccccgccgagaagtggagcgtgcacatcgccatgcaccctcaggtcaacatctacagcgtcacccgtaagcgctacgcgcacctgagcgcgcggccggccgacgagatc

SEQ ID NO: 1658 - DNA, 2644 bp, Homo Sapiens
agcggccgctgaattctagccaggatttctctcttcctatttcaggaggactctcacaggctcccacagcctgtgttaagctgaggtttcccctagatctcgtatatccccaacacatacctccacgcacacacatccccaagaacctcgagctcacaccaacagacacacgcgcgcatacacactcgctctcgcttgtccatctccctcccgggggagccggcgcgcgctcccacctttgccgcacactccggcgagccgagcccgcagcgctccaggattctgcggctcggaactcggattgcagctctgaacccccatggtggttttttaaacacttcttttccttctcttcctcgttttgattgcaccgtttccatctgggggctagaggagcaaggcagcagccttcccagccagcccttgttggcttgccatcgtccatctggcttataaaagtttgctgagcgcagtccagagggctgcgctgctcgtcccctcggctggcagaagggggtgacgctgggcagcggcgaggagcgcgccgctgcctctggcgggctttcggcttgaggggcaaggtgaagagcgcaccggccgtggggtttaccgagctggatttgtatgttgcaccatgccttcttggatcggggctgtgattcttcccctcttggggctgctgctctccctccccgccggggcggatgtgaaggctcggagctgcggagaggtccgccaggcgtacggtgccaagggattcagcctggcggacatcccctaccaggagatcgcaggggaacacttaagaatctgtcctcaggaatatacatgctgcaccacagaaatggaagacaagttaagccaacaaagcaaactcgaatttgaaaaccttgtggaagagacaagccattttgtgcgcaccacttttgtgtccaggcataagaaatttgacgaatttttccgagagctcctggagaatgcagaaaagtcactaaatgatatgtttgtacggacctatggcatgctgtacatgcagaattcagaagtcttccaggacctcttcacagagctgaaaaggtactacactgggggtaatgtgaatctggaggaaatgctcaatgacttttgggctcggctcctggaacggatgtttcagctgataaaccctcagtatcacttcagtgaagactacctggaatgtgtgagcaaatacactgaccagctcaagccatttggagacgtgccccggaaactgaagattcaggttacccgcgccttcattgctgccaggacctttgtccaggggctgactgtgggcagagaagttgcaaaccgagtttccaaggtcagcccaaccccagggtgtatccgtgccctcatgaagatgctgtactgcccatactgtcgggggcttcccactgtgaggccctgcaacaactactgtctcaacgtcatgaagggctgcttggcaaatcaggctgacctcgacacagagtggaatctgtttatagatgcaatgctcttggtggcagagcgactggaggggccattcaacattgagtcggtcatggacccgatagatgtcaagatttctgaagccattatgaacatgcaagaaaacagcatgcaggtgtctgcaaaggtctttcagggatgtggtcagcccaaacctgctccagccctcagatctgcccgctcagctcctgaaaattttaatacacgtttcaggccctacaatcctgaggaaagaccaacaactgctgcaggcacaagcttggaccggctggtcacagacataaaagagaaattgaagctctctaaaaaggtctggtcagcattaccctacactatctgcaaggacgagagcgtgacagcgggcacgtccaacgaggaggaatgctggaacgggcacagcaaagccagatacttgcctgagatcatgaatgatgggctcaccaaccagatcaataatcccgaggtggatgtggacatcactcggcctgacactttcatcagacagcagattatggctctccgtgtgatgaccaacaaactaaaaaacgcctacaatggcaatgatgtcaatttccaggacacaagtgatgaatccagtggctcagggagtggcagtgggtgcatggatgacgtgtgtcccacggagtttgagtttgtcaccacagaggcccccgcagtggatcccgaccggagagaggtggactcttctgcagcccagcgtggccactccctgctctcctggtctctcacctgcattgtcctggcactgcagagactgtgcagataatcttgggtttttggtcagatgaaactgcattttagctatctgaatggccaactcacttcttttcttacactcttggacaatggaccatgccacaaaaacttaccgttttctatgagaagagagcagtaatgcaatctgcctccctttttgttttcccaaagagtaccgggtgccagactgaactgcttcctctttccttcagctatctgtggggaccttgtttattctagagagaattcttactcaaatttttcgtaccaggagattttcttaccttcatttgcttttatgctgcagaagtaaaggaatctcacgttgtgagggtttttttttttctcattt

SEQ ID NO: 1659 - DNA, 498 bp, Homo Sapiens
ggcttcttccgcgctggagtatccagataggcgacacgccggcgggcggctgaggcgggaatggctgctgtactgcagcgcgtcgagcggctgtccaatcgcagtcgtgcgtgtgttgggctgtaaccctgggtcccatgaccctccaaggcaccaagcacctacctagtggggaccggccccaggagaatcctcattgacactggagaaccagcaattccagaatacatcagctgtttaaagcaggctctaactgaatttaacacagcaatccaggaaattgtagtgactcactggcaccgagatcattctggaggcataggagatatttgtaaaagcatcaataatgacactacctattgcattaaaaaactcccacggaatcctcagagagaagaaattataggaaatggagagcaacaatatgtctatctgaaagatggcgatgtgattaacgactgagggagccactctaagagttctatatacccctggcca

SEQ ID NO: 1660 - DNA, 609 bp, Homo Sapiens
  misc_feature (461)..(461): n is a, c, g, or t
gttctttcctaagaatatgcctatcatcaatcatcttattaatttcttcatcatcatcatctttgaactcatactcatcaagggcagatggaagaggtgttttactgggaagtatctgtttactttcacagatgagagagtctttctctgtttcagagtcaatattttcatcaacactagaaggatttacagattgagcctcttcggaatctgtgtaactttcatcatcatcagataaaggcacctctctttttagtagcaactccaactccatctgtttctgctacatccactggacgcatccccatgtttattagcttgaaatggatttccacgtgacgaagtaacagctttactatatctctgtgcccactactagcagaatcatggagtggagtgtcatcatctaatccttgtgtgttaacatctgctccagctgctataagtatcttagcaacatngtaatatcaacattgcaagttcatgcagtggtgtccaactgcaaatctttcacatcacatttgccctaacttattaatctttaactggtcacattcactgatacgaccagtgtaatggattcacaggtccatctttattacttatctt

SEQ ID NO: 1661 - DNA, 412 bp, Homo Sapiens
  misc_feature (64)..(64): n is a, c, g, or t
  misc_feature (80)..(80): n is a, c, g, or t
  misc_feature (82)..(82): n is a, c, g, or t
  misc_feature (223)..(223): n is a, c, g, or t
  misc_feature (406)..(406): n is a, c, g, or t
ccttcatccctacagtactgatggcctcatcttccccttcaacccccagggacacactcagganaccaacaccttctttntntgccggacactgcgctccctaggggtccaggtttgccgagtctcagttgtacctgatgaggtagccaccattgcagctgaggtcacttctttctccaaccgcttcacccatgtcctcacagcagggggcatcggccagctncatgatgatgtgacctttgaggcagtggcacaggcctttggagatgagctgaagccacaccccaagttgggaagcagccaccaaagccctagggagggggaaggctggggagaagctattcattgggtgccctccttttgcccgcctgcatttatgggcacagatccttgcactgggtcaacntttcag

SEQ ID NO: 1662 - DNA, 387 bp, Homo Sapiens
  misc_feature (4)..(4): n is a, c, g, or t
  misc_feature (36)..(36): n is a, c, g, or t
  misc_feature (50)..(50): n is a, c, g, or t
  misc_feature (56)..(56): n is a, c, g, or t
  misc_feature (60)..(60): n is a, c, g, or t
  misc_feature (198)..(198): n is a, c, g, or t
  misc_feature (222)..(222): n is a, c, g, or t
ggcncgacccgagcagccggttccctcctctccagnccccctcctcattncacccncgcngcctggcccagcgacccgtcccttcgtctccccgcggaatggggccggcactgctcagggtcgcgcgccctggacccagctcgctctcggtctcgcgctgtcaggactgcccggctcgcgccgcctcgcgctctgccntcagtcaagtggcgccgaagtccngtttaagcggcggcggcggttcctgtttccgtttcttcctctccgttcggtcgggagtagcatcctccactcaagccacccttcccactcccccatcgtggggcaagctgcggctgaaggggctgtggctttggcagctgcgacggggagcggcggagaacgctt

SEQ ID NO: 1663 - DNA, 843 bp, Homo Sapiens
gcatataggatcgagcagggttagatcggacgagggccgccggtctgttaggctggagtagcgctagggagaatccctgcaggtaatatttgacttttgcttcatattaatctgagtggaaaataaaagggccctcttctcctctcgcttccctgccgggcaggcgccatggcggaagcctcggcgacgggcgcctgcggagaggcgatggcagcggcggaaggctcctcgggcccggcgggcttgactctgggccggagcttctcgaactaccggcccttcgagccccaggcgttgggcctcagcccgagctggcggctgacgggcttctccggcatgaagggctgaggctgcaaggtcccgcaggaggcgctgctcaaactcctggcgggactgacgcggccggacgtgcggcccccgctgggccggggcctggtgggtggccaggaagaggcgtcccaggaagccggcctgccggcaggagcgggccccagccccacctttccagccctgggcatcgggatggactcctgcgtcatccccctgaggcacgggggcctgtcactggtgcagaccacggacttcttttaccccttggtagaagatccctacatgatggggcgcatagcttgtgccaacgtgctgagtgacctctacgccatggggattactgagtgtgacaacatgttgatgttactcagcgtcagccagagtatgagtgaggaggaacgcgaaaaggtaacgccactcatggtcaaggctttcgggatgcggtgagggaagagggccggcgtgacggtgggcaacggtggtcaccctggatatatcggggggtggcccggt

SEQ ID NO: 1664 - DNA, 463 bp, Homo Sapiens
  misc_feature (10)..(11): n is a, c, g, or t
  misc_feature (385)..(385): n is a, c, g, or t
ccagctactnngggggctgaggtggcaggatcgcttgagcctgggaggttgagactgcagtgagccaagattgcaccactgtcttcccacctgggcaacagtgagaccctgtctcaaaaaaaaaaaaggcagtggaaatagagaagtaacttaaaggtcacactgacagaatttctggttctgagcgtcaactctccagctgtgatggcggaactgactgcttgctgcctttaattgtcttgctctctatgggaaaaaaacaaaagggcttcagtctcatggatgttatttggtgtttgtaaagatacgttttcttttaaacgattttcaaaatatgtctaaattttggtgttgtgtaatgcataatgctttctcaccaacaganaaaaggaaaaaaattgttttcagttaaacactacatgtcctacttgaactccactgggacgctggtttggcatttact

SEQ ID NO: 1665 - DNA, 476 bp, Homo Sapiens
atctctccttccaatcgatgagacaaatccagatttggaagagaaaatggaaagttcttttggttcaccatctaaacaagaaagtagtgagagtttgccaaaagaagcctttctggtcctctctgatgaagaggatatttcgggtgaaaaagatgagtctgaagttatatcgcaaaatgaaacgtgctctccagcagaagtagaaagtaatgaaaaggacaacaaacctgaggaagaagagcaagtaatacatgaagatgatgaaagaccttctgagaaaaatgaattttctagacgaaaacgttctaaatcagaagacatggacaatgtacagtctaaacgtcgtcgatatatggaagaagaatatgaggcagaatttcaagtaaagattacagccaaaggagacattaaccagaaacttcaaaaggttatacagtggttgctggaagaaaaattgtgtgcgctgcagtgtgctg

SEQ ID NO: 1666 - DNA, 522 bp, Homo Sapiens
caacagggagagcattgatgaggtcaggaagcctcctgttgggtagaggagcaactaagagactgaacttggcccccaccctgaggctcacaagcttgaattgcacctgagttccaaaggagaagttgacattcttccagaacatatgcccagtgtcttcaacttgagatggagctgggatgccaagtctgcaaatactgcgccatggggctcagcgacggggaatggcagttggtgctgaacgtctgggggaaggtggaggctgacatcccaggccatgggcaggaagtcctcatcaggctctttaagggtcacccagagactctggagaagtttgacaagttcaagcacctgaagtcagaggacgagatgaaggcatctgaggacttaaagaagcatggtgccactgtgctcaccgccctgggtggcatccttaagaagaaggggcatcatgaggcagagattaagcccctggcacagtcgcatgccaccaagcacaagatccccgtgaagtacctggag

SEQ ID NO: 1667 - DNA, 4567 bp, Homo Sapiens
cctcgcccgccccgcgcgtgactgacagggccactcagggcgcgcgtgcgaggtgctcgcttgggtaatctacctgcgtgggcccgccggcggtaccctgcacagcctgctagaaactgagaccccgggtggtgacagctctggcatcgcccctgggtcctcgggaagaggggacagaaggtcccgagtctcccaggccacacgaagcaagtcactgctcttcctggcctcagtttactcctcctgataaaggaggccataatagtgcctcacctggctgttggctctttctctttagggcaaggcaggttggaggggaaaataggacctgtgcttaccgccggagcagggcgagagtgattctgggccagttctgaacctctctgagattcggagatctcttgtcagtggggcttctggacaactgagtgggctgattgatgcgcggcccagcacgcggcccagtgctcgaggcagggagcgtgtttatcaagagggataaacttgatacgaactctgtacgaaggaaggtgtaggtggatggaggggtgtgtgctgccactgagcacaagaacccacggggtggcctgccaaagttcaaaacgagggagacaggttgatctggacccaggaactacagtgctgaatcctaaaccggggaaagatgagacctagaagagggaggtggtaacctaattggagggtgaggagggaaagagcctgccacagatggggcatctataggggtgctgttgataacagagcagctgacttaagcccgaagtgggtacttctccctgggcagatgggaggtctgggacaggctcctctggcagaagggctcctggccaccctgtcctaaggtgggtcagtcacttcctccttcaccagttccacagcatcttactatgagcttggcattcgaggcttctcttggcagggccctgcactcctagcctctccttgcacattgcacccccattccagagaggtttagttaaaggcgggggttaccaagtcagtcagatcttgggcaagtcaccactcctccagagcctcagtttccttatctggaaagtggaggtcatggcaacccgccaacctggttggatgggagcctgagctgttgtgttgcaccttgcctggggcccacgactttgtagctcctgtcctgcactgggcttatgttttcattcattccagaaaccttttcagagagtccctttggggagtgtgggggacaggagggaaagaaacctggtccttgtagccgttcgtctgctccctgccctgggcagaggacatggggactcaggccagcctgagatcactgggaccagaggaggggctggaggatactacacgcaggggtgggctgggctgggctgggctgggccaggaatgcagcggggcagggctatttaagtcaagggccggctggcaaccccagcaagctgtcctgtgagccgccagcatggatgacatctacaaggctgcggtgagggacagggctgggtagggctggggtgggcaggcccactgggggctcactcagctgagagtgcggggttagtagccccagggaagtggtggggaccaaggagaaggcctacgtgccttcaacccaggccctcacagggacagtgattctggtgtttgaggatgcagaagggggtagggggttccgggtctgaagggtggtggaggaggttgcagctttctgatcgtgtctcactctctgtttccaagtgtctgtggtctgtggcactgtcgctcagccacatgtctctgcatttgtctctggacgtttttgccttcctcttttcatctcttcctcctgagctgtctgagtccccattactgtctccctgtccccaacccccactttctgcccctcacattctgcttctcacatgctcaaaatctgccacccactccagcccttggcgggccgaagatgcttggagggtggagggtgtgagaggaggggtctgtagagcctgagtcctgggctggagatggggctttgaagtttgaggcagggaagttctggacatgagggagaaccaaggaagaaggaacagagaactggggccccagctcccatcatgcctggcaggctcagggctcagtggcttagctaggggtgagagcgagggaatgagggctggagagtggtcaccccaagcccctgcaacctcctgggtcactgagggtcttcagatgctattctatcctgggtggtggtacctccccaacccagagcaaggacatcctggcatggccagctgtccccaggggaacccctccctcagcctccctcactcctgggcagggaagtgctatagccagctctgggggcacgcctgcttatcctgtgggagtccatggagccggggtggggacagccctccacccagtgcccatacaaggcctggcggagttggggactaattttggcttctgaggcggcactagcagccagggggccagataacgctgccccctgcatgccaaagtccccagaacaatcaccaggtttcactttgttcctcgttaaaaatagcccagtggccaccctggtcaggttaccgtgggtggcttgcctgcctccacactggttttattatcccaacttagggacagctgtccttccggcccacccagcttgagtttcatcaggggccgaaagggcattgagtggtcactgactattgttactgagggtcaccttggtcctgaagggggtgcccacctgtcaccctggccctgagcccagtcgcagtgaggccagctgggtcacgtcagggctttgggggcagggagggaggactgagacctccactctgtggcctggaaatagccagcctcctccagctccagccttctcacctgtggaatgggttggttcctacgcagcagctatacctgagtctgagaccttgagattccctttccttctaggtagagcagctgacagaagagcagaaaaatggtgagaatccctatcacacatgtgggagaccagcgggtccaggctggcatggggaccccttatcagaagaggaccccaggccagagaccagaggcttggtccctcttgctctgccctcagagaggtctccgagggaggtgggcaggttggcaggtggccccagggttctggccctccgtggtcctggctgctgagccctgactaccgtgccccccaacccctgaacacagagttcaaggcagccttcgacatcttcgtgctgggcgctgaggatggctgcatcagcaccaaggagctgggcaaggtgatgaggatgctgggccagaaccccacccctgaggagctgcaggagatgatcgatgaggtggacgaggacggtgagcccccctcctccccaggctccagaagaaccccagctggctgggggctggaatgctggctctgtttagctgggagcaatttagcctatccgagccttggttgcctcatctataaaatgggcataagggctacacaagcctggcgtttggtgtgaggatgcggtgagaacatgggggttcgtgtcgaaggtgctgcctgcagtacctaccctggcctctgtaacggccatgctgcccacccccaggcagcggcacggtggactttgatgagttcctggtcatgatggttcggtgcatgaaggacgacagcaaagggaaatctgaggaggagctgtctgacctcttccgcatgtttgacaagtgagcacgtgacccttgacctctgaccctgacccacactcaagccgagctgtacaggagggcagtctcagattccaggcctagggaccctgtggcctctgcctgataggggagagggatgccccatctcccagtgtccctgctctgcctcctggggcatgggtggggctgcctcatgccctccccacagccctaccctgagccccctccccacagaaatgctgatggctacatcgacctggatgagctgaagataatgctgcaggctacaggcgagaccatcacggaggacgacatcgaggagctcatgaaggacggagacaagaacaacgacggccgcatcgactatgatggtaagcgggtgggtgggctgatctcctgcctccatgccctgcccagcccctaccctcaacccacacctgcccctctttccacagagttcctggagttcatgaagggtgtggagtagatgctgaccttcacccagagctgcctatgcccagcctccaactccagctgagtcctggggttggggagggggtcggggtcccaggacctgagcctggccatgtcctcaaccccaaatcccccgactccctccccagatctgtcctgggggatgcaaataaagcctgctctcccaaggtctgctatctggctctggtgtccctgggccgtggactcatccccaggacccactcttacccaatggccgcttccttccctgtcctaggcaggctggctgcagagcctggcgcctgaccaccgctccacactgccttctgcaggggggtgagatgagatcggagactgccgtgtggcctgccctgct

SEQ ID NO: 1668 - DNA, 544 bp, Homo Sapiens
tgaagtgtgcggggtactcgccctgcagcagcgcctcgaagtgcaagcggcagtagaccaggctgtccttcatgccgaagtggtcgcccgtggtcagcatcttgttacacgtggtgcacgtgaagcagttgaggtgataaaccaagtcccgagcgcgcatcaccatctccgaggccgagatgcccaggtggcagcgggcgcagcgctgcacagagaagcgcctgtagtagtcttccttgcagtagatgctaccgtccttgctgaaacaggtgagctccgactccaggttgagcttgcactcgcagcacttgaggcagcgcatgtgccactgcttgtccaccgccagcaggtagtagcggtccgagatcttgcccccgcagccggcgcacagcgcggcgcggtcactgctgatggacggcatggtcgtctcggtgtcgccgcggtcgatggcggagctgatggcgggagcctcgctcttggccctgcggtccatctcgtcgatgaccacgtgcacctcggggcccgacagactgtggaacagcat

SEQ ID NO: 1669 - DNA, 4080 bp, Homo Sapiens
cgttagttctccgggtacctcaggcgcctcagcctccttagtctcctcatcctgcttcacaggctccgcggcctccggcctcctcggcccccgtcccccggcctcctcggcccccgtcccccgccatccgccgcccggatcctcgccgccctccctaggccgccccgccgccatgggcctgcgcccgccgcgccgccgggccgagggcagctgaggcgcggtgcgaagatgggcgaggacagagcagggcccgagcgccagccccagcagcccgggcgccccgcgcgcgcccgcccgcgccgccgaggggatgcccgcgcccgccgccgcgccctgagcgcctttgtctgccgcccgcgccctccgcaccactagcctctcgggagcatggcgtcggccccgccggcctcgcccccgggctcggagccgccggggcccgacccggagccgggcgggccggacgggccgggggcggcgcaactggctccgggccctgcggagctacgcctcggagcgcccgtcggcggccccgacccgcagtccccgggcctggatgagcctgcgcccggggccgctgcagatggcggggcgcgttggagcgccgggccggccccggggctggagggaggcccgcgagaccccgggccgtccgccccgccgccgcgctccggcccgcgggggcagcttgcgagccccgacgccccgggcccagggccgcgctccgaagcgccgcttccagaactcgacccgttgttctcctggactgaggagcccgaggagtgtggccccgcgagctgcccggagagcgcgcctttccgcttgcaggggtccagcagcagccaccgagcgcggggcgaggtcgacgtcttctctcccttccccgcgcccacggcgggcgagctggcgctggagcaaggtcccgggtccccgccgcagccctcggacctcagccagacccacccccttccgagcgagcccgtggggagtcaggaggacggcccccgcctccgagccgtgttcgatgccctggacggggatggggacggtttcgtccgcatcgaggacttcatccagtttgctacggtctacggggcagagcaggtgaaggacttaactaagtacttggatcccagtgggctcggcgtgatcagctttgaagacttctaccaagggatcacagccatcagaaacggagatcctgatggccagtgctacggtggtgtcgcttctgcccaagatgaggagcccctggcctgcccggacgagttcgatgacttcgtcacctatgaggccaacgaggtgacggacagcgcgtacatgggctccgagagcacctacagtgagtgtgagaccttcacggacgaggacaccagcaccctggtgcaccctgagctgcaacctgaaggggacgcagacagtgccggcggctcggccgtgccctctgagtgcctggacgccatggaggagcccgaccatggtgccctgctgctgctcccaggcaggcctcacccccatggccagtctgtcatcacggtgatcgggggcgaggagcactttgaggactacggtgaaggcagtgaggcggagctgtccccagagaccctatgcaacgggcagctgggctgcagtgaccccgctttcctcacgcccagtccgacaaagcggctctccagcaagaaggtggcaaggtacctgcaccagtcaggggccctgaccatggaggccctggaggacccttcccccgagctcatggagggcccagaggaggacattgctgacaaggttgtcttcctggaaaggcgtgtgctggagctggaaaaggacacggcagccaccggtgagcaacacagccgcctgaggcaggagaacctgcagctggtgcacagagcaaacgccctggaggagcagctgaaggagcaggagctgagagcctgcgagatggtcctggaagagacccggcgtcagaaggagctcctgtgcaagatggagagggagaagagcattgagatcgagaacctgcagaccaggctacagcaactggacgaggagaacagtgaactccggtcctgcacgccctgtctgaaggccaacattgagcgtctggaggaggagaagcagaagctgttggatgagatagagtcgctgacgctgcggctcagtgaagagcaggagaacaagaggagaatgggggacaggctgagtcacgagaggcaccagttccagagggacaaggaggccacccaggagctgatcgaggacctccgaaagcagctggagcacctgcagctcctcaagctggaggccgagcagcggcggggccgcagcagcagcatgggcctgcaggagtaccacagccgcgcccgggagagcgagctggagcaggaggtccgcaggctgaagcaggacaaccgcaacctgaaggagcagaacgaggagctgaacgggcagatcattaccctcagcatccagggcgccaagagcctcttctccacagccttctctgagtccctggctgcagagatcagctccgtctcccgagatgagctcatggaggcgattcagaagcaggaggagatcaacttccgcctgcaggactacatcgacaggatcatcgtggccatcatggagaccaacccgtccatcctggaggtcaagtagaggcaggaaggtccagcctgagctggattcgggactccaacaccctggagtggttccgtcagaccatgaggagccaagaccagcaggtcccacagccgacagtgcccagagcatgcagggaaccctcgtgcagctgagctggggccgccaaagaccggggctgccaaaggggcagagggtggtggagaggagagggagaaagggaagtcccagggcccggggtccacagaggatgagggttgtggcagggccgtccatcagcgctgaccttccgggggcccagagcttcccagccctgagtcaagctggccatgaacgcgtacacttcagttcagcaggatgggctggagagcctctctgtgcagcggtgtggggtgagccctgctgtggcctccttgtggtggtccctcttcccacgtgcagccctgttgggaagaaaggaagaaaacaggtccctccaggggtgctgctgcctaagccacccacataagtacgctggtgccgtgtcacccatgttgagccgctcctgatggctgacgggctcccagaccctcacctcggacatggtggtgggggaaggacgggtgggcaaggctggtgcgttccccagctctccctacgctgctcgggccattgcccagccagatgtggtcacctcagtccagctctggggcctccaggccatgtggctgttcccacggcccagtcctcgctgcagtaacccctgggggctctgaccacctatgggggccgggcaggagcctctggggcctccactccgacatcaggacctgagatgaccgctgtgtggcgctctctccctgggcagggtggatgccacaggcccctctggctcccaggtgctgcttctccacaggtgcggcctggcccggcctcctaaaggccacaccctccccacgcacttcccaggccagaatccaaacatcgggaaccctgttttcttctgggtgtgtctcacttagaaatcgtggttcttccccgagggtgcatgttgcaggagggagagggcagggaagactcacagcagagcaggagggggcctgtgcttctcggggtctgcaccccaggcacagcggtgtcaccccgcaggaccgcgggcctgccccaacccccagcattcccgggtgggcccagaccccatcaccaagactggccacccgctgcgtgtgtgtgcgcgcgcgtgtacgtgtggccccacatccgccgccttccacgctaggatgtaagaggtcgcctcctattgtacatttggggaaagccttgggtgtaaatcagtgtaaacttggaggagagatttttctatcatgtagagtaggtattttttatagattgaaggttgatcaattttttaatactttcaagagaaaactgtgtatacacatgaaatatatatatatatat

SEQ ID NO: 1670 - DNA, 172 bp, Homo Sapiens
ttttagaattgaagtctgaaacaaacaaaagcaattcaatgtcaatagacattaagcaacataatagacaaacatctcctaagggaacatttgttacagctgctccttccctgaactgtgctttggaagataagctctgtcctgagtccaaaccaagcccttccaagagaga

SEQ ID NO: 1671 - DNA, 586 bp, Homo Sapiens
acgcgtccggtggggagtcggcgcctgcgtactaagacccgtgtgcagcagcggcggcggcggtagaggcggcggcggcggcggcagcgggctcggaggcagcggttgggctcgcggagagcggacggggtcgagtcagtgcgttcgcgcgagttggaatcgaagcctcttaaaatggcagatgacttggacttcgagacaggagatgcaggggcctcagccaccttcccaatgcagtgctcagcattacgtaagaatggctttgtggtgctcaaaggccggccatgtaagatcgtcgagatgtctacttcgaagactggcaagcacggccacgccaaggtccatctggttggtattgacatctttactgggaagaaatatgaagatatctgcccgtcaactcataatatggatgtccccaacatcaaaaggaatgacttccagctgattggcatccaggatgggtacctatcactgctccaggacagcggggaggtacgagaggaccttcttctccctgagggagaccttggcaaggtgatgagcagaagtacgactgtggagaagagatcctgatcacggtgct

SEQ ID NO: 1672 - DNA, 186 bp, Homo Sapiens
gtcgagtcggagctgtacttccttatcgcccggtacctatcggcgggcccgtgtcggagagcggcccaggtgctggtgcaggagctggagcagtaccagttgttgccgaagagattggacttgggagggcaacgagcacaacaaggagcttcaggagggagttggtcttgtccattaggcatttgg

SEQ ID NO: 1673 - DNA, 918 bp, Homo Sapiens
cccccccccccccccacccccacccgccgcaccacaccggccagcaagaccccgcaaacttaggctaggtacgaggcctggtgttagcggtgcgacgaaggagtaggtggtgggaatcctcaccgtgggtcgattagccttttctctgccttgcttgcttgagcttcagcggaattcgaaatggctggcggtaaggctggaaaggactccggaaaggccagacaaaggcggtttcccgctcgcagagagccggcttgcagttcccagtgggccgtattcatcgacacctaaaatctaggacgaccagtcatggacgtgtgggcgcgactgccgctgtgtacagcgcagccatcctggagtacctcaccgcagaggtacttgaactggcaggaaatgcatcaaaagacttaaaggtaaagcgtattacccctcgtcacttgcaacttgctattcgtggagatgaagaattggattctctcatcaaggctacaattgctggtggtggtgtcattccacacatccacaaatctctgattgcgaagaaaggacaacagaagactgtctaaaggatgcctggattccttgttatctcaggactctaaatactctaacagctgtccagtgttggtgattccagtggactgtatctctgtgaaaaacacaattttggccttttggtaattctatttgagcaagttggaagtttaattagctttccaaccaaccaaatttctgcattcgagtcttaaccatatttaagtgttactggtggcttcaaagaagcctattgattctgaagtagtgggttcgattgagttgactgtttttaaaaacactgttgtgcgttttacttggtgatgccgaacgttatagtaacccaacatttgggttttgtccgaccttttttccctcctggga

SEQ ID NO: 1674 - DNA, 652 bp, Homo Sapiens
  misc_feature (366)..(366): n is a, c, g, or t
  misc_feature (458)..(458): n is a, c, g, or t
agacagttattttgtctaagaccgtattaatactttgcactgcagcaccttctacaagaggacagcaaagaacttcacatgtgtatcactgggctcctctgcaagaggctgggaggtaaaggaggggcagggattgctgttacggccctctctgttgtggggaggcctaggtaggactttgacactgagaggtcaaaggtatgaacgcagcctggaaactaatcattagagggggctaataaagattcggatgggctttcttctaattcaggctatttccaatgaaacttaggtctaaaaggataagcagagagtgaggaaagagggcaagacatggaatacttatatttatcaagagtaactatngtaattctaccagggaagaagaatcttgggtttcacagtatgcttatgacctcatcctcagctactttggaatcagcttcccaaacattgtngttagagagtcggcaaccacttctgttcttgaatttggcggactgtcagggggttttagatttatcctttcaattatttataccaactctctatctctgaaaccagaatccaatttggaaagataaatacatctctgtgtgcgtgtgtgtgtgtgtgtgtgtgtatgattctctaattcctagtcatcttccta

SEQ ID NO: 1675 - DNA, 350 bp, Homo Sapiens
  misc_feature (289)..(289): n is a, c, g, or t
ctgagtctttcaggtaaagatgagcatgaaaattaatttgtatttattttttgtcagctactattttacccaaaaggatcaaacgttatagatatactacaaatcactttaaaacaagaggttcctcagtcagtcccaatccaaggatatgcattaaatctgaattactgttatatctatatactttaacccagcatgaggtctgggttaaccaaatgccaaagcaggttttgtgggtaagggcccatcatgaaaaaactaaggtcattattctacaaatctttaaggntttgtcttaaataaattcactgttcacactaaatttgtcttaaattaaattccaatggtaa

SEQ ID NO: 1676 - DNA, 449 bp, Homo Sapiens
catataaattatcttaatgatctaggtattttgttaggggaatacatacagtcaggataggataagaggggaagtaatgagtggtttactaaatatataagacaaacatttcaagtaaaaatttcaggagaaaatttttttttaggtttctaagaaatatatttgtggatgtggaatttttctgtcagatgacgtaagagcaaagttgaagatagctaatacttggggattcatatggaggtaattttttatttaaaatgagcaagaaggaccctagccttttattgtggtcttggaaactcattccccaccagtatcattccttgaagaaatggttggttctaggtctggggcaggaaatatatgagataagctgaaacatcttgactatcagcaaagattttatcaaacgatgctagggttgtgtcagaaggactcagcagccaact

SEQ ID NO: 1677 - DNA, 4266 bp, Homo Sapiens
cagggctccttcccgcccgccgccgccgagacccaggctgaagctggggaggacggtggagcccggcccaggccgttctcctgcccccgcggctggagcatcgtctgggactactggctgaaggcgagccccgcagcccaagcgcaggacacgcgcgccccgcgccaccgccgttctctcttccctcccctcctctcccctcccctctcctccgcccccggcctcggctgcggcgggaggaagaacgcttcccaaccagccaggagagcccagatctattcccattcggggagaaagaagagaccccgcacttggatccgaccgacttctcgccccggggccacggaagtggctcgccgtccaccggagagtccccgccgagcgtagccctccaaccctcgcccaaccgcagccgcatagacagcgctccccagcggcccccggccccgcgagcccactccccgcgcggggccggggccggggccggcgatgcctggcacggcagcggcggtggccgcggctgctgctgctgctactgccaccgctgccacggctgctggcgcgggcccgggctgggggcttgagtctctgcagtggggctgagcccgcagtcccgccccccgatcctgaggccgctgctccgccgggcgccgggcctcctccgcccgcgcctccgccccaggagctggagccaagcggggagctcgggccccgcgcccaggcccggaccatgcatggccaccgagccccgggggggcgccgggccttcggagcccgaacacccggccacgaacccgccggcgccgctccgccggcctgtgccgactcggaccctggagcctcggaacccggactgctggcgcgcaggggctcaggttcggctcttggcggcccactggatccccagtttgtcggaccctcggacaccagcctgggcgctgctccaggccaccgggtcttgccctgcggtcccagtccacagcaccaccgggccctgcgcttctcttaccacctggagggctcgcagcctcggcctgggctgcaccagggaaaccggatcctggttaaaagtttgtcccttgaccctggccaaagcctagagcctcatccagaaggtccccagcggcttcgctcagacccaggtcccccgactgaaacccctagccagcgtccttcaccactgaagcgggcaccgggcccgaagccacaggtgcccccaaagcccagctacctgcagatgccccggatgccccccccactggagcccatcccccctccaccatcacgcccactgcctgccgacccccgagtcggcaagggcctggctcccagggcagaggccagccccagttctgcagcagtatcctcactgattgagaagtttgaaagagagcctgtgattgtcgcctcggatagaccagtccctggccccagcccaggtcccccagagccagtcatgttgccacagccaacctcgcagccaccagtgccccagctccccgagggtgaggcctcccgctgcctgtttctgctggctcctgggccccgggacggtgagaaggtgcccaaccgggacagcggcattgatagcatcagctcgccatccaacagcgaggagacctgcttcgtcagtgatgacgggccccccagccacagcctctgccctgggccccctgccctggctagtgtgcctgttgccttggccgacccccaccggcctggctcccaagaggttgacagtgacctggaggaggaggacgacgaggaggaggaggaagagaaggacagagaaatcccagtgcccctgatggagagacaggagtctgtggagttgactgtgcagcaaaaggtgtttcacattgccaatgagctcctgcaaactgagaaggcctacgtttccaggctccatctcctggatcaggtgttctgtgcccggctgctggaagaagctcggaaccgcagttccttcccggccgacgttgtccacggcatcttctctaacatctgctccatctattgcttccaccagcagttcctgctgcctgagctagagaagcgcatggaggaatgggaccgctatccacgcattggagacatcctgcagaaactggcccccttcctcaagatgtatggtgagtatgtgaagaactttgaccgggccgtggagctggtcaacacctggacagagcgctccacccagtttaaagtcatcatccatgaggtgcagaaggaggaagcctgtggcaacctgacattgcagcaccacatgctggagcctgtgcagcgcatcccccgctatgagcttcttctcaaggactatctgttaaagctgccccatggctccccggacagcaaggatgcccaaaagtctctggagctgatcgccacagcagcagagcactcgaatgctgccatccgcaaaatggagcgaatgcataagctgctgaaggtatatgagctgttagggggcgaggaggacattgtcagccccaccaaagagctcataaaagaaggccacatccttaagctgtcagcaaagaatgggaccactcaagaccgatacctcatactattcaacgaccgcctcctttactgcgtgcccaggctgcggctccttggccagaagtttagcgtgcgggcacgcattgatgtagatggcatggagctaaaggagagctccaacctcaatctgcctcgaaccttcctggtgtcaggaaagcagcgctccctcgagctccaggccaggactgaggaggagaagaaagactgggtccaggccatcaactccaccctcctgaagcatgaacagacgctggagactttcaaactgttgaactcaacaaacagggaagatgaagacaccccgcccaactctccaaacgtggatcttgggaagcgggcacctacgcccatccgggaaaaggaagtcaccatgtgcatgcgctgccaggagcccttcaattctatcaccaaacgcaggcaccactgcaaggcctgcgggcatgtggtttgtgggaagtgctccgagttccgggcccgcctcgtctatgacaacaaccgctccaaccgtgtgtgcactgattgctatgtggccttgcacggggtgcctgggagcagtccagcctgcagccagcatacaccccagcgccggaggtccatcctggagaaacaggcctcagtggctgcagagaacagcgtcatctgcagcttcctgcactacatggagaagggtggcaaaggatggcacaaggcatggttcgtggtccctgaaaatgaacccttggtgctgtatatctacggagcccctcaggatgtgaaagcccagcgcagcctgcccctcattggcttcgaggtgggaccgcccgaggcaggggagcggcctgacagaaggcatgtcttcaagatcacccagagccacctcagctggtacttcagccctgagacagaggaactacagcgacgctggatggctgtgcttggccgggcgggccgaggggacacgttctgcccggggcccacactgtctgaggacagggagatggaggaggcaccggtggctgctttaggagccactgctgaaccccccgaatccccccagacccgagacaagacctagagggtttgggacaaactgggagcccccaccccacactctagttgcccatgtctgattgggggctctagccccttccctcccagctcagtcaatacttgaactcccatcacgggcactttcaatcccgaatgctgggtcttgggttttttaattcatcttttcacaaaaacgtgggctttttaaaaaatatattcctacagtgatgtcaatttttattaatccctgtccccagggagggtgggagccgttgccagtcctacctgaattaggtcgtttttctccctcatccctcaataccctaccacagatcctgcctccacccagttccccacaaagcaccagaggtaggagacctggattcaagtgccagctctgccactgaccctggggccccgacccagccctgcctcctcagccaggtcttcacacgtacaactccacgtgggtgcaactagacctctcctgcctctcccatggctacagctctacccggccccaaggctacccagtattttatcgtccagacccatggcagggccagcgggcaggacagggaaacaggggggaggacaatggatactcagttttttgtgtttttttgtgtgtttttttttttttaagaaaaatacagtttatttcaggctttacag

SEQ ID NO: 1678 - DNA, 440 bp, Homo Sapiens
ttgcggccgccaacgccgcccggactggagccctgacattgctgcgctcggggggctccaggcagcccgtatcggggcctttatttctcgtcggcggcgccctgcaccgcgcctcgcaaagccaaacaccagagcaccctagaaggtttaactaaaagaatgctcatgtttgacccagttcctgtcaagcaagaggccatggaccctgtctcagtgtcatacccatctaattacatggaatccatgaagcctaacaagtatggggtcatctactccacaccattgcctgagaagttctttcagaccccagaaggtctgtcgcacggaatacagatggagccagtggacctcacggtgaacaagcggagttcacccccttcggctgggaattcgccctcctctctgaagttcccgtcctcacaccggagagcctcgcctgg

SEQ ID NO: 1679 - DNA, 513 bp, Homo Sapiens
tttaaaaggctttatttgcagtggaacaagctaaatgctgtattcattccaaatgaaaagaactagactgctgattgtactgagaactcataagacgaagctaaaatccctcttcggatccacagtcaaccgccctgaacacatcctgcaaaaagcccagagaaaggagcgccatggattactacagaaaatatgcagctatctttctggtcacattgtcggtgtttctgcatgttctccattccgctcctgatgtgcaggattgcccagaatgcacgctacaggaaaacccattcttctcccagccgggtgccccaatacttcagtgcatgggctgctgcttctctagagcatatcccactccactaaggtccaagaagacgatgttggtccaaaagaacgtcacctcagagtccacttgctgtgtagctaaatcatataacagggtcacagtaatggggggtttccaagtggagaccacacgggtgccatgcagtacatgttatatcacaa

SEQ ID NO: 1680 - DNA, 580 bp, Homo Sapiens
tggcgaattcggcacgagggcgggacccgttggcagaggtggcggcggcggcatgggtgccccgacgttgccccctgcctggcagccctttctcaaggaccaccgcatctctacattcaagaactggcccttcttggagggctgcgcctgcaccccggagcggatggccgaggctggcttcatccactgccccactgagaacgagccagacttggcccagtgtttcttctgcttcaaggagctggaaggctgggagccagatgacgaccccatagaggaacataaaaagcattcgtccggttgcgctttcctttctgtcaagaagcagtttgaagaattaacccttggtgaatttttgaaactggacagagaaagagccaagaacaaaattgcaaaggaaaccaacaataagaagaaagaatttgaggaaactgcgaagaaagtgcgccgtgccatcgagcagctggctgccatggattgaggcctctggccggagctgcctggtcccagagtggctgcaccacttccagggtttattccctggtgccaccagccttcctgtgggccccttagcaatgtc

SEQ ID NO: 1681 - DNA, 3907 bp, Homo Sapiens
gaaccggtagtccgcggtggcgcggtccgcccctcacctggccagcggcgggcgctgaggggcccaatgggagccgcggcctggccgccccgccccgcgcctccggacgtctgtgccgggacaaggccgccgctggtgccgggtccttgaggagagcgcctcccgtccgaggccagccgcctctgtcagccgtccgcgcgggccgggtctgaagcgccgccgggacggcgaagagccgcggccgccgcggagaaggaggcagcgcaggaggccggagcggccgccgcgcccgagcacatggcgtccatcttactgaggagctgccgcggccgggcgcccgcccgcctcccgccgccgcctcggtacaccgtcccgcggggtagtccaggggatcctgctcatctcagctgtgccagcaccctggggttgaggaactgcctgaatgttccatttggctgctgcactcccatccaccctgtgtacacatcctccagaggcgatcacctcggctgttgggctctgaggcccgagtgccttcgcatagtgtcgagagcgccatggacctctacctctgtgggttttgtggctgtgggacctcagtgccttcctgtgcgtggctggcactcttcgcgccctgttcgcgatgactcggtagtagagaagtccctcaagtccttgaaggacaagaacaagaagctggaggaaggcggcccggtgtacagcccccccgcagaggtggtggtgaagaagtccctggggcagcgggtgctggacgagctgaagcactactaccatggcttccgcctgctatggatcgacaccaagatcgcggcacgcatgctctggcgcatcctcaacggccacagcctgacccgccgggagcgcaggcagtttctccggatctgcgctgacctcttccgcctggtgccgttccttgtgttcgtggtggtgccgttcatggagtttctgctgcctgttgctgtgaagctcttccccaacatgttgccatccacatttgagactcagtcactcaaggaggagaggctgaagaaggagcttcgggtcaagctggagctggccaagttcctccaggacaccatcgaggagatggccttgaagaacaaggcagccaagggcagcgccaccaaagacttctctgtgtttttccagaagatccgggaaacaggggagaggcccagcaatgaggaaatcatgcgtttttccaaattatttgaggatgagctgaccctggacaacctgacacggccgcagctggtggccctgtgcaagctgctggagctacagtccatcggcaccaacaacttcctgcgcttccagcttaccatgcggctgcgctccataaaggcagacgacaagctgattgctgaggaaggggtggacagcctgaatgtcaaggagctgcaggcagcgtgtcgggcacgaggcatgcgggccctgggcgtcacggaagaccgcctgaggggtcagctgaagcagtggctggacctgcacctgcatcaggagatccccacatcgctgctcatcctgtcccgggccatgtacctcccggacaccctctctccagccgaccagctcaagtccacactgcagaccctcccagagattgtggcaaaggaagcacaggtgaaagtggccgaggtggagggcgagcaggtggacaacaaggccaagctggaggccacgctgcaggaggaggcggccatccagcaggagcaccgtgagaaggagctgcagaagcgctcggaggtggcgaaggattttgagcccgaacgtgtggtagctgctccccaaaggccggggaccgagccacagccagaaatgcctgacacagtcctgcagtcagagaccttgaaggacactgccccggtgctggagggcttgaaggaggaagagatcacgaaggaggaaatcgacatcctcagcgatgcctgctctaagctgcaggagcagaagaagtcactcaccaaggagaaggaggagctggagctgctgaaggaggatgtgcaggactacagcgaggacttgcaggagatcaagaaggaactttcaaagactggtgaagaaaaatacgtggaagaatctaaagccagcaagagattgacaaaaagggtgcagcaaatgatcgggcagatcgatggcttgatctcgcagctggagatggaccagcaggctggcaagctggccccggccaacggcatgcccacgggggagaacgtcatcagtgtcgctgagctcatcaacgccatgaagcaagtcaagcacattcccgaaagcaagctcaccagcctggccgcagcactggatgaaaacaaggatggcaaggtcaacatcgacgacctcgtcaaggtgattgagctggtggacaaagaagatgttcacatctccaccagccaggtggctgagattgtagcaacactggaaaaagaggagaaggtggaggagaaggagaaggccaaagagaaggcagagaaggaggtcgcagaggtgaagagctagaaccactggcctgggcacctgtcctcctgctgtgccgtcaccctggcaagggccgtgagggcgattgctttgtggtgattctcagtggctcatctaatattttggctggaataaatcagagacttccataatcaagtaaattttaattttcatcattccatggagattcagtctgtctggaatcccggaacccctccacagaatcgtgtctggatccacactgtggtgtggctgccacggcctcctggctccagaggcagctgggccgggccaaggcaggaaggcgcccccatgtgtgtggcctcagtctcagcatctgactgtgctgccctgtccccagggaagagaatgaggaccacgtggactccgcccacacagagctggctgctgtgcccaccctcaggggcgtcaggagacacagcctggcctcctcagggctgaagatgcctccattcgcctgtggaccttgatttctagatttcagtgtcaatagacctgtcttcctgcacactttcagttggatgtgggtcattgtggagacagaggtgtctgccatctctgtggcctctggagagtgacgtctccctgctgggagtgctggttctcacgtgcggtttcccttgtgtatcggagctctttctcggctttctatttcccccagttctttaagcagtcaattggcacagagtttcccacgggggctgcagtggattcactgtgtcagggatgagcctggcttgggggttggtggggctctgaagcgcatttggggttctttgtagcttctaatgtgaggtttgagtccagtgcgcccacagcagcatgcccttctcaccccttgcagtgttgcaggctcaggcccctgggctccttcagcaagcaggctagtcaatgaggcatgaggatccggcacagggcatcccctggggcttcaagggcaatacccccgtgcttagggtttgccctgtgccctctgggtggggtggcctccccgcactcggcagcatggccaggctggccagggcgtgggcaggtggtgtcctgtggcacctccatcctcctgcccagccggctgtgtcacactcatctttttaaggtcaggttggttcctggcaaaaatgtacctccaggggcctccaagcataggatttggaagacaggaacggcacaggcgtccaggaaagcagctgcactcagacaatgccttctccattacttgaagcttctttctgttcagccattaaagaaacttgacaaaataggaacaggagatatttctcaattgtaaacctttgtgcagggacagttggcttccagaggtttcagctttcagttatttgagaagtttgttttagatccttaactaatatttatgaattctctcaccctg

SEQ ID NO: 1682 - DNA, 573 bp, Homo Sapiens
  misc_feature (313)..(313): n is a, c, g, or t
  misc_feature (363)..(363): n is a, c, g, or t
  misc_feature (385)..(385): n is a, c, g, or t
  misc_feature (389)..(389): n is a, c, g, or t
  misc_feature (394)..(394): n is a, c, g, or t
  misc_feature (461)..(461): n is a, c, g, or t
  misc_feature (478)..(478): n is a, c, g, or t
  misc_feature (482)..(484): n is a, c, g, or t
  misc_feature (497)..(497): n is a, c, g, or t
ttgtattggatttcactttattttgttccctttcccgtctgttttggcgtagaaaaaatatcaccgagaggaagcagcaggagagggcaggtggagctcgactgcctggactggaggggggcgggcatgggcaggggccgggggcagggccagggcctcagcccaggggttctgcttacggtaccctaatagggtttggaggaaaaggggacaggcatatggcaggcagaatggtgggaggacaggccgaggtttttaggcctttacagtcttaggcgggtagggtgaaagtaggacaagcctgggggatggnaagcaggtgggtgggggggggtgccaggcaaggagttattaaagctgcgngaagggggagtgcgcagcctanccanaaggntgaaaaggggaccccactgtggacccaggggacattgggacccgctccaagcccccgctattctggngctgcactcttatcctntctnnntggggggtgaccnggggaaggggggctacccccagcttgcgggcacttccgataaaggaaagggcacccacccctcgtgcccgaaatct

SEQ ID NO: 1683 - DNA, 417 bp, Homo Sapiens
gttcttctgctgttaggaagccactatgtctggacgtggaaagcaaggcggcaaagctcgggcaaaagctaaaacgcgttcttccagggccggtcttcagtttccagttggccgtgtgcaccgcctcctccgcaaaggcaactactccgaacgagtcggggccggcgctccagtgtacctggcagcggtgctggaatatctgacggccgagatcttagagctagctggcaacgcggctcgcgacaataagaagacccgcatcatcccgcgccacctgcagctagccatccgcaacgacgaggagctaaataagcttctaggtcgcgtgaccatcgcgcagggcggtgtcctgcccaacatcaaggccgtattgctgcctaagaagacggagagccaccataaggccaaggcaagtga

SEQ ID NO: 1684 - DNA, 3887 bp, Homo Sapiens
gcaaacatactttaataagttaaagaaaataacaaaaacagtacagcaaagatactgggcaatgaaagaaagaaacatacaatttcaaaggtataacaaactgaggcattctgtaatatacattcaggctatttttaggggaaagaaagctagaagacatttaaaaatgatgcatatagccgcaactctcattcagaggagatttagaactctaatgatgagaagaagattcctctctctcaagaaaactgctattttgattcagagaaaatatcgggcacatctttgtacaaagcatcacttacagttccttcaggtacaaaatgcagttattaaaatccagtcatcatacagaagatggatgataaggaaaaggatgcgagagatgcacagggctgctactttcatccagtctactttcagaatgcacagattacatatgagatatcaggctttgaaacaggcctccgttgtgatccaacagcaataccaagcaaatagagctgcaaaactgcagaggcagcattatctcagacaaagacactctgctgtgatccttcaggctgcattcaggggtatgaaaactagaagacatttgaagagtatgcattcctctgcaacccttattcagagtaggtttagatcattactggtgaggagaagattcatttccctcaaaaaagctactatttttgttcagaggaaatatcgagccaccatttgtgccaaacataaattgtaccaattcttgcacttaagaaaggcagccattacaatacagtcatcttacagaagactgatggtaaagaagaagttacaagaaatgcaaagggctgcagttctcattcaggctactttcaggatgcacagaaaaaaaaatatattacatttcagacttggaaacatgcttcaattctaattcagcaacattatcgaacatatagagctgcaaaattgcaaagagaaaattatatcagacaatggcattctgctgtggttattcaggctgcatataaaggaatgaaagcaagacaacttttaagggaaaaacacaaagcttctattgtaatacaaggcacctacagaatgtataggcagtattgtttctaccaaaagcttcagtgggctacaaaaatcatacaagaaaaatatagagcaaataaaaagaaacagaaagtatttcaacacaatgaacttaagaaagagacttgtgttcaggcaggttttcaggacatgaacataaaaaaacagattcaggaacagcaccaggctgccattattattcagaagcattgtaaagcctttaaaataaggaagcattatctccacattagagcaacagtagtttctattcaaagaagatacagaaaactaactgcagtgcgtacccaagcagttatttgtatacagtcttattacagaggctttaaagtacgaaaggatattcaaaatatgcaccgggctgccacactaattcagtcattctatcgaatgcacagggccaaagttgattatgaaacaaagaaaactgcaattgtggttatacagaattattataggttgtatgttagagtaaaaacagaaagaaaaaactttttagcagttcagaaatctgtacgaactattcaggctgcttttagaggcatgaaagttagacaaaaattgaaaaatgtatcagaggaaaagatggcagccattgttaaccaatctgcactctgctgttacagaagtaaaactcagtatgaagctgttcaaagtgaaggtgttatgattcaagagtggtataaagcttctggccttgcttgttcacaggaagcagagtatcattctcaaagtagggctgcagtaacaattcaaaaagctttttgtagaatggtcacaagaaaactggaaacacagaaatgtgctgccctacggattcagttcttccttcagatggctgtgtatcggagaagatttgttcagcagaaaagagctgctatcactttacagcattattttaggacgtggcaaaccagaaaacagtttttactatatagaaaagcagcagtggttttacaaaatcactacagagcatttctgtctgcaaaacatcaaagacaagtctatttacagatcagaagcagtgttatcattattcaagctagaagtaaaggatttatacagaaacggaagtttcaggaaattaaaaatagcaccataaaaattcaggctatgtggaggagatatagagccaagaaatatttatgtaaagtgaaagctgcctgcaagattcaagcctggtatagatgttggagagcacacaaagaatatctagctatattaaaagctgttaaaattattcaaggttgcttctataccaaactagagagaacacggtttttgaatgtgagagcatcagcaattatcattcagagaaaatggagagctatacttcctgcaaagatagctcatgaacacttcttaatgataaaaagacatcgagctgcttgtttgatccaagcacattatagaggatataaaggaaggcaggtctttcttcggcagaaatctgctgctttgatcatacaaaaatatatacgagccagggaggctggaaagcatgaaaggataaaatatattgaatttaaaaaatctacagttatcctacaagcactggtgcgtggttggctagtacgaaaaagatttttagaacagagagccaaaattcgacttcttcacttcactgcagctgcatattatcacctgaatgctgttagaattcaaagagcctataaactttacctggctgtgaagaatgctaacaagcaggttaattcagtcatctgtattcagagatggtttcgagcaagattacaagaaaagagatttattcagaaatatcatagcatcaaaaagattgagcatgaaggtcaagaatgtctgagccagcgaaatagggctgcatcagtaatacagaaagcagtgcgccattttctcctccgtaaaaagcaggaaaaattcactagtggaatcattaaaattcaggcattatggagaggctattcttggaggaagaaaaatgattgtacaaaaattaaagctatacgactaagtcttcaagttgttaatagggagattcgagaagaaaacaaactctacaaaagaactgcacttgcacttcattaccttttgacatataagcacctttctgccattcttgaggccttaaaacacctagaggtagttactagattgtctccactttgttgtgagaacatggcccagagtggagcaatttctaaaatatttgttttgatccgaagttgtaatcgcagtattccttgtatggaagtcatcagatatgctgtgcaagtcttgcttaatgtatctaagtatgagaaaactacttcagcagtttatgatgtagaaaattgtatagatatactattggagcttttgcagatataccgagaaaagcctggtaataaagttgcagacaaaggcggaagcatttttacaaaaacttgttgtttgttggctattttactgaagacaacaaatagagcctctgatgtacgaagtaggtccaaagttgttgaccgtatttacagtctctacaaacttacagctcataaacataaaatgaatactgaaagaatactttacaagcaaaagaagaattcttctataagcattccttttatcccagaaacacctgtaaggaccagaatagtttcaagacttaagccagattgggttttgagaagagataacatggaagaaatcacaaatcccctgcaagctattcaaatggtgatggatacgcttggcattccttattagtaaatgtaaacattttcagtatgtatagtgtaaagaaatattaaagccaatcatgagtacgt

SEQ ID NO: 1685 - DNA, 210204 bp, Homo Sapiens
gaattcttgttgaatgaatgaatgaatgaaccaatagtggtctattctacactgtagccactgccattcattttcatttcctcaaaacgttatattcagccttccctctaggtctttgccaacacgggtgcctctgcccacgcttgcccattgcacaggactaactcctacacccctttcacatctcagcttggaggtcactttgtcaaaattcaaaacttttacacttcaaaagacaccatcaagacaattaaaagaaaagcaataggccagggggaaactatttgcaaagcagagctctgataaaggacgtgcatttgagcataaagatgaccaaaggggccctgaaggagggtgctgccagcaagggagttcctgggtctgtaagtcttgtggtctctccaccgtgtgtgttcttttgcagcagccccgtagctgggtggagcctccgggcctgacgtggaccttcactggagaagtgactcaggtgggaaaagtctccccgggcctctccacctgcaggatcgccttcctacaccttcccccgcccgcttccttcgcgcgggctcctcccaatgaccaccagcagaactgcagcctcctgccttagctgagctggagcccgaggtagctcagatgccagctccttcctccaagagaccctagaaatgccattggctgctactctgatgctctggcagaaggcatgccgttgaagtgtactgtgttcgatgtaaactattatgagtttgcatctggctaaacgtgctagtgagtgagttaattagccacctggggtagaaacaagaaaactatgggtggcctaggcagagctcgatggagcaggaattaggggaactgagaaagacaggcaagagactcccggatcctgctagatgctaatctagagggtgggagtgggaggagttttgtgcaccccttctgtttccaggactactctcaggccctccatcgcaggttctgggagtgagcacaagcagcccagactcccaggccacctcctgtcccctgcttcaatccctttaccttcattccttctccatccccatctctcagccctccccaactcctgaaacctttccatggtgccccctggatctccattcttcattttgcaaatatttatgtgatgctccttgtgttccaggcattgttctacaagatgaacacatcctaacactcctcttaagagccctgtgaagtgggtactaatggctgttgccatttccactttacagaggaataaagtgaggcatggggactgtaagtgccttgctcaaggtcacccgatgagcgatgagcgagcgttggagctgagattcagtggcacggaacctgtaatccccagaagcatccccagctcctcggtctcctcaccctccgactgggagactccccagtccagcttccctttccaccctctcagagggtggttcctgcttcccctccaacaccactggcctggggatggagacgtgtctttcttgttccccttggcaacattgagactcttcctccctgctttctagagccccctgtcttggacccacaggtgtcaacctagacatcttgctgcccatcgttgttagtcatcaaggagtcccccaggccactctccccttcccccctcactgtctccccagtttttttcctgtcttcattcttgctgatgtcaatgtccacatctccacaaagatgatccttctgatactcagccgctcgctcccacggtcatgtcctagacccgatcaccaccgatagccggaatctctttcatttcagcaccaaacatcccactttcggcatgccactccctctgctctacacttactagccgtccacaattcttctacctccccttggaactccagtagctttccctggtcctcacccatcttgcatcttatttctctcctggctcaaattccacagcaaatcattacaattattcacctgctacaccctcaaccctcttgtgttatgctcatacttgctggggggaagcctctacccctactaagtcttccacacctgcaaccatacaggtgaatccagcacagcaagtctggctgctctcgtcaattcaagatcatgagcctccacaggccccattgttgcctggcaatcctgctccatttccgtaatccatcctctcttattcccctagacttctatttctacctttttttcctgtcaccaaacatccaacatccgcccaccaccaccacctcacactgggctgagacctcattccttcttttactgagaaacctgaagcaaggctgggcatgggggctcgcacctgtaatcccagcactttgggaggccgaggtgggtgggtcacctgaggtcaggagtttgagaccagcctggccaacatggtgaaaccccatttctactaaaaatacaaaatttagccaagtgtagtggtgggcacctgtagtccgagctactcaggaggctgaggtagcagaattgcttgaaccctggaggcagaggttgcagttagccaagatggtgccactgcactccagcctaagcgacagagtgagactctgtctcaaaaaaaaaaaaaaaaaagaaaagaaaagaaaaagaaactagaagcagtaaggacagaacactcactggctgccgccaccactcctgggaccagccagcacctgagcatgtgtgctgccttccctcccactcacccagccaacagcctgactctcagtaaacatctccactgtgcactagttcccaagcctcccgcagtctcactttgctccagcagttcccccctcctcctacttcttctactgaatcattcccaccactatacaatgtgttatttttcccgtcttaaccactttcacctccaattactcttccagagagctgtttttgcccactggctccaattcctctcctgtcattctctctggagcctattccagtctggccacctgcacatggcttaaaccatggctaatttggctgggcgcagtggctcgtgcctcaagtgaaagagagatagagagggagatagagagagaggaaggaaggtagaaaagagagaggaaggaaggaaggaaggagggagggagagagagagagagagagagcaaccatggctcattcacagttgtcatctttcttgaccacatcaacactggttcctccctcctcctggaaacattgtcttcattcaacccaggacaccaccctctcctgcttttcctccttcctcactggctgctacttctcagtctccttctctgtttcctcctcccctgccctgtagatattggcgcaccccgaggctcccaccttggatctctcctctcactacattctcttctgtaattcagggctttgcctcgaagagttgtcgctatgccagtggcttttgtctcacatttatgtctccagtctcttttctgaactgcagactaacctatccaaatccctgctccccgtccccacttagcatgttccaaactcaactcttggtttcacccttgcacgcactccccctccacctctactgtccatttccatcctgcactttctgcctctcccattccataacagcaactctatcttccagtggctcaggccaaaaacctgagagtcatcctcgactcctctcactctttcacatcccctatctaatctgccggcaaatcttgttggctccacattcagaatatttccaaaatctgagcacgtctctcacctccactgcgcccatcccagtccaggctaccattgtctcctgcccggaccctggccgagctctccgcatctacttctccacttgttcacccctcctgctcccccacctagtctccatatgaggatcaaagagatctcattaaagcctgtaatcccagcactttgggagtccgaggcaggagaatcacttgaattcaggagtttgagactagcctgggcaacatagtgagacccttgtttctatcaaaaaattttaagaattagcctggtgtggtggcatgcacctgtagtcccagctactcttgaatattgcttgagcccaggaattggaggctacagtgagctatgattgtgccaccgtgacagagtgaggctctatctctctcttaaaaaaaaaaagtcattttaattcactccatggctcactccccatgccctttgccctgccctgtgcagcccactggtctgcttgcttccccaactctccgggcaagctcgaagcccagggcctctcctccacttaaagtgctctttccccaacagctgcatggttcactccctcaagtccttgctcagatgtcattctctcagtgaggaattccctaatcacccctttacaattctaacctcaccctcatccctccactttgtctccccagtagaatcccacaagggagggatttttatttatcttgttcactggtgcatttgtctagcataaagcagttgcccaccaaatattcaaatgcatcaatgaatggatgaatgagtctacttttctcgaatggaagtgaagggtttccaggtagaggtgaggtctgaaggcaaaatgaatgatcttttgagagaacaaccaccttgcagataagttcaagtagctaccggacacctcccattttcacctgcccttcccactgttatccatgcctgaggaatgtgatgccagggacggcaggctctgcattggtgtctcaccaaaatgttcaggctcacggagttggctcaggtccctgggcaggtcctggtctccctagttcaaatgcctggaagacagagacctttctaagccaggcatagaaataacaaactccacatatttccagctatttgtgggggcaaaaaaattaaaacaattgaactcatggagatagagagtagaaggatggttaccagaggcttagaaggatatgagggtggtggggagtggggatgcttaatatgtacaaaaaacagaatgaataagatctagtatttactagcacaacagggtgactatagtcaaaaataatttaattgtacaccttaaaacaactgaaagagtataattggattgtttgtaacccaaaggataaatgctcgaaaggatggatacctcatttatcctgatgtgcttatatctcattgcatgcctgtatcaaaacatctcaggtactccataaatatatacacctactatgtacccacagaagttaaaaaaaaagaggggggtgtttcttgagtcactgcacatgccaggcactgcattccctaggagctatggcccttaccatggctggatggtgactgcatcagagattgctgaatgcagagatgattgtcattgagccccgtctgcatgggcgttccgtgaacacagcggttttgacttccaacctgaacatttccacactggggtctgacccacatttgtgaaatttgttcatttatatacaacaaaaacttcccaaggtagaactggaaaaatgcacatttggatgtgcattttacaactcttgtttcagggatccagtggtacaaaataagaactctcccaggaaacgagaaccagtctgtcatcccggccttgggtttgaggcagctgttctcttgcaggacagggctgtgtgccgtctcgtgggctggccctcctgtcttgggtctgaagtggcctagcctggccgaggcactcggtgcccatcccacaactccccatcgggcttctgtgttttgcaaaatgcaagggagtctttgcatctgacctggatgccctctgtttcccagggatcctcccaggatgtctgcctcaccagacgacctgagtacagggggaaggttacagaacatgacagtggatgaatgcttccagtctcggaacaccgtcctccaggggcagccctttgggggtgtccccaccgtgctgtgcctcaacatcgccctgtgggtggtgagtcctgggcactgcaggaggcagacagtaaagcctcagacagggtcgaactttcacaggtgatgcagtgggggacccagttgtccaaatggacaacaacaacattgatacaaactgcctgaatgtcagtcctgcccagggtggccccggtaggtgggcctcaaagaggctggaggaacaggcagaattcctgggattcttttctgtgcatcattgtccagaggttcacctggcctccttcctctttctcattgctgaggtcttcaaggcacattctggtcccatagatctgaacatgcctccagctccattcaatgaactctgagcatccactctgtgcccagaagctgctgggcgctggcaacctacagttgaaaggaatggcccctactccaacagagctcaccttctagtggaggagctccctggggacctcagggacagggtctcccccaagggaatgcagggggccagccaaggggaagggatccatgaagtctcccaccccacattgcttttcctggcctgtagctcgtccttgtggtttactccttcctccggaaagctgcgtgggactatgggcgcctggctctgctgatacacaatgacaggtgaggaggggtcgagatgggtgagccgttgcccccttggggaaaacctgttgccatggccaggacgcagctctgcccagcgcccgagctgcagcaggtgtctcgccagcaagtggcctctgcccctgctctgccctccctgcaggaaggggacttggagggcagccatccctgggcacaaggccgtgtttttctctggtcttagactttctggatcacgtggctgaactcccagatgcctggtgtacctggcacaggggcgattgctgtctgtgcccagagctgtgtgctcagcaaaggagctgaggagcgcctgcccgtggcagagcagagggcagccctcagccagggagtggggagggagcagggcaggcagctgagaacttttctctcctttcttacctccctgccccttccctggctggcagcctgacctcgctgatctatggggagcagagcgagaagacatctccctcggagacttccttggagatggaacgcagagacaaggtgagtgctgggagcggtctgggcggtgggagtcccagcactgggcaggcaggcgtggtgtgcacaggaagaaacacggcttagaccttggggctttgtaatcagccagcctcaaccactctggcagtgtgaccttgagcaaattcctcagcctcccccagactcagtttccccacctgaaagatggagttattgaccatacctactactagggtgccaagtaagtgttaacgaattaagatatcttagagagatttttaacattaatttgtcttctctgctcaaatctccaacccttctcacagtcccgtcctgcccacgtccctacctctgactctgaatcaaggcctcacctcccatttcacatagaagattctagtcatgtggtagggattccctcagcctcaggcttcccagccctgtttagtggagcgcagtctgctgtttcctcctcttccctggtgaaggccagccctccacccgactcatgcattccttcagccacttgctgtgtgccagccactggtctgggagctggggaccaagtcctgcctcatggtgctgtcttccccaggcaggggagacgaccagacagaggcatggtggagaacgccacagggggaggtcagagatggtctcgggtagtggtgacatttcggcggggccctgaatactctgagagggagccctgagaacgtcctccctccccacccccacacacagctgaactgacagtggcccatgctgctgtcaccacttcctcacctctcactcacgccccgcctcccactcacgccccgcctcccactcacgccccgcctcccactcacgcctcctctcccacccacgcctcccctcccactctcgcctcccctcccactctcgcctcccctcccacccacgccccctcccactctcgcctcccctcccactctcgcctcccctcccacccacgccccctcacactcacgcctcccctcccactctcgcctcccctcccactcatgccctgcctcccactcacgcctcctctctcacttacaccccacctcccactcacgcctcccctcccactcatgccccacctcccactcacacctcctctctcattcacaccccgcctcccactcacgcctcccctcccactcacgccccacctcccactcacgccccgcctcccactcacgcccccctcccactcacgccttccctccccctctcgcctcccaatcacgcttcacctcccactcacgccccctcccactcacgcctcccctcccactcatgcctcacctcccactcacgcctcccattcatgcctcctctcccactcacgcctcccctccccactcacctcccactcacacctcccctcccactcacgcctcccattcacgcctcccctcctactctcgcctcccctccttctagcgcctcccctccccctctcgcctctcactcatgcctcccctcccactcatgcccccctcccaccaagcctgccccccactcactcgttgcctcccactcctcccactctcacctcccctccctctcacacctcccctcccacccacgcctcctctcccactcatgcctcctctcccactcacgcctcaacctcctcaaatgtgagctcccgtccctcactccacccagacaaccctgaaggtcagcagtggttccccccaccgctaaatccaatggacttttctcagttcacatcttgcctgcgttctctgaaacgtctgaccctgtagactgtctttctctcttgcacaggtgctctccgttgcataggtgatgtcacattctttgggttttccttctgcctctctgtctgctcctcctgtgtctccttagcagacttctcctccacaccgggagtccccccaaccagctgatcccatatccttcccctcaccctgactcctgggcaatgacacccacactgacaacttcctttgccatctctacacataaacttttaaattcctgtctccagctaatcctctcccactgggccccagcctgattattcaatgcctttcaaaatacctccatatggatattgtagtcatttggggttccatttgtccaaaacatttcatgatatcccaccacacacccacctgttcctctgaccttggtctcagacctcccaccattctccccagggtctcctctccctcttacccaggtccccaagcatagccaatgtgtctccacgttgtgttgctttgaccttcccagctttctttctctccatccctcctaccatcccctggtccaggcctccatcagcctcttgcctggacaactgcagtagctctaactgatccctttaggtccacgctctagggcccttatccattttccacctgcatccagagagattcccctgcctggggacatatattctgctgcagagaccttcactgtcttcctagggcctgtggaatcaattgcagatgctgtgccgtggcctggtagtttggtccatcctcccttactcctcccaactcccctatccctgccacatgagtccaccgtttagcttctcaacagggccacctgcttccctccaccagccctttcccaggctcttccctctcccccttccgcagtggcccttctctgagtcactcaccttttgttgagatttcagcttaagcacacttccccagggagccctgaccacccctcctgggtccagatctcttgttatatagccacagaaaatgcattccttttcttcaacatttttaaccctgtctgtaacgatccctcatctgcaagatcagtctagtgtgtctgctttccgcaggccctgaacttggatttgctcaccactgcaccccacatccaatccagcctgccatgtacttagcatctgatgcatatttgtcagttgcgctaagtaagcggagccaaattccttccattgtcatccctcgagaggcggggtccttcacttgctagaatctgccctctccaaagtgcagagcctcagacaagtgacttcatctcttgaaggcttcctggatagaaaaaaggcagcaacatctaccttgcaaggtggctcgcaggtttattcttggaaatatcactttgatttttttttcttgttacaatgacaaaaaaagttttatttttaaaaatctaagaagataaatccttatggcagcagtgagggggacaaactgaagagggcgtaaattaaattaaatggagaacagagagttcagtgaggtggcccccacagtgaggtggccccaggatggggagacttcagccagagccaggtggtgtgggtgaagaaaatgggtctcaccatggttccctgagcaagttgggtcaggtactgttacccccaggtggcgggggctcagataggtgaagtgaactgacagctgtcactctgtcacgtcagctgagctggctcctgggaactgcagccctgtatctgcctctcatgtggctgttcagctgctgagctttctgaatggtttatgccttcagagcgataatgtgtactcaggggagggagtgtgtgtgtgtgtatgtgtgtgcacacacacatgagagagacagagagagagagagagatccacacaggatattcatggccacgcttctactcatgacctctgccctttcctggatgacccatcctctgtctattccagtatacacctgtgcacctgtagtggaaggggcagaaacacattcccaggaagatgtgtccccagtggtacctaatcatgagggaccatcaggaaagctacttgttcccttagtcagttgcaccctgtttgcccagctgagccatggagacagactcttcatgcaggaggggtggctggacctctctcggcccagctctgctttgctagttacccctccctggggatgctccccattgctgctgccaccaccatgctatttcccttccttgctctgactcacacctgaacatttatccttaatttagctccccagggcatagctggaggaatgtcctgctgtgaacaccctcgagtggccattgtcaccatcagccaacccaacacagggaaggggacttagaaggtgggacttatgccgaggggagcaagggacttctatttcttttgtgccttctcaaaaggaagcaacgaggacaggcaaaaaagaaacagatgtcctttgctcccctcggcataaggcccgccttctaagtttccttccctgtgtcgggttggctgatagttgcttccttttgggaagtacctcttccccagtccatgtggttccagaggactatcaatcaagaggtctgcctggttcacagaagtgcacatgacccaaatggggccaatctagagctgtaaccttgtgcaaggttttgctaagtcctctgggatcccagaaggaagcaggcaccagagtaacttcaccagctaccagagctggcagcttttagagctgcaggccccagccccctctcttacacaccgttccaaagatgactctctctctagtcccccaccaatctccccatggctaaggccacctttcccccccacccagaaactccagacagcaagaccccaagagaaaggcctcaacaggacaggaccctcagcacgtggcatcaaagatgccaccaaaccacgccaggtttcatgatgtttactgaggtgcaggaattcagagggaaagagaccttcttccttgcaacacccatatcaatccccttaagggatttttttttttaattttaataagtggggtcttgctgtgttgcccaggctggactcaaactcctgatctcaagtgatccatctgcctcagcctcttgagctgctgaaatgacaagtgtgagccaccatgcctggcttccttaaggaaattttaattggccccacttgggtaaagttcccattggccagtcaatcactggaggcaaactcccactcggacagagtaagagtaggagcccactggaccacacgcatccagtgaaggacatttccagaaggaagcatgaaggacagacagagagcaacagacgttcaccccagaagcagtcacttctccccctccagttcaagggtcaccttctaaaccccatttcctataacaggagggcagagatgtccactcatttccagggaagcatctccctccacagtcaccactggttcccagctgagccttcagactctttttcccaggaagaaggccccggacgctgccgcggctgcctcagatgacctggctgcctgggttcccagagctgggcagggcaggccaggacctgggttttctcacagtttctcccctttccccgcagggattctgttcctggttcttcaacagcataacaatgaagtaagtgcccgggctctgtgagcttgtgaccgtgttgccttgggggtggggggtggaggctcctggaaaagttagcagcccccagcctgggaagacagggcctgagctccgtatcctccccgccacctcggcccattaccagtgaaggatgctttcctggggtacagttggtgacgtgagaactgggcacagcccactgcccctgttatctctgcctcagtccttagggaaggaccacttttaatagctgaatcattactcgcgtgcttatagaaatgcttctgtgaactccataccaggaaaaagaaacccttcctttgtgctatctgcttgatttctgtgaacatcattcaacatatcatgtgttcgcccttctgcccaagcaaacatcgggcagaagggcaggcctcgctcggcctcagtgcctggagagcagaggggcagcccttgcccacctcactttgtgggtttcttgaatgccagaccccactttgcaagcaagcagcccccaagtcacctgttttctcctgcaagccgacctcaagttacctgttttctcctgattccccaacaccagccagacgcttcagcagagcagacacttaccggaactctatgttcccactgcgtaggcatacacacatgcacactcatacatacatgcacacacacgtacacgtgtgcacacagctctgcctccacctcagaccccacacactcatgggctctcccttaatgtgctccacctgtcctgtcctgcccatcctttaaacccctccaccccacccctacccaaagactcctatcacagaggcccctctgtcagggacccagcatctgggaaagcaggaaggcagggcattgcaccgtgcatccagcagcccttgagagcagtgtcatagaagagagcttaatgcgtttactgagcagcaataagtcaagtagcgtccctgtgcacaaacccatgcggtctggttggagaaacaaaggtgaacaagactcccttcgtagcattcagaatgggagggttataattgctgtgcagacggcatgtggggaagagagaaattaattccaactggaaaagtatagttttgagctgggcattggaggacaggaagagtttcgacaggcgcgatgtgggatgtggagggcacatcagaagtaaaggactgtgtgagccagtttgttgcagagatgagtagggtgtgcacagacatggtaaatctggtgtgactagaagcaaggtttcatggtaagtgtggcgggggagggtaaaagattgggctggaaggatcagttgggatttttttttttttttttgagacagaatatctctctgtcaccaggctggagtgcagtggcacaatctcagctcaccgcaacctccgcctcctgggttcaagcaattctcctgcctcagcctcccgagtagctgggattagaggcacgcgccaccatgtccagctaatttttgtatttttagtagagacggggtttcaccatgttggccaggctggcctcaaactcctgacctgaggtgatccacctgcctcagtctcttaaagtgctgggattacaggcatgagcgaccgcactgggcctcagctgggaccttggctggcatactgagaatcttgggctttcatctagagacagtagagagccaattagtatttttaagctggaaactcagaacaatatatgtgtgtaggcagaagtatggagagtgaatggcattagagaaagtccaaagtcaaggtgagcagttaaggaggctattccaatggtcgaggtgggaggtgctagtgacctgaaccggggcagtgactagagaaacaatgggaggggaagatgggagggagatcataaggctacagtcagcaggttgtggcctagttaagaaagagggagaaattgaggtctggtttctggggagggtagtaatgccattaggtgggagaggaaacacaaaatgatgagatgtagtcagggcaagtatgcaagctgacaaaggagctgttgaaaaaacaagattgaagcctaggagaaaggtcagagttagagatttcaacttgggagatggtgcatggaggctgtagttgaagtcatgggagcagatgggtcatccaaggatgtaagaccagaagcggcccaagggagtgcctcatcgaggcgggaggaagaggcatcctctgggctggactcagtgaagccaggccaggacaaggctcccctctagggtggggcgacccagaaacctctagtgctacagaggtggagtagaatgggggctgaggaaaggacattgactttggtgagttggttctctgttgggagggcaggccgaggataggatgtccaagacacagaggcagagaaggaaggtcacctttttccagaggtgcatggaaggagggaagtgaagctactggaaggaggagggaaaacaggtcagggaacagatcagagagtggatccttgaggagctgttttattacagaggaaccaacaagcacttgagcctggttgtagtttacagggaagaggtgtgggtggacgcaggtggatgcagagagaggaggatgccgaagatgagagagcagaacaatggatccagcacgtcttcagaaagaggtggaaggaagggaagcaatgagagcagagacagagaattaattgtgagtaggaagaagggcgattggctggaaggtcagggtggggcacttacaagaaagatggagaaaggaaacaggcctagtggtggaggcaggaattcctggcccaggaagagaattctagtgctctcagtgccatccagtcctgtccagccctctgctctctccacctgattggaggctcctggacctcaccccgcctcaggcagtgcaagaggaccttcccccgctctccagaagttctcatccattccacttctggcattctggcatttcattctcaagtccatggagggaaacgtttagccgctcaaagttaaaaaatcaagagctctaaataattcctcaaatgagaacattgaaaaccttgaaggtgtgctttttgtagtattgtttaaaaataaatcttttttttttttttaagacggagtctcactctgtcgcccaggctggagggcagtggtacgatctcagctcactgcaacctccgcctcccacgttcaaacaattttcctgcctcagcctcccaagtagctgggattacaggcacgtgccaccatgcctggctaatttttgtatttttagtagagacagggcttcaccacgttggccaggctggtcttgaactcctgatctcaagtgatctgcccatctcggccccccaaagtgctgggattacaggcataagccactgcacccggccttaaaaataaatctgaatcccagactggatgctagttttgcatacaacctacaatcctgacaagggggcaggggtgggtaaaccatggtgtgtccaccagtggagtggggaggcctgcatggtgctgagcatgaaccagtgctccatcaacagaggccactgtcaccattacgtaaaaccatcagaaaatgcttgagattaaatgccaagcaaaagagcagtgcatcaaatgctttttataactataatcaccaagtaaaatgagcacaacaagaaaataaaggaggttgggcatggtggctcacacctgtaatcccagcactttgggaggccaaagcgggcagatcatttgagatcaggagtttgagaccaacctggccaacatggtgaaactccgtctctactaaaaatacaaaaatttggctgagtacacacctgtaatcccagctatttgggaggctgaggcaggagaatcacttgaatctgggagacagaggttgcagtgagccaagatcatgtcacgcactccagccggagctatagagtgagactctgtctcaaaacaaacaaacaaacaaaaattaagtccaaatgcttattattatcattattattattttgagacagggtcttgctctgttccccaggtcacccaggctggagtgcagtggcatgatattggctcactgtagcctcaacctcccaggctcaagcgatcctcctacctcagcctccagagtagctgggactacaggcacatgctaccacacccagctaatatatatatatatatatatatatatatatatatatatatatatatatatatatagtagagatggggtttcaccatgttgcccaggctggtctcgaactgctgggctcaagcaatccacctgtctccgcctcccaaagtaccgggattacaggcgcaatccaccatgcccagccgcaaatgctttttaatcattgtcttaggttcaatgagattgtagatgaattatttacttctctttcatattttccaaagtttctatgagcacttgttgcttttaaattgtttaaattgaagtatagcatgcacatggaaaagtgcacaccaaaaaatgtacagctcggcccggcatggtggctcacgcctgtaatccaagcactttgggaggccgaggcaggcggatcccctgagctcaagagatcaagatcatcctggtcaacatggtgaaaccccgtctctactaaaaaatacaaaaaattagctgggcgtggtggcgcacacctatagtcccagctgctcgggaggctgaggcaggagaatcacttgaacccgggaggaggaggttgcagtgagccaagatcgtgccactgccctccagcctgggcaacagagcaagactctgtctcaaaaaaaaaaaaaaaaatgtacagctcagtcatcacaaagctaaggctgtgccaccatcatcctgatccacaactagaacattgccaatacccagcagctctcttcctgccccccaaccttcatccccatcccattctaactctatagctcagtattgcctatagctgaactttatgtttgaaaccacacagtatgtgttgtttgtgcctggtaacttttactcagcattgtgtttgtgaggttcagctatgggtcattcatttttattgctgtgtaacaggggtccccaacctccaggccacagatcgatacctgttaggaacctggccgcgcagcaggaggtgagcgagcgttacacctgagctctgcctcctgtcagatcagcggcggcatgagcttctcataggagcacaaatcctattgtgaactgcacatatgagggatctaggctgcctgctccttatgagactctaactaatgcttgatgatctgaggtagaacagttgcatcccaaaattatctgccccccccaccaccccacacccaggtccatggaaaaaattgtcttccacaaaactggtccctggtgccaaaaaggttagggaccactgctgtctagtatttcatgatttatatatcacagttcttgtgtccatttcaccttgatagacatgtaagttgtttccagtttgaggacgttacaagtaatgcatctgtgaaatttttatacatgtctctaggtacacatgtcatgcatttctgttgggtataaacctaggagtgaattgctgggtcatagaatgtgcatgtattccatttcagtagataacaccaactgttctccagtgtaactgggccagcatatacacccatgagagcaggagaactcccagcgccccacactctcaccagcacttagtgttgtccaactttccaactttggcaaatctggcagtgtggagcgatagctcattatctcgtcatgggtttcaggtgttccttttttcctaatagagtgcctctcagtaccacgagtgctttatctggtgcctgcaccatagcaaccactcaaaatgtttgaagaagtaataaaaggacgaatgcatgctctatttcaagagtgtttctggattcctgagtgtgtatctgtaacagagcccctatctttgatatgtctgtgaaattcagttaaagtatacttcaaggataaccgaggctttgagatatagggcaatttcgaagttgccttatatatgagatatagagatagtaaaaaaaaaaaaacttggggagggggtgatcatttcctgcccttccctctacctccccgcaacaagtggtggccacgctggctcctgaggcacgtccttgtctgtgtgtctcttccagggacgaggatctgattaacaagtgtggggacgacgcgcgcatctacatcgtgttccagtaccacctcatcatctttgtgctcatcatctgtatcccctccctgggcatcattttgcccatcaactatactggatctgttctgggtaggcaaagctcagctggccctggggcagcagctggacctgagaggcagccaggcaagccagtcagggctggggttgagggtctagacatctattttaatcctgcctctgggagtttgttgttgtgtgaacttgaataagccatgcttcgcttctctcatgtggagactggagacgattcctcctttgtcacaggtttggcccagagcctgacacacagcaggcacatagtattaattcagtttggaactgagtgttcattcgtggccccactctggctgggcgttcctggagacccttttgtgacatgtgacccactgcaaagatccctgaacccactctgttggacataacaccataggtgcagaatttgtcttgtaggacctctactcccactcattggaacagggtgagccctttggagggaacagcattgtggatgagaccttggcttccaaaacagaaaaatcatggctccacagtgtttacccacacctgctccccagaaaatacctttgcctagctaatatgttattttatattttatttatttatttatttaatttattgagacagagttttgctattgttgcccaggctggagtgcaatgacgcaatctcagctcactgcaacctctgcctcctgggttcaagtgattctcctgcctcagcctcctgagtagctgggattacaggcacccgcccccacgcccggctaatttttgtatttttagtagagacgggttttcaccatgttggccaggctggtctcaaactccttacctccagtgatccacccgccttggcctcctaaaatgctgagattacaggcatgagccaccgcacctggccactaacatgtgatttaaccttgtatatggcaaatcagtcttccgagcttcactttcctcaactgtcttagggattgggagatcgcacgccacatacctatacagtgtttgatatacatagtaggtgctcaatgaatagcagctagtatttcatttagaatcatgaagctgaatggagctgtatgaagactgtacaactgggtggtgcagaatagcaccgtaaatgccccaggggcaaccagctttcccctgattcctcaggtttctacctgttcatccttggccagaggtagaccttaattaattcagtttagcacactgagtgtccatgccaccaaatgccactactagagtaatatctgagtcttgtctcatcctaagagctggtatgttggcagtgataatatcatgcaggatttttagacacattttataagggggtgtctgaaccgtcaaactaatgcacatagccagaaggatttcctctgaatgaggcagtgttgccttttctggacgttgccagtggtaatagtgttgctaatttcatcattcttctcgtggctggaaggctggtgcctccaacaagcattcactgggtgtccattatgtgccaattatgccctggagataccacacaaagaagtgttctcgctttcctcccgagagccccagtcagcagtgccagggaaaagaggcctctgatgtctttgttaaaagttggggagaagctctggggaaccagaaggaagaggaggtcaaaggcaagcatctccagaccccacgcatttgtccaggaaccttgaattctggcgcccccagcaactgaggagccaggctcgaggtcagcaacttctttctctttcagactggagcagtcactttgctcggaccaccattgtcaatgtctccacagagtaggtacctgatcttaacctcccattccattggctgggggtgttggtgtggagaggaggtctaacatgtcagtttgcaacatgggcagcgttttgctgataagaaaggcctggtttccctgggaatcgggtcctgagtgagatgccagaagttgcatcctctcggtggggcaggactcttggtgtgagatgaggccctgtgtcctcatctgtcatgagtggagctgcccaaactggccactcatgaagacgtggagaaatggtcctatttgcttagtgtacccagatcccaagaggcagagaccatgtgctgaaagagattgaagattgttttcctgccaccaataggttccagtcagccgtcatatacccgagtgaatcatgtgcctgacagtccccctcagagtcccacagcagactcgtgccccaactctgccattaactggccctaggtctgaagcagtgcacccccaacactgagcttcagtccttattcatgtccatcattggggaagagctggtggacatgctctctaagctccttcccctcacaggccaagaacctgtgggtttcaacttcagccgacctgactggaggccatatcaatttgccccaagccaaatgtggccccgttggtccatgccatggcccaggtgtctaggccagcttggctgattcctgacaaagctgcagaagcagttccagcaagtgtgagtggggttcacacacccctgccccacctcgcctcccccaacccctatccctctgcccctgctctcctgcaatacaccttggagcagactggcttaacccaaattctgaaatgagcggaaaggggctatggcatcctctcacctctgctttgaccatatcctcccctgaggatgccaaccagagcagggatatcggctccttcccgaggcccattgctggcccgacgtacctacatcttcccaacaaaaagtgaattctagtagaacagcaaaaagccatcaatctccatgaatctatcctggcagagagctggaacattctgtagagaccatgtagccttgcccttctgtggaaactgagggtggagcagcatggtggatccaccatcatagcagatggcaatggcgtgtgaggtgccaggcaccaggggtattttgaaacaaggtgacctttctcccctctaaccatgtagaataaagtgggccctatttctgagtagcaatcctagccaggtgctttgggatggcatcatgtgggttgaaagcagggatggcaaacatggtccaagtgccacgactctcctaccccaggggtggtgctgcaaaccgtctggtcctcctcccccgaggcctgcaggtaacgcaggttcttcctcacttggtctgctgtgcaaccatgggggcctgagccacagcagttggcaggatggcgtagcagtgatgaatctaagtacttcagcagctctgggctcacctcccagcgcaccattgctacagtgaccttgagaggggcaccgaccctctctcaccctcctttccctatgagtgaagtgaagataaccacatgcatggctatgtgtgtggttgagtctagtgagaaaatgcacaccatgcactaagtcccacctggatctggctcagagtaaacactcaataaacgttccccccatgagctggagcaagaccccttctcaccactgatgccccttccaaggcacctgagtgtctggactccaagaaggtgttcctggaaagactgcatgtgggctgggagaggggggtccagggagattgtgttcggtgggaggggagggtctgagaagactgcaatggatggggagatatttggggagactgtgataggtgagaggggaggatccagggatactgtgatgggtgggagggagacctgggagactgtgacgggtggaagggaggtgttcagggagcctgagatgggtgggggtgtcctaggagactgtgactggtgggacagatccaaggagactgtgaccgtgaccggttgggggatccatggagactgcaatgggtgggaggatctggggagactgtgatgggtgggagggagcagggagccctaggagactgtgatgggtggggaaggtgtccagggggactgcagtgggtgggggtctggggagactgtggtgggtggggggtctggggagactgtggtgggtggcgggtatggggagactgtgatgggtgggggtatggggagactgtgatggctgggggtatggggagactgtgatgggtgggggtatggggagactgtgatgggtgggcggtatgggaagactggtgggtggggggtatgaggagactgtggtgggtggggggtatggggagactgtggtgggtggggggtatggggagactgtgatgggtgggagggagcagggagccctaggagactgtgatgggtgggggaggtgtccagggggactgcggtgggtggtggcctggggagatggtgatgggtgggggggtctggggagactgtgatgggtggggagtctagggagactgtgatgggtgggggtctggggagactgtggtgggtggggggtatggggagactgcgatgggtgggggcatggggagactgtgatggtagggggagtctagggagactgtgatgggtgggggtctggggagactgtggtgggtggggggtatggggagtctgtaatggatgggggtatggggagactgtgatgggtgggggtatggggagactgtggtgggtggggggtatggggagactggtgggtggggggtatagggagactgtgatgggtgggggtatgggaagactgtgatgggtgggggtatgggcagactgtggtgggtggggggtatgggtagactggtgggggggtatggggagactgtgatgggtgggggtatggggagactgtgatggtagggggagtctagggagactgtgatgggtgggggtggggggatactgtaatgggttggggtctggggagacttggatggttgtgtgggtctgaggagactgtgatgggctggggggccccaggagactgagggtaggaggaggcccaggggtctctgtgcagtgggctctggggagctcacaggctgacctcactgctgctgcctccctccctgcaggagcaagctcctgtggctgcatagcctgctgtccttcttctacttcatcaccaacttcatgttcatggctcatcactgcctggggtttgcgcccaggaatagccaaaaggtaagtagcctacaaagctgcttcccactgtgggaagctggggtccctccccactgggctgaccactcccaaccctcagagaagccctcagagggtccagggagactgtgatagatgggagggggcagtttcacctgagcaggggccaagcttcctcccttcagtcctagtaacaatcacctggcccccacctctcacccttctccaccctctcaccctcctccacgctgctccaccctctcacgctcctccaccctctcaccctcctccacgctgctccaccctctcacgctcctccaccctctcaccctctcaccctccatcctctcacccctaatgaaactttcagactggttggtaaatagctgctgcccaggtacctcctatccctgcccctctgctgccccgcccctccccagggactcttggacttcccaccatctgaaaactaaaggattaacaaggcccagtggaccagcgggggcctccatgctaagtggtctgggccctgctgagctgctgctacttagtgtacctggccctgcccacccctgctaggcccgtgcctcgcccttctgcagtctctcggagatcagagacccccgtgtatccccaccgtctcagtttgggtgaccccatccaagcagaccctgagacttggaatgagtagcgcttgtttatgggaggtgatcccaggaaaggccagtaagggagtgaggatgcaaaggcaaccaaaaaaagggagcatggaggggcaacttacccctgtgggcaagtggagcttcatgaccagggaactctgggagctggtgtagagcacatgccccagaattttcctggaggtgagcaatcgtgggtattttccaccagctccctgtccaccgttcattgagggttgcgcttgggggctttaactcctcccctacttggccctgcacaaaagctgaacatgccccaaggccgggaaagagcagtcgcagtatttgaagcatgctgcaggtgttggtgtgcagagatgactgacggggggccacgggcaggcaccagcagtgccacccatctggaccagcacccatgctctgctggggatgggcaagagtgaggagcatccttagttcccgtcctcagcctttcaaaggttcagtggtgtggaatcagctccttccaggccgtccattcaaaaggactgattcacttgaacccaccccagagtgcaaatccacattccctgaaaagtgaacccaaatgcttcagcctgccaggcatggaggcttggtcacccttgaccagtctggtgtctgctacttcagctttccttcttgtcaccagaagcctctttcaagacccctgattcttgcagcacaattaccagactgtcatcttaaaggtgacgacccaggaagatatttcccattcacagaataaagtgtgaagtttagggaagcttccctaccctctccccagagtcttgtttacttcccaactccccggcccagtctcacgtgagggatttccctagagatgtgaggctttacgctggaacagtggaagctacagggagagcagaaatcactgtggggtcgctccggcagctctttccaatcatggagctctgatcctccaccccagcctgatggcagctttccagtccttcctcccttcaccacagcagtccggagcagggcacccacagctgggcacagaggagaacggaagcacagttgaccaacctcagagctgcctggctcagctgggacgctgtgggctaaggcagctggcacttccttggcccacagtgtcccagcttggctctggctttcttggctctctcagcaaggaggcactggcatcagcagcctgctgtgagcagaaggcctgctctgagccaccaaaagactgaggtgtctggaattcctatgcaagcacagtcttctttctccatttttatttttcccacccaggtcacaaggacactaatgatcacctatgtgcccaaggacattgaagacccagaactcatcattaagcattttcagtaagtgggttggggtaggccaaggcgtggattgcttcctccccataaccccgcctgggtcctcaagtgggtagtgagttggtgcaggatggtgggactgggacaccccggggtggctctccctggactcagctcaggatcagctttttagaatggggagggccgctggagctggagcagggtgtctgaagtcagggacttcctgcatggcatggctgtgatatgggtgatgggaatttttctttctcctgttgcttcaactactgagcacagggaaccttggatcacagctatttagagaagatcatctggagacatcctttgtgaccccaagttcccagccccaaggacactgttcactgagctaattatctcttcgtgaacagctgtctcctgggttccccagtgggtggagctccgcccttttgccctgttctgagttgtgtaggaaggatttggcagctctcagattgccaaggttcaaaccctgaggttcagctttaggagcagagatggagtatcccatccaggaacaccaggcagctgagccacccagccctcagggccgacatgctgggcagggggtaggggcagcacatccccaaccccacaggccgactcagcacccatgtttgtggctgcagcgaggcctatccaggcagtgtcgtgacaagagtccacttctgctacgacgtcaggaacctgatcgacttggacgatcagaggtgaggctgcagcggggccttttggggcccggggtgggggtaaaaggggaggatggggctctgctggcccctgacctgcaggtccttctcctgttgcccaccgctggcaggcgccatgccatgcggggccggcttttctatacagccaaggccaagaagactgggaaggtgatgatcaggatccacccctgtgcccgcctgtgcttctgcaagtgctggacctgcttcaaggaggtaactggcttgagcgttgggagcacagcaagggagcggtggggtcctggggctctaggctctgtgcctttgcccgcactgttgggccccaggcctcactcaggtctgctctagtgctccccacccagctccttcctccccatccaccatgtcctgcctccctgttgagatgggagcctttctggaggccaccttcagaacaatccagggaagcttgctgctgtctcctttctggtcttggatgggagaatgagagagaaggaccagagaaaacacagcaggctacacgaggctgccaggcctcaggctcccaaagagataggacagaaacatttgaaggcaacagcttgtcttatcacctgaccactgtggctcaaagagggcgtcgagactcagacacctgcttcaggaccatgccgaacttctgccagcccagagattcaccctctctcgtggaaatgcggcaaacacattctctcacctctctggggtccaccccaagcctgaaagcccccgggtacccctagctatgcctcactttccccagatctaagggcaggggtgaatggcagtcatcgcctcttcttgttctagaggtgggactttggaggccagccagggtcctgggctccttgaggtgcttcaaggccaccacaatccagggaggcttgagtggggaggaacctcgtgaccagggaggccttcctggggctctggccccagccctgaaggctgcctgccaccccaggtggatgcagagcagtattacagcgagctagaggagcagctaacggacgagttcaacgccgagctcaaccgcgtgccgctcaagcggctggacctgatctttgtcaccttccaggactccaggatggccaagcggtgagcaccaggcaggcgccccacccagccccaagcatactcctgcttctcggcactctcctccctctccacctccagtttccccttctgcctcccctgggccctccatgctcgtcacaggcagctgccatctggctctccagtggatgagatggccatacctgcttcccccagctgctggggcccagctgctctcaaggggtgcccaggccggggctcctcactccctgtccttgctttagcacagaggtggtcagagaagcctttgacctcatggtccctcttctgcccttgacaagaatgacatcccttttccctttttctttttttttctttttctttttcttttttttttctttttttgagagagtctcgctctgtcacccaggctggagtgcaatggcacaatctcagctcactacgacctctgcctcccaggttcaagcgattctcctgcctcagcctcccaagtagctgggattacaggtgcctgccaccatgcccggctaatgtttgtatttttagtagagacggggtttcaccatgttggccaggctggtctcgaactcctgacctcaggtgatctgcccacctcagtctcccaaagtgctgggattacaggtgtgagccactgcgcccagctgacacacacatcactccctcctcaccataagagagcgtcagcatagagcagctctgtttgcccttctcctgccgcaggcctcccctaattcatagctctacagtcccctctcttctctgccccagcctctggcagcccatgcgttgacaaggagtgaattcagtccactctggaatgttccagaaggatccttaggactgggccaaagtcctaaaggagctccagaatttatctcttaagaactgtggggggcaggggggctcttctttctgggggaggctgatcctgtacagcacattgttcccacctaccccaaccctacaaaggaagagcagaactacctagattttgctcacaaacaatggtacacaattttgcaagttccttacactctcaactttttatctggcaaatttggttactgatatctgtcctgttcacctcccggagggttgacaagtgatatgccttctattcagtttctgtgttgtttaaagcaatacacctacctaaggttatattgttcattctttgagacattgccatttggtagagaggatccggggcttaattacagcagaatatgagctagcaagccagaggtggggctccagcacctgctcctctttggtcacatctctaggcacctcgatttagtcatctgtgcaatggaaatgatactggtcatcaattagcacagtgtcaagcacacagaaagaactcaataattagtagctattgatattaagatgaggctaaaagtagtacctcccttatcaaatctcaaagaaagagtgtgtttatgtgctgtcactgctgttaaggggaaaggcagaaacagaaccacgtggcacctctgccctgcctgggcagtctaggcaccctcaaatgccctttcctccagatactgggccttaggaactgtccacctctaaggtcctgaagacatatccaaggcttcaagaatccccaggaaggggatgagcccccatctgtaggaccaccatagtggccctgagctcctggcatgagaccctcctaagcccatccccccacccccagacccacatttcttcctcttctcccctctctgcagtgtccgtaaggattacaagtatgtccagtgtggtgtgcaaccccagcagtcctcagtgaccaccatcgtcaaatcatattactggagggtcactatggccccacaccccaaagacattatttggtaagcctcctccatccctcccctctcctctgagctcctctgagactgaagaaggcagcaggacagggccttctctccccatgtcattgcccaacagagactccaaggggactaagttccatgctctcctaagcaccacaacctgtgtgtatgcccagactcattcccacaagtgtgggtggcatccaacccttagcaaaaaggcttttcctgcagagggaactcaggtccatttttttttggctctatgctctggatcctttataaatggtgtgacaggggacggtccagggtcctgttgcatgcaagtctgggcccaggaggctggattagaccagggcaggctgggtccacagctggcctgcagcaaacagcacgtgggctctaagaactgatgtctctaaatgtgcctccttcttccatccttccccaggaaacacctgtctgtccgccgcttcttttggtgggcccgctttatcgcaatcaacaccttcctcttcttcctcttcttctttctcaccacgcctgccatcatcatgaacactatcgacatgtacaacgtcacccgccccatcgagaagctgcaggtgcctcctctgctcaggccaggcctggggaccccagggagatcaaggaagaattcaggcgaggatgggatggggggggccccctgggagggggctgtggagcccatacagtgcgaacattgtggaggtggccatggtgcaaatggcggggtagggcttgctttgttctaaagggatgaaggtgggtgactgccagtcttagggaccagggctagagtgggaagggagagtggggagtccacaggcaggtcctggggtgagttggagggggtgtcgtcctgtcaacatgggctcagaggtcttcatgaacggggtcatcccaggccagcttggggtccagagggtgtggcaagtgtgagtggctctgctctctgcaagttgtccgaggcagcaggctcctggtttgtgtagtagggttaaaggtgaggaagagtgaggtaagccccaacgcagccctctcagagaagtgggagctcaagatctgcctccacctccctcatctccagacacctgcactccaggctgggagccctcagccctggaggaaccatctctgaagttaggggatgcctcctgctgatggtgcaggtcagagggatcctaacccatttccaaattctttagcctcaagactgttactaggagcctagaaggtctcttcttccatattctcgccatcctcatttccaacaacacacatgtgcatgcacacatgcacacactcacacaaagtcaacacacacgcatgcacacacacgcacacatgcacagtcaacagacgtgtgcatgcacgcacacacatacagtcaacatgtgtgcatgcacacacgtacacacacacacaagtcaagccacaccacttctgctgctgatttttgttcccctttgtcaactttgtaataggccccagaccccacgcatcctgggagggccacagctctccctggggactcctccatcctcccctcctcccccgctcacatgtcatcacagcaaaggcaatttgctggggttgcactcctggctagctctggccttaggaggaagtcactcaagaaagctcaggctgccgctccagtgacctcagcatagaaggcctagctgcttggggactccacttgaccttgggtgtcagcctctgcctggccaggaaagccagtgagaagggccaggccccttgcagcctccaggagagcaagccagccctgggagtgagtgggaggagaagaagcaaggggaagaggatgcttgcattgacgtctctcctgccgtcctcccctctccccctgcagaacccaattgtgacccagttcttcccctctgtgatgctctggggcttcacagtgatactgcctctgattgtctacttctccgccttcctcgaggcccactggaccaggtgacctgggggcctcctctcgtagccctgtggtttctccagcctcttcccctgccctggcttccccgccagcctggcacttgggcctcccctctagcctaagaaggagaattgataagggatggttttgatacctgaaaccatccccaaagaccaacaggtgttctgtctttggaaggagggtctgggttgactctgggcccctgggttgctgagatagagccactgtctaagagtgtggggccaaagccaagccctccttgagcttctccctcagctcccagccatatcctgaaggcatggagctgtaggcatgagctaggcagtcccaggcattccatgcagaaggcacaggaggaaagacttgtgtgggaatgtcaatagaatgctttggccacacagaggggcccacaaactcactatgactgtcatcacatatggcccacaccatgccaaccttttacccaatcaggagcgttcccatttgttagccttgatggttctatggtggctgctcactgggtagaaagtatttgccataccctgggcaggtggcagtactttggcttgaaagctgcatgcatctcaaaagttattttccgcaccaaaagttcctactattccaccaggcagcagccaaaaggtttgtcctaacggaaatccttcctggccttttcctctggccaagaacaagacttgtattgatgactgaaactgcagggatttttagtattcttggtaatgtctctttaacacagagacatcaactatatggcacatctgtgccttcccatcccttcccatgcccagcacagacatcactagtggatcatgctgttctttcctgctgctcccagatgcagcacagctcacagtggtgtatggagatggcatcggtatgcacaattaaaccaatttcccagcccagacctctactctgcatatgtctgtattagccagttttcacactgctgataaagacatacccgagactggacaatttataaaagaaagaggtttcattggactcgctattagtccatttgcactctgctgataaagacatactcaagactgggtaattaacataggaaaaagggtttattggacttgcagttccatgtggctggggaagcctcacaatcatggtggcaggcaaggaggagcaagtcacatgttacgtggatggcagcaggcaaagagagcttgtgcagggaaactcccccttgtaataccatcagatctcacgagacttattcgctatcatgagaacggcatgggaaagacccaccccccataattcaatcatctcccactgggtccctcccacaacatgtgggaattatgagagctacaagatgagatttgggtggggacacagagccaaaccatatcagtgtctctcttcctctctattacatagttaggcctttggttcttattaggccacgtccattgatgaatatctctctgtttccttctagatcaagtcagaatctggtcatggtgcacaagtgctacatctttctggtgttcatggtagtcattctgccctctatgggactgaccaggtacctcacttccaattatcccttccttcttagccaggctctcttagagttaagacctcctctttcagatactgtagacctgcctgtgattgctgcaaacccactcctcaaagacagccccatgcctgtcatgggtgtagcatgagccgggcttcctgcagacactaacgtgtcagccgtgagttcagcccacatagagcttatcatctggctggggacacaaggcgtgcttaccagttgcctgacagccccacatgggaacaacacagccaaaaagcagtggaaattcagaagagggagagagtactgtgagagaaatgagtgaatattgtgagagaaatgtctgcttacagttttgcaaactggcccaggtttgctggaggaggtggccttgagctgaaaggccaaagggctcggggccaggacagcccagcactaagaaggaagaggggaagtgtggactggccagctggaataaagcaagggtctttctttggagattgggcaagggaggatggttgaaccctcagccttagctcataggtttgctaactaacagacctgccttgtttttgcttctagtttggatgtctttctccgctggctctttgacatctactatctagagcaagcatccatcaggttccagtgagtactcccatgtgtccaccagggctgctgtgtgtgcacacaggagtggttatatgtgctcttccctgagtccagcacctgaatttgctcacagaagtgtagacaaatgcttgtgaacaccctcactgggcagacttgttacctttcctgtgctgggatccctttggcaatctagttaagcccagggaccccttctcagaatgatatctttgaaataattgtatagtcacaggaagttgcccccaaactgtatgcagggtgggtgttccatgagccctttatccagtttcccccaatggaagcactgtgcataactatagtgtaatatcaaaaccaggaaattgacactggtccatccacagagcttattctgattctgccagttttacgtgtactctgaatgatgtctttatgtgcacaaaatacatggattacaaagaaaaccaattatacaattatactgaattacagttatcaagatattttaaaaatcaaatttttgacatagtctttataaacacaagatattgcttttttttttgagaccaagtctcattctgtcgcccaggctggagtgcagtggcgcaatctcggctcactacaacctctgcctcccaagttcaagcgattctcccacctcagcctgccgagtagctgagattacaagcacatgccaccatgcctggctaatttttgtatttttaatagaggtggggtttcaccatgttggccaggctggtctcgaactcctggcctcaagtgatctgcccacctcagcctcctaaaatgctgggattacaggcttgagccaccacacccaaccaatattgcattttttatataagcaagctaaagttacattttactgtcttaaaaacatcagtataaaaactgatattacttattggaataagaatattaaactaggggggatcattgacaaagcaacatgcagaccacgtgggacattctgccaatttcgatttttttgttttagtgataacaagtgttgagaatcccaattttcaaagatatgttgcaaatgacatgcaaacttccataacttgctctataaggcaaggaccagaatccttcaaggtattttttagtagagatggggtttcaccatgttggctgggctggtctcaaactcctgacctcaggtgatctgctcacctcggcctcccaaagtgctgggactacaggtgtgagccaccatgccctgccatattgcccacattcttaatgcaagaaaatgctaaatttcagttagagattagtgaaaataaagatgttattttttcccatcctagtttacagaccccccagaaacccactcatggattctcccgagtctttggacctggctcagacacccttgctttggatcaagccaatgcatgtatcccctaacacacccatgctttatgtggtccctgcccctccctgctcaggggactgcttgttaacttcattgggttggggacatatatattataggagagagacagagaaaaagaaagagaggaaatgttattctccttgtctgtatctgtatctccactccgattcccattccctctgctgctctcctctctctcctcccttttaacatctctccctctccctgtggcttctgttgccaccttccctctccctcactgcccaggtgtgtgttcctgccagacaacggcgccttctttgtcaactacgtgatcacggcagctttacttggcacaggcatggagctgctgcgtctggggtcactcttctgctacagcacccgcctcttcttctctagatcagagccagagagagtcaacatcagaaaggtacagactggctctccgctgagcacagccctcagtttcctttgggagggtgtcagggatagagcctgctagaagcaccaagggggttgaggtgggagggacggtgtggatgggtgttggtggggcaccttggtctacagggttggaaaggaggctgcctccaggcctgagctgccaggaggctgatgaggagccacagaagtagtcaagccaaggggactgggccacctcagggtgacacctgccttctgccccagaaccaggccatagacttccagtttgggcgtgagtatgcgtggatgatgaacgtgttcagcgtggtgatggcgtacagcatcacttgccccatcattgtgccttttggtgagtcatctccaaggcatgcccaagggctgcacatccgcagatggggaggaggaattgagcctcacaacatcagtccacctcctggagcatggggagacctgtggtagggaggggtcagggccagggccaagctgggggtacagggcagctgaggttggatggctgccgatgggggatgtttgttgaatgaacgcatgagagaatgactcttcaccaagctgaaacagtcagttctcggggctcaagggaagctgctggctccggaggtcagtaccacggagctcccccaacccatccttggttgttgtgactctgacagccgtggatctggcttctcaggcctgtggagacactggagccacaaaggtccagacttgaaggggccactgagtaagtttccacctttgtcccccagggttgctctacctgtgcatgaagcacttgacggatcgctataacatgtactactcctttgcacccaccaaactgaacgagcagatccacatggctgccgtctcccaggccatctttgcgccactcttgggtctgttctggatgctgttcttctccatcctgcggttgggtaggtaccaagccagcctggagaccccacctccacctgccccactgttctgtgagtcccttaacactgaccctgttagaggagaaaagcccaggcagggcaagacgctgctcaccagacctggccacacccagtgacttctctgggcctaaagggcctacattagagtctcagctgagcttcaaggctaagaggaggccctggaccaacatggtccccaggtgtggatttgggtttccagcgctcagggaaggaaacctcatattccttctttctaagtctagacgggtggaaaatagagtatcagctattgggaggctcagttcccatgacatttcctctgggatcccataagatgcctggttttttgttttgttttttaattttattttttgaatcagaatcttgctctgtcgtctagactgaagtacagtggcgcgatcacggctcactacagctttgacctcctgggctcaagcaattctgccacttccccctccccagtagctgggactacaggcgtgagctgtcatgactggctaattgtttttaattttgtagagatgaggtctcactatgttgcccagtctggtctggaatttctgggctaaagcgatcccctggcctaggcctcccaaagtgctgggattataagcgtaagccgccggtgcctagtggtagatgcctggctttatgggttgccaaaaaacctggaagaggaaacagagcctgcagtaggggccagctttttcctcactctttagctacacacagctactgctcctgcccaggggagctcagagacaccctcccagaagcagtccctgcaggccacagattagaaatctctcagctttctccccgttggaggcaccttaacccccagcaacccccaaccccactgcccttccctcagacacctgaccttaaccttctcagtggtgggagaagggagacgcggtgttttctttctttttttttttttttcttttgtttttagagacggagtctcgctctgtcgcccaggctggagtgcagtggcctgatctcgacccactgcaacctccgcctcccgggttaaagctattctcctgcctcagccccctgagttgctgggactacaggcgggtgccaccacgccccgctaattttttgtattttagtagagacagggtttcaccatgttgcccaggctggtctcgaactcctgagctcaggcaatccgaggcagtgttttcttttctctccctgccatggtggcatccatacggtcgactctcagtcatttatgtggcttacccatttgccatcacccccaattgcttatcccgctagcctttccctgccaccccagagacttcattttttccataatgctttttttctaagaataaaggactgcatgtttatcatcaaaaatagaaaaaatataaagaccaacatgtaaatgacccatcatcttacccagaacctgatgtcttttgttcccagccccctttccaggcatgcgctttggggctttgggcatgggaacattgagagggagcagttggtctattgttactttgcaaaactgcgatagtccatattgtaacattcagtcctgtaccctgaggttttgtactgaacacaatgttctgagcaatttcctaggttgttaaaagactgaacacgtaggtgcctttcagcggttgcatgaaagtctaccagttttagtcagttctccgtgattggatattgaggtttgccactttttgctactataaaaacactgcagtaagcatcattaagcagtgatttttggctgtaaagcataatttaaacaacatttacctagttagaaaactgctgccgtaaaaaagggatcaaatattcccaaatgtaatgtaggtgacttttaccttctagattccctctctgtgccatcggtgcagataactgagcatgctcacttcaaaagggcttgcagggaaaggtgtaggtcagagatggcgttgggggcactggcagaaatagtcactcaaagatacttcccagggacgatggtgttggaggtgaccagcaggtcaggaaggacacatttaatgggcactgcagtgggtactgaagtcaattaaaacattttttcatggactccacagatgccaaattctaacagagcaaagggatgatgttattttgtcagactcctagatgccagttgttatcagaggaggactggcaaggtcaaagcccttgcagtggtgctgtgacggtccctggcatctgccagttggggtggcatctcggctggcagactcctgcccatgactttttctcctcctcggcaggttctctccacgccatcaccatcttttccctgtccaccctcctcattgccatggtgattgcctttgttggcatttttctggggaagcttcggatggttgccgactacgaggtgagttgccagcctgcccctcctcctggttctcttggtccctgggggacacagctgtaggatactctccaggtctgggctcccatagcaccacaggatgaaagggtctcgcctttgtctctgactgtagagcgtggagcccagtgtgcatgcgtgcatgcatgcgtgcatgccttgcgtgcatgcgtgcatgccttgcactagcttaggctctggcccccatccagaagacagctatcctctccttttctgccctctgacacctcctccaaactgcaggctgctgcgatgtgagtccagtgcagccactgaactgtgagcctccaaggactggaggccaagagagaggatggagcaaaggaggttggggggggagttgctgatgattcaaaaagaggggggattgtcattttctctcctttaagaccccaggctattgaacttgaggtggccatgtttggaggtggcccctgccccacatgactcctttggttgttggcagtgggcccagcctaatcattaggagaggggagccaatccatgcccttttagagccatgccaacaactgtgtgttctagctcagcatttcccagaatggatgtctatcctggggcactggaatgatttccagtggatcacaacataatttttcatttttcatggttacgtatttaacattaactttctgcctatggcaactgaaatacagttttctgtttataatagtgaattgtttcctttttaaatgaatgtatataaagaaaagaaagctgattttaaggactgacacactactgagcctgaggagggactcggaggaggatctctttgcttctggtgtctctgtctgtgtccagggctctgggcacaggtgcccactgccctctccgcccagccttccttctccacgcctggctggaacaccacactagtgaagggtctcgtgaaggaccccgctgactctgtctaatacagcagcattatgtgattgggttggccaggtgtccactctagagaaggagaatggccaggaacctaggctgtgttggtgtaggacactttccaaattagaggggaagccacaggaggaaagacgacagtgctgaagtcaaggcttctcctggagtcaaagcaggctcatctttgaacttcaattccagctctgcttacttcccccagtgatggcccttgggaatagaacattccagaagggactcccttgcatcccagccttctctctgtccccctgggtctcagtcttgccaggctgaaggtctggaaagacagaagatgagttgagttccaaggtggtgagaagcccaggtgtggagttgaggctcctctggatgaatggggaggggcaaagagcaggcctcctgtaacccaccacctctccctgctgcagcccgaggaggaggagatccagacagtgtttgacatggagccaagcagcacctcctccacgcccacctccctcgtgagtcctgagtcccagggacaggttgggagggtggtgcttgcagggatggtctactctagtggcattgtgggggatgccagctttgctgcccactctgggtatggggaaggagatgggggacccctgggctccctcctctaatggagcaggacttggcccaggtccaaatgctgccgtggtcctggatgaagagtgagaaaaagagaagagccaccgtgtactcggcattgtctggaaggcacctagagaggaagtacttggtcagggaggccgagaccacagcgacctcggtcatgtagacgcaggggggcctgctgaggattggcctcgggaccaaaggctgcccctgaggcacaggtgcaggcagagcgacacagacagagcttcagggaactattagaagtctgcactgatggtaaggcagggacgccgaaatgagcgagcctgtctgcgtgcagagaggctggctcagagtgcagagtgcagggcctgcaggctgggtgctgtctctcacacagtggctcggcctgaaggggaatgggcacaagcacccacccgcatccctgccacaaatgcagcttcagagccaccaatgcacacactgaggtgggtactgggtcagcctgtgccccaaggccagggctcctgggaggagctctgaagaagggtgccaggctggcactcggtgaaagcatcccagaggagggagcattgaatctgaccccaggaatgggcatacggggtgccaggtgaagtagggtgtggggcaagagttttcaaggaagaggagcagcctgtgcgaaggcctggagacagaccggagcttgggggactcaagacagttttcggcacggtggaaatgcggagtgggcggcagggccctatgggagacaaggctttctttagttgtgggcagagctgggagtgagtgcacggtgacagaagcacagacaaaacaccagcaagtggacagaagtcaccggagtgccaggtttgcctcactttgaaaaaccctacacacaggcacagattatctctgagaggggacaggagtaggtgcttccataatgaagagaccacaaggatttcaaagcaagaaagtctctcttttcttgggacccttccaaaaggacccctcttggaatattgttagcaataagtttttgaaatcttcttatgagcctggcgctttgctgttttcgctcttaatcttttgataaacccacacagtagggattttcatccccaaatggaggctcagaagttccgtcaatatagagtccagggcaccaagcaagggagtgtcaggacaaaggtcgaaccaggtccatctgactctaaagcctatgcttttaaaaaacacgactaggatttattttttaaatcttgccttattaccacagggctatatgaacatcgcacatcattatagggggaaaggataagcagaaataagaaaataaaaagtccatattcccaccacccagagatgaccactgatagtgtattttcttgcagatatttatatactatgtatctcttccagataattatgtatgatttacatagttttgctaaaatgaaatagtactgcacatactgttttataacctttttttgtggggtggggaaacagaatcttgctctgttgctcaggctggagtgaagtggcaccatcttggctcactgcaacctccatctcctgggttaaagcaattctcctgtctcagcctcccgagtagctgggattacaggcacatgccatcacacctggctaatttttgtatttttagtacagatggggttttaccatgttggccaggctggtctcgaacttctgacctcagctgatccacccgcctcggcctcccaaagtgctgggattacaggcgtgagccaccacgccaggcctataacctgcatttttagttaacaatctttttccatatatataaattttttatctctttgaacacccagccggtattcaaattgccttaattgttccagaagtatcttttagagcttgtccaacccaatatcaaatctagcacatgtgcctcaggttttcatgtcccttttattttagcacagtgccttttaaatgacttggagagaccaagccagcagtcctgcagaatgttccacctggatttttctggctgttcatgatgtcttatgacaggttccatgatctcctgaatgctggaagttagatctgatggcttgatagatgcaagttcaacatggggctagaacacattacaggtagtgctgcaatttacactcagagagatgtaacatcctgttaattcccattcattaatgatgccgtcatgaccttctaattaggggaatgacaggtggatttttccatggttcagttgacatttacccctttatgaccaaaaggtcatctagatggcttactttggcaccacgcaaatgtctagattcttttgtaggaaaaccgttccttcaaccagggctgtttggtttcactgaaataaactcctatgggaaaggtttcattccattccctaataacctattttctaagtaaggagatggtttaagagccacttcagaggatgacaattgctcttcttcctagtacatcctgtgtttttctatctgctgccgtcccaggcatggggaccattcctgggtgtgacaggtcatgtgaccaaagtctccgctagcagttccacatcttgaggacaggccaaaccagtgacagatcccgagggagttctgaatgtgctgctgaagctgtattagaaggtgcactagctcaggaaagagggtctctccagacctcagctgaggggagcctcatgtcacctcccctggatgcagcttgacttggaactgagagtgaatgggacatgttctaaaggagcagtggactaggagtggggagtcctgccactgaaccagccctgggagcacctagatgctcatcaaatgatcaagaacaattaggtgggtgggacagacaggacccaggctgctggggaagaaggcaggctccaaggtctggaggagacagaggcgatgggggtggggcatgaggggagagggtgtgcccagggccttgcccccaacgtgaccttgctcctgtcccctgtctctatcccaagcagctgtatgtggccaccgtgctgcaagaaccggagttgaatctgacccccgcctcctccccagccaggcacacctatggcaccatgaacaaccagccggaagagggagaagaagagagtggtctgaggggctttgcgagggagctagactcggcccagttccaggaagggctggaactggagggccagaaccagtaccactgaccgggacctgaggcctccactggcgacttgttgaggggtcaggggagggcctggcaaggggaggcaggagggtggcctggacctccccactacctcctgcagactttgagaagcctacagtggagacatccaccaccccagccatgggccatacgggggtcctgacctgctgcccggctggaactggggctgctcggcagtgctgaaggagcctgggaagggatgggaggatacaggcaagcacatgtcttgagagaggtggctggagccccggcacagagactgaacgctggggtcccttcctgggaccaagatggagaaggtgttcctaagggaggagacagaaggaggctgccgaaggctctgtggggtcatcaccactctgcatcagctgcccttaaaaggagcttctgctgctgctcctcctcccagccccggcccattcctcccctgcagtctgaggaggcaaaggtatgtgcacggggcacattgacaggacacggaggaccacctcatcacagggttccctgcatggggatctgtaaagagaaagtttctgcacccaccagagcaagagccaactgaaagcgtagacctgagaagaggtaactcagccccttcctgctcctctgccctcatcagatgtccccaggagcagcagggcagaggcccttctttctattcttacaagggtagctagagcgtgatcactcagggctcatcaaatgagactcgtgtgcatttttcagaaggaaaccttggttagtccttgctgggtaacacaaagtggggtgagacgacagaagccgaattcatggaaggggggtcttctccccaaaactctgtgtggtgggaaaccagctatacctccccaagccccagggcctaaagagaagacccccgaagccaaagatgtggccacttaaaagcgtctcctgcctcctacccaactgagtgcctgggcccccagcttggccaagatgggcagtacgttagggtaagaaccccatgcttcaaacttaaggactgaccatcacctgcgtcccaagtaggacccttcctcccttctcggggctgcccctgcaccctgccttgaagaccacccaagcggcctccagtgtgggcctggtccagacattgcagatgcttcaaccgtgatgtcgccccaggcctgccaggggtgtggtggaggggaaggccacgtgctccagggagaagccctttctggagaagcaaggctgtcctcccagggctgccactaccagagacctgggggagctgaattccgaacagtgatggtgacactcagcacctttgccacagccggggggaaccggcttctgcctctgggatgggctctcatcaggaccaccgtgcagcccagccagggaggacatgagaagggccagtgggggcctcaatgaaccagaacaagccaagctgaatggggtctgtgtgctccagggccctcttcagccccctcccccaaaggtctgggtccctgccaccaacctactgaaggccggcccccggctcacctcacctgagcacctgcaccaggccccaggcacatggctgccctgaactcagatcacctagaccttgtccctgccccacctttgccccatcctagccccagaagctccaagcttcaccgcaggtgagaaattgtgctcaatgggcagaaactgctatacccccagggcatggcccacattttggcatgagggtgtctttccagagagcttgggttggctggagagaggctgtctttcccattccttgtccagctaggaataaaggggaaatggtcctagcctggcccctacacacccaggtcccacaggccccctccccactggaatttcaccaaccaacaaggggaaagtacgctgttacagcatagcggtcaggcccagcaggagcttggcacatgatggggaggtggccagctccaggccctgcccgaccccatcatgtgtatttggtgtatggggtgtgggggtcacaccagaagctggcctggggtctcttctttgctggacacagctccctggcccctgcccccagcccctgcagcccctgccggactgtggaagccacatatgggaaaagtcctggcagacaatgtggcgggatgactgggggcttctccctctgaacctgggtccagtgtagcctggctctgagagaaggtggtgagcatgtggagaaggttccatagtccactcttaggggaaccagcaaagcctcatggcagttggctccatctggacctcccatggtcactacaggatggtggagcagggggcatcttttagcctccccccgccaccacatccaggccctctcaggcacctcctgcctcagcccacacctgcctcacccattgcccccctccccccacctactgccatcccactcctctgccagccacttcccagccgccccaccccactccatccaccaaatcacctcctgacttaatcctttctggaaggagctgccgcccaggaaccggtattgcctagagcctccaggaggggccctcctcaggcctccagtggccccatgcccacctgcctgaccctccactgcccctggaagcaaagtgcctatcagcagcgttgcgtcctctggggcccccggtcgggggggagggggtgtgggctaaccttggccaccaccacaaaaggaatgtgccagaatgctgaaccttcttgttaatgctatgaccgtgccttgaataaacaagtcctcccaacctctcctggcccctgcctctctgcctgtgcatctgggccagcctggccttgctccgctgtgcagtggagagaactttctggtccttgagctacccaggaagccagcagggcagccccgaggagcagcagaagtctctggtgagtgctgagccccatgagcaggccactgggctaggctagtggccagacttcaaaacacacagatttcaggtgaggccccaggaagagcggcagacagggctcaggtctgcaagaggatgagggtgggggacttgggggatgggggaggtggaggagaggttgggtggaggagaggttggcacgagggaagtgtgtggggcagccaggtgggataagaaacacccgttagcaaaggctgttataactgtggcaaggagacaacagttccctgccctggcggacacatctcagggtcaggagactggttctgtcccttcctccagcagctgcatgacccaggctggtcacctcatccagacagtagggctgggaggacatgaggcggactgttctgcttcgtgactgagcagagcagatttgagggcagaagatgggaatcttgtgggtgtgttgagtagggggagacttcctcccgcagtgctccctatggggacagaggatgacagtctcagggtggctgcctaaggactctttcctgcgtcatcctcgctgggtcctctccgcaaacttctacggtccatccgtggccactgactcaaagtctaccaaggtgtgggcctgggcgtgggatcaagacccgtccacttgtcccctctccccctcaaaacaattattttccaagtcaagtcagcccttaaaatccacaagggctgcttcgcaggagagaagccatgaagactccctgactggacgggacggggctgcgccctgctgctgcctctcatggtcccctcccaggggccggcagctccagggtccccagatggcaggcctgggacactctgtggttcagcagacctttcgagggccttttatcaggcagagactgagaaagagacagaaaaacaagccgaagagggagggcggtctccccaaggatggaatgtcctccagggaggttagtgttggtcaatcctctctccactcagcaggccaggatggaccggaggcctgaaggtggatttacctgggctggggacgggactggggcagggcaagagggagccccaggaggctggctccactgggctgtgcccaagaaaggattggagcacgtgaccgagtgctgcgcagggaggaagcagcggggcctgagagtgccccatgcctctgcccagaaaccaagcctggggctgcacggggccccgccagggaagcctgaggcagctcacttctgtcctgaggaacctccttgctggccagattccaggtttctaggtctgctctgtggaaggccttgcagaggcgaggagagcctggtctatggggagacaggttcccaggctttctgaacagaggctgctttcagaacatctgacagtccctcggcctggacaagcggcagcccggcagctctcagcctcaattcccaaggttctccagcccagctgcaaaggagagtcactctcaatgtccaggccccatccctgaaaaaccaaaatttctcaggtggggcccagtaccctgtattttacaaaagtcccccaggtgattccagtgtgcagggaggggtgagtggataaggaaaacagtcccaacctcaggcactgcatgccctgggtggcctcagcatctcaccatcgccagcttagaaatgacaactccctagctcaggcacgcttctgccatctttatcttcttttgcaataagtatgagtaccatgtgggcccgagggccacacaccaggtgtcaggggcacttctggctaccttgtcatcttcagcaagggttcaaagactgtccctcttccctcccctccaaacacagagcccagtggcttccatgaccgcctgcccatttccgtgcaatagaacgtgacaagtgcagtaaacaaataggcctacataatggggtgtcagggagagacaaagccggataggggcaaggggtgcctgtaggtggggagaggatgctttgcactagagaggccagcacaagctctgtgggggtgagacatgagagccagcaaagggtctgtgggcacacatgcggagcccaaagaaccaggcagagtgagcgaggggaggagagggtggggcgaggtctgagtgggcaacaggctgtgcaggccacgctgggactccaagtttcactcatcatctgagaaactatgggaggattctgggtaggagtatgatccccttatgtgtttgttttccaggtttttttgttgtggtggtggtggtaaagtacacataatcatattcaccatcttaaccatttatgggttttttgtttgtttgttttgttgttgttgttgagacagagtcttgctctgtcacccaggctggagtgcaatggcgtgatctgggtgcagtgcaacctccgcctcccaggttcaagcaattctccttcttcagcctcccaagtagctgggattacaggcatatgccatcatcatttttgtattttttagtagagatggggtttcaccatattggccaggctggtctcgaactcctgacctcaagcaatccgcccaccttggcctcccaaagtgctaggattataggcgtgagccaccgcgcccggccaccatcttaaccatttgtaactgtcctgttcagtggcatgaaatacattcgtaatgtgcaaccattaccaccagccatcctccacaactctttatcttgcaaaactgagactgtatacccataatcaataattcctcattccctcctccccttagcccctggcaaccacccatgtaactcttatgtgctgaaatggtcactgtcaccagggtaggacaagtagaagcagaaagcccagctggggccaggtgtggtggtgcacacctgtaatcccagcattttgggaggctgaggtgagaggattacttggggccaggggcttgagaccagcctgggcaacaaagcaagaccctatctccacaaaaattttaaaaattagctgggcatggtggcatgcacctggagtcccaactactcgggagactgaggcaggaggattccttgaacccaggatttcaaggctgcagtgagcaatgatcatgccaccacacttcagcctgggcaacagagtgagatcctgtctaaaaaaaaaaaaaaaaaaagcccagttgggactgtgtcagaggcattcaggagagagaatatggtagcttgcaccaggatagggagtgaataaagaagcagttaaacttggaacagaggttgaggattcatggatgattagatgtggggtctgagggaaagcaggaacgcaaggatgactcccagatcttcagcatgaacaactcagcacactctggtttgaggtggagaaagctgggaagaaaaaggccaagggaaaccccaagagttccatcttgagtgtgttctggttaagatgctatgtggggatgtcaagaaggtggctagatacaggagtcgggctggagatgtcatcagcacctgggtggtgattaaagcatgggactggctgagactttgatgggagcaggtgcaggtgaggaggtctgagggctgagccagcacaaagagatgggaggagaaccggcaaggaaaaccaggagggactcaaaaaggaaggagggtgtccccagctctaaccacgcttggcagtaaatgcggtgcatagaggaataagtcaaaagatgccacgaagcagcttcagccaagtggagaatgctgaacaggccattagacaaatgacccacttctcccacacagcaatggtgaggggaaatggcaagaggggccaggccaaagtgaaagagtgaagagacacaatcaaatgcgaagtgtgcatcctgagttgaacaaaccaactgcagagagacgtctgggaaatctacacgtggatgaatgtgggccatcagggaatttgaattaggtgatgatgagaagataccgttcatcttgttagatgtattgatggcgtggcttcatatgtgaaataaagtgccagctagaaattcatatggaagaatttacaggtaaaagaacatgaagtcttggatttgctttaaaactctccagcaaaaacaaagaaacaaaaacaaaaatgggaggggggtgtggttgggggaagaggtgcatggagattccctcatctcttgattcttgtgtatgttaacatttttccataataaaaagtgtaaaaataaaggcatgaccaactttttcgagtgctgctgagcaggagaggaagataaggactaagatgtgactctacatctggcaagatgagggtggttggtgaccttgactgtagtagattgaaagtgggggcaaagcctggttgaagcaggttcccatcctcccataagaagtgaggagatgaaaacagcaaggaaagactgctctttcgaagggttttgctatcaaaggaagaaaagaaccaaaggggtagctggagaggaaaggaagtgaggggttgttctttgtataggaggggagatgtgggctgatagaggagggatgcaggagagagggctgagcccttgagcagaggaggaggtaagggatactctcccctgatacagacgtgcgtgcatacacgcacacgtgcacacacacatgcatacacacgcgtgcacacacaccagtgcatgcccatgcacacacgcactcacacctaagtagaagagtggctttcaaaaaaggtgaaagcatccatgcttaggatgactcagacacaggtcagaggagggcattagacctttccaaagccaggccacctagagagctgtgggccagacatggacacctgagcctgacccattaataggtcacacagcagatgaggccctcactcactgcagcctgtagggctccagaaaatgctctgggcaccacagcggccaaggcgttcctaacatgctgcagacccagtgcctgcagtcacatagcctggcaggcctggcatctgagcttaaagaaaatgaggccccatctgggagctggcaaggccccgtgggcatctgctacattcagtcttggctgagaaactggaagcccagggcgaggacagccagcccaggcacaggccttgcagccatgcgtgggcttcgggcccgccgccgaggctggaacacatggaggtaaccccaaacctgctccaatcatgcctactcaacacagcttctcttccccacgtccctggctggctttctagcccacagcctgtggggtcccaagcccccgaccaatgacctgcttcagaccatggatcagtgcgggtatgggtttaactaaccccaaaatgtgtaatggcataaacacaagagaagtttgtctctttcatataaaattcaaaatgggtgattctgattaataggcaccttcctccaagcagcgattcagggtcaggactcctttcacctgtggctctgccatgttcaacacgtggccctcatggtctctgtgaggtctgtatcacaccagcagaaggatgacagagcatggaggagcatgcaggagttttgggggaccaggcctcggagtggcacacacatctgcacggtccagcggccagagcccagtcacatgccccacctaattgcaagggtggctgcatgacatccagctgtgtgcccaggaggaagaagagctggtttgtggtctgccagccagtttgggccacagaccccacagatgtctgccactggcttcccagagcttcctcccaggcccctccctcctgttccacccactccagccttggcctccctgactccatcctcccatcctgtcctgagatccactgccctgcagcttcatctggcacaggccaagacccaagaaaagatcaggcccgagggtcagagaggcacacagaaccagtttatttctcatgaatttataggaccacagtcagcacagagcaaatggtacaagtgcagatggctggggtgagggcgggggcctctgctgctgccttctcttctctccagctgcctgagtactggcacacagcgggcagtgaatctgaggagctgtggcctcacagtcgctgcaggctgagccagaaaggagggccaggggaggtaagactcactcctgcaggagcgggttggtgatgaagggctgggggaactcgggtctctctgggatgaagtcacccctccttcctggccggtccccagcccctccccacctggccagctagctgggttcctgcagcagcggaatagtcagggagttcccagcagaagtgctgaatgagggaaagggaatgccgccaaaggaaaccgactctgtcagggcatctgcacagcccgcgagactcaaatgagacccattgagacccaggtcccccttcccttccctggcagttctgattctgctcccactgcctgggattccaccaagaaggctaaagctgctctttctctttatttgtgaaaagcaagccatcttggggcaggaaagcagtgaagggactgggcaggcaggacagaaggcgctggaagctcagccatctcacccccgccttggcctgcactcacctgaagaagcaggacagacagaagagccccatcctctcccacctccatacctttccagctcatcccacctctgccaccaaaacactcatcgcggggtcagagggagtgccaaaaaaggtaaaaagaaacgcaagaaagaggctactggggatgaggggacacccagaagccccttcctggaggaaaagccactccttctgcagctggactctaggatactgagacccagccctgccccatcacctctccagtgtggccaaggggacaaggaccaagatgcagggaagcttggggagcctgggctacaacagatacaggccaacagacagacacagatggatgggggctgccgggcggggtcgcctcttactcgccatcccagcctcgactcatggcctgcactacggccccgtagagttggctccaggcagcccgtgtggctggtgtgaaggcagggcccagacacttctccagcatgtagagcagagactcacccactgtctgcagaggcaaggggcaccttgtcacttccaaaggcagaaaggcactgctccattccacaggtgagaaaactgaggcctaggactgattagggctcctgggccttttttcctctcctgcattgagtccatgcttcctgagcagggtcctacccaaatccttgggtatcacattgtgtctacctttccctctaaatgtgaggctttatatcctcacatttttcacccctgtcttggtcttgcaaccaccccatgagtggggccaagacattgcctgggacctcccagcttagaccaaaccaagtcattgctcccagacttgagtttcctcatctgcaaggcagcaatgatggggttaagagcctgggctctggagccagatagacctgagtacagattctgactccacccttcatcagctgggtgaccttgggtaagttatgtaacctctctgagcctcagctgcttcatcagtgatacagggaaagtagaagctccaactcctgggcctgttgggatgattaaatgggataatccagaaaaagctcttagcacagcatctgtatacaggaaacctacaatgataataggccaggtgcagtagctcacgcctataatcccagcactttaggaggctgaggtgggcagaccacttgagcccaggagtttgagaccagcctggtaaacatgggaaaactccatctctaccaaaaatacaaaaattagctgggcatggtggtgcatgcctgtagtcccagctatgagggaggctgaggtgggaggatcacttgagcctgggaggttgaggctgcagtgagctgtgatcacatcactgtactccagcctaggcgacagagcaagattctgtccccagaataaataagtaagtaaataaataaataaagataatggctctcatttgccattattactcataataaaataaggtttatttatctcacaaatattaactgaatatccactgtagccctggtagatcaggcactatgctggtgctggggatggagaggaggacaagaccaacacagctccttcctcaaggtgctcaccatctggcaaggtgactggactgtgtggtgtactgtcatatcagtcgcccccagtgggctacacctcaaggattcatgcccttgagtagggtcctcccacattgacactgggcttatccatgtgagtggctttggccaatgggacattagcaaaagtgatgcaagcagaggctttataggcactttcacactggggcttgtcctctaaaaactcccccttggaactcagctgctattctataaagaagctcagctagactagtgaatgacaacaaatcacagggacagagctcaaaggctgacaggccttggacattctagcctcagttgagctcccagctaaacataacacacaagtaactccagctacaccatgtggagcagaagagctgcccagctgagcccagccatgagaaatcggaaagcattgtcatagttctagggttgtttgatacatagcaatagaaaattgagcagaccagctgatcccaaaagcttgttaatttttatggttttaaaagaagccatatcagaaaagagaacttggaagctcagagaggtcaagcccatgtcagggccacacagcaggtaacagatgcaggcccgcagccctggttatctaaggatatgggaatgggagagagaacaggtggcaaggggaggtctgggagagagaagtggccccaggccaggagctctggagagagtcagagctcctttacccaccgagaaggagctgagcttcacacccactgcccggtgcttcctgcccaggctggcaaggtactcctccagtgaggacaggtcttccacattggtcactgcagcatcaatcacgagcatcacctgccaaggccaaggcagcagtgaaacagagaggccagagcagccccatctgctcacaatcacagcccaaggcatgagggtcccaaagcaagagaggccagtaggaccctcagttctccaagatcaggggtcaaaggcagcctgtgtctactacatgtagggggcacccgatacgtggtggccaaactactaatgttatacccatgaaggaagcctctctcctctgagaaattcacatctctaaacacacctactggagagtgttgtctgctgggacaaggagaaactgaggccctttgagaatcatgagattctaagaaaatctcagcctgattttcataggcagatagttcccaattaccaggatctgtgctaacacaacctatgggagccagaggacaaaggcaatgacacaggctgggaccagctctctgaacgcagggtaggggaagaggctgattctgatgtcccagaccaatccagcccagagggaaaggagctgtaccctgcttgggggaactggaagggagtaagactagacctggggcagaaagtcattttctccattctccaccagggaggtgctctgctggatcccagaggtcacagcagctctgcctccctctcaccttcctgatgtggtccaggaactcaggcgaggagagacagtcctctgggctggagaactggcggcagttgtactggaagaggggcagcaggtcaggctccagggcaaacagcctgtgggagtgaggcccaggtgttagccctggggtgtgagctcctgcaagccccagcaagcctggctgtcctgcagtcagcgggcgggggtgccaagccaggtctcagctgcaaaccacagctgactctcccacctggcactgctcccccgccagcttcggtagtgccctcctcctcatgccttctactggctctgggcagcatcctagaaagggcaaatgtgtcccagggcctctggtaagcaggggtccctcggtgaatagctgaggggtgtgatttgggacaggaagaggtccccaaacaggaaacctggagttacgttgtgtggagaggaaagccctttctctctctctctctctctctctctctctctctctctctctctctccctctccctctccccccccccccccccccctgcgctgagtactttccgtgtggttaacttttaactgtattcctcactgtcctaagcagtgggtacaactgttatcccagttttatagaggagaaaacagaagcccggggaggctagaactcgcctaaggtcacacagcttggatgtagtgcagccacagcgggtgcctgagaaaaaagtgagctggggggagtccggaggcagaagcagaggccctcctcggcatttgggaggtctcaccgggtaactgaatgttttccccttttgtcttgggggtggttttgcggaagcctgggtagaagttctggactgtccaagggtgccaaggataggtaacaccacggtgagggaagcagtgcccggttggtgatagcggaagggttaccaaaactgcgagctgaggttggagactggccttcccttcccacccggcctgcacaccccccacccctctcccctgcggtgaggctcccgcatctgtcaccccttccccggctgctctctggctctttcctcggaaaggtttgtcttgttggttgtcagggatccacacacctggagccagaccgctcacacgcgggcgcaggagctcgccccacacatctcccttccccggctctcggggcaccccagtaccctgataccggcagcggggtgcacccctgcagtcgctacctaaggaagacgcaggaggcacaaggcggggtggaggcgccgcgcagggacggaggtccacccgcccagatgtggggagatccgcgggaggggatcccgcccggcccggtgagccccgctgggagagtggtgtgcggcgctggttggcaacaggcgcccacggtcgagagagaggcagaggggctgtgccacccgtcgccgcgccccgctcctctggcgcacatctggcaggcgccccagcgccccggcagcggccagttttccctccttcggggccggtcctgccgcgtgacccctttcccgccgaggcagcctccacccgcatccccgggcgctcgtgtagccctcacctggcaaacaggacggtgccgtgctccagcgggctgcggctcactgcccgccagctctgccggatcagctcgggctccgggcgctccatgctgtcccggggacgcggagcgcggggctgggaccctcagggctcgggtgccgtcaccgcacgtgccgcgccatctcctccgcgacgcggtcccctccgcccctcgtacgccccccgtgcctccgcccggcgggggccgcagccgctccttccctggcgcgggagagaaaaggcgcgcggccagtcgtaggtggagacaccccagctgtgcttccggggaccccgcttggccgctgcgccctgcgccccgcagccgccagagccgccccaccccgcgacgcctgggctgggcgctttaaagccgccacggcccccgccccctccaggccagcaaggcgcgcgctccctccgccagccgctatggtggcctgggaaaggcccggcctgcagaacgtaactgacatcgcggaggctctctgggcctcagtttctcctcccgagccccgagggcactgtgttgaatttggtcgcctcaggtaggcgctgcatgcgccccctctccacaggcccctcaactcacgcattgccagaggcatttgagtttgccacccacctggcctgcaggtcaggcctggggaggcggcctaggggcctagttctcggtctgactagggcaccagcacacgttgggggccaccagggctttcagccgtagggacagggccaagaccacagccattcccagccaggcctgggtttttttgagactccatctttagaaagccgtgagatccagttctaatcccagctctgcttggccagggtggaatcttgagggagttcagctctaacattctaccgttccatgatttaattttaattttaattttaatttttcacctcttccctccctgggccttccccacttccatgatttttcatctttttgtttgtttgtttgagacggagtctcactctgtcgcccaggctggagtgcaatagcgtgatctcggctcactgcaagctccgcctcccgggttcacgccattctcctgcctcagcctcccgagtagctgggactacaggcgcccgccaccacgccaggctgattttttgtattttgagtagagacggggtttcaccgtgttagacaggatggtctcgatctcctgacctcatgatccgcccacctcggcctcccaaagtgctggggattacaggcgtgaaccactgcgcccggccttttttttttttttttaacggaagtactgtttaattttttcaatagaagttcagataatagaatccatgctccccactcagggtgtgcaattggccacctgccaattacaactaaacttttctctttcaagcagaaagttcctcaagccccagcccagtgctggtggcccaggtttgggagagcaagcccgttttcacctttatttctctctcattattccctcaggggtctccgagcctatctcctctgtctgtccacgcctctctggccctgtttcctcagttgtgcagcaaaggggttgggtggtgaggtctctgggaccttttagtccacctcctttagttccatgggtagaaggtgggtgttcttgagcccctggttatgaacagctggggctccatgcccagccctgtgctagacatggagtggcgagtcctggtctttaaaatttctccttctggccctgaatcagaactgagtgcctcagcagaacttttctttcctactcctagccatgccccaggaaatcatctagctgttctccctcttccaaggactcaggagtttgtggtaacccctattctatttcccatttcctcacaaatctctgggctggagcaggagagcaaggctataaggcagcctggaaaagctggtgtcctagggtccaagaggtctccaagcaagaacacaaagtgattggggctgaaggaacaagacgtgactaaacttccagcttggggtcccgtggacctgcagccaggtgcagcaggtcacagggcaaggacacgtgtcattggtgaccttcactattcagtgcccagatgctcagtgctctgtgcaggccacctggctggtctcaggtaccccactctacccagctcacgcttcttgccagcaatctatacttaggacccatcttgcttcctctctcctctggccagggtctggagtctgatgaggtagtgggagttaacggccctagctagtaagtagagtcagtactcaaaccatggcttcactctttgtcttcctagagccaggagatatgtgctaagataagccaaggtaagtgcactctatccctgctcccttcaagaaaggcctgagaatctggatgggcctaagcgatgagagtgatgtattcccatcagtagaccaagggtccaagcccacatttgaggggctcagtaaaagtcacaggagtctcctccctgtgggtcatccgcccaggaggtaagaacctagaggagaattcaagtactgtcccagagccagtgctggtcattgaggttcatgtatcattaataatacagagctggcatttatgtctagacagtgttccgggcaccttacttcatttcctcttttcatcctcacaataactacgaagtaggtgctatttatcataccctcgttttacagctgaggaaatggaggcaaagaggttaagtaactagcccaagctcacataggtaataagcggtggggccaggatttgacctcaggtctctctggcccatcctgtaggcctccatgcctcccttgctttaatgggctgtggccaagagccccagccataattcagaccaagccatggtcactgggtctggttcagcggtgtgctggagccagctttcatatggctttcaagaaccaactgtatgcatctctttccaacttctcattcagtgacatcaagttggtagcttaaaaaagaacatgttgggaatatttacaccatggaaattggcaaatgctatacacaccagtttttcctcccagaacacctgttgttaaacatctaccagcacacactgatctgggtgcacctgggggagccaggaaaacctgggccctagatgagcggctgctgatgcattaagcagaaggcccacgggaaggtgctgcgtcagggacctcgggctgagtgctcaggccttctccccagggtatctagggctgcagctgttctgggaaggtgcctctagtcccaggacaagactagagaggcagaaaaacccaaacttggcactgagtcctggctctactatttacttgttgtgggaccttaagacaagtcatttaatctctcatgggtagaatgggaacaaaaacatcattgacttcactgggcctttatgaggattaaatgtcagagatgtgttgagactttgtaaactaagctgtgccactcaaggaagagtgacttggccccttcctaaactgcctgtcgtaggcatgttccacctcctgaagatccacatgcccctctctccccaccagcccctaccagagggtggctaggcagcccagaagccccccagttccacagcacagtgctactcccctcccccatcctctgtccaacactcaggtcagctcctgctgccttcagctcctaagcatcactcctgataacaggagacacctgtcaagatggggacctctgttaggcagaatggcaagttgctacagcactgggatactcggctgtctgggaaggggacaacttcttcttgcactcctttctatgccatgtgaacaggttaaaagaggacaaatcagaggtccagcttcctacttattttggaatcagtttaaatataccaaaatgacgaccaacattactcaagtaactgtacacatggggagatccaaatgcctcctggagtaatcaggctcacctgcccagcccaggtcttctgctggaattagatcagcctcagacatgacacacggggtggttcctgcactcaaaacattcttctcagggaggcctttctgggagcagagggcaagtcggattcaattaagtacaaggacaacaaggcattcaaaacaagtgttatttattataaaatcagtggcttctgattagaagactttttttttttaaaccaaataggctcaagaagctggctggaggttgaattggctgacgaacatcttcttcctccaccagcagtttgtgggacacatcacgtttctgccaagtgctacagctgaagcccatattcatagaagcaccctgacagcccttctccagcaacttccagaaaacagaacctgagcactcaaagctgcatcagcccatgtggccttgctcccagagaagcatctgccagtttgggcatggaggaacagaaagtgggcagggaattctccttggctccttagaaggcagtgggagcccagggaagcgttcggccccagtgcagcctaattgggagggagggatgggtagaggctggctgggcttctccttcctcaccctcatgcaaggtggctgcccctctggctccttcagagctcttcccttccaagttcctactgagaaataagaaggcacaaaggaaaatcagccacctcctggaggtcactgtgggccacctgctttgctaagagccaagcacagacccctgcattctccctgcaggagagcccacccggctcagaagaaagcaattccgcctgtggggaggagaggaagggaggggaggggaggacacacggtgaggtggaagcagcgagcagagcttctccatccctcctctccttccctgccagaaatgcaattaagcaagtggcccagactcagccgcacagacagcgcttcctgctgggggaagtcaaaagggctgtagcagtgggaaagggaggtcatcgggccccagatctaattaaccaacctgccttgcttttgacgttgctgcatttcctctattaacattaatgatggttggtctgaatgcccaagcatggccagaagcttccctccccaccacccagtaggtagcacagcctgtccctgggaccaatatccagtctccgtggcaaccgcctcctgaagatgctttaaagagatctgaccctgtcagagttgttgggagcttcagaggagggaaaatggagtgtggcggattcatcattaaatattgaagcatcaaagtcctctgagacaaaagaaatattttgtcatgcaccaggaaggtggaggcaggcttaagggctggccttgggtggtttggttctaccacagggttttcttcatcccttttggggaggaagtggaaggggcagctctgagcttcttgtttgagctgcagagtggtagacgcaggaagctggcatgcatttctaggtgccatgggtcttcactgctgaagcagtgacagagagaaagggaattgcccacggagtgagggaggggtgagcagaggaggactgcagaagtgacactgggaaagctcagcaggtgacaggaacattagtctggagaggccagagtccccacatcccagcaccacgcagattccctgccctgtctctcatctaccttgggcgctaagcaaggttcccatgggctctcccagcagccaggagaatgcatctgccttgccctccaggccaggctagatgcacttggagagacctggcctctggcacacagggcctgggaacactgagcagcccaggataggacatcgttcctcccgagtgtcacagtgtgacaatcccaaaaaacgaggaaccaagggctaaggcaggctgacgctccggagtccgctgctctctgtgcgtcacaggcaggaagtccagctacctgcagccactggggggcatggtgggagccaggccctccagctcggggcggcgcgccttcctccacgctggattcatttgtttgtgggagggagggcagcacaactttgacagtcccatctgctctgcctttggtgacatcccaaggtgaggtcagtattctctgccctcaaggccctctcagaggtctgagaatttttgatggatcttacaaaccaaaaccaaagaaatccaacagaaaaaaataccagaaaatattactatagcctggactattttagagtttatgacactcagctgtccagttacacggtctgtattccacagggatatggacaacatgccctcacatacacacacgcgcacccactcccaccctctggcacccatcctcccctgcgctgtgcacgagggagcagcccaagaggcgctgtcctctccgtggtgctgtggacggagctgcggctctctcccggctctctccaatgctgggttccattccagctgcactcccagagctgggtcctggtgagcagcagaattcttcgggctccttaggcagcttcctcatggccggatggtccagtactgcttcccagctggctctcctgggaagttcctggacccaggctggaatctttgcagtggcctcaaaagtcccatgagtccagccaccttagtcctgccattggactttgggggtcctgggccaggggaccaaccatcccgtaagccagagggtggaagaggtagaagctgtgagagagaaccagtaggaggcagttggcacccccagtgcctcagctgaggggctttgaattccattcctcctgctggagctccagagaaattccccatcgccaagcccggttctctttcacggccttgtctgtctgagtcccactggggcacactgtagctggagagcttagtagatgctgactcaatgacaatcatggaaagggctcttcccaagaggcccaggagggcaacccttctaggggtcttgtcatgggctatttggccaggggtgtttgtcaacatgtgaatgtaaccctcttaggcaggcatgtgctcacaggccacaggcccagcaccaaggccagggactggggaagcggggagccttccaaacaactctccctttcagccactcagccacacacttcccattcccacccttcccaccccacccgtcgagagctcttccggcagggggccacagtgactaaagaggggtgccctgtcccccattgccccccggttcccccctccctcacccggagagctgttctgacagggggccatggtgactaaagaggggttccctgccccccattcccacactccccctctgagagctgttctggcacagagtcactgtcactagaggggtacccttccaggtgcgctgggatggcacaaaagctgaaccaccggcagaaggggaaaaggcagagttaagccctgcttctcctacctggctgcacattaggatcacctgggggactctggaaaccacggccccacctgggcttgggtgacgcagaacctccaggcatgggcactggtggtgttaaaagcaccgcaggggattctcgaatgcatcagggctgaggcactgctgagcccacactgggagggcatgtgaggtgcagagatgctcacctgtaggcagttcccaggagcaggctcaggattcccgccacatgtatgcccctcgccaggggccatgaggccaagccccaggcacagagccgcaggagggtgtcccacagaatgcctagaggagaggagagaaacctggagtcagccaggcagggggtgacttctgggctacagaagaaggaggcactccaagtcaaggagcagagagtcactcccagcactgctgccccacagtggcctcccgtcaaggagcagagtcactcccagcactgctgcccaacagtggcccgccctccacctgctctgtctcccaagtccaggtgggtggcactgacctgtcaacatgcttgagaagagcatggctgggaagtagtggtggaagtagaggacccggcccatcaggaaaaacgggaagtaatggagtgtccagccgagcaggacctggccgcctcctcgaagcaggacctgggacaaccctgggcccaagcagcacagcccagtcagaagacaaggagcgggcagagattccaggctctggtccagctctgccccttccttgctgtgtgaccttgaatatgtcatatcacctcattggaccaacccaaaccacgctacagaaactggagaggagcagctggggctcgagagctctggtcagggcccagcctagtgaggcctgggcaccaatggcaggtgcaccaagcaccagcaggaggcagcccagcctctaaagaaacccttctgcgcctgcagacagcttcactccctacttccacctcccacatctttgctgccacacagatctttgcagcggcagacaggcgctaaggtgaggttacaggtgaggatggagtgaggaggtgtctgggactatgactgttcagacagagagctgcagaggcaaaagggcctgtgtgactgtctcaggtgctgtggcccatggtctggcagccaaagttaccaagaacagcactgggatgggaactcaataaccctggaggctcctctctagcccatgagaggacagggccatggaacaaggaggtggcagaaaagatgggcagctctgtacacagcatggggctaaaagtgagggctgtggagtcagattgcacgggtttgagcctcagctctatcacttactagctgtatgtcctggggcaagtttcttaatctcatggttccttggtttcctaatccataaaatgggggtcataatagccaacgctctagtgttgttgggaggaagtaaagtgtttaacacagcactgggtacttgggggttgttacctttcaaaagcaaaggataagggaaggtgtggggtggtaaacgcaaaggatggcccatcagcaggcagccggccctccccaggggtgcaggtgccctgctgccgccaggtcaggggagggagagcccagaggacctgacctgcaacctccgctggcagccgtgcccctctctgcatggctacagcaatgatgctccctgagaggaggtagagggcgatgctcaacagattcagccaccaaaccacctgtgcagaaatgggaatgggcagatgagaacgcagccactctccacgggcaagtgctccagggcctgagccgggaatgtttaggcactcaccgggttgccaagcagatagactcggaaatctgtgtcattgacccctgagaagcgtaggccctgtggaatagagaccaccctgctgacccaggcccagcccatcctcggccacacccattagggggaggaagatggtcaccttccacagacagggagcctggacacgaacctcaggctggcaaattctacacgagctctctgggaagcagggtcagaattagggcagaaaacagatactcccacctctggccaacccatcccaggaggcccctcgccctgccgccctagtacacccacccccgcctccaccggtctccctgctcttgttcttggctccatttcctgggaggagccccagccttggatcctacctgatagttgataggccagtgccagggtttggacgtgaactcattgtccttgggtttgaggccactgttcccctgcatgaaggtagcaaagaaagctagtcaagacagagatctagagggctgacagaaatgtggggcccaggtttttctgatatagggccaagcgccgagcagaaccttctctccttcccttcccttgcagggaagaatcaggcagctgctgtctgcctacctacgacacttgctttacttctcccagacaagcctccatctcccataaggggtccattccaaccttctagggaaaaagaagggaaagaggaaattgttccaatgggcacaaaatatatacccatctgccaagctaaggacaaggtgtgaaaatggtgggagagaggggatataaaatgaggcttacagccgggtgcagtggctcatgcctgtaaccccagcactttgggaggccgaggcgggtggatcacctgaggtcaggagttcaagaccagcctggccaacatggtaaaaccccgtctttactaaaaaatacaaaaaattagctgagcgtagcggtgggtgcctgtaatcccagccacttgggaggctgaggcaggagaaccacttgaacccaagaggcggaggttgcagtgagctgagatcatgccattgcactccaacctaggcaaaaagaccaagactcagtctcaaaataaataaataaataaataaataaataaataaataataaggcttacttatttgttcccttcaggggccaatttcaaacagaaaagcagaaactctcatgcgtgcctagacttggaagaggttgctttagcttagtgcttctccaccttttttttccactactgcccctctaccaggagcctttgtagacaagtttctccctaaacacactccatgacattttaatactttatactgtacatcttacttgtgctttatacataaaaaattagatattttgccctccaagaacacatttcatctattgggagagaaatcaaccctaatgcatgctttggtttgaaggacccagactcagcctccctaatccagcagccaagaacatctgctaacctttctctacagggcaaaccaggtctttgctaaaacaggaaggagtagggtcaggatccaggatattaaccactaggactgggttctgccttatcactgggacagactgaaaaggcatttccccagaaggggagtcagctgccatgacttaggccggagcttctccacctcagcactcccaacatttcgggctggatgagtctttgctgtgaggactgtcccgtgcattgcagagtgtttagcattcctggcctccactcactgaatgcccgtagcactcctaccctcaacccctcagtttcccagccaaaaatttctccacagatggccaaaagtcccgagaggcaaaatcaccctcaattaagaaccactggtatagcctaagaaagacccagaaagttcagtggactgccacccagtgccttatgaatccagttcagcaaggggctgggaatagtttacaggcctctacatggtggagaggttgtgcctccaaggtcaaaagtgcatccagggcatcagacacaaaggggacagctgcacggccccagcgtcactgcggccctttgaaggacctgggaatgaggaatgaatcattctggacccctgcggcagttgctgagggaaaccaattccttcaaattgtacagtttggtcccaaacccaaggactccagccagaactgtaccaagccaagggaatcttattcactacattaaactctgagaaatcctgctctgttgctaaactaaaagaggaaagaaaaatctgcaaccatcacaggcatatgtacttgtaagttgttctctatggctgaaatctggatgggctcattcctgtaactgcaccaggcaaggcagccttctcctccaggtcccgggccactactcagccagcggaagagccctgcccctgcagtttctatagtctggactcactgttttcatctctctcccctccctgactctttgttggctgaataagaaagctctcattacttcccttttcttctctgactctacttcttagataatgaaagacaaaatgaaactcgtagatttagtcttaaaatttgacccaggcccagaatgatattctgactgacaggcacatgttcaaaagagctatgtcatcaggccacagtgacagctacaagcagagagtcagaaaggaagtgacccagagatgcttaatgtcaacttatcacctcccaatgcgcaaaaatgacaaaatttgaatttttaaaatttaatctggtgaaataagtcaactatatgtactgagtactgcttacataatcacttccagggaagtccacttgacaatggcttaccaggggaaaaataacaagtgctacacctccctgcaatgctgtgggtagagtgataatcacatatctggcttgagatagtgattcttaaacattattcctgcagaacacaggttttccataagccagaataagggggtcttccactaaacagcaggactacagcaggggaaaatttaagctagtgagtagaattttctcaatttaaagatttcttctctgaatttttcttaaacctttgatgctacaactgctgtcagctactaatgatagagagtgcaaacaatgtcttagaaaaccttaaaaagaatcaatcatgccctgcctaagcagtttctgtccaggaatatgagtgggctcgtggctgggatttcatgctgcatataaacaacacactcaaattagctatccatcctaactgatcctgatttcatatgatggaatgaactatcagtatctcatgatcttcaaccaagagcactatgattttcaggggctctgccacttgggcagattcacaaatcacttagaggtgaaggagtgtagtggtaactagcagtaactctaaaagcctaccagcctggctctgagggctggatctacctcttacacttagctgtgtgaccctgggcaagttccctgacctctttgtatgtcagttccctctcctgtaactgggaatgatggcaacctccatatgattgtaataagtatcagatgagtatagtgcttagcgtagtgcctggcacatgagctgtacaagcagtcactggtatcaccatcatcaccaccatcctcattctgtggtgagggaaatgcctttgaggatcacagaaaaccgtagtaaagatgctttcaaattcctccacaagggggaatggatctgtagcatggcattgacttgtgatccaaattcatggctgcccaaaagctcttagagacgccatgaaatgagaaggggacacatacccggatcatgaccatgtgggattccagcaagatctcaggaaaactgggctgtagcacatccaggctgatgtttggcactaggggaaaaaaatgcaggagaaaagcctttgtcatacattctttcctcagtctgtccatggtgtccacattcccaccagaatccaaatgcagccttgctgacaagttcacaactgttgaggagacagaagaaagcttggcccaattcttgatcatttacttagctgtatgaagaactcatcaggcattctaagaaatgcaaaggaaatagacaacaaggtttcacctgcttggtgctccaacagctcccagcaccattgcttttcactgtggtactggctcaaatgctgctctcctattaggcataagggacagctgcacagcccccgagtcactgtggccctttgaagggcctgggaatgaggaataaatcattctggacgcctggagcagctgctgtcgggatggggaccaagtctgtctcctcgccaatatgtccacagggccccatgtggttcctggcatacttgataaagagttgttgaattagttgattagtgggtttggctagattaggtgggaagaagaacaaaatgaaggcacacataagcttgaggtgggtagtttaggaaaacagatgatgaatccaaatacttattgagttgaagctgacaacgcagtggaaatatcaaattggagcttgggtgtagagatgtggggcacagatcagggctgtggcagtcactttctataaaagcattggctggatatgtgggggggcgggggagcgactctacactgaggcataaagggaaagtagcagcttgctccaagcctggaggctggggaggtgcccatggtgcaggggagagaggagcccagaggaagacgagacagatggatctgcagatggccactggccactttagggagaggagtttacggagggagtggatgagaaggaaaaggagtatgctatgtaggtacagacaactcatagaaagagagtgttaacaaggaacaaacagcagcaagttgaagggatagcacagtttacaaacgcttacttttctaagataagggtttcttataaatgcttccctccagagccagcccagaaagtgacctcactcacacttgggattgatatggtcctccacattccagatggagttgagggtttctttcaggtatggggtgcaagtaacttccaactgctcccagcccctgtgaaaagcagaagtcacagatgtctctcagaagacgtgaaatccaccagagagtgacactgtcttctgctcttaaatccacaggctccttctcttttccacatggtggccattatttcttcatgttccatgttggacaactatcctaggatagtctagcatacagtattcccattttagaaaaagacatagacccagagagttattagcaccagccagatgtgaaaatgttgaactatcagaacacataaaacaccgaagctcccccggagttctgtgctccataatacacctgatatctactctccctccatctgccactaagaacaagcagacagcaggtgaacacaggaaaacaaaagcttctggcatactccttgtagagtgaaaggaaaatcaggaccctcgattgggacagcaaaaccctagagacttaccacttgggcagaacctttcccgaggagcccaggacacaacctgtgaccaaatggatgaagcgaattcgacttctcagcactttgatccggtttccaaatttcctgtttacgacctcaatccgccagaaatcatttgagtcccctgttccattctgccataaaagccaagaaaaaaatacaaagaaagtgaggggactttagagaaaacgtgtcagaaagggaaatggccacccagatgccaccatgttatgaaggtcaaagaccaaattaggctcaatgatagagatgggcaaggttacaagaaggccaaagaaatatcccaggtgattggcattgtcccaaaactcactattacaaccaaaaaacagtagtatgactcctggaaccagaagtccaggagtccaactcttcacttcatagaactagagttcaagttctaaatacctgtctttgcccttcaaccaaactcaagacatcactctgagccaacagaaacagatctgggccatttgcatccattaccttggctatctaggtattcactcatctaagccagaaaggtctggcctggctattgcactttggaaattaagacatgtatgtctaattcttctcagaagatgcccacaaagaagattagaatgttcacagtcttgacctagcacaatgtggaatgagcaaacagaaagagggctgggaaatccacctgaaggccagaatctgtatacagttttccactagtagtttttgtcttcagttactcccaaagccataagtactcatagagcttttatttattagctgcatctccttgaggtagtaaaatacaaaagctatggataatatccctctgcagaacagggaaatgatacttaaaaataaagctaatgagaatttgggatctggcaaaagataaacatacatgttgttcatctggggtcatattgtgggtccttggcttctatgtccaatgtgattttaaaagagatccaaatagtattcatatttgacatttattaagtatcagagcatgtaaatggcatggttattatgtgaggagagagatggagacaaacagacttcataggctgcttttcccagagcaggcctagccaaaaagtgcccaaatgttaagagagtccctgtgcagcctcttatcctcaggaacattccagaattctggggaggagatatcccaccacacagccctgagccaaggcccataacttttacgtcctactcacatccccgttgcttacttactatgccatagccggtgacctgatagtgcttccgggtcatgggggcctcatgatagtgactgtgcaagttccgggaagttctagaagttagaaaagagaagtgtcattatcctatagaaagatgatgtgcaacatttcttcttttaccaaggatgttcagagtcaactgtcaggataagaaaaattagaatctgaactattaaatccaacatatcaggaactggtttcctatttactcacaagaaatatcctgagaactggagaagagatgagcccaaaccaggagagacagatggtaggagcactggacggcatgccaagaaaggggctaactttaggtgctggcagggaggtggggggcgactttcacacatttagtagctttgaagcacttagcttgcctgacttaggaggcaggtttgaggagaggaaaaattaaaacttgtaatctgcatggcctgagctaggtaacctcctcactgccacttactctttctgctcccatcgccagatttttttaagtggacatctgtggaggatgagaggggtttaatttagcttttatttagttttatataacaactctcacttttatctggaacaaataataaatgttcattataaaatttctgaaaatttgcaaaagtaaaatttaattacaataaatttttattaatgacaaatgaaatttatttaataaaataaaaattttaagtattcaaaatccagctgactcaaaaaaaaaccatagctaattgcttctctctctgtctctgtctctctctctctctctctctctctctatatatatatatatatacccacacacatacacacctctgatttttaaaaatttgtatccgataattccagtctatgaaatgtttacggggctgctcctgctgtctgtcgtttcagcttgttcttgcacacagtgccctatttccttgtgtgctttgttacttttgggtgtgtactattgtcactaaaaaactatgggaacaaatgacaacgactttccccaaagagggcttacatttgcttttagccatgcacctaggagacacgaccaatctaggatcatgttcatttaaattcatgtcttggagattctgagatcacccaggcaacatgaatttgagctccaagttcatgtgaggatcaaatggtagttccaacttctcaggaactaaggacagttcaccacccaacccccaacacttagctgggtcctaaagtggacctgggcataagtggatagggcagatttacccttaccccaagcctttgggggttccaaatatggggaaggataacttaataaatttaccactttgggtgagcctaggtttgactttaaaacctcttctctcaagagacagccaaaagtcaagattgtgggatcaaagcaaaagtggcttcagtgtctcacttatttctctggattcctcatttcacttaggctttggcctggtaactctttaatatcttgtcagcctttttatgctcttaagaagtctttatattattccagcatttttagtcattttcagtgagaacactggttaaataagctagcttgccatattctcagaaacagactcctacgtctttctaaaggcagccacttaagaagaagctttgggagctgggtgtgatggctcatgcctgtaatagcaaccatttgggaggctgaagcgggaggatcgcttgagcccaggactctgaggccagcctgggtaacatagtgagactctgtctcaaaaaaaaacagcagcagcagctttcagcaactcaaattttcctctaggaaatgggaaattgaaaggtccccagaaggcaggcaaaggctggcctgcaatttcatcaccttcataaaatgcttctcccattctcgcactgtggccttgctccattgaccagagcctcatcaaaatctaacttctgtttacttcttaaaataactccctccccttggtgcccgtaccatttatttatccaaactgcaaattgacttactctttgtgttctagtcgaataatgtctccatgtcttacaaactccactgggaaggaagggtctaggggatctgccaaaaagaaacaagcattgatatccaaaatcactcaccaggctagtattaatcaagggcctactggtaaacagttatagtaccatgtggtatctgctagaggtactaaccaggtactctgagaccaaagaggaaagacccctaaattgcttcagggtattagagaagggtgtcccagagataatgctcgaaaagactcttaagggaaagggagaattttgtcaggtgaacaagcaggagaaaggcactagaagtgtgaaagaagaaaacttctggccgggcacagtggctcacgcctgtaatcctagccctttgggagaccgaggcgggcagaacacctgaggccaggaattcgagacaagcctggccaacatggtgaaaccccatctctactaaaaatacaaataatagccgggcgtggtggtgcacgcctgtagtcccagctactcgagaggctgaggcaggagaatcgcttgaacccgggaggcggaggttgcagtaagccgagattgcgccactgcattccagcctgggtgacagagcaagactctgtctccaaaaaaaaagaagaagaaaaactccttcgatgaatagcaaatgggtttcatactgtaagggtgggtggggtgggggagagtgggaacagatgaggctatgaacgagtgtggccagactgcatattccaggctggaatgtggcctttacccgatgaggcactgaagcccccactggagcttaagctgggaagctaaatagtaagactttagtagtaataacagccttctaaaaagtaattccatacaaatgaccacttgcccaactctcctcaaaatcaaataaaccctgacaatcttgccagcgagtatcttgtctctggcaataaacttgctaaatgtgaggtgaataatgatgaaatgattaaaggactacttctgtatcatctcaaaatcaagaccaatcaggatctagaaaggtgatgacatggaaaaggagctggcagtaatcatagcaacacagaatggatccttgcaaatttctgtcccaaacagtgagataccaacacactataaattgatcaaggtcaggaaagataaatttgccagtgcaaatcactggctctcaagagaatcagagaactcaaccgcagagacacccatttccatgctgcctgttagggtctcttaaaagcattaattagcaagatgacaaatcaactaagtcaatagggagggaggttttatttcatatgcatttggtggggaggggcatttatagccttcaagaacacaaagaccctagtctataaagctcccacaaaatccttaatcacttcgatgaaatgcaaccatcttaactcagaagtcacaatggaataacagactaggaatgttcaaagacttggttcatgaccacatgacggaagtaaaactggtcttccctcgtaactcctcactgtgatagaacactcacgtttggcctgctgaatcaatcaatatccattataaaagtatagaaacagactctgcccaatggtgtcgtaatttatcccactaaggagcaggatgtagaaagtggttgtatacgccacgtttctagcctacacagcaataagaggaggtggatttaggtgagcagctgcccatttctctacaaaggcctaggagcagctgagctgggataggctaagccaggtgggatttgctgaggagtcacagagatacctgtggcacaggactgtcagcagagatgacaggctcggaaggtgagtggaagatgccctctgttctcttagctgcagcagaggcacagcctgcaggtagctagctgtctgaccaaagaaaggaagatctggctctagctcttgctctgtcataaagccctgagagcctgataggtgtgcttcagagcgccttcacccaggccagttagaagcagatcagcaggcatcgagtcacatctcaggaattagcctagacaaattccagtcacaggactagtagcccctcagatcaactgactgactcaggccagggctgagcagtgggcaggattctatcttatcaagacgacttaagctgcaccacatgctagagtgtgcaatgtttggtgtgctctatgtaagaaatgagagcagcagccaggtgccctcagctggggccactcaccagcccctagtggcatgctcaagtaacctctacttagattaaatctgggctccgctatctgtcttcaaaatgacagctctaagagcaagttcttacctgttttgctcaatgcttatcccctatgccaacaacagtgcttggaacacagtaggtgcttaataaataataattgaaaggataattgagataagtaaaggtgtcaaagatgctcagcaaagcccatctcaggatcattcttttgcaggcatgagaaatcttaaggagggctcagagggagtaacagcacaagaagcatcagtctctgaccacattacctgagtttgtgttatgtttcttgataatccacaggttgttgtagtccttgtgcaaataggtggtgacctgggtggggggtgggggcggagggaagaggaagcaggagggagaataccatcactatcagcacagctggccaaggacaatcaacctcaaaccaatgttgcttaagccaatttcagaatccccagccaccaacctgaggggccatgtttcccaatggggctcatatgtagcactggtgagtgagattctctccttccttctgcatttagaagctttgtcccacaagagcctttttgtttctttgtatctttctgcatcttgtcctaaaagttccatccagccttctagagggaggaaccatgaggccttatataactgactccaacacaaaaacagaatgaggatttaagtgcattttcaaagtaattaaggccgggtgtggtggctcatgcctgtaatcccagcactttgggaagccagagtgggcggatcacctgaggtcaggagtttgagatcagcctggccaacacggtgaaaccccgtctttactaaaaatacaaaaattagccgggcatggtacgcgcctgtaatcccaactactcaggaggctaaggcaggagaatcgcttgaacctaggaggcagaggttgcagtgagctgagatcgcgccactgcactacagcctgggcaacagagcaagactctatcttgggaaaaaaaaaagtaattaagatcatgcctcaaactttctaaatgaaaaattcatgctattatattttctataatgtggccaaatgaaacgaaaaagctccacagatatcctgtcctagaatttaactcacgttttatacaaaaaatctggaaacagtatgactgtctagtaatagaaaaatagttaacatgatagtatgtcctgggatagaatattatacagccataaaaaatgtttcagagcatttttttagcaacatgggaaaaggctcatgaaatgctgatgctgaaaatggctaccatttattaccaggcactgttctaagcattgggcaagtcttatctcatttaaccattattacagctctatgccataggtactatggttatccccacattacttacaaggaaactgaagttaagtaatttgctcaaggtcacacagcttatgcgttggggagacagaattcaaaccagggccgcaaaataaatgctcccaggatagagactatatacgtccaattatgccaattatgtagacaagtagagaactctcacaaatgagtttttataaccccaattggataaaatatgaccaatttatagtcatatgccacataaagacattttggtcaacaacaaactgcatatataatggttgccccataagattataataccatatttttactataccatttccatgtttagatatgtttaagttaatacaaatacttaccattgtgttccactgtgttccaactgcctgcagtattcagtacagtaacatgctatacaggtttgtagtctaggagcaatcagctataccatgtagcttaggtgtgtggtaggctggaccacctaggtttgtgtaagtacatactatgatgttcacccaacgatcaaatcacctaatgacctgtttctcagaaggtatccccccgatgcatgactgtacttacaaagagatttagaattagcatttaggggaaaaattattttgcttgcattatggctgcttcttttgagtggtatttgctttgttcctcaggaaaaaaaaattagggataatgttattaagaatatacaagaagctaaaaagttttggtgctcataaagaaattaaaatgaagtctacattcctgagaaaaagctcgatatcgtccatccagcctggatttgctcaaggaagttaaggttctatgatgctcgtgtgtgtactctgtgtagatgtgtggtaggagagcagtctttgtgtgtctgttttacaagagcaattatgattaaaattcctacaagaaaaattatttatttatcatgagtacagtccatggccccttttcccactgaaatgtttgttttgacaatggagatttttataccatgagatttcctaagaacacaagtatccaattatagcagaatgttgtacattaaaacattcagataaacacttaatcttctgggattacatgtagcttttgttttcttttttatacttttctacattttccaattttataaatgctatgctttaaaaacattctaaaatagagacctagacatgttaacaagacattaaactgcatggcaggaagggccactggagattatttagtccaatcccctcaatttacagatgaggaaacaggatgaaaggctaaaagatctggtcaatgacaaagccagacactttcgtcccttggcgcaatgcactttccctataccaccatcacgtttcacacctccacacatgggctctacgtacataacactagcttaacagagcctttcagagtttggcctttctctccctttgcacagtgtagatgttctggtcaccaggtctgtaactgtagtgtcttctacatgacacctgcagcaatttatcaacacatgagaacacagaacatctagttttctctgccctgggtgtacatgacttagaataatttggacagcttaaaaccaaaccaaaaatgcataatgcatgggcctcatcctagatcaattaaatcataatctctgcagtggagtccaggcatcagaatttttaaaaatctctccgttgattctaagtgcagccagggctgaaaaccactgggccagacatgaatggagaattaaggataagaaactgatactaaaatccaataccctgtaatatggtttggctttatgtccccacccaattctcatcttgtggctcctctaattcccacgtgttgtgggagggacccggtgggagatgattgagtcacgagtgaatgggtctcacaagatctgatggttttatttttttattttttgagatggagtctcactcttttgcctgggctggagtacagtggcgcaatctcagttcactgcaacctccacctccccggttcaagtgattctcctgcctcagtctcctgagtggctgggattactggcacgtgccatcaagcccgagtaatttttttgtatttttagtagagatggggtttcaccatgttggccaggctggtctcaaactcctgacctaaagtgatccgcccacctcggcataagccaccgcacctggccagagatctgatggtttttaaaaccatttttaaaatgggattttctctgcacaagctctctctttgcctgccgccatccacataaaatgtgacttgctcctccttgccttccaccggggttgtgaggcctccccagccatgtggaactttaagtccaattaaatctctttcttttgtaaattgcccagtctcaggtatgtctttatcagcagcatgaaattgcactaatacatactgagtcactttctagcaactaaaagggaaataaaaataaagcatttggagagagacaactttttgcaaagaacaaatctttgcaaagtaaagattccatgctttttgcctctgttcactgtcctttgtcataattattgcctccaaactggttccttgtgagctatcacatttccactaaagttacctttctaaactagagatctaatcataatcataataattttgattgcctccctaatgtctatggagcaaagtcaaatctactataacacaggcctctccccaatatggccccaccaacctcttcagcatcctgcttctccctctcaggcaccatccactgcagccacacaaacactccttaacatggacacagcatcgttcactcattcagatgatactcacatggctaatctttcataagcacttcacattgttatctcatttaatcctcacaactgccctttgatggagagaggtactactcattttccccaacttaaagaggaggatacaggctgggcgcggtggctcatgcctgtaatcccagcactttgggaggccgaggcaggtggatcatgaggtcaggagatcgagactatcctggctaacacggtgaaaccctgtctctactaaaaatacgaaaaattagccaggcgtggtggcgggtgcctgtagtcccagctactcgggaggctgaggcaggagaatggcgtgaacccgggaggcggagtttgcagtaagctgagatcacgccactgcactccagcctgggtgacagagcaagactccatctcaaaaaaaaaaaaaaaaaaaagaagaggatactgaagcacaagaagatgaacttgtccaaagtgacactctatatgaaagcaggcttcacaccccgatcatctagtctggttcccaggtctgtgttcataaataccacactttattcatcacccatcccatagcaggcaccgtgctaggcaattgagccttccaggagctagcaatcaagtaccaaagagacggcgggaagtaagcatgcacagttcaatatgagaaggtttaccacgtaggcatgtggaaggtgccaccaagcctctcatcagaggggcaccccacccagcaccatggagaggtgggacatggttgtcactaaagaacacctatgctgatgcctagagaagctggggttagccagagaaaacagaagggtgcagggctaggaagaatgtttcaagcagggcgaacaggatgagcaaaggataggaggcaagagagtgaactgtcatggcgaacagcattgctgccgtacaagtgcacaaaaggctcactgacctgctgctgacgggcaccaatgccctcggggtagaggtgcctgtgggagtgcagatagccgatggccatccggaggttcttcacagtgatcacagagccgtaggccaggtctgggaggaagggagacagcagaggggtgagctggcacagtgccagaggctgtccgtgcctgcgaggagcctcggaagccacagggctcactaaccctctgcgagactcccctgggccctggactgaagcccagctaccttctcactcccatggagccgactcaagacagagttcaccacagggcccacttactcccccgcctcctgagggcttcagaagaagcttgtgttaacactgtcattatcaaagcactacgtgtaacagcaaaagacgaaaaacaacttgtccttctcaaggtctccacatggattcaatggaataaagaaggaagtatcttctgtcttcgcctggaatgttctccaagatacagcattttgacaaaccatttttttcactctatatcctttcgtgccttttgaatctagtaccatatgaaataactgttcaatggtgttttgttttactctgaattaaaaaacaaaaaacacagaaaaccacttctcaagagcatcccctgctcctataggccctgagttattgagaaaccttttttccttaatactgtccttcttccaatccgctggaatgacctgctcctgtttttctttgttcattcagtggaccagaagaattacacactggatccaaaggtggaggaggcctgcctgtggccctggaagagccctgtctacaaggaagatggcttcacacactgacaagtataggacagtgggcaagtgccccacaaaggcgtgacaatgtgtgacatggtgggaatggtgggaactcggaacaggccaaattctctcccaaggattaaagagaggacgacttgatcgaagaggtgacagctgaactaggcctttaaataatgagcaggaatttgctaaactccacagctgtgttcttctgagttctcaggcaggccaacctcggcagccctgcacatggctgaccacctttatttcttgaaatgctctctgttcccacttctcgaccgcacactctctcaagggctgctcctccgcagtctcctctcctaattcctcctcctcttgcattccccagtgatctgacctcagctctattcttttcctctttctacagtttccttacaaatcacagctactgccacagcatcaattaccgttttacttgtctgattcctcctttgaaagcatcagccccaaatcccactggccccatggcaacaatttccccaagcagctcactatcaacccctctcgcgtggaattcagtatctgcccttccaacccaacttcttctcctgcttccctatttctcattcttcccagtctgggagagtccgctgtattttaggcactgtgcaaagtcctggaaagactaaaatgagtaagatgcagtctctgcctccaggaagcaatcacctgcactcaagtccttagtgacatctttcttcctctcttgctgtgtccagatctcccttgtatatgcccatttgccttaccctgtggctgccccaccatacccagctcaggttcctgcaatagcttcccagagggtttctcttgcctacaatcctgtcccctccccagccagcctcgactctcccacccatgtcatctccctatagcacagccttcctggcctcctggctgctcaaagacctccactaggtctccacggcctgttttaggaagtcaaatacctcatccagacacctcaaaccctcatagtctgggcccaacctaacttttcacatttatcttccagtagttttctgcatatacctgtgcctcaagttttactctgtcctcagctttgatcatgtcatccctcctgcctgagatgccctctcctctgttgaaagccacacattcttccagggcctgactccaaggcaacccacatcacgaacctctgatgcccttaaccgcccagcagccatgctccttcacgcctgtcaatccccagagctgtgctccctctttacgtacttaacgcttccagccacaccgtgtggagctcctctacaccaggctccatctctggagggtgagcacgcgctccactaccatctgtcatagatgaacgaatgcaacactcagaaagcggtgcgggaaaccaaaaactggctctgaagggcctggtgctgtcaccatattctctctgagtgaccttcccacagagctggcttggagagccaccaaggagaagtcattctttagggtcagagagcttgctgctcaggatgtcttcctctcctctgtcctgattcactctcgagtattttcaccagatctatctgggtctttctcccaccgtgccatcacaggctaaaataacccaaagccatcatatttgtcttttccaattcaactcccaggacacccctctgccttctacctttgtaatggcccagagacactcacgttcagggatggaagcattgtgcaggttgttccctgaaagccgggcctggaaggcagaactgaagaaaccgtcaccagggccactgtggggagaggaagagcagaagagagtcaagttaaaggagtgaaagtgtgatttcccaggagcgctgggaagagctctgctcagatagtttaaggaaagtagaatcagatcatgggacagaggtgggtgatggagttggagaaactggggtccaaatcccaactcagccacttactagctgtgcgaccttgggcaagataaccttgtttagccttagttcctcatttataaactagagatttaaagaaaccaagagaagtcacaagtgattctgattaaatgagataatgtgtacaaaatgcggaacacagttcctgattctcagtagctactcattaagtgggagctgttgccgccggagttactgttattgttacactcactcctactgcacatcttattgtggcctatccttgctaagtacaggggactctgtttagagataagggacaatttggctataacgaaaatagcttcttccttcaggttagggtgctggcctttctgagcccttagcatatacccaaaggatagaacatagcaggaaagaaacaggaaaaagcccctggggtccctcacctatcattttaaccacagacccagaaaatcatccgacccctccacaggcttaggagcaaaaggaaaaccagaagcaagatgctgcaaaggctctgtctgtaccttttactcagcaccatgaagtgaacagcaaaggtggctgtatagagagccaggggcagcactatgaggcacaggacacgagcagtcaggtgttttcccacagtcacctgcaaacagaggccagcgtggggtgctaggcatgtgagacctcattattccttaggcactatgcatgcattatatatagcttttaatatatcagtcataatcataaaaaatggccaagaggagagagaagaatatgtggaaaccctaagcctttctgtaacacccaccacccaagcactacacaagataaacatgggccagccctctgctacctctccaggctctacacccaaaaccccaggatgttactgtgccaaggacaaggcacctgcatctgcaacacagttgctcaccagtccgctccatgttccaggtacactaacctccttgaactttcccagtgcttcctctactgtcccagcccaacccatcacatggctaatggctccttatcttaacttcgcggcttccttccagaggccttcctggattgcctgggactggccgagtgcccttttctgtgctctcccagcactcctggctgactgtaactgcctgcttccttatttctctctctccattgaccacagagggtggggaccatattatattcatctgtatattccagcacctcacacacagtggctggatgatctttacacattttctgaataaatgaatgaatgaatgaataaacttgttaggagctggtttggaggtgatggagcagcaccacagcagagtgatggcctggggccaacctaacctggttgtgactcctagatacacctctcactccccgatggcctcggggaagtcattacctctgtaggttttgatttcctcatttgaaaatcagggtaataactccctacctcataggactattatgaggggtaaatgagataatgaaggtaaagcgtttcgcatagtgcctggcatagaatcagcccttaataaataataaactgtaaaggcccttactggcctccaaatatggagaccgtgggtcaggaaatgaaaattgtgagttcagaccgggctcggtggctcatgcctgtaatccccgcactttgggaggccaaggcgggcggatcacttgaggtcaggggtttgagaacaatctggccaacatggtagaaccgcatctctactaaaactacaaaaattagctgggcatggtggtatgtgcctgtaatcccagctacttgggaggctgaggcaaaagaatcactcgtacccaggaggcggaagttgcagtgagccaagatcggcccactgcactccagcctgggtaacagagtgaaactctatctcaaaaaaaaaaaaaagacagacattataaaacaaatgcaaaaagagacttccaagaatgttaatctatcctctcccttgaaccctatccagtcctcagccgggcccactccctgatgtcctgctgtctgcggaggttggggggtccagcccacctgggacccagaacacagccactctgccacctgcagtagagacagagaaggccaccagctcctactcagcaacatcagggagcaaaaacatttccacagcaaacccttgggtgctcaccaatgaaagactgaggtctccgaacaggtaccaaaggtctgcaatggtgttcagccccacttgaaggatgataaagaggccaacaaacttgacccctaaagcaccagcaagactaacgccagtcaggctgagccagaaccaccagggggcagagaagggcctgaaaatcaacaagacggagttcaatttggcagctggaaccaaagccaaacgcaagcgcagcaggggacagggcagttctcagacttggagcggctgtgctgtgccctgtcttgggggctcttagcctcaagggaccatggcgtggctccatggaggaggcggcctgtgaaacccctggaacggcaggaaaagcactgtctgagggcgcagggtattcttcaggggagagtgtccatagtgctcctggctaagtacagggctcagggtaagtgggggctccttcttcacaagtgaccagtcaggcaggagtaaaaggagaatccttaggtgcccctggactcaggcagccctctcctttgtgtcacctctgcccttgtcgaaggcagcatttaccgagtgcttactatgtatgcgtcacgcatcattccaagtacgatgcatatattaactcttctagccgtcactacagcacacagaggatcctgtcactaggtcctctttttgcacaggaggaaatcaagatacagagaggtggagtaatacagctagcaggcagtggggcacagttttaacccaggcaattgggtcaatgttagtgctcttaaccattttgctattcgtatagcacctagtactctacactatgattctctggctctctggctgcctcctctgccagagtgaatattccttaacagccaagcccaacagagctcagtacctccagctccccgcatagtacctggtacacagtatgtactcaagaaatggtagatggaagtggatgtggcataagcacaacaaccaaagccagagtgggctgagagtcactgatcaggtttgattagcacaatggagcttaatgagcctggctgtgcaaagttaacttccagaaaagcctacgaggggccaactcttctggtttgaatagaatgaatgacttattctactttctcagaagtagaaggatgatctggaaaagactattctgcaagtagaccggaccctccaagtcagctttagaactgaccaggacctggaaggatcctcttggctggtatggaccattcaagccaacctttacatatgctattcccatcattaggtcaggactggatgcaaccactgacgaaagggagatagtttccaggcagcatctaccctggtgccctcccttctaggacagagtatgtgaaggacagccctgtcccgggatttcctaaccagcactggttacaagaggtgggtggggaaagtattaggaccccccatgatatcccaaaacccctacccaattgtactccattgtaaacatgataataataatacgcttgaaaaagacaactgacattttctcggtcttgaatatggcaaaaataaaatcacctgtagaaaactttttaaaatctatttttatgatctaaaatggacaatctaagttaaaaaaacaaacaaaaagtatgcttgccttaaaatcagcttcaagacaagtctctgggcacccgccctggccctggccattacagaaattttggagttgccacagcttccaaccctcccctcccggggatggagtttctgacctgtcggcgcaagagttgtacttgaccatgctcagcatggcagccatgatgaagaacatcaggatggggtcaaggaggatgtactgggacagagtgaggcatcccgtgtctgaaaaacatgagctcgctggtgaaaaagcgaggtaagagaagggccccctgaaaaccaagcaccccagtagtaggaaacagtccctcttgccacttaattgagtgtaagcacttgtgcagtcaggactagagtcaacactgagtcatcagggaggtagaaggccacagctctgggagacatcaaagcccaatgacaagaagcagtaactcacactgcctctaggccctcaacccaagagaggatcatgtcattcgctccctcagaccagccctgagacaaggtgtcatcctcatttccaccatcaaaaagggagtcctaccactctgctcatgtaaccgcaaactatctacacctatgatagaatcttatcattttacatgaagtctctcttgggggtcgattctccagacagatggcagagtgatgttttttaatttaaatccttaaatctcattatgtcatgcccctgcttaaaccctccaatgtcttccaacctcactcaaagtaaaaagttctcatgacaactgccagagtctgtgcggtctccctacccatctaacctcatctcccaacaccctctgcctcactcactctgccctttccacgccagccttcttactgtgatttgaacccacagaggtccacaccagaactacagtacatgcacttccctctgcctgaatgctcttccctcagatccctgcagggcctgatcctttgtctcactcaggtctctgctcaaagctcccctctcagaagctctttcctgactatcctgtctaaaatagtactgatctccattattccatcccttacactgctttattttctacactgcacttgtggcttaggacatcacatgacagacttattcatttacttgtttatttactgtctgccccacgatgaggtaagctcaatgagaccagagtgactcatcagtgtatcctctcagactaagaaaagtggccgggagctgggtaggtgcttgagaaataactattgaatgaaaagtacataaatgactaaatgaatgaataactgaagatggaaattcaagatacaaggaaaaagccaccagtcctctatagagaaagccaataatcttgcaatctatctgtcaaaacaaagcaacatatctgtcaaagcaaacccctaaagtaccccatttaaattggtctagacttctttaaatgttaagctccacaaggtcatgaattcactttcataggaacaaagctagcaacaggatcaacttctacgatgaactctcatttatccatgtgaagattattatccaagttcccattttgctatctcttgccacccagctacttctgcatttacctttatattcagttgaaattagttaaggaatgcaaactaatcttaacttaagagaagcaaaattagaattataagcttccttcaaaaacacacatactcacatacaaatctatcttattacccattccaaactcaaccgtgaataacgtggaggtaaatctattccttgggattacccacgccgattctcccctccaataatataaaggcttgttatatataactattgatatacattaagtattactagtgaatgagatttgtagtacattttacccaatcctaaaattaattgaactggacccacatatagggcccttgaatgtactgattttcagctacattcacggagtggcagcccatttcccaaaagccatggtatggctaagacaacttaccaaaggtgaggagggcagctgtgagcagtgctgccgagagggacttggacagatccagtacagtgaggtaggcaaaggggaccagccaggagccaaggaatgcacagaactgtgggaggaatagagaagctgtcaaataacaagctgagctaggtcagcgacctactggactcagtacaacctaacatttaagacaggggacctgatgaaggcatgactttggtgacctaaagtcacctaggatatctataactaagaaaagagtattgtaatagtgaagagccaaatcaagcaatatatatgttcccattaagcagcaacttgtgcactgacatgaaatcagcaagttcagccaggaaggtgtgggtaggagacagggagaaaagcaaccaagtagctacacaccaggaatagagagaagggaagaaaatgagtgttattaacacacagatagtaattgatagccattagcttctattacacaactgtaggtacaagttgagaaagacccctctgaaggtatttcagagaattttaaggaacccctagttcttttcttcatttacaccagaaaccagtctttaatctacacaatgtatgtattttgattttgggaaaagggattgcttgatacttcagtagctggatacctgtttggttttttgtttttttaagctgctggccctcttccatcccctacctgtccatcaaaataaacagacaagccagaagaatgggaaattctcacgtttggttgtcacatccaattatgtatggtatgtggtgttcaaaagttattaggaagacacagaatcacttaagaacaagaacttgagggtaggatatactccttgtttaatataccacgatatagccatgcaaatcatctaacgatgaggccaaataagcacacagccatttatttaaatgctgtgaaatcctcaaggaaaggggcttgtaaatgcaaacttctctgagaggtccacactggaggtcagcttctgctggcttcattcagccacacgttcaaggttcccaaagagttgggtgttaaggccctgccatgttccatcaaggctggtgctgtaaatcaggacacagagggactgcagcagacatttggcctcccttcaaataaggctggaaaactctttctgtgtgcctgaaaccttcatggggaaagacacaggaacatggtgacagggtgtggggatgccaaaatcttcagaaaaggctctgagatgtaggcaacactccagcagctgtggctgtgaggggaggagcaggcagcgtgccagtgcatggaggcactgctggggctgcaggagactcctgattgcccgggttccaggctgttctccaacctgaggtctgacagtataccggggcagggcagcaggtgacaatgcgtgcctgcttctatctatgtcatctctgtattatttgcagcctcctcttcccttcttcctcacctcagttctgagtatctacaccacaggggagggtctgatcatcctcccctctcctcaccacccaaagtccctttatttgcacctgccaccacgccagggctgctaactataacatttctggtttagtgtggccccagggttcagtcagtccatttcaagtcaggaagccttactcctctcattcccatgtagctgtgatgctcatatttatccccaggcttctggaacaaaaaggtaccatcatatccactcaggtagccagcaagacctatcagcatctgaggagagaagaacaaacaaaaagatgagaagcctttgggagaagattcctctgtcctctgaacttccctccagctgcacccacagactttgggttcccttgacaactgtccatagaaaatgttgccaatgcaacattttctcctgcagctgccacagagcaaagaatcttttgtctacagagctcactgcttgaaacaaatcctctcttgtattatggccgaggtctaggaacagcacaacctaaacactcaggaaggaaaaagagccccacaatttgaagggtagagtcagtaaggggctctctgattccgctttccttcagatggtataaaataaaacacggcagctcttggacagaggctgattcctggggaattggccttttgaaaggaaagtgagattccaagtcacagtgagagagaaaagagaccaaggagctacataccaggaatagagacaagagaagaaaatcagacagaggaatgcaaagacagatgctttgcccagaggggaagagaaaaactgccaaaggccagaggctggtttctcccattcctaatattccaaaggagggcatccttggtacctcccaagccagaacaaatcaattagaaactgagactgtgagtcatgaatccttcaaaacctttgacaagatcggccgtgtcttttgtatatttccttggccatcaacattataaaattctatttttcacacaagcaatcagaagcagctgaagtataaaaactgctggcaaatgccaaccatctgggacagccccaggctgctccagcctgacccccgagctctggcaggctgtgttgggggagggaatacactggctgtgtggggaaagtccctcccagccacacttgtgggacatggatttagactactaaccaacccacttttttctctaagtagttctaaacagagccagtctctatagctccaggtcaaggtatagaagccaaagtctggcagtaaaagacaacaaagacttgtttttaaaaaggaaggcagggaccccagggttcagacagggtcatccaaatagctagatgaactaaagctgccaagtggcaatcaaatggatccctcttcccacctgggatctcgcaggacaagctcgcctggtattggtcatacatttccagactgcttggctggtctagagagaagaaatgtacagatgctttggatctcagtaccctatattctagttctctgatcacggacaatatttagtatctctgagctataggtaataaaaacttcctcacagggggcatgaggattagaggtgctattaagtaaacacctaacactataccaagcacttggaagacactcaaaattcaattctctctcagttcccttaaggttaaaagtagccccaagttaatttcttcttttttttttttttttttttttgagacagagtctcgctctgtcacccaggctggagtgcggtggcacaatctcagctcactgcaacctctgcctcccaggttcaagcaattctctgcctcagcctcccgcatagctgggattacaggcatctgccaccacgcccggctaatttttgtatttttagtagaggcggggtttcaccatcttggccaggctggtcttgaactcctgacctcatgatccacccgcctcagcctcccaaagtgctgggattataggcatgagccaccacgcctggccccaagttaatttcttaactaaacaactctttcaaatcaatagaaaaaaaatgaattactagaaaaaaatgacaaattcatagaaaacaaaatacaaatggctaacatatgaaaaaatgttcaacctaactcatacagtcatgcaaatgaaaacagtgatatgtcattttttactctccaattgacaaagtttttttgttttttttttttttttgagatgaagtgttgctcttgtcacccaggctagagtgcaatggtgcgatcccagctcactgcaacctccgcctcctgggttcgtgtgattctcctgcctcagcctcccaagtagctaggattacaggcacctgccaccacgcccggctaatttttgtttttttagtagagacggggtttcaccatgttggccaggctggtctcgaactcctgacctcaggtgatccgcccgcctcggcttcccaatgtgctgggattacaggcgtgagccaccgcgcccggccaacaaagtttttaaagtatgatcgtaccagtgctggcaatgatgtggggaagaaagcactgtcatacactgttggtgggagtatatatgattacaacatctttgcaggaaaacttagcaatatctaactcaattttaaatgtgcatattcttcgattttttagcttggctgctgggaatttttcatatatacctgcgcaactatacaacgatatatgtacaaggatgttcactgcaatatcttttgtaatgactaaaaactggaaataacatacatgctgcccaccaactgaagagggataaatacttacggcacatctacataatagaatgacacacggccattaaacagaatgaagcgcatcttcatgtgctaatgtggaaagaagatatatcatgtttcaaacacaagctgctgaacaactgtagacttatcccatttgagtttttaaaaagaattgtgtgtatatataatgtgttgttcatgtgtacatatataaaaacatacacgcttgtatttgtataaaagaattcctagaggaatgtaagaaactattgacaaagatgaccgtggttacctctgcggactagaaatgtggtggatgaggcttctgaccctgtacttccttctgtctactacgtgcaggcttttttatgttttaagttcctgtcttatgttttaagttcctgtttaagttccaggtgcccagggttggtaggcaatgtgaagtggcaggtcttggcctcagtagcaaaggagaaaacttcctgcttgctacttggaggggttttgattccttgactggcttggcctcagaacctgcagaagctactgcaccctctcacaggtttccagtttgctcatcactctctttcaaccagacagaacacagaaccatcaggagctaaattaggggtgcagatgggccgcattccctgagggcagccttagaagcctcacacttctcccttcacacgggcaaccagatgtgaggaaggcaaggctttgatataatattattatatttatttatttatttatttttgagatggagtcttgctcagtcgcccaggctggagtgcagtggcacgatctcagctcactgcaacctctacctcccaggttcaagctgttctcctgtctcagcctcccaaatagctgagactacagacgtgtgccaccatgcccagctaatttttgtatttttacgtggagtttcaccacgttggccaggctgggctcgaactcctgacctcaggtgatctgcccacctcagcctcccaaagtgctgggattacaggcatgagccaccacgcctggcctaaggcttaggtaaattaaacaaatcagccagtcctgtgcacatgtccacagtgcgctgagaaccaggaaaactccaaaaaagaacgggcagtccccacagaaagactgggctgggtttcctatgaaaaatcttcatcagaaatctggttcccaggcgagctccatgcaaatactcaacatgttctgttgtttaattctatggtagtaacagatgtagtctgaggagtgagccaaggcaagcttgtgaggcactgtggtgtcatgattaagagagaaggctctatgccagcctgacccttgaatctgccacttactagcttggttccctatgacgaactacttatcttccttcagttccccatctgtgtaatggggatgaaacaatacctactttataaggttgttctgaggcttacatgagataatgcctctaaggtgactagaacagaataaatgtttttaattgttcttgttattgttgttatagtataaaagagataggaagaggcataatatgttctacacttttcttgggctcagagccaattttgaaataggctacctgttctacctcgcttcccatccctccacgctgtagggccccctgctctcatgcttccttaagcccaaccataggtgatctttgtgatctttgataaaagattacactccctgcctcctcctgccttccctgctcctgcctttatcccccaagtactacctgctccaagatccctccccacttaatcacaggaaaattcctgtccccttggtgcccaagatctaagtctccagttaggaagaaagccttgagtgaattccagggctaatccgagagccttctcagaggtttttgtttttaaaagactaaaatgggccaggtgcggtggcttgcctgtaatcccaacactttgggaggccaaggcgggtggaccacctgaggttgggagttcaagaccagcctggccaacatggtgaaaccccgtctctactgaaaatacaaaaattagccagcgtggtggcgggcgcctgtaatcccagctacttgggaggctgaagcaagagaatcacttaaacttgggaagcagaagttgcagtgagccaagattgtaccattgcagtccagcctgggtggcaagagtgaaactctgtctcaaaaacaaacaaacaaaaaaagagtaaagtgaattctaattggttgaatttctaatggtaaaacatgtgagagaaacagatcaaaccatgtgtatgctgggcatgggaagggagaaagaagtcagccccatatggatatcagcctcgtaagctatttctgcttcatgcaatgtattcctatttcttttttcttttttaaaattcagacaaattcacataacataacatccaccattttaaagtgtgcaatgggtggttttaagtatattcacaagattgtgcaatcatcaccactacctaattctgtaacatgtcatcaccccataaagaatccccacacccatttgcagtcactgcctaatcctccctgccctgagatcctggcaaccactaatctactttgtgtctctgcggatttgtcagttctagatatttcatataagtggaatcacagggtatgtaaccttttgtgtctggcttcttccatttagcatgttttccaggttcatccatgttgtagcatgtatcagaacctcatccctttttatgaccaaatattattccaccatatggctgtgccacactttgttcatccctccctcagctgatgggccctctttccatttctgagcccagaggacccttaaaaaacaccagagattttccatgaaagtagctggtctgaaatgtcagaaaattctttctacaagtcccaaattctttctagaagccccaaatccaaaatcaagatgtggctccagcccttaggaacaatcctctgggaccagagagctgctattcaccacactgctcacctttcccaggggcgggtgcacatcaaagaaaaatgtacggttgatatagtaacttcccatttttccaaagtgagtctcatcccaactaaaggaaacacagaaagagaaacaagaattttaaaattatcataaaatccaaatggccttcataaagcatggttaaaattaaaggctatgcatttcaaacaattaatgcaaaagtctggatttaaaaaaaaaatattttgacacaagtgattttaggaagaaagacatcaagctggccactggtcttcatttagatagatgagaaaggcgagcaaatattcactagccagttaccaattgagttaaatatacatatacttactctgtatcttgagtttctatttattttaaaaggacaagatgttttctcataatatggaaaggtttgtagtaagagttttcttctggccgggtacggtggctcacacctgtaatcccagcactttgggaggccgaggcaggcggatcacgaagtcaggagatggagaccatcctggctaacatggtaaaaccctgtctctactaaaaatacaaaaaattagccaggcatggtggcacgtgcctgtaatcccagctactagggaggctgaggcgtgaacccgggaggcagagcttgcagtgagccgagatcgcgccactgcactccagcctaggcgacagagtgagactccgtctcaaaaaaaaaaaaagttttcttcctatcttcaagtagctagtgtaaacaaaaatttaaattaaaaaaagtttcttccaagtctgctaacttctgagacaacatttgctattagaaggtccattacgacgctgttgggctgctggtcagagttgagtctataaaccatgagtgtcacaggagtctcattttgctcagccaccctgtgacaagtaagctgctaactgtgatctggctgatcttatactaactagtatataaaagttgaaggctttcttactaaattaagaccacatctaaaacctatcctcattgcttaagttattttgcaagtaaataagtgatttgaataaacaggctttcaaacacaatgcaaagtcctcttttatacaaccacatacacctttctacaccatacatgagggctttgggaacgcagccaagtcatccagcagagcctggccttttctatttgtaattttctccctgtagctcaaaagaagggttactttctagtagtcatcaatccccaggtcatgagcagtcattattgacctactacataaggggaaaacatgctttacctaagaatctaaggttctttttatatcttacttggtgggtccaagataggcaaaagaataggtctatttcagcatctgctaaacaccttgacaggcagtgaggacattggcatggtgaggtcgaagacagaaataacttcaaagcagggtaatgaaactgatttgcagaaagagagatccagtcccagctccaccactaattaatggcacaacccgccaaaatcacttattctctctagtcctcttatctcatctacaaaatgaagacaataatattatctgccctgcccacctcccagggaggccttagggctcaactcagataacacatgtgaaagaattctgtagattataaagtaccatccctgctgggccctccttaaactgtcctgacatttgtggttagtttttaaatctgtttgggaacatactaacaaaaggattccagtttttttgttttgttttgttttgttttgtttttgcttgttttttgagacagagtttcactcttgttgcccaggctggagtacatggacacaatcttggctcactgcacttttcacctcccgggttcaagcgattctcctgcctcagccttccaagtagctaggactacaggcggccgccaccacacctggctaatttttgtatttttagtagagatggggtttcaccatgttggccaggctggtctcgaaactccaaacctcaggtgatccacctgcctcagccccccaaagtgctggggttataggtgtgaaccaccgcacccagcctgggctccagatttttacttcaaaagtttcccaagtaaaaccagttgtaacattcatatttcctcctggcttttattgcttgtgttaggagagacagtcctccgtggctctcttgtgctcctccaggccttgcaaggtatgccaagaatgctgtttgcagtaaacaaccttgagggaagttagtgtctccctctgagacagagggctgtcttgtttattgcttgccataaaacagcagattccctaagcttaatattactcagctgtgatgcaagctactgcatgtgcaagcattcatccagtccctcagcaccacgtgggacttaggggcaaaggaaactgatgccaacatgctgatgcacatcccacttgctgtgccatgagaaataaagtcctctgtctctgacccaagactttgtcttctgtcagcatgcaaaaaacagtgacaggctaacttattagctaataagtaggctaagataaaatcacagcccctgacagtgtggagacaagcataggatgaggagagacatagtctttggtaagagaaagaatgagggcctccatgggcaggcaatggggtagtgagagtcccccactgtcccactattagagaggctgatggaaagaggtaggattgaaacaagccactgaatgtcaccctggttactgccctgtcctctgggcaaaaggaggaagaggagtgatcatgacaatggcagcaagcccagcagcccctgccaaaaggcaatatggatatggctgctcaatcaacaagtctccaacggtgcggcaataggaccctgctatataagatagaactttgagtaaaatgaaacactgaaagatccttgggggagctgtgtactcaagccaaaagtaaatataaatatgacttgctttgtggctcggagccactctctccctttatgtcccaggatccctcccactctaccacaacctcagctgcattaaagactgagatgattaaaggttgggctgaggtttccatgtccctaaaggggactgaaggtcatacacacccatcctagtatgctggagagccccagggaggagaggggcaaactcagggctctgctggatatgaggtcccacatctccaccctaccatgtctcatggggggaaggatgtactacacacagaggttactgcagacactcaggactgcagggacagccatagcagtgcgcacaaggactaaagggaaaagggcccctaaccctgagggagcgacactggggaggtcgtgatgcaagcctagtgaagagctaaaggagcagaaaaagcttctccccactccctgcagccagcaccgccacactctccgactgggaaatggcaaaatctctggctggctgtcaccatagcccctgatgcaggccttctagacgcattagttcgaggggaaaaagtgtccagattaaactggtaatgtttgagccacgctccctgtagggaagggaagttaaagtgacattccaggcagagctctttgggcctcttcaatgtactattcctgtggcttccagtgctgaatgtatagctgatactgatcccataagtgtcgaagaggattatcctgggcaagggctgctgtgtgtagacaggtgatcctgtcctctcctggtggtccagaagaaaaaaatctacatccctggaagggaaaggaaataaatcacaggcttaaaaacttcgtggcggctgggtgcagtggctcatgcctgtaatcccaaccctttgggaggccgaggcgggcggatcacctgaggtcaggagtttgagaccagcctggccaacatggtgaaaccctgtctctactaaaaatacaaaaaggtagccaggcgtgataggggcgcctgtaatcccagctactcgggaggctaaggcagagaattgcttgaagccaggaggcagaggttgcagtgagctgaaattgcgccactgcactccagcctgggcgacagagcgagaatctcaaaaaacaaaaacaaacaaacaaaaaacaactttgtggctgctggagtactgagagccatgcaccagaatcacagtgccacctgctggacataggtaccaagcacaccctttttaaaaggacagctattaactccttagttaactactcaacactttgaaattgattgccagacccataaaggcctcaggactccctggcctagtattcccactttggggtgggtcaatgggaatctactgataacaagggaagggtttaacaagcctcactgatcctatggaaatagtacattcaagagtacagctggtaatcccagctattcaggaggctgaggcaggaggatggcttgaggtcaggagttcaagaccagccttggcaggatagtgagaactcagctcttaaaaaatctgttttaattagctggacatggtggcacgtgcctgtagtgccagctactcaggaggctgagacaggaggagcccaggagtttgaggatgcagtgagctatgattgtaccactccactccagactgggcaacagagtcagatctcatctctaaaaaaaaaaaaaaaaaaaaaaaagagtatagctagcctggccctagaggcatcttggttttacgtgaagaagtggcagctcccactctgggagaaacaaccttctctgctacctgaagccgagctgctgttcagtagggcccttgattcacaggggttcctgtaaatgcttaggcctggctcaccaatgattaggctgagttaaaagctgatgttgcccaccaagcagcagcaggcacttagccccaatgataactctggatggctgatggcagtaaggattgaagcatttggtatgccacttggaagactaaatactgagagatgaaagctgagaagtgtggaaacacatcatggctgcctgccaataggacagactggatcactcacgtaggtgcccacactaagggcaggtactctcgtaagactgactggaatcaaactgctgatccagcctgcaccaccaagactgctgccatagccacctggattcatgcaaccggtgtggaaacatctaccatcatgggctaggcacaacgtaagggactacatgtttctgaggcagaagccaccactgcgtgccagacttgtgactcctgccaaaagttggcctgcttgtcttgcagtaaaggaagccacattgcaaggggcactgaccacacctgctcctgggagattgacattaggactttgttcccttctctaggctctcatcagtaccttgctactgctgatactttttcagtttacagtgctgatgttgcttttccagtccaattatctgactctgtgtataccactgtggcccttgaaactaaactgccaggttttctgctttccaaaccatctacagtctgacactggcatatctttttgtcgcaatggccacccaacagtgtcaacagtcaatagccaaggtattcgatggacctcccacactccctaccatccacaggcatgacattgtcaagtactgaacagttccctcaaagatcaactcaaaaagatttttgattctatgtttttaacctcctcctggtctgcaaaccttactgaagcagtttggtcacctaaggcagccattctcagaaatgggtcatctccttttgcctaccaactgggtaatgatcaggaaaaaggggtggagggttatataaacctattttgaaaatgtgagattctcccctgaccatttctggccatgattcatctttcttcccccttacagaaagcccagatcagctgggaggaggaggctatctatgtaattcagacttaattctagttcagtcactagattgtcttgttggaatggcctggtgccagaacataaagttaatgatcatttggttgggtatagtgcttttaaagtccccctacagtggcccacatgtgtcaaggtagaagacataatgggcctctgtcaattttctaacaattggatattagaaggcctgcgtattggtaggggataaatggagaaaaggtgaagttatagttactagggtaggacacactcattatgtagcaatggaaggaaagaaacaatcctggcatctggggaaggaacaccacaggaccctggagatgtaaagagaagggaaacaatgttctctttgtccctatccagcaccaaagcctggcaaacattcacatggtccatctaggtcaagcagcaactgtggctggcaatctgacctgtggctgagtttgtcatctcactatgaaaacataaaaactttatctagcaggtcagtataaaaaagaaaataaaaaaagaaaacaaaaactcacatggacacggccagtcttgaactattcccacgtgcctgatgacatcaacaccaactcccaaacgcagacctccctcataggtgtgcaaacacacagatcagcaccaccttctatcaatgcggctgatacaaatcacatgcttctcctgagatcctaagggccttacttaggttatgccttgtctagtgattgaggctgcaactgttcagtgacactgcccatgtggtttaaaccactgtaatggtaatcaaatttgatggtgatccaaataaaaatctaacaaaaatcctggagtggcctgcactcctccaagtaatatgttagtgtaaggaagaatgggtcacaaaatatctttccattaatcatggtagttaattttttttttttttttttgagacagagtctggctttgtcgcctaggctggaatgcaatggtgcgatcttagctcactgcaacctctgcttcccaggttcaagtgattctcccacctcagcctcccgagtagctgggattacaggcacccgccatcatgcccggctaagtcttgtattttcagttgagacggagtttcaccatgttggccaggttggtctcgaactcctgacctcaggtgatctgcccgcctcggcctcccaaactgccgggattacaggtgtgagccactgcgcccagcctggtaattactttcttaaaaaaatttttacaagggtagtgggctattgtaattactggtaatgacaccaaagatcagagatcaatctgaacccctgtgcacaggtcacagtggttaatagactggtcttagactgcagcccagatgtctgaaataagattcctcggtgcccccaggacttattcacaagtggctgaatccaggaccctggagggcatggttgaggtaaatactgtaagctggccttattctgctgcttagagtcccattgacaacaaccttaattaaatgctgtaagggacaaactgaaaagatgtgagtagccaggggagttgtatattcatgtgaaaatctgctagaagccaagaccatagaatcgaggagtgagagaggctgtcagattgctcgtgcctctacacatcattctgggtataccaagaatgcaaggccctgactgcatctcacctgggccatttctcatggttgtgtttgcagcaagcaactttgagagaagaggcagtgtctccctccaggacaaagaggaggtctgcgtactgccttctataaaacagcagattttccaagcttgtcgttccttcacttggatgcaacccactgcctgtgcagtcatccatttaaacccatagcgtcaccctgtgggacttggatggcaagggaaactgcttctaacatgcatcctatttcctgtaataaagtcctttgtctctaacccaggagtctcatcttctgccagcagtcacgacacaataacaagctaatttattaatttctaaataaagcaaccctgacagtctgttttcttgcctgctttttgcttaaagaattccatttctgacacccagtatctggatagtacaagctaaaacctttaagaaaataaatctcttctcacaagaagagttctgcctcataaaatcctttggtcaccatacctgaacacccaaactgtccttgccctataggataaaggtacacagttaggtattttctcctctgttgatgcctgaaaatcctgcagacataggaactcaggccttagaaaattctgtacccaaaaatttgcaattctctttggaaagttgaaagcacctttaaaagccacaatttgcaagccaggtgatgcactgtagcataacctggaagacatgagggctgcttcctcagatactaagaatcccactgccccaccaccagagcaaaacgatccccctcccagagaatgcacctcgccagaggccaacccacccgatacctcaagttcccctccaccgtggccctcctcctatagatcccgccccctccgtaccctcgggccaatcagagggcggcgtcccgtcgcggttgccatggtgcccgccgagtccctcccatcactcaccagatgtgcggcggctcgtccaagcggtggaagcgggtggcgaaggacagcagcgtcaccaaggccagcagggcccaccagccgaccgcctcgaagcgccgtgagccccaagcaggccgtttggggcttcgcgccacagcctcagcggccacgtcccggcctgcggccctagcagcctgggggccacagcggcccctccggggacgcagctcggactctgccaggcctccgcccgtggccggcggcatcttccccctcctctgggtcgccctccggcccggaggcacactttgtctgaccagccgccccgccaaggagtcacaagagggcagctcggggtaccccgggaaatgcaacgcccttcactgcagcggagcgcggggccccgggctcggggcggggcgggcagcgtggtcgcggcccgggccgctaggaggcggcaggaggcgcagagcatgtcgggaccgggagggccggccggcccggggcgggggggactgggcaggaggggtcgggctcagggaactgcaactcccagcagcccccaggtacggggcgtggcgggagagctgggcgagccagaggcgaccggaaggatctttctagtccagcccctcgctttacccggacgaaagacacgggcctgattcgtcgagtctcactgagccttagtcgtcggcaggtcccaggcgcgaagtttctcggcctggaggagggggtcgcgcgaagtgccagatgcaggcggggaaggtctgtgacgcgcacccgggtggagggaagctggttagacacctggagaccctggggggcggggtcagaagtgagctgcaccgcccgcccaggccgacaacgactcccggcatgcagtgctttgcgccgggcacgctctgcgcctgcgtgctgcgcgctgcccgctggggctcgaagttccgggagggttgggccagaggaggcggtcctggtagggagtgcgtagcagggtggagtcgctgtccggtcgcgcttcacttctgctccgccctccctgctccccataacagacccctccctccactaaggcttccaaacgtcgccccaagcctcccaatttctcgcagcccttcatgctcttctcttggccctagcaggaggtgaccttccagtaatgtttgtattttaagagtccccgggccgggcgcggtggctcacgcctgtaatcccagcactttgggaggccgaggcgggcggatcacaaggtcaggagatagagaccatcctggctaacacgatgaaaccctgtctctattaaaatacaaaaaaattagccaggcgtggtagcgggcgcctgtagtcccagctactcgggaggctgaggcaggagaatagcgtgaacccaggaggcggagcttgcagtgagccgagatcgcgccactgcactccagcctgggcgaaagagcgggactccggctcaaaaaaaaaaaaaaaaggccccgagcgaggagaggcagtcatgacaatcacctggggagcttcacggctttcacatgttcttcccggggcctgctccagagccactctgttcatctctggtggaacgggctcgagaatctgcatgtttttataagcggtctagatggttcttaacgtgccatgaagtttgagaaccacttttgtggcactaaggaaggtggcacgttagatgggactttgcgtcacgttaataatgtatagtcctccctcttccaaatgggattttaggagtctttttctcaaatcatgtgtaagacatggtttaaaaataaaatctgctaaagtaatcagaatgcatatttgaattggaaacacaggtcttctaggagtgctgatgagatggatacttgggcttaaagtttagttctacaagtgcagaaaggaacggggcatggtttacatagttatcactggtaagagaaggcagaaattgcctaagagatttcaggtttcctgcttgtgggtcgtgacggagggcagcagcatttaccatgcttctggtcactcgtagtacagatccaaaggtgtaatccaaaggcatttagccattaggtaaggcatttcttcagggattctaagctaattaatgtctgccacactctagtggtcaccagcagtccctgtcccttggcaccaggagtccctgtagcctggctaggtaaggaaagggagttgcatctccaaataaggaagatccagttgtggccacccaattcctcctcttcgaaagacactttctgcccatcacctgctttctgtgccaggaccatctttactttctccacaaaaggtaccttcaggacaggctgggactgctgggcttgggaaccatcttggaagggcctaggttcccacttacacccttgccatctagcagactgagttggtagtacagggatggcaatagcaagttcagagagcagcttaatatgctaggggtggcagaggggagagggagctttggtgaaatgtctatagtcagaggggtagtaaacagggcatctgagaagttctttcaagttctcccctatccatagggatacacatgttttggtgggaagattcatgagtgctaatcactggcgagtctttcctgggttccactttgaaatgctggctcccgaagaagtaccagagaaattaactttgagccccttaaaccttggagtagagatcgcacacccagctgcccccaagggcccaaaggtaacaaaaatgagaaaagtgggccagatatgggccatggcagacctgagagcgcatacgctggttgatgggggccattagtctgttcccatcaattgctgctatttaggaacccaaatctgtctccagatttttttaaagaaaaaaaacaaacaggtgttgtatataaaatatcatgatttttatttttattttattttattatttatttattttgagatggagtcttgctctgtcccccaggctggagggcagtgacacgatcttggctcactgtatcctccgcctcctgggttcaagcaattctcatacctcagcctcccaagtaggtgtgattacagatgcacaccaccacacctggctaatttttgtttagccatgttgtttcgccatgttggccaggctggtctcgaactcctgacctcaggtgatctgctggcctcagcctcccaaagtgctgggattacaggcatgacccaccatactagaatgaaatgtcctgatttttaaacattggcaactacttgaaacattttaaactactgtgttgagcaaacagaaattctgagggccagatagggccccagtgagctgccagcttttgacctcacctttggggtgagtgagcatatctgccagctgtttttatggggacagccgagagcccggaggactgctgggaggtggggttgaaggagatatgtaccaaagcgtcaaaaaattagaattccttgtcttgctgcattgctagaggatgccctgccatcattttagggcaacctttgttttacaaatgagggagccgaagatttaaaaaggcagaggtttgtccaaggtcatgcagagctggttcctgcaccaggtccagactccagatgccagctcccagcccgctccaccactcaaaatactgcatcaaaaccaggccacgctctgttggggggacaccaaacctggccccagcaggagcgtaagaaacttcctgcgagttggaaaaaaatgccttttttttttttttttttttgagacgcagtctcgctctggagtgcagtggtgcgatctcggcccactgtgacctccacctctcaggttcaagctattctcttacctcaacctcctgagtagctgagattacaggcacccactaccacacctggctgatttttttttgtattttcagtagagacagggtttcaccatgttggccaggctggtctcaaactcctcacctcaaatgatccacccaccttggctcccgaagtgctgggattacaggcgtgagccactgtgcctggccagaaatgccctttctgaccagagtcaaagttcccccaatgcctgggtagcccagcttccccattggctcctgaaatccacccctttaggtttcctttccctgctcagaagctgtgccagaggggacatttcctgggaggctgagggtcaccacgataccatgacagagtctggcaaggtatggaaggcactctcaggctagctgcccctttgggggcctcttggacctcaggagctcaaaccagcataattttggagccaagggacctcatgagcctctcagagagcttggagtctgccctgatttgcacagatgcaggcctgagagaggaggcctggcaggacaggaagaaatggttgactcctcccaagctggagcccacccagcatgggttaacacgcgccttcatcctctctctcctcagcccatcctctattcctatttccgaagctcctgctcatggagagttcgaattggtaagagatgtgcctcctccaggatgagtgctggagtggggtggactggggcggataagcccgggtgcaaagctggcctgggatggaagggttgctctgtcagagaggacctcacccccagcaaccagcatcccccggctcctagaacccccatccctgcatggcatctccaccccggaaacacagggtgagggtgggaggaagggggttgttttttcccttgggactgacacttctcccaacactgctctccaaagccccttggcaaccatgtttaaagcagggtcacaaaatccacatgcccctggtaactggcaggggaacagctggcccttctcagttcttattttatttgaactggcaaagcaaacagaacgggccagcatcagcctcggaggcttcagaaaagcagaaacaagggccctgtggctagtccttgtttgacccttccctcccttggcttaacacagcctttggcaaaggtcataaccaaagcagcctgtactgaggaaaagctctgtgctgagtgcttttgtgtgcctgattccatttaaacctcagcaaccctaggagggaggtactattattactgtccccattgtatagaggaggaagctgaggcacaaaaaacaggcaacattcagtaacttgcccaagatctttcagttactaagaggcagaactggaatttgaaccaggtagtctggctccagaggcccattaagttacttgcccagggccacacagttagcaaatgactgtgatgaaatttgaacccaagaagcttgcctccagagtgtggaggcaaagccatcctccgtgacccctcctccatcccatagtcacttggtatttgctgggatcagtaagcaagagcactgggtgccaggagaaactttcctccaagaagatgaacccatccctgggcgccagtacctctgccctggctgagccagaagccggagcaatataggtgctgtctgtacggcctgtgtgctttggccttccctcctccaggtgtctcctccagccccaaacactgtcactccccagactggagctgaccaacactaggaggagcctggtattgcccaggctctccacaccatgacatgtctggtcctcctcccctcattcctttgcccttccctgagattggccatcaccatacttgaatgcccaagtgtgtgtaatacacacatgcatgcacacgcacgcagtcttctccactagtgttgacccacccaagttttttttaccctcagcttgccaggggaaattatcaaaagggatggagaggaaatctggtgactggagtcacggcaaatgctctgaggccaccaaagagcctgatgcctgtctagaatctctagtaaacagccctgagaacagagagaatagattggaagagattcttctccaacagaacaagagtgccatctgtctgtgtgtgctgtgtgtggccacctgagctccttcccttggcccttagttgccttcttgagggagtaattgcatgtcttcaaccaagacactggtcaccactgtttaaggccctgggggggcagagttaaacacaacacagccttgctgaactccaggagcccacagagtgccagggcatacacctttatcaccatccagggggcatgagggccccattgggggggtccagatcttgaggtctctaagagttcaggggtgagtgaggcagagcatcgtgcatctggggtagggagcacgtggtgacaaggaaagctgagagaaggggatagtgccacggtgagccttgaccacccagaagtgttagagaagcctccccctctttggccttaatgtcaccttagaagggctctttcctttaagagtacggcgagaggctgttctttgactccgctatgtgcggtctctcctagctctggccttgaaaggcatcgactacgagacggtgcccatcaatctcataaaggatgggggccaacaggtaagaaggctgtgcccagaccacaatgtgggaattggaggccttgaacaggcaccaggcaggggaaaaaggggaggctctgccccagagaagtgaacctgtgtcttgtggactatcactgcaggaggctgctggctctcccttgtgggacaaggtggcaaggtgtgcagtagcaggaggcctgggaagggcccaggtccagactgtgtaccctagcctgggctctccagtgcctgaccctgggagggtgggtggctagtgggtccccaccccatactgggccctctggatggctgactagggtaggagctgccttggtggccacggtgtgagatgcagggaaagcccatagccaggctgttaggatgaagcctatggctcagcagcagctgggctttgggagactgcatggatcccccagggattaccctgggcctaggatttagggccttcccagggaagggagatgggggtgggtggcaggcctggggttctcctgcttgcttggctttcctctggccaactcaggccaggccacccagcccaccagggccttgtctccacagttttctaaggacttccaggcactgaatcctatgaagcaggtgccaaccctgaagattgatggaatcaccattcaccagtcagtgagtgcagggcctgggggagggccctcatgagagcagtgccctgaatgagagcgcctgacatctcttcctcgcctgtgtacagtcaaggtgcctagcacataggagaggctcaatacaagactcgtggggagggtgcgaggttatttaggaaaataagggaagattcaagcacatggagaaccaagttctgcatgataaggtccaaaaaggcttatagggcttgagctgagcagaagcaggggggaagaggtgtagtgatggtgctggaagaggagaaggaggagtttgctggccctgtcccctctggtccaggggtcctgggccctctccctgcctcactgctcccctctggacagctggccatcattgagtatctagaggagatgcgtcccactccgcgacttctgcctcaggacccaaagaagagggccagcgtgcgtatgatttctgacctcatcgctggtggcatccagcccctgcaggtgtggcacttgtacacttgcacccttgcacacctgacacactcttacactcacacattggctgtgagctgcccagtgtgggggcgggggtgtcaagggagggagggggattctcagggcctctgacctggaccatgtgaaagaagggggtgaagatcgcaatctcagaattcagccccccagcgggtcccccgctgcgttccgagaagctctagtttccaaggacgcatgtacaggtgcttggggtggggaaagggccagaatggcaggggagagactgagcaggccccagtccaggcctcctgcctttaaccagagcagcttccgtttcatctgtgctatctcagtcatatactgggatacttgtaggattttattttttaagtgtcactgttaaaacagacaactaagtattaaaaacagttcatctgtgccagcttctactctgaatgaggaaatagccccagaaaggtggagtgacttaggagtcccacaggtaggtcataacaaagtggggactaagtcagaatccctgcatgcctatgccctctacccgcatgtcgctttaacaaaggatgttggagcagacagacatctccattttataatgaggaaacagagggaaaatggctccaggggtgccaagatggagccaggctggaaatctctggaagccggtcttgtggacctccctcatcccagccccaccctctttcacactccctctcctcacaagggaccatgcaagggagaagtgagggagacaggcctcgagttgtgggcacacctgccacagccatggccgcgtcctgtgtcacatgaatagggattcttgcacatctctgacagaatcacgtggctttttgaggccactggggcagcctgcaaaggtggctgctgggatggctacctccctccaacctcagggcccttggttgaaggaaggggctcatggagcctgggggagaagggatagacatccagccaggggcagatgggaagtgaacttccctgagggggtttggcgaaggggtagcccccacccagctgtcagcgcaatcacagattttctttgggctgcacagaacctgtctgtcctgaagcaagtgggagaggagatgcagctgacctgggcccagaacgccatcacttgtggctttaacggtgagtcctcacctctgtgagctgccccacagtggcctcttagaggtatggccctcgcacacaggggcctgggtatctgaaccagcctcccaggctgctttgggcctgacagttgcatggatgagggcaggactggggaggcaatgggctgggtgggcatccagaccttagctccagcacttctgggaacctcggtccctgagcccacagcccttcatagctggatggcccaacttcagcttcactgcctactccagctgggaaaccaaggccagcacagcgccagccatcagagtgagagctgtcaccgtggccagtggcagggcttgtccactcgagtggggaaatggtgattgtctgtgcggagcctcaggaaacagcagctcatccctaacagctctctcgagacctggctgccacattctcaccagcagccatgcccagtctgtcactcagttgggcgcccatttcataactatggaggccaaggcccagaaagctttgtgtcccctccctgcgcccagaataagatgtttatgtggcctccccacagccctggagcagatcctacagagcacagcgggcatatactgtgtaggagacgaggtaagctgtccccagacctccccaggcccagccacagtggctgcctccctcatgctgacctccctcaagctcagagcttcctgagaaggcgtctgcagggggatctctgtgccatggggcactcctcagctcactcccactaaaccgtcttaagagggagttactcaaggtagaagactggctgtgagaggatgaggcgggccagcatcagttgagggattgtgctagatgatgtctgcgcagtcaaggcaatccatcttctctggccctctcaacccacagagttggttgtcagggcaactggagcatggcctgggagggcacttcagctccgggggacagactcatgcaggcctagggcagacaagaattggaggtgggatgggtgaaagagccgaagcagattgttggtacccccagtagagtcgcagtggacacacccagtccagccactgactctggggtatgcaccctgatgggaacccaccgggacctctttcaggtgaccatggctgatctgtgcttggtgcctcaggtggcaaatgctgaaaggtaagagagagccccgccaccctcccttctcgtggctctgcccacagtcaggccccactcagctggcgagatagcatctcatgcagacgcttcgccaaccagccaaggagcccaccatgccaggccacatagccacttctgcctggaagagggcagaagaaattggggcagtgctcctactacgcccaccacagcccagatgaacctgtatagatagccccagctcctaagaggaggtggctcacctggtggacccccaagagcacctgcctgatgtcctcaaatgtggtgtgtctgtgagcagtagtgagctctacctctgcatccttccgtgaaccctttggtagggcacaaatgagcacctctctggaaggcatcatgctaggcgttagggatatggaaacgtatggcacattccctgcccccaagaagcttacaacatgggggaagagagtctgtatatataaatgcctagcactgggccttacacatagcaggttcacaaagaaataggaacagtaggtaacagatgccaaatgatactgcacaagacctacccatcccctgtgaataagggctgccccatcgtccttccctggacagctccctcgacctcatccagccctgcctctctgctccccctgctgcatcagggcagtctccctgtgtccctgaaaaccttagcttagcaggtgtttctctactacagattcaaggtggatctcaccccctaccctaccatcagctccatcaacaagaggctgctggtcttggaggccttccaggtgtctcacccctgccggcagccagatacacccactgagctgagggcctagctcccaaatcctgccccgttggcacagggccacaggagcagaagctgggtgggctgaagaggcctggaaacgagagtcttaattgaggagatgggagactcgaactctagccctggatctgccttcctgctgaaacttgttccacctcagtcccctcatctgtcacacgcatgtggggtggagtagggagatgcggggagcagggtgggcaggaatactgttatctatgtgacggggcagtcgtgaggctgagatgagaatgcggattaaaatgcctggcgtgctcaccgtaacaccacggggaaggctgtgtgccttttctcatccgcttttgttgtgtgtgactccaaagaatgcccgcgctgaaatttggcgtgaattaaactgaagcccaggcctctaccttgtttgtctaagactgagctaggttccagaagatgaacactgtccctagctggaatcccctgtgcctggaccagtagaggaagtcagtcagccacttgcctaccctgtggcaggcctggcccatgggacctaagggcaatgatgagaaatatacccaaaagcctgcctgaaagaatcagacaagatccagggagataacagatagaagcaggaaagcatctagtgactggctgagttctcagggctaggaatggtaccgttgttaaatgttccactccaggctgggcgcagtggctcatgcctataatccctgcactttgggaggccgaggcaggtggatcacttgaggtcaggagttcaagaccagcctggccaacatggtgaaaccccgactctactaaaaatacaaaaattagccgggtgtagtggcaggtgcctgtagtcccagctgaggtgggagaatggcttgaacctgggaggtggaggttgcagtgagccgagattgcaccagtgcactccagcttgggagatagagtgagactccatctaaaaaaaaaaaacatattccactccagcactgagaggccatttggccctctcaaccagtccctcgtcttcagggccagcattctccagaccagtcccaggattaggcactcggggtaaatccagtcacagatggtgctgggaatgggaggcaggctcccccgtgggcagtgtgagcagctactgaccaggccagcttaggagaccaagcaggtagcagtgtaccacaggctgccctggagggagcaagttcccatgcttggcagtgttcaggcagaaccaggaccacctctgggcagagatgccgtacagagattggggtagcttctggggatgaaatgagatgactttttaggagctttacctcttgaaggccccacctctgaatactgttgtattggagattaagtttcaacatgaattttagaggggacataaacatttaaatcgtagcaaagaccatcacctttttacaggacattttccagtaggggcttctctcaaacggatgagtggtaagtcaagtccttcctttccatatcacactcagcagacacctgatcctgatatgctagaggcacagggagactagatatgtacgtggtcttcccagagtgggagtggccacagtgaaggaagaacaatgatggaggggcctgatactggtaattccaactctatggaagtaacaagtccccagaaatacttcaggaggaggaaagcagtagggaggtgctatcaggaaatacctgagaacaaagcaaaaattataggctgtgttcctcagaaattttacatatccattaaggaaagtggcaaacttactggataaacaggtgatacacatactcatactatttttttttatttttatttatttattttttttttgtgatggagtcttgctctgtcatgcccaggctggagtgcagtggtaagagctcaggttcattgcaactttccacctcctgggttcaagtgattctcctgcctcagcctcccgagtactgggattacaggcgcgttggttaagctggtctcgaactcctgacctcaggtgatctgcccacttcggcctcccaaagtgctgggattacaggcgtgagccaccacgcctggccaagatacggctcctcctaacttttagtgttttgtttttgtttttttttttttttttggagacagagtctcactctctcgccaggctggagtgcagtggagcgatctcggttcactgcaacctccgcctcccaggttcaagggattctcctgcctcagcctcccaagtagctgggactgcaggcccacgccaccacacccagctaatttttgtatttttagtagagacagggtttcaccatgttggccagaatggtcttgatctcttgaccttgtgatccacctgcctcggtctcccaaagtgctgggattacaggtgtgagccaccacgcccggcctagatattttatttaaaaaaaatttttttagagatggagtctcactgtgttgcccaggctgatcttgatcctcccgcctcagcctcccaagtagctgggccagctcttacttctaaacataacttatttagctcttgcttccaaggtcacagcaattctactttcagagaatactttgaactaaggatagctgctgagtttaagccagaagtgcacaggttaaagaacatcaaggctgaatgtcaagagctgtaatgtgtgagctgccttttgtaatcctgagctatgtcaaggtcaatgatatgacacatatgaatgcttttaaaagttaaaaaataatcttaaggccaggtgcggtggctcacacctgtaatcctagcactttgggaggctgaggcgggtggattgcctgagctcaggagttcaagaccagcctgggtaacatggtgaaaccctgtctctactaaaatacaaaaaattagctgggcgtggtggcatgtgcctgtaattccagctactcaggaggctgagacaggagaattgcttgaaccagggaggcggaggttgcagtaagccgagatcatgccactgcactccagcctggcgacaaagtgagactccatctcaaaaaataataataatcttaaatatattatgtgttcacagtgacatattacatccagcatacccaaacatgaatcattaatgatctccagctacatggaatctgcctgggctttttgttacttgtagggtagtttggtgattacattcaactgaattgtttcagatcccttctctttcatgcttcaacctctaaaatatgttgcaacagaaagcagagaatgatctaacaggttcattttagcatcacagatatcactgaaggaaatatttaaatgccacccttccctgctcagatgtgagtccttattctgcaacagacactagggatgtggagaggcagtgttttaaaagacagcaaagatatattatggtgtcactttttgtaaatgaaaataggctgaattcatatcacccagattacgttaatgattggcctggtatccgaagtcgaggttccaaatttgaacagaatatcttcatggggaaacaggcctcactgggaccaaatgctgacataaaactcagaacttattaatcatcactataaacccagtttttccattcccagttcccaggtcatgatactctgccatgaatttaaatgcagatgaaagatctattattaatcttattctcaattttttttctttttagttcttcttaactttcacaatcttaatagattatgaaataattcatatgggcttatagaatacctttcttaaggaagatacatgaaagacaaagaatttaaaatgtaaatcaggttcattaaaatataactcagatgttaccaggtgcatagtgaaaaagtttatttatgacagattcgaaaactcagaagagatgacaaagaatgcacaaaagcatcacaaaactgttacctaatataaaacgcaagaactgagctacttgaagaagcacagctcagaatcatcagtgtaatcgcagtaacacacccagtgccacagggtgataaaaatggtattttaaaagaaaaaccactcagcaggacacaagaattaaagtaacaatttggtaagactcttagaaatcacagatgttgatagcatttctcatgataggggacatgtaaaacaagctgaccataataaatgattagttgggatacttttgtattttaaagaaaaaagataaaacagtgacacggtttcccttccagaccctttttgtaatgtcagcaacagtacatgatatagaacagtaagaaaataatgtctttgtagttgccaattgcttaaatctttacgaagaaaacatgatcatctttcagtcaactgactgatctgagtacatggcaccaaagaaagcccttcagaaaatagaagctaaatgacataaagtagtttggaaaatcttcaagcacctccctttattccaattatccttttccaaagtctggctttcttataatccatcactttgattacaaaacagctctcttctgggaatttcaaaacacttcccgttacgttaagggaaaatgggtacaccagattcatgggttacaggattgctttctctagacttggcttctctttaacatggctaaatggaaataatttagcttggttaaatgaaagctacttcacttacaggataatctcaggagacatgagtggagtttttcatatggaatttcttagtaaaatgtactgtttaggatatgagagacggaattaagataatgttttccagatgattcttggcctgatcctaagaatcaacaataacaatcaatagcaaggaacattacacattcaaccctgagtgatgaagagagttcaggaagagagccccttaaactctgaattaagggctctttggtaatatcatatactataatatttcaaaccaaaacttcagaagggttcatgatcctatttcaggactttagaaaatatactttgtcctctggaagcaatttcacatatattattttgcccccagataagccacaactacctgcttaaatttttttttaaactatggaattaaataaacatgcatctctagatttctagggcaacttttcatcatatctttgaagagtcatgacattaactctggtccacatacctggggcctaaaaaaatcaggtacatataataggaatcacatcatgagcctaatttcaaagccagtgtcttgcctttggactgtgtgtgtgaggcatgcctatttgtaaatgagctccactatcattggttttaggcaatagtgttttcttagcttagaaatttcttaccttaagaattcaaacaggaggggctttgtttagccttcttggtttaggcagggacaatgcaacacttgagaggcagcagtgatttctgagcaaaattctaagatatattcgataggtttgctctcccctccccccatactcctaccctttgccccctaattttattttgttttccctcgttgtgatcaattttaaaagacagttctcaagcagcacaaaacggtgtaacttatgcccctcccttatgctccactaaaacaagtctcttatgtaaatattagggtcactcaattccacaccttagaaccactggggttaaaaggcaaccttctgcagataagtggtcttaacaaacaaatataaaagcagactttagagtctgggtttcaactaattctctcaaagagggactgagcaggactcataaacataaactcatattccctacagattaagactttttatgataatacctaattctactgcttaatataagacagcgttcagatttcactcttccatatacatattataatgggacaatatacacttttttaaaagtctgagtttttcttcccaaaataacaaaaatattttttaaagtgcatgtatcaattcattaagaaaaaaataactaagaatggtctaattccaaattgctacctacttccatgataaagctacctgttatctaaggattgagttttaatatcagagtcctgaggacatgtcatcaagcaacagaggttagcataaagcccttccggagcagcttcacaatcactcttgtactgacatgccagttagtaaggaaaacagcagagatcatggcctgagggaaggggaaaatacagcacagatgtattttcttgaaagatggagaccaagaaacaatttttttttttttgagacggaatcttgctctgttgcccagtctggagtgcagtggcatgatctcggctcgctgcaacctctgcctcctgggctcaagaaattctccctgcttctgcctccagagtagctgggattacagatgcccgccaccacgcccagctaattttttgtatttttagtagcgacggagtttcactatgttggccaggctggtctcgaactcctggcctaaggtggtctgcccaccttggcctcccaaagtgctgggattacaggcgtgggccacggcgcctggcctccaagaaacatttttatgaagaccacctcctgggtaacccatgttgaatgaaacaggtctgctaaaaatcaggggctctccaacagagccgatatgcaggggacattctcagcattctctaattggacacttgtcaaaaggaacagaatgttagaatcatctttgcctaggaattggtagtttaaaatttttacatttatgcggggagtgtgtgtatacatatatatacagcaaaccaaaaataaattctaaatcccccaaccggctgaatggacccctgtcttggcccaggggatctcaaaggaacctgaaaaactagtccatgatgggaagacagggtgcctcatattatggtcagattacagggtgcctcatattaccctcttccctttggaatttaaatacaactgaccagcattaacattaaaacagagatcttaagactaaccaaacagaccctttgtggcaataaaataccaaatcccaacctgactctggtatagcatcacatgacagcaggccccaaaggaaatttaccccccaatatatttatttgacgtattttgaaatggccctacaaagctgtctcttgtgggggaaactgcattctgtagagaatctccttctcttattaggtcttttctggagagtctgacaccttttaaggcctaaaaagaaaaattcatcatctgttctctctgaagcctgctacctggaggcttcatctacatgacttaagccaagcctcccttactttaacttaagctgacttcatcttttcaggtaaagtttaactctctcaaccaactgccagtcaggaactctttgatctacctctgacctggaaacccccatcttcaagatgtcctgcctttccaggccaaaccagtgtataccttacatgtattgatttatggctttgcctggaccttctgtctccctcaaatgtataaaactgtaacccgactacctcgggcacatgttctaagaacctcctgaggccccatcatgggctctgaaccttggcaaaataaacctctaaatgtattgagacctgtctcagatactttttggtttacaatatatttatatttcttttaagctgtttgctgaaattttttcacaataaaacactgggggaaaagaaatcaatactttaaatatgtcttcctttctaaaaggcccatctctcaacaaagtggcaaaactaaaactaaagaaatttaagaactcagtcactatagagaattccaatctctctcctactatgaagcactttctttcaattgtttgttactatttgtttgtgctctagagaacagggtgaggatcaaagcaaacggttttcatttcattgtttgggtctataaatttggactgggaggggctgaggaaatgactgtctcttagaatttgctgggctgtgggttctcagtaattacctgtgcttcagtaagtagtatcttgcccctaaagttcaattatttcagaaatgtaacatgaaaatagtgaattagacagtgaaaatatcttcttttagctattttgtgctaatggaacacagaaaccctgacagttggtgaaaaaccagtatgaatgaaatgtaaccatgcccaggacttcaaaagtgaccagaccctaagaggcacacagaggtgaggggaacaagtcccttaggcttccctgatgcaacagaactaggattccaaagaaaataagcagagaatctcatggtgaaaataaataataacaagtgttatccttgggagcttgctgtgtatggcctgactgtttcaatttgagagaaaggcagaagttaataataaacaggaaaaataagcaaggctttagctgactagaaaacagctcagtagaaaattattttacaaagattatattcagttagctaaggcatgattcaacttcaatgatgcaagagcggtcactcagctatccaatgggatgacacacagcaaatcagctcttcactgcctcaacagacagtcactaaaataatttctttaaaggtatataaatgttggccagtgtaatcctctacaaaacacatttgcaaatataaaataatggaggtatgatgctgctcagagaatgggaatgctctggcagtccccaacatcctatcccacttggggctttgctccgaggggaagagcaggtgcaggatatattgccctttgatgtgatgtagatgctactagggacccactgggaagagtcccgttccttgagttatgctactgtagggatagacccttggtgtgaggaatctaacaatgagtcaaaggaaacatcacaaagaaggtgacacctcagaggagacaaaggactctgaaatcctggaatcacgggatatctctgattggttagggaattcctctgcactcaatctccagcaaatgggcagattccctcacaacttagaatttttcatggggagtgctggactgtaccccaaacatggagtaaggtggcatcatccatctctgaagggccatactcctcgcaaagccgtcacaggactgacctacagaaataaaacatcatcgcttcccaaattctcctaaaaatatcatctttaactccataaaagagggggcttcagtggctcagaacagatgggaagccttctgagaaacagatggaaactgtttcaaaggcaaaatgaaatgtgctaaaaaaataaatacagtaataaataaatctaattattcttcagaattcgtaggcagtaacagacataacacgaggagtaagagacagggaggtacaaacacagagactgctgaggtcccatctcacctccgtctcctcctccgcctgggggcccagcagctggtgctctggtgaccactggctgcagcactacctgcactctgtggcactcctgagcctcaggggtgacacagtaggaaatgctgtcaccagggaaatgcaagctttggtcaggtaaagaacaaatacaatcagcagcaatagtgaagcttcattatcacctaaactaagggactttgaacaccaaaagctttaagccctcaatgcaagaaagctaaatgcagaaactttggaaacctgattgggtttcactgcatttgattccaaagcaacatttctaaacagcactcctactctaaagacaaaaaaaagcggtggggactctggagtgttttttgtttttcatcttctctgtcagatgataccattccttctttgattataccaaaaaaaaaaaaaaaagtaacacgactttcaaatatgtgggttctgacatcaattcagtacctaatttccactctctccactttgactgccagtgcccatagtaagggaaaccagctcttggaataggaaataatgggggcagtttttcttcccacaagatcttaggttacattgatcatcacttgagattgcatgaatgttcttgctgtaatggcaaaaacatagacttaggaaagagaaaggagggggtgtctaccatcaggaatagtaatagccctccaaaggcagtgtggtctcccagctatgcagagaccaagaataaccagcaggcaggaatatggcagtggtgacaggctggatagagctttctccaaccaaaagatggggctccttcatgggcaatgtgcttttccctcttctggcacctcaacaactgaagagagtgggtgccactaaatgcactggcaataagggctgtgggagaggagagggcagcaatctgaatgataaacctgtgccaagatgaatctatttttaaaaaacatcgccctgcttccttttaggcttgtgccccataggtgccttcaagagggaatttgctggagtctgaagcaagaagggtatgagtcagggactacagaacaggggcactacaccaccacctgcagaagccaagaaggggaaaaagctacgtgggccaacagtcaggcatgccagacagggtgtgaggctcagcagccccccatgaacctttggctcttgcctatcccaaacaagaggcaccagctggcagcctgcttcagccagcaaatacagcctgcccctgtcccagcagtccttcagctggtgtagtagatgtggaagtagagagtcttgttgcgcagcagggagtaggagttgtcgaacttgagcaggtagatgccctcaccagggtagtcatggctgccagcctgcacgtctcggtggctgtcccgccggtacacaggcatgacctccccatagcgaccccgcaaggagctcctggagcctctctccacatctccagctggaacgggttctgcgtgagcaaaatggcaaagtgttcagagactgcgtaagtcctgcctgaaggtgagcggaaggaccaggtgacccagtggctttcacagagcggggagattattgccctcctacagacatttggaaatgtctggtgatcttttggtcatcacagtgactattaggtgatatctgcatttagtacccaagggtccaggagtgctaaaatcaggatagtacctacacaacaaacaatgtcccatcccaaatgccaataatgtctccactgagaaaatgatttagcctgagaggagccttcctagcttcagaagtgtctggacatttctgagagggagaaagagatatttagaagaaaagatcccgatattctatcatttagtaggtgaaaggactagctaacgaagataggaattgcagataaacgtgctataaagtgaccctaggattcctgaaaagcagcaaataagatacaaggttctccgctttcccagatacctgtaggtttccctgcccgcttgctgttctatgaagaagcacgttaaaggactgactttaagattatataagaaaatcaaggaataagaggaataagactaatgcttaggacctactcttacgttatctgaaaaatgcctctgggccatcctttgtgtagtgtgtagacactacaaataacagccggaatggagcccggagacccttttaaaacttgtctgggcatgaagtaaagaagtaaccaatagccagctatgagagtttgggataaggagagaatggatacctttagcaaactgtaatcactcactttggttccaggccaagaataaatatctacaaactaagagagagatgtaaaataatctctggcttacatgcgacctgaatgaccatccctctaaactgccgcatgactcaccctctctctgctcctgccccatccctgcccccaggaaggtgttgggaaaacaatgaggtaccgataaggaaaaagaggctttctttcaattaaggcagcagtatcaaccccaccagaatgttctctttggcctgtaccactcagcttagcttgtaatgctgagtttctcaactgcattcaaaggaagaggaggactggtacaacccacaaaatggtcaccagaaatcagattaagccagaaaactgcaaattaggttaaaattaaatttaccttcaatctcttcctcctcttcctcttcttcatcctcatcgtcactggaatcactgacctgcacagttatgtcagtgctagttacaggggtccagtcaaaataaactccaaagccaatgtcatagtcatcggtcgcaaactcccagcagacacgcttcccctctggatgagtaggtacccggatggtcaccacctcaccacgcttcaccaccagacggctgttcttctctttgcccagcttgcttttgaattccttcaccttggcaaaggtccagatgcatggaggagccatcagaggtggggagactgaaaggacaagcagcttagcactgagaaaccatgaggaaacatgagtaccccgggcattttgctaagagaggctggcacagtcagacattctttctactggcttgacttcctttcacaagtcattttctttccttccatttgtctgtctgcctgcctttctttgagtatctactggaaacaaaccacctcctttactcccaaaggtctcacctttcctgtggtcccccagaagatctgcagattccaaatcagctgaaagaacatctatagctcctgtatgttcagactggatcataacgatgtccccagacctctgtggaacttgatacttagccatctgcacaacagaactctggttaaaggagtattcgagtggcagattctaattaatctctttttgcatgaaggctgccccacccctgctctattatctccactatccccactcaaagcttaatgtactagtcaatgttccttctctttcttccaaatagaagttgctaataaattctactaattttttaaagccatcaaaatattccattgtttaaagactgtttcctaccttttgcaactttcctgctccaaaccctttataaggtccttgtccgccaacaccctcgcaggttgttaacagtatttgcattgactgtgattctgggccatgccttggtcttacctcacctgcacagtacctccctgtggctcctctcattaatagctcttgctcctagggtttagtttgactcccactctgccacacatcctcctgctacaattcccactcaagggttacttctacattactgtcaatcagctctccaaagcactgcagagacagaatctggtttatagtctttctctctcatccacagcccacctcgggctacagattgtctcagtcttgaagtcactaacagtgttctatcaatagttacaatttcaccttagaccagccccaggacttgcatttaaacagtacatttgctgccagacgtctgacttacatggaagaatgcaaatggcatttgatactcaaagccctcactaacccatgcgggagcttacaatgtctccctggtgagtttcccttcaaatcactcagattagtgttcctggtttcatgctattataccttaatttctgccccttctccaaacagttggcaggcaactcaacaagaaaactatacctattgcccacaggggagagcacatcagtgagtcagcaatccagttaagaggctggaattgtatttgtgagaaataaataaatcaagtttgtaatcctcccaggctgtattctcataatatctgtttctggagaataagccctccagttctcatctcctttgctaactgaaatgaatcagactttggctagcgtgcttaaataaatccttccttttctaaaatgctaaataaaggattaggttgcaacatattagctacatagccttagtaaagtctctaacagccctcagcctcagtttcctcatttctttctttcattccttttgagacagagttttgctcttgttgcccaggctggagtgcaatggcacgatctcagctcactgcaacctccacctcccaggttcaagcaattctcctgcctcagcctcccgagtagctgggattacagacacctgccaacacgcccagctaattttgtatttttagtagagatggggtttttccatgttggtcaggctggtctcgaacccctgacctcaagtgatctgcctgcctcggcctcccaaagtgctgggattacaggcatgagccaccgggcccagccagtttcctcatttcttaaatggagacacaatggcacctatctgacaaggttgttctcaggagtaaatgaagtgttacagatacaaatgcttgtaaactgtaaagtattatacaaatctaattataacgcctggtggtgtcttcattgacactaataccaaccattattctaacacatatgctaataaatgatagaaacaaccccatcccgcccccatccctccatggcaggggcaccactacaccatcacttccatacagctacttggaaggctgaggcaggaggatcactcgagcccaggattttgaggctgcagtgagccatgactgcaccatcgcactgaagccgggtgacagagtgagacctttgtctcaaaaaaaaaaaaaaaaaaaaaaaatcaaggccaggcacagtggctcacatctgtaatcatagcactttgggaggtcaaggcgggtggatcacctgaggtcaggagttcgagattagcctgaccaatatggtgaagccctgcctctactaaaaatacaaaaattagccgggtgtggtggcatgtgcctgtaatcccagctactcgggaggcgaggtgggacaatcacttgaacccaggaggtggaggttgcagtgagccaagatcgtgccactgcactccagcctgggcgacagagggagaccctgtctcaaaaaaaaaaaaaaaaaaaagcttctgtggaatctttatcataaatactaaatagatctaccacaagaaaagtaagagcaaaatagtccaatgacttcaggctcctcaatgaagaggattttagagaacacatgaacattcactctaacacttcgttttctgaatcggtgcctactgggtgccagtacaatgatgggccctgtggaagatacaaataatcattctccaaaaaataatgaagaccaagatgccctaaattagagggcaaagagagaattccgggagccaccctcgcagtgctttctaattccaacccaaccactatgtgtccacattctggtgcctcctttcataagaaagagccagaatctgccccctacctcattgaggacctgggcctggtctgcaggcagcaaatcctgtttcaccaaggcctgagcctccaaaggaccagttgctttccgcagatcttccgtggcatccttactcactggagataccatctgtggcctctcagaggaagagagcatgttaattcaaggactctttgaaaagactcaatcatcctggagaaactttgaaataaaacaacattcgagataccccctgccccacctgcccctggcatttatttagctctactgtcaccttagccgaccactgcccagggctgaattggtccacagtaaagtgttgacagtgtgaaaacaaagactaacaaggccaggtcaaaggctaggagaaccatggaaaacacacagctccatcatctgagatggactgctggtctggttttttttttttttttttttttttgtcattgttgtttcttttatttatttattttagttgacaaagtgtatatatttatggtgtacaatgtgctgttttgatatatgtacacattgtaaaatgattaaattgagctaattaacatatccatcccctcacatactcctttttgtggtgagaacatttaaaatctactgtcttagcaattttcaagtatacattgttattaactattgtcaccatgttgtacaaagatctccagaacttgttcctccttctaacaccttataccacttgaccaacatctccccatcccaccccctggccccaacacctattaaccaccatcctgccctcggcttctgtgagttccaatgttattcctcactctgcggcccacagggcccacagaattttaaccgaggaattggtagaatctcagttcagttctacacacaaagccactggctagaagcaaaaggaggaggtctgcctaagggagactgggcaccaaaacaaagtacaaaatgatgatcaaggcaaccctctctgcagttatccctgaggcagtctttcagcagatccgtttcataccctgtccccgttcagtgctaggggtcatcactttctctcctttttaaagcacattaatcaacaatcccaatggcttcaaacacagctatgtgaatagttgtttgttttttggcagagtgcaccagtgatgcatctcaccacaacctcaagcaattctcctgcctcagcctcccgagtagctgggatcacaggcatgtgccacgacacccggctaattttgtatttttagtagagacagtgtttctccatgttgttggtcaggctggtcttgaactcccgacctcaggtgatctgcctgcctcggcctcccaaagtactaggattacaggcgtgagccaccgtgctcagccatgaatagttgattataaagatgcaagggaatgatttatgctctcttccatttcccctggcctcacaaaaactagaaaattagtgccacggttgtagcaaaataacccaggccttttgggaatctgttgctgataaaaggtgacatggatttttttgaatggcagttatccaagtatggtctaggggcccttcgggggagtctatgaagttcaaactgtttcataataacactaaaatgttatttcccttttttcattctcattttctcaagagtgtgcagtggaattttccagagactatatgacatgtgataccgcaatagaatgaactcagaagcagagctgagaatccaactgccttttattaagccaaacattaaagagatttatgtctctctttgtactacattctttgctttgaaaattagttgtttttaagtaaaaacatgttttatatatagcatgtcatgagttattatttttaaatgaacaaataaccatattctaatttttcagttttaatttctttttttttttgagacggagtctcactctgtcgcccaggctggagtgcagtggcgcgatctcagctcactcaagctccgcctcccgggttcactccgttctcctgcctcaccctcccgagtagctgggactacaggcgccggccaccacacccagctaatttttttgtatttttagtagagacgtggtttcaccatgttagccaggatggtctcgatctcctgacctcgtgatccacccaccttggcctcccaaagtgctgggattacaggcatgagccaccgcgcccggctgttttaatttctaatatagtaaatattgatagatataacccacacaaacaaaaattctttgggtccttaataatttttaagagtataaaggtctgagaatccctgcttgagggcatcatttcctcaaagaggttgagtaaatgactggaaaatggtagtatacacctcatgggggaaacggaggcttcattttagagtttattagtttgtttcttttcttttttaacataaacaagaagaatcactccttcagataaaacagagccatcttttggaatatccaaaattactccaacctacctcaggacagacaagaggaggtcactccaagaatcagagctgtgggattctgttgatctttataggttcacttgggtaattcagtgtaagctgtaaactggcctaggctgtgggtctattttaatgctcttcaacccagaaattatagtccatttctgtttcttgacactgtgtatcatctgcctcctctactagaaagtaagcttggtggcaggcactgggtctcactgcctctgtatgcacagcactgggaaccaagcctgccacctggaactctaaggccctttttttttttttttttttttggagacagagtcttgctctgtcgcccaagctggggtgtagtggcatgatctcggatctcggctcactgcaactctgcctccctggttcaagcaattctcttgcctcagcctcctgagtagctgggactacaggtgtgcaccaccatgcctggctaattttttgtatttttaatagagacggggtttcaccatgttggccagggtggtctcaaacttctgacctcagatgatccacccgcctctgcctcccaaagtgctgggattacaggcgtgagccacctcgcccagccctaaggccctttgcactctgacctcacctctcagaatcctcactctgccctggtccctccagccacaacagcctcttcaatccttgatagtcctcaaacaccccaagtactctcccacttgagagcttttgcatttgctgtaatctctgcctagaatactcttctaggacattaactcttctttagttaactgaagacttccttcctgcaggttttctgctgagaggtttctcagaggtctgtatataaaatgtgtgccccttcctggccttgtcactgtttctgcccttacccagcttcatttttcttcactgcacctattactgcctgacatgatatggagcatattttgttgattgcaagatgcacactggcttttagattttaacacaactgaaagataggatgtcttaaaaattgatgatatcttaaaagtgccgtgggcctggattgacatcaactctttccacgagagatttgcatttgcttctgccagtacttaggaatgctaccaatctgagacttcttgaaattaagttctctgtttagggttttgtttaatcctcctggcagagtgaatttagacaagacactggctaataccaactggtggttcctattctcaggggagatattttttcctcctatgacacagtgtcaagtttgagacaatcaagcttccttgctgtccttttctgtgtgggggatttttgtctttatattttcactgaaggtgcaggtttttggtatcccagttgcatatggggggtctattagatgatccatcttaagcatttcttcctctcttggtgggacgtgaaagcacaacttacagttgacggcaacttaagagtctgtgaagtatgatgtgtaattgttttctgtccacttcccccactagaacataagctccctgagagcagtgatggactattttgttcatttgtggtttctttagtacctagaacagtatcaggtacatggtaggctcccaacaaacatctgttgaataaatattagccccaaaatatttgttgaataaaaaatgaataagttaatttttgcctgggaataaaagagaaattctggatcagactatcatttataatattggaaaggtgagactacaacaggctatctgaatcattagcttgacttactgtgtgtgacatctaaaattgtctctttgtctttgtgcatgctactctgaaaaaacatggttctgcttatttaaaaaacatattttaaggctcggtgtggtggctcatgcctgtggtcctagctactcacaaggctgagatgggagggttgcatggtccaggagcttgaggctgcagtgagttatgactgcctaccgtgctccagcctgggcaacaaagcaagactctgtctcaagaaataattaaataataaaattatgttaaacaggatatgtgccacccacataaatttaatattcacaattagcattttatgctctggagaattagaaaagggcatttggggaaagattaatttcaaattatttgatgctggtgataagccacataaaggaaaagcctccgctttaagcttctggtttgtactgacctggagcagggaggccatctcaaaggaaggggagagcctggccggcaagccagcctcactagaaaagatagaaagttgtgccgtttccatttccaatagacacataagcataagaagtaagcctcaggcatcacattcactggatttttatcttcactcagcaaatgttagaaacaaaagttaaaaattaaatccctggcccggcgcggtggctcacgcctgtaatcccagcactttgggaggccgaggtgggcggatcacaaggtcaggagttcgagaccagcctgtccaatatgatgaaaccccgtctctactaaaaaatacaaaaattagccaggcgtggtggtgcgcgcctgtagtcccagctactacaggcgtgtagtctggccaccacgccccgctaatttttttttttttttttttttttggatttttagtagagacggggtttcactgtgctagccaggatggtctcgatctcctgacctcgtgatccacccgccttggcctcccaaagtgctgggattacaggcgtgagccactgcgcccggcccacattctttactttaacttgcctccccgcttaaagtcactacctatttctttcaccagttcctcatctcagaagataaaacctgtgaaagcattctatccaaagtggttacctgtggggtgaggagcagggttctggatcggtggcagaagccaataaagaggtatccttgttttctagatcttcattctctagaaaaccatagaaagaaagaattcaatatctgagagggaatacaatcataattatcttgtacctttaaaaaaatctagcaatttcaaccaaattcttcccaaaaatattctggtatgaactttatactctcagaggcccaacacataaattattcaagtcatcacatccaagtattctcagacagtcatatctcattcataaaaaataaatcatttctaaaacaaggctccaaaaattaatcctaatttaagaatcatatttctgccaggtgaagtggctcacacctataatcccaacactttgggaggccaaggcaggaggattgcttgagaccaggagttcaaaaccagcctgggcaacagagcaagaccctgtctctaaaaaaaattaaggccagatgcagtggttcatgcctgtaatcccagcactttgggaggctgaggtgagtcaggagttcaagaccagcctgatcaacacagtgaaaccccatctctactaaaaatacaaaattagccaggcatgatggtgcacacctgtaatcctagctacttggtaggctgaggcagaagaatcacttgaacccgggaggcggaggttgcagtgagcagagatcacaccattgcactccagcctgggcaacaacagcaaaactccgtctcaaaaataataataataaattttaaaaattaaaaaaaaaatagggccaggcacggtggctcacacttgtaatcccagcactttgggaggccgaggtgggcggatcacttgaggtcaggagttcgagaccagcctggccaacatggcgaaaccatgtctctactaaaaatataaaaattagccgggcatggtggcacgcagctgtaatcccagctactcaggaggctgaggcaggagagtcacttgaacccaggaggtggaggttgcagtgagctgagatcacaccactgcactccagcctgggcgacagagcgagactccaactcaattaaaaaaaattaataaaaagaaagaaatcatattcctcagaaagcagatggttaaattaggcagaacatagagggcagagtgggatgtaagataaactgaatttagcatcaaagtataaagtgtcacttctacattcaataagctcagatcaatgtacccaaggtcaggtaaaggacttttgtattttcatttatttattcaatcactcatttaccaatgatttactgaataactaggtgccctcaaggagtatataggtgaaatgcataatgaaggccatgttctcaagctcaaaagaagcctatgtatggctggtcttatcacagccatttttgcagtaaggaacttaaggcatagagacaggattcaaacccaggcagttgtgcccttaaccatcagatgctacttagttttgtgggttattcatttagcctttccttgaacacccagatagcatatggtttagtgcatttagacagcccctcattaaactccctctgtgtaagacaacaagacactgaagactgaagtttacttctcaatacaaaatgcaacttaagtaaacttcaaacattgaaagtttcagagtttggtagcaaactcaaagtgaaaatgacaggcaaaatttttaatccaagcttaatttagtctcatgttttatatgtgaacaagatctatttttcttttcttttctttgttttttttttttttttggagggggacagggtctccctctatcacccaggctggagtgcagtgacacaattatgactctcggcctcttggcaacctcaaccttccaggttcaagcgatcctctcacctcagcctcctgagtagctgggaccacaggcacaccccaccatgccagactgatttttttctttttttttttgtagagatgggggtctcactatgttgcccaggaaggcttgtcttgaattcctgggctcaagtgatcctcccacctcagcctcccaaagtgctgagattacaggcgtgagccactgtgcccatccaagatctatttttctttgggtcaattcagtctcacaggcagaaagaccttagagctcctgccatctaatttttctcccaacaaagaaacactgttccccagtctctgccactctgtaaagaggcccattcactgagggaaaatgcaaagagaaagttctcccctctgttgacctaagtgaagtgtgctttctaataaattctactctttgaccactactcccgacaatatcctttcccatattgacagctggctgtcacatttccacaagttccttctcctcaggctggtcatcttcacactatatagcctgtgaccatgctggctccctttagccgctccacttagtttgttccatttaaagaaaggagccaaaatgaacaacttttccaggtgtgttccaatccgtgcagactacactgacaataacctcttaaaaaggacacaatatttcttgacataataccttaaccaggcactagatttcttaactgcaaacttactgttggcctaaataagtcaatcaagatctccagggcttataaaaataaactttttctaagcccactctctcctatgctctatttttaaaatagacttttggaaaataattgattttttaacttaaaaccaggactttatataccctattacttatttcaaattaactttttgaaattatactaataatgctttgttcattgtagaaaaaagtacagataagaaaacattttgcatctacccttccagactttatttcctttaaaataatttttaatatacagataatccattgttcactgtaaaaaaaataaatcaggaaatacagataagcaaaacaacaacaaactaaccgtaaccccactaaccaaagattaccactgttaactttttaaaaaaagacacaaggttggctgggtgcagtggctcatgcctgtaatcccagcactttgggaggccgaggaaggtggatcacctgaggtcaggagttcaagaccagcccggccaacacggcaaaaccctgtcctactagaaaataccaaaattaggtaggtgtggtggcgagcacctgtaatcccagctacttgggaggctgaggcaggagaatcacttgaaccctggaggaagaggttgcagtgaggtaagattgcaccactgtactccagcctgggtgacgaaggaagaactctgtctcaaaaaaaaaaaaaagacaagaggtttctttatgttgcccaagctagtcttgatctcttgggctcaagcggtcctcccacctccccttcccaaagtgctggggttacagcacagcatctggccaactgttaacattttgatgtatatcccttgagaaatacatttatacatatatgcatacaaatacaaatgtatatgtattgtgtgtgtgtgtgtgtgtttctgaaaggacatgcactaaacactttttttttttttttgagacatagtcttgctctgttgcccaggctggagtgcaatggcatgatctcagctcactgcaacctctgtctccgtgttcaagcgattctcctgcctcagcctcctgagtagctggaattacaggcacacaccaccacacccggctaattttttgtatttttagtagagatgggttttcaccatgttgtccaagctggtctcaaactcctgacctcaggtgatccacccgcctcggcctcccaaagtgctgggattacaggcgtgacccaccatggccaataaacacttttaatgaacatttttcagagtcaataaagatagggctatatcataattttaaacggctacatattatcccatacgttgtcccaccaattcttaaccttctactggtagagctagtgcttattccaaatctttcattgttacaggcaatgatgctgtctataacaattacagattgttatagactgttagagataatgatgttctattggcattatctacaacattttcttaagaacctcccccctcaacagccttggaagtggcagttcctatgatcaaggtacattgtgttggccatagttcattggtttccggtgagcacctgcccaaaagtcagtccgattctcttccgtaaaatctggagttggtatccaagacggaaacagactgtggagaactttgtcagtttaggagctgagcctgccttttgggagaagccttcacaggccacataaaagcagatgactaagcagagaagataattttcagaaagtacaatgatgcattcaagtaaagggaaagaaaaacaaggggacctctgagtctaggagagaaacagaccagagaggctactttgtaacaccatgaggttcaagtgtgctcctccaactggagtctgtaagaggccttacatagtaacaatgagctctttttttctttttattgtgaaataaaccacacatatgaaagattgcatgaaaagaagatacagagctaaaatattaataatacaaatacctgcatacctactaactaggtgaattattagtactttagaattcccctacccaatgccctttcctatcctatattccctgttccaaattctgagtaaattattccttgctattctttatatattttaactaattactgctgtttaaaaacctttattgtagaaaatgttaaacatatacaaaatcacaaaattagatcacagtagaatgaagactcatgcaccctacctatgttttcaacaagattttacttggcctggtttcctccatgccctaccttcttgccccactcaccaacagattatttcaaacaaagcccagacatcattgtatctaccattacattcatttagaacaaatctctaaagaagaagactttcaacacaggtacaacaacattatcactcctacaaaattggcaattcctcaatatcatctcatacccagcccatgttcaaatttctccaagttgtctcccagaatttcttcttaggagctggtttgtttgaatcagaatccaaataaagttcacacactaaatttaccttataatctcttaatctacatcaatcctcaccaccatgggtctgtatacaatatatttgttgacattttaaaaaactgatctgcagacttttcaaacattctgaatttggctgactgccttttcacggtatcacttaacagattattttatgcactatatttcctataaaccggtcatagatgtagagcttcactgtccagtatagtaattactagtacacgtagctaaatttaaatttaaaagaatttaaaattcggtccacccatctcaactagccacatttcaagtactcaatagccatgagttgctaatggctactgttgccagggagcacattttcaccatcaaagcaattctattggactgtgttgatctagaggcttgactcaattcaggttcagttttgttcttgcaagaatattccagaagtaacatatgtaattcctattgtattacattaagaggcacataatctatggttattacaagtttaatgataaaaagattaggttcatgttttcagcctaatccaccatcaagctcctcattaaccctgcacctagtggctttagcaggcattcatgatcattgtctaaaatagatacaggatttcattaaaaactagaaaatgacttttccaattctagcactttctacagttgttcttagttggaattctactaaaaacaaaatttcccctcatcaactatttggctactctgacacagtcataagagaaaagcaggataaagacttgatccttcaccaactgacttagaatcataacaacctccaaaggtaaccaatgatttgttctttgaagtatcgttagaaacacatgaattttagcatattttatgtgcttcaagttttcctaattttggcctgtgggagctcctcaaagttggctcttgtgtccttttaagatgacaccactggtcttgcttatagcataagttctgagctttaaaatcttataaatgcctgtcccacacttggaatcaactatttctctaaggagtcctggttctttttcattagaaattgtctttaaaggctgggcatggtagctcacacctgtaatcccaacactttgggaggctgaggcaggtggatcacctgaggtcaggagatggagaccagcctggccaacatggtgaaaccccatctctactgaaaatacaaaaattagctgggcatggtggcacacatctgtaatcctaggtacttgggaagctgaggcatgagaatcgctggaacctaggaggcggaggttgcagtgagctgagatcgtgccaaggcactccagcctgggtgatggagtgaggctctgtctccaaaaaaaaaaaaaaaaaaaagaaattgtatttaaagaccacaatcaatgtaatatatcacacacacacacacacacacacgaatatatatatatcctaaatgtcatatattaatatcacatataaaaatatacatgtaaaatgaattcatgcaaatacttctaattcagattacaggatttttctttttttttttgagacggagtcttgctctgtcgcccaggctagagtgcagtggcgcaatctctgctcactgcaacctccacctcctgggttcaagtaattctgccttagcctcctgagtagctaggattacaggcacatgccaccacgcccagctaatttttgtatttttagtagagacagggtttcaccatgttggtcaggctggtctcaaactcctgacctcgtgatctgcccgcctcagcctcccaaagtcctgggattacaggcgtgagccaccacgcctagcccagattacaagatttttaacctaactttaattctatatttgtatttttcggtcttgttgtggaaaatcctggatcttaataatattcacatatatacatatttgctttcttctacaatgtaaatataatagttttaaacgaataacagtataactaaggatatggatattataacattcttctccttagcttttaaccttccattatttgtttttgaaaacataaggaaatacatatacatatagttgtatgttgcccccatcttagaaaaaaatacacattcttcttctgcaacttttttttgtttgtttgtttgtttgtttgtttttgagacagggtcttgctgtgtgacccaggctggagtacagtggtgcgatcacagctcaatgcagtctcaacctccctggcttaagcgattctcctgcctcaggctcccaagtagctggaaccacagtcccatgccaccacacctggctaattttttaaattttctgtagagatggggttttgccatgtagcccaggctgatctcaaaactcctgagctcaagcaatatgcccaccccggactcccaaagtgctaggattacaggcatgagccactgcgcccagctacaacttgtttttatcacttaacaacacagcctagaagagctttcaagttggtgaatttatccacattcagtggtgcaacccaactccatgcagacggaagctcctgcactcaggacccttccaggcctcgccctatttacctcttcatctggctgtttatcctttataataaacactggtttattatataaaaacaggcagaaattctccagatgtctcccagtaatgtccaagtttttatcccagtgtcacaaagaaataccaatgatgaaacaacatgacctacccaggacaacctacaacgacctgaagacatttactggggagctgtgttgttttcataatatctgctatcgagtaaaactgaagagtggctttctacttgatcaaaaaacagtttaaaaagaaatattaatgaatatcaaaggagtaatgaaacctggcctcaacgccattctggtacacacaggtggaggcaaaccatggttgttagatgtctgagctgcaaagaaaagatccacatgattatctggagatgttttgataaatggagtacctcaatctgccaatttcaaatgtaattcacattctgtggtacaggatgatatcatcatgggcactctgacagtgagaaaaaatttacagttctcagcagctctttggctttcaacaactatgacaaataatagaaaaaaaaattgaatgaattaacatggtcattcaagagttaggtccagaaaaagtggcattccaagattggaactccattcatggtgtgtctggaaaagattacacagatcttcctcattactttaaatttttaaattgtatatgtttaaggtgtacaacataatgttttgatatacatatagatggtgaaatggttaccatatcaagcaaatcaacaaatccatcatcccacagctatcctctctttttgtgatgttgaacatctttttatatacctgttggccattgtatgtggcaaaagcacctaaaatttccttttagtaaaattcccaagcaaaatattattaaccatagttctcatattgtacattagatctctagacttgttcatcctatgtatctctactttgtatcctttgacctacacctccccctttcctctaccatcaccaccaccaccaccacctctagtaaccactattttatcctgtttctgtgtacttgacttttttttttttagattacatatataagagagatcgagcagtatttttctttttgtgtctggcttattttacttaatataatgtcatccaggctcatccatgtgtggtaaatggcaagatctccttcttttataaggctaaataatattcctctgtgtgtatgtatgcacaccacagcttctttattcatttgtctgtcaacggacacatagattgttttcatatcttggctattgtgaataatgcgacaatgaacaggtatctgaggcggtgatttcacttcctttgggtatatattcagaatgggggttactgggtcatgtggtagttctacttttatttaggaatttccatactatttttcacaatggctgcatcatctacatttgtaccaacagttgttatctcttaccaaagagaagtcatcctaacaggcatgaggtgatatatctcattgtggttttaatttgcatttcccttgtgactactgatgttgaacatcttttcatgtacctgttggccatttttacgtcttctttggaaaaacacccattcagatcctttgcctttttttttttttttttttttcagacagagtctcactctgtcacccaggctggagtgcagtgacacaatctcggctcactgcaacaacctctgtctcccaggttcaagtgattctcctgcctcaggctcccaggtagctgggattacaggtgcatgccaccatgcccagctaatttttttgtattttcagtagagacagggtttcaccatgttgaccaggctggtctcaaacttctgacttcaagtgatctgcccaccttggcctcccaaagtgctgggattacaggcatgagccaccacgcccggcccatttccattcttttgcatgtggaaatccagttttcccagaaccatttattgaagagactatcttttccccactgtgtcctcttagtgcctttgtcaaaaattagttggtcatatatgcttgggtttgtttctaggctctcaattctgatctgctgtttttatactagcaccatactgttttaattactatagcttttaatagaatttgaaatcagaaagtgtgatgcctcaatgttttctttcttaggattgcttgtatattcagggtatttgtggttacatacaaattttagaattgttttttctacttctgtgaagaatgtcattagaatttggattgggattgtgttaaatctgcatattgttttgggtagtatgaacatttgaacaatattaatttttccaaatcatgaacacaggatagatcttcccatatgtttgtgtcttcttaatttctttcatcagtgttttatagtcttaagtgtccagatctttctggttaagtttattcataagtattttttttcttgagacagggtctctgtaagccatgctggagtgcagtggcacaatcacagctcactgcagcctcgacctccatggctcaagcaatcctcccacctcagcctcccgagtagctgacacaacaggcatgggctaccacgctaggctaatttattaagtattctttatgctactgtaaattgggattattttcttgattttttggataggttgttactgtgtacagaaatgcaactgatttttgtgcactgattttttatcctgcaactttattgatatcatttattaattctaagttttttttgtagagtttttggggttatttacatataagatcatgtcatctgcaaatggacataacttctaccattcagctaattgtatgccttttttttttcttgtctgcttgctcttgctagcacttccattactatgttgaatagaagtgatgagagtggtcatccttgccttgtgccagatcatagagaaaaagttttcatttttccacactgattatgacactggctttgggtttttcataagcagtctttattacgttgagtaaatttctttctacatctaaagttgttgccagtttaaaataagctattctaactacaatttattctacataagcctcatggtaaccacaaagcaaaaaaccaccccagataaacaaataataaagagaaaggaatcaaagctcagcattatagaaaatcaccaaatcacaaaggaaaacaagagtaagaaaggaacaagggctctacaaaacaaccagaaaacaattaacaaaatagcagaagtaagtccttccctatcaataataagcttgaatgtaaatggattaagttctccaattagaagacaccgagtgggtgaatggattaaaaaaaactaagatccaacctatatgctgcccacaagagactcattttagctttaagaacacatacaggctgaaagtggaagaattgaaaaagatattccatgtaaacagtaaccaagaaagagcagaggtggctgtacttagacaaaataaagtctaaaaactgtcacacgaaacaaagaaggccattatttgatgataaatgggtcaagccatcaagaggacataacaattataaatacatatgcactcaacatcagagcacctaaaggtataaaccaaattttaatagacatgaagggggaaaatagatagcaatataagaatagtaggggacctcaatatcccattttcaacaatggatacatcaactagacagaaaagtaataaggaaatactaggcttgaactacacttaggaccaaatgggcccaattttccatacaacagtagcagaatacacattcttctccattgcatatgtaacattctccagaatagatcagatgttaggccacaaaacaagtcttaacaaatttataactgaaatcataacaagtattatttccaaccacaatggtaaaaaaactagaaatcagtaacagagggaattcagggaaaaatcacaaagatgtggaaattaaacaacctgctcctgaacaaccaatagattggttgagaagaaatcaaaagagaaacgtatcttgagacaaaagagaatggaaatataacatactaaaacctaggggatgcaacgaaagcaaaagcagttctaagaagaatgttgatagcaataaattcttacattaaaaaagaagaggccaggcatggtggctcaggcctgtaatcccagtactttgggaagctgagacaggaggatcacttgagttccaggctgcagtgagccataatcatgccactgcactccagcctgggtgacagagtcagacccagtctctaaaataataatcataataatagtatctcaaataaatagcctaacattattcctcttttttttttttaatgttgcctaggctgtactcaaactcctgggctcaagcattcctcctgcctcagtctcctgagttgctaggatttaggtgcatgccaccacagctggctcattactttttaaactggcatacttgactgtgtggatgtacaccatactcatgtccctaccaatagacatcagggttatttccagtctattaatattgcaaactgtgctacaatgccttgtgcatatttcatatttttgctagtgtatctttgggatagattcctgagagtggaatttctgaaccaaattctccacaaggatcatctattttacattcactgcatcaatatatgagtgcccgtttccccacacctggcacatcagagtacattgtcaaactgttagaaaattggcagaacttgatatgtgaagaatagtatattaattttaatttgcacttctcttatcttttaatgcattagaccactttcttttttttcttcttcttcttctttttgagacaggatcttgctctatcacccaggctggagtgtagtgttgtgatcacagctcactgcagccttgacctctagggctcaagtgtagttttgcaatcacagctcactgcagccttaacctctcgagtagctcctagctactcaggaggctgaggctaggaccacaggtatgcatcaccacatctggctaatttttaaatttttctgtagagatggggtttccctatgacgcccaggctggtctcaaactcctaggctcaagcaatcctcccacacgggccatccatagtgttaggattacaggcatgagccatgatattttttttaagatggagtctcactgtgttgcccaggctggagtctggtggcataatcagagctcactgcagcctcaaactcttgggctcaagtgatcctcctgcctcagcctcccaagtagctgagaatacaggcaccctcaccacccccagcttgcattttgttatttaagcctttttttacttcatttctataggacaagtccccagaactgaaaaaccttgtcaaggtctacacattaacacttttatacacattgcccaatttctctccaaaattcacttctactaggagtggatatccgagtgtaaccatttccccacattctcactaacactagatataatcattccttataactgctgccattctatagatagaacacgatgaaacactactgttttaatttgtcatcctttaagagctcatatggctgaaacaagctcttttatgcataaaaatcagttgccttttttgttgtttaataagggaattctgaccacacatactacttaacctacctcttccactcaacaatgatatttatccatttaaagcagcccactgaatctccttcagatatcactcagccaaatattttgccaaaatcaaaatatactgtatatacagcaaccacatgaaaaagggaaatttgagttaatgactttgcctaaattcaacagaactttactggacccctgctatatgtcaggcagtatattccatgtagggaatatacagttaaattagacatgatttgtgccctcaaggaactcagcctagtgaggaagataaactcataaacagacagttgtaatataagtgtggtatcctttaggatagaattatgcactagatgtcacagatacacatatagttaactaatttagggaataaaagtatcaaaggtttcctgaaagagatgacaattgcactgaattcaaaaatgaccaggacttggccaagtcaagtggaaaagggcactgcaggcaaaggaggctgaatgaacaaaaccaagaacacaaaaaaataccaccgtggcagctcagtgtggctggaggccactgcaccaatgcagagagatgagctgagagccacaggtcccagtgatttaacttgatacttaaccaaattcctagtaagtgcctggccacatcctaggtactggagagaatatccaaagcagacacagttctggctctcatgatgctttcaatctagcaggaaaaagtgtgtgaaggtcctttgtcccaaaggtgatgaataattttaagctagtaaatgacatggtcaaacctgtatttttttggtacaattctatggcagccataggtaggatggattttacgagatcagataggaggcctctgcagaagtccatgagagagagaaaggacctaactagtaatgaaagactagaaaggctataattagaaaataattagatagtcaaatgtgtttttagttcgcccatgctggctcctagcaacacttattttctttacattcaaatgacatattctactgaaaatctggatcaagtttaatggtctccaaattctggattatactctttcccttcaggataactaggtatgtccatttctagtccccgacatccctcaaagatggtgcacaagtatatttgcaagttatttcaggaccccagacgtagaagtcatctgtcaatcttctggctttcaaaaatactcaaccttttcctccttggggagaactgtcactgacaatagtactcagtggaagtcaaaatggaagatccttctcttcgcagtaccaggaagtcagggaacaagcacataatctaaaatattcccacctggaaaaggtgaaacaggagtgggacaaatgagagacagaattcatctagtggcagccaaacagccaagttgttcttgctgcttagcctctggagtcctccagccttctaacaatttagtgagcctcctttttccttctaataaatcctctttctgcttaagacagccagaattaacttatatggcttgtaaaaagaactctgacaaaaattcctggatagaatttcactgggtccagaaatctgaacttaattaaagtacctagctattctacctttattctgatcatctttgttattataaccaagactcagtggtcacttactatatgtcaattattttctaagttttttgtaggcatcaccatattgaatagtcactgaattgcactgaattatagaaccactgaagttgatgctatcattactccctttctatagtttaagaaattgaagctcggagaaatcatgatgcccaagatgaccagcaaatacgaatagaagtgatatgcactcaggcaatccaagatcaaagtcagcattcttactaactacattatacactgactcttttaaaaaccttttctaggctgggcgcagtggcttatacctgtaactccagcactttgggagcccgaggcaggcagatggcttgaggtcaggagttccagagcagcctggccaacatggtaaaaccccgcctctactaaaaatacaaaattagccaggcatggtggtgtgtgtctaatcccagctacttgggaggctggggcaggagaatcgcttgaacctgggaggcagaggttgcagtgagccgagatcacaccactgcactccagcctgggtgacagagcaagactctgtctaaaaaaaaaaaaaaaaaaaaaaaaaaactttttaaatcttttctattgtgaaatataacgcaaatgtagaagagtacacaaaagtgtatacctcaataaattatcacaaacaccacccaggccaagaaatagaacacttctaacactccagaagcaccactcatgaccttcccaatcattacctgatcctttcctccttaaggtaagaaaaccactatcccaactatggacattatttccttgctttctttatagctgggccacctaagtaagcattcctaaacactgttgcttcactgggcctgttttctgaattccatataaaggaaaatgaaaaagaatgttttcttttgggtcttgcttatttcagtcattattttgattgatgcatccatcaaaatctgcatcaaaaaatgcacccatgtaattgtaggtaggtttgttaactttctttctttttttttttttctgagacagaatctcactcttgttgcccaggctggagtgcaatggtgcaatctcggctcactgcaacctccacctcctcgcttcaagcgattctcctgcctcagcctcctgagcagctgggactacaggcgcccaccaccacgcccaactaatttttgtatttttagtagagacggggtttcaccatgttggccaggttggtctcaaaatcctgagctcaggtgatccgccttcctcagcctcccagagtactgggattacaggcatgggccaccgcacccagccagtttgttcactgtcattgctgtacgttattccatgaatccaccatgagctatctatctattgttgatgatacttaggttaactccagtttggggctattatgaataatgctgctatgaatattcttgtgtcttggctacagtgcatacatttatgttggatataaatgtcagaatggaaacggttaagtcatagaaatttgaatgttaaatttcagtagataatgccgaactattttctaaaggggttgtaccaaatataatgctaccagcattgtagcatcatttcattactctggaccttctctgacacttggtcatgttaaaatttttttggggggccattctggtagatgtatgctaatttagtttgtatttcaccaatgactcgtatttcttggccatttaaaaatcttcttttgtgaagtgcctctccaagtctcttgccaattttattactggattgtcctttttattatttatttatttatttatttatttttgagacggagtctcactctgtcacccaagttggagtgcagtggcatggtctcggctcactgcaacctccgcctcctgggttcaagagattcttcggcctcagcctccctagtagctgggactacaggcacgtgccaccacacccagctaatttttgtattttagtagagacagggtttcaccatattggccaggctgttctcgaactcctgacctcatgatccgcccaccttggcctcccaaagtgctgggattacaggcatgagccaccaagcccagtccctttttattatttataggagttttagatacaaaccttttgtcaggtatatgtattataattacctgcttccactctgtgacatgacttttcccatttaatggtggcctttgatgaaccaaagtacttttgtgtactcaaaatttatcaaatttgccttccttagtctttgtatgtcctgtctaagatgtctttcactatattgagatccgaaaatattctcccatatcctataggtaggtgcttatgtactacctttcacatactgttctataatctaccgagttgattttttgtgtatgatgtgtgaggtaaagattacgtttctttactttcctttctcttagaatattcaattgtcccagaaacatttaccttaccttacccactgctctatgttaacaatctttgttgcaaagcaagtgtccgtataaacatgtttctaagcttttgattctattcctagagcctgactactctttaaaaactttaaaataagtcttgatgttggatggaacaaatctttccctgttgtcttattcaagagtgtctttgctatttgtggccttctatttctatatgtattttagaaccagcttgtcaaagccacccaaaaatcccaattcatgaacttagctgtttctgaagctgagttgcactccctgcaatgacctacttttagggcatggcctttcatggccctaacccaaaggaaatggagttcaccaggctcccccttgacgggtcctgaacactaatccatttcctgttactttagttcaaagaggcacttttcatgaccttgtcactcagcttccccactcaggaatccagcatgtaccctcaggagacaaaagagccccaaaatagactcttgtccttggatctctatagctctcacatggatcacagctaggtaattcttcatgatctttctatctctccagtatcttccagcagatgtttatatttcacccatattttctaattgtccctgatgagagataattacctagtctgctattactgaaaacagaaatccatattgcctatttacccatatcaatctgaatataccttagtgaataaaatagaaacaaaaatagttctgccctctgccaggcacggtggctcatgcctgtaagggaggcggaggcgggagggccgaggcgggcagatcacaaggtcaggagttcgagaccaacctggccagcatggtgaaaccccatctctactaaaaatacaaaaattagccgggcgtggtggcacatgcctgtaatcccagctactcgggaggctgaggcaggagaatcgcttgaacccagaaggcggaggttgcagtgagccgagatcacaccactgcactccagtcaaggcgacagagcgagactccgtttcaaaaaaaaaaaaaaaaaaaaaattctgccctctctctgtcattgattaataatatcagtttatctactatgtctatccccctttggcttatcctgtcctttggatcgtaatgaagacttcaaaaaggttaaatttttagacagaaatgaaactagcacaaaaataatgaaagacagtagtggatttaaagaataacaaaattaatctctaaggagacttataaccttttataaaaaaattcactgagagaaaaaggtctagaaaatgtcagttcctgatgagcagaaacagaatacagacctatagaaaggctcttatttaggatatagacatagtgaagtctcatgccaagtttgtgtgtgtgtctatctatgtacacatatatttatatattttaaagactatttttattaactatttctgaataatttatccacattattcaaaattcaaaaagcatataagtatacagtgaaaaatttcctcccatgtcagtccctacctccaaaagcaatcaatgttatttggttttgtgtagtcttccaaagatgttttatgcatataaaaaaaagtgtgtgtgtgtgtgtgtgtgtgtatactttttcacttttttacacaaaaaatgggcatgcttaggcgtggtggtgcgtgcctgtaatcccagctacttgagaggctgatgcaggagaatcgcttgaacccgggaggcggaggttgcagtgagctaagatcacgccattgcactccagcctgggcaacagtgcgagactctgtctcagaaaaaaaaaaaggtcggggggagcatgctggacatactactgtgtactttgttctttccacttatatctcaaagacctttccataactgcacatgaaaagcttcttcattcttttctacagctgattagtatttcattgggtgaatattccataatgtattaccattacaaacaatgccataataaccttgtatctatgtcattaaacaggagaataaataaatctataattcctggaaagaatgagtcaaaggggcatatattgtaattctgatggatattgacaagttgccctccacagaatctgtaccaatttacaatctcattagcaaagcatgagagtgtctgcttctgcacaccgaccaacaaagtgagttagcaaactaccaagtgtagttaggatttccaattcccttattatgatttaggttgagcatttttcacatggtaagcaccacttctcatagcattttaacaacttaatgtatactggaaaaaaatatgcttttgattttttttctttccatcccataaggagttgagcttttgatttttaactttaaaggaatgccctaaattatttttaattttaaagaatgccctaaattacataagaactactggtaaaacaacttataattggattcagagaggcaggaagtaagaaaaggagaaagaaaaacataactttatttccagaagtataaagtgtgggagatgcagcgctgtttcagtgagagagaattatgagcacagccttttaggtttcctgaagttcttcagtgaaatttaagccactatgcagaagaaaaagccaattttcctatagtatagcttttattatattagccaaatataagccaattctgaaagtattcctagaagagatcagagaaatcaggccagactttgcaaatttagatggtatgtggggaaatgttttttatttttaaaaatatgtattctagtatatattaagaaaaatggatatatcaaactagtaatatcgtaggtattatttagaatgaaacttttaagtgtcaatcaaaatgtcaattaaatgtcaatgtcaagaaaaaatagtaaataactaatactgtaacggtattctccagtgtggcaaagtcattaccatggttcctcagtggccgaaatctcggaaacaatgaacggaggaggaaaaatggaagcttaacaataacttaatttatcattgatggccactaaagcaaaggtgagagagaaaaaaggaacttccttaaaataacttattttatatttgacaactttttaaatgtgcattttctttctacattaccaaagggtctggtttcagacattctgatcatgctagggattcaaacttactgtgtacttcgtactttccctacaaggagaaccaaaaagcaggtttttttcaaaagcatttgaatatcaggtcagggttctttagaacaggcctcagaggatttccccctcagtaaacaggctgcaaagagataattagcctgtcattttagattccagtgcagaagaactaaaagcaggctatgtggttacagactcaagaggcttaaacgaaaacaaattaagtgagtttatgttccaaccaaatctagtgaccatgtgatccaatttctcttcagcccttgagtgggacatgctcctgagaggtcactcagattgtgcacctttggttatactgtttagactgaatcacgacatgaataatcaactatctgactaatcgactatctggacactaaaaacacaaccactgtaagaaaaagaaagccacaggcagacaaaatgttaacattttgacataaaaccacaatagaaaactaaaaaacatcaaggctgtttgtcattgactccctattattcttaccattcaacatggtagccaccaaattttgaattttaattcatgcacattgaaatagccacagatattatatatatatatatatatatatatatatatatatatatatatatatttttttttttttttttttttttttttttttgagacagcgtctccctctgtcgcccaggctggagtgcagtggtgcaatctcggctcactgcaacctctgcctcctgggttcaagtgattctcctgcctcagcctcctgagtagctgggacagatatgaaatattttcatcactgcaaaaagacttattgtaatattctaacttctaccttagaaccatgaacaagtttacctgacctgtttccatcctcaacatctaaatgtattgatagctctgggggacatacacaccaaactaagttctactgctgacttcaggatcacaatagagttttattttcctttaaacttaaaaaaaaaacaaaaacaaaaacaaaaaaacctgcctttaagtgatgcaacaagtatgcctcagatagtttcataattaaagaatgatttatctctcctctggggaactgaagaacccaggtgcctcaaataaaagactattaaaaacaattacaatgcataaaacaataagaacaccatgaccactggagagcttagttcataagaacataaatcctttccttccttttcaccaaaacctcagctaacaaacatgaagacactcaataggtattctctgcagagaacacttttaaaaaacaagttatggttattctggataatgacacattcctgctttgaaggaataagatacaccaaaaaaccaaaacccttaactcaacaatacctgatatggcttggatgtttgttccctccaaatctcacgctgaaatgtgatttccaatgttagaggtgaggtctggtgggaggtgactggatcgtggagatgaatccctcatgaatgatttggcatcatcctcttgatgataagtgagttctcactcagttagttcacctgagatatggttgtttaaaagagtctgggacctcctcccgtctctctctctctcactcccaactctcgccatgtgacatacctgctccccctttcagtatgattctaagcttcttgaggccctcaccagaaacagataccaacaccacacttcctgtacaccctgcaataccatgagccaattaaaactcttttcttataaattactcagtctcaggtattccaaatggactaacagaacacctgaatatccaattccatttcttactgctgttttctctctgaaagggtgagagaaatctcattaaatttcattctttcttagagctctattgcttactcattgtatcattttctagaggaagatggcagaaggatccaatcaaacgaattccaagtttaaagcagttttttggggtttacgcccaagcctctggtccaggccaaatatagtatttccacactgctttggaagcccagcttaactctaacacagcgttcccaaaagcagcaccactgacatctggagccagatacctccttgttatggggattgccctgtgccttgcaggatgtttagcaaacatccctagcctatcctcactagatgtcagcaatagctgccaccagttgtgacgagcaaaaatgtttccaaacattgccatgccctggggatacaaaatcgtacctggttgaaaaccattgctctaacccaaggaacattcttggttatctcaaccctaattcttcacattcattagatgctcatccagatctctgcattcagactttctctcaccatcaaactcagcaaatatttgcgaaacctctaaaacacaacatcaagggctctagataaataaacaagcaagagagattccgttcctaactccaagcaggtttcttagtagataaagaattgtaataaaagacgcccaattatataatgttttgaattgttaattgtttctccctgaaatggatctctcatctcatcaaactgaaaacaccttgaggacagagaccataacctgtctgcgagtaccaatacttgattcatggccaataaaaacaaacaattatagacttcatcataacaagatgacaatttcatccagacagtaaaaacttgcgctaacttgaacaggtaagttaacctttctcagctgtagtttgttcctctgtaaaatgggaagaaaatgattgttgacatgactaaatcagaaaatataaatttttttccacctctggcacagaataagcattcaatatctgtaggttatcattactattattttattagcaacaaatcctacctcaagaggaagagcttgctctgggctactataataaacccctacatgacattaaaaaaaaaaattatcaccctgcattctgagggtaagaggaaggaaagtaagcatctctaccaatgtcctgggaggaagtgaatgcaggaatgaattagatgtcagggggaaaaaaaaacacactcatctatctaaaacgcgtgggtacgtttgccataaacacatgagaacctaaaggggaagtaaaaacatgcttaatttgtaaatactggcgcatgcaagggacaagtgttataagacttacctttctgtgtttacttgcttagtcttttagacattatgcttagaatttctactgctatgttaaatatatgccaacgatttttaatttaatacaaagcagagttcgtaagaaaaaaaggcaaaatttgtcaggtgttttaaagtaaaagaatataaaatcatgggaaagagctgggtgagttgtgtgtgtgtttgaataaggcagcattatgagagggaagatacttgggatcagagtagaagacagaaaaaggcaccatgttggaagccatacatccaagaacacctctggcggcacaggaagttcaactgaacaaaaagagaccttactgtcacaatggttgagacgagtatagtgtgtaccatggactataccccaaatgccttagacaaagcagctcaagtaatcctcacaataatcctatgaggcagatatttttagtaatcacattttacagatgaggaaactgacgtttcagactccaatccaggcaccctggctccacagtagtgcctcaaccattatactttatggtgtctattttaatttcagacctagaaaattaatttatatttgctacttaaataagacaagttctctcccctctaccctttcgtatttcaaaagagcatcctttcagttgcatcgtgtgtggtgttcaggaggctgaaagaagaaagtgtgatggatggactcttttgtctttggacactgaaataatacacacggaggaactcgcgttagtagaaatggagacgtcgtcctggacaagaagaggatgagggtcttgagaatgagggaggtaggccaaatttttaattcctgctcttgctttggctactgtgttcaagcaaaagaccccagacactacctatttcaactctgcttttcatttttcccactctaagcgatggagaggatggcagcaaggccagggggcctatgtgcaggaaggctagggcgcagtgggcttctggcagaggaaggcaaggctgccaacccgggtgggggccgagaggcgcgtggtaaggctggggcaggggactgagatggggatagggtggggagccagaagcagggggcggcgaggccagtagggttcgggtcggcagtctagatgtgattagcagacggaggtgggacccgaaccccggctgaagctgaaactgaagctgaagaggcgccaggggcagagccaccctgtcactaccatttgggcagatctcagaaaggaagcggggcaggaatcaaggcatttcgaaacaggagtgagtagaaaataacctcgagcccagggcccgggtggtggcagcggcggggaaggggccccgcgcgcgaaggggctgccgaggtgggtccgctccgcggggaagcccaggacagagcgcggcggaggctcgcgccgtggtgcggggccctgaggccgggcggcacccacccgccagcgccccggccttgcgtacctgaggcggccgcctggctcccctccactccctggcagtccccgacgccgccagccgaccctgggcgggctgtggggctccaggagcccggcccctcagccgcctgcaggtcagacatctgcagcccgcgcacggagctctccgctgccagccgcgagtggctccggaaacagccgaaggccgagcgagcgccgagcacagccgagcgcagcctgcaggccggaagaagcggcgcggcggccgcttgaaaagctagctgacccaggggcggccacaggagctctggcccgctgaggctggcgatgaggccgcagggagggttactgcgtgcttgtgacagacgatttttaaagtcagggcttgaaagaacaaacaaaacctggggaagagtcaggaagacactgccggaaatcgtggtatccatagagacgctatcggaagttggggttgctaggaagccgcggcgcgtctgctaagctgcaaatggctgaagtcccggaggattatgattccggcccagatgaagatggagagctggagcctgagaggcctgaactgcctggacttcataaattgtatgaaaatgccgaaccagacaccatggcaaaggcagactcgaagctaccagcagagatttaccaagagccacagccagagaccgaggaagaggacttcaaagagggggagccagacagtgctaagaacgtgcagctgaaacctggcgggacgtcccaggaaggaattgccaaggagtccaagagagacgtaccaagcgaaactgaaccagggatacaccaagaggtaaagtcggaaacatccagagagatgggagagtttttcaaagatttggaggcccctatggatgaaacgcataaagagtcagacctagagccaccagaggaggctaaaccaaatgttacagaggatgtgttcctagagtcagctatggaaacagatccagatccagtgccaccaacggaaaccatgtctgaggtttcgggggccacagtcagagagagaaatttagaattactagaggaggagactgaaccgggggttccagaggaatcacttagagtgcaacatgaagagacaggtctagagcctccagagcagaccaaacaagattttccaagtgagaaactaggagaatcacttgaagagacagatcttcagccaccaaagatgaccaaaccagagactccagaggagacacaaagagagtcaactgagaagaaaaggacagagccacccgagcaggctagactggaatttctggagaaggaaccaagaaagtctagtgaggaggcaggtctagagcctccagaagagactcaaccagaggttccagaggagatgcaaagaaaggcaactgaggagaaagggacagaactacctgagcggactaaaccagactttccagaccacaagccaagaaagtctactgatgagaacgttcctgagccactagaagagatcaaattagagtttcctgaggaagaatcaagaaaaacaaatgaggaaacaattctagaacaatcagaaatgatgaaaccagaaagtccagaagagataagaaagtcaaatgagaaaaaaaatccacagccaccagaggagactggtccagtgctaccacaggagatcaacccacaagttgaagagaaaacacaaacaaagccaactgagaaaattctagagttaccagatgaaaccaaaccaagggagacacatgtagaattttccaaggaagacaggccagaaccaataaagtctaagtattctgtaggaaacgatgagctagagcaccgtgagcctaaaagaggaaagttgtcactaagtgacaaatttagaaaagaatattacgcattaggatctctcagagaaagtgaagaatcaattggtacacattatgagtttttgcaaccactccaaaaattgcttaatgtcagtgaagaatgctcatactcagatccctcagagtctcagacagaattaagtgagttcgttcatgaaaaggaagttgtagatttgtcccaagagttgaaggaacgggtctctgaagatgacgaaacccagccagaaaaagggactgagttacaatttgagcatcttaattgggatccagaggaagttgcagagtggattagccagctaggcttccctcaatacaaggtatacaaaaataagatgttttgaaatcacatgctgtcatccgtctacttcttattccttctaacttggcctgagctcttacctctttaccggaaggagtatcaaaaagtcctagactgtggtagaggtaacttggattttaattttggccttgccactgatgtatatttgtattttgggagaggaagggagggtcacatcggtttgtttttcctcttccagtgattacacttctctgcaatccttgaataaaagaccaagaagagtatatagacctcctttctttttttttttttgagacacaatctcgctcttgccaaggttggagtgcagtggcacgatctcggctcactgcaagctccaccttccccaggttcacgccattctcctgcctcaacctcctgagtagctgggactgggactacaggcgcccgccaccatgcgcggctaattttttgtatttttagtagagacggggtttcactgtgttagccaggatggtctccatctcctgacctcgtgatccgccagcctcagcctcccaaagtgctgggattacaggcgtgagccaccgtgcccggccttagacctcctttcatagaaaactgtatttttaagtagactttgttcaaggtaggctttttggtactttgtcaagttattttagtggcagctcccttgctttgaacttgtgctattactttttaaagtgtctgccccaaatatgtcacctgtatcatgagcacttaagtgtattaattcaagttagccagttaaccaaaactagttttagtaaaaagtcagtgtaaacctcttgtttcactgatgccaactaggtttaaggctaccacaaaacaatacaagatctgaaaccttttgtacctactatacttacaaatgtaattgagacatgaagaagcactggttgtaccatgcccaaaaaaacagttaaagagcagtgtaaaatttaataaagagcttacatggaaaaattgtgccgttattgggatagaaagtaaatttaagctactcaggaggctggggcaggaggactgcttgagtccaggagttcgaggctgcagtgatctatgactgcagcactgcactcccgcctggatgacagagtgagaccctgtctctaaaaaagaaaaaacaaaataatatttttttctcagggtagaacaaacacgacttcttcccttcctcccccttccctccctttcttccttctatttgcagtacattttttaagtgatgtccttgttgtattgacaggagtgttttatcacaaacttcatcagtggccgaaaactcattcacgtcaactgctcaaacctccctcagatggggataacaaactttgaggacatgaaggtgagttgtgtccaaagtttccctacagagcactgttaacagtgccaccatctgtctcaaaccaacctttttttcctccagcctggcctcccacttctgtcaatggtgtcatcataattccagttcctcaggctcacggtggttgcctcctctttctcctttgatccccataaatattccaagaactgtccattgctcctgtggcacttacaccgtctggctttcttcattcccacttttcagaccttatggcctcatgcctagaacaccacagtggcctcccgcttttagcctgtctcaatggaccctttggattcaagggccctgcttttatgctctcactttccacctacttatgtactattcaaaaaccttctttggatcccttctgcttaccaagatagtctccactccctagtttagaatttagggccctccacaagttctctcccctaccactcctccacatgaattttgtgctccagcctaccaccaggtctaacaccttcgcaaacctgcctggtgcgttcttctctctatgtcttcgctcagttcccccatcctctgtattactaatatgaatcttaatcatccttcaagaccagttcctcatttgcatctccccaagaagtcttttgtaacattcccagcccacagtagcccccatcccaagttctcatgacattttgtgtctctgacacccatttggcacttatataacaccatatgtattttgcctgctttgctgcctaactttgaaacaagctacattaaccactctgagcatcaattttctaaaatctccagcaccaacagttcatgattattctcctttgcataacagtaccctccatttgtagtgctttgcaatttacaaagcatcacaaacaatctcacgtgtaacctctcctttagtaccccaccccaataaccctccaagaatggacagttcttggcataaccatggttttgctcagcacacccatgcccagaaatgtaccacctcagtggtttccaaacttgggtcgtcttcagaatcaaatgagattttttgaaaaagatacattcctaggcttcatcctccagagattttgattcattagggctgggtaggccctggaatctcttccctagatgactcttcaacaggccttataaccctaaaattccataagtcatatggtttagaaataagaaaactatgcttgttaatacctgagtccttttactagcaagaagatataacgaaactttttaaattattaaacatacagtcctaactgagcgtttactttcttaaattctgctaatagctatgctttgctgagagcttactgtgtttggggcctcttatatgtattatttcactaattcccattttatagaaaactggggcccagaaaggtgaaacaacttaacaagctattcagataatacgttttttctgttttttgtctttgtttttgttttttttgagacagggtctcgctctgtcacccaggctggagtgcagtggtgtaaccttggctcacttcaacctccatctcctggtttaagcgattctcctgcctcagccccccaagtagctgggactacaggtgtgcgcaaccatgcccagctaattttttcttcttgttgtttttttggggttttttttttttgagaccgagtctcactccgttgcccaggctggagtgcagtggtgcgatctcagctcattgcaacctccacctcccgggttcaagcgattttcctgcctcagcctcccgagtagctgggactacaggcgcgtggcaccacgcccagctaatttttgtatttttagtagagatggggtttcaccgtgttagccaggatggtcttgatttcttgacctcgtgctctgcctgcctcggcctctcaaaatgctgggactacaggcgtgagccaccgcacctagcctaatttttgtatttttaatagagacagggtttcatgatattggccaggctggtctcaaactcctgaccttaagtgatctgccggccttggcctcccagaagtgctgggattataggcatgagccaccacgcccgacttatattcagataacaagtttaagagccaggatttaagtccatcttgtgtgacttcccaatccatgttctatttaactgtattgcctaagtgaacatttttgttaccataaacttccatgtactataaacattatgatgtggaaatgatcctttatttattttatttatttttttgagacagagtcttgctctgtcacccaggctggagtgcagtggctcgatttcagctcacggcaacctccgcctcccaggttcaaataatcctcctgcctcagcctcccaagtagctgggattacaggcacgtgccaccatgtctggctaatttttgtatttttagtggagccggggtttcaccatgttggccatgctggtctcgacctcctgacctcagatccacccgcctcagcctcccaaagtgctgggattataggcatgaaccatgcccagcctggatcatttattatatacttgtatttccaaccatgccctcacttaactaccaagtactgccagataaatatcttgttctttttatgttcaaagataatacagctgtttttatgaactctaatttctacttaaggtataatgaattttctagataaaaataaggaacaggctgctctgcctacggagcagccatagtccttgactttcttaataaacttgctttcgcttaaaaaaataataataataaggaacagaattagcaaaatagtaacctgtcaaattcctggaacatttaagtaccaagaatttcagctttttatcatgagaaggcatttttaagagtcagacaattcattcagctcccttggtattctaattccaaaagtacaatatcaacatgcagtaataaaaattctaattatagtttttcttatcttgcgagacacaagaggttttaaaaatcttctgaaatcctcaagagtaaatgacgaatccagtggtctgtccttttatctaagaaatttgaataagcaaactttgagatactcattatcacagtcacctcagacaaatgtggccttcccttgaggtcactagagtaacataaagaccaagacatccaaaggttacgttagataagctttgcttgacacttagacccacatgaaaaagctgattatggccaggtctggtggctcacgcctgtaatcccagcactttgggaggccaaggcaggtggatcacctgaggttggcagttcgcctggccaacatggtgaaacttcttctctactaaaaatacaaaataaaaaaattagctaggcatgttgcatgcctgtagtcctagctacttgggaggctgaagcaggcgaatagcttgaacctgggaggcggaggttatagtgagccaagattgtgctctccatgaactgcactccagcctgggtgacagagcaagactcagtctcaaaaaaaaaaaaaaaaaaaaaaaaaacctgattatgctctaagacacagggtaacttctaggaggtcatacatgctgtagctgtcttccttactgatatacacagcttttaaaatgtctccattgtacttacagcacctagttcacccacaatttatcccataacaacagttaaatagtatagttatctttttcatgctgagtctcccatatcatcatttatggacttttgggagaatagaaggaaggaagagcgagcagattgcttgagagtgtggaattctggacatgctgctaagaatctgaacagcattgccactgtgcacctcctatacaagccttgcagttaatttatggccattttctgttatcttctcagcccttctatgtttaattggaattcttctgtaaggaattcttctacatttaattgtcccctttctcccattttttaatccattcagtcattgatattagtgtggacttatggatatttatttttggggttataacccagttctattgctatttattttgttgctcaaattgtgccatctttcaccattgggggctcttttaaattggctcttgtggccttttgacatgtcctcccttttttttaaagcatctccttaccttctggcaatataagttgcttcggactcatcttatatttttcctgctgcagccccagaatcagccatgtttctaaggagccctggttgattttatcagaggatggtatttagaaaccaagacgtggacactagttgtgcttgttgctactgagtgtcactgcttctatgcactcttaacagaaagatctaggaaataaatgtatatatactaacccatgtgtacacaaatatctatcttatttcgtatctatctgtgtatatacatatgtattaaaataagcatgggggccgggcgtggtggctcatgcctgtaatgccagcactttgggaggctcaggcgggtggatcacctgaggtcaggagttcaagaccacctgaccaacatggtgaaaccctgtctctactaaaaatacaaaaaattagccgggcctggttgtgcgcacctgtaatcccagctactagggaggcagaggcaggagaatcccttgaacctggaaggcagaggttgcagtgagctgagatcataccactgcactctagcctggatgacagagtgaaactccatctcaaaaaaagattgatctctctgatatctctaatctaacatcacagagttcattctagccttccttcccatccttcctatccccaaccccacttgcctttttttttcttttttctttttttttgagatagagtctcactctgtcactcaggctgcagtgcaatggcgcgatctcggctcactgcaacctctgcctcccaggttcaagcaattcttccgcctcagcctcccgagtagctgggattacaggcgcccaccactgtacctggccaattttttttgtatttttagtagagatggggtttcgccatgttggccaggctggtttcaaactcctgacctcaggtgatccgactgtcttggcctcccaaagtgctgggattatacccccttgcctgtttataactactttttctgacattgagaaacttggctctccttatatgtaaatatgtttccctatgaaagacagatttacccaatagagttcagtgtttgtgtacagctgtttctgtctctcgccttacagtatctagacaaagcactgttttcttaaagttacaggtcagcacctttcttccccacccccttcagtgagattatgtcttactctataatacagttagattcatttgtccacagcctttattccaccccaacatcctggattttttttttttttttttgaggcaaggtcttgctctgtcacccaggatggtgtgcagtggtgcaatctcagctcagtgcaacctccacctcctgggctcaaataatcctcccacttcagcctcccgggtagctgggactacagccacatgccaccacacccgtctaattttttgtacttttttgaggagatagagatggggtttcgccatattgcccaggctggtcttaaactcctgagctcaagcaatccacccaccttggcctctcaaagtgctgggattacaggcatgaaccactgcgcctggcctctcttcctggctttttaaaagtttgcatgcagtaaaaccattctttgttgtgtgtagttctgtgggttttgacaaatgcatgcactcatgtatccaccaccaaagaaccatacagaacaattctgtcactctagaatttccctttgcagtcagcccatccctttaccgtaatccctaatctgtttttgatgtcacataagtggaatcaaataatgcacattctttgggtccggcttcctttccttagcaaaatgcatttaagattaatccatgttgttagatgaatcaacaagcagatgttaaggagactatacatctgctttaataatgctggtataggctggctgcagtggcttggacctgtaatctcagctactccagaggctgaggtgggaggaatgcctgagcccaggagtttgaggctgcagtgagctatggtcatgccactgcactccagcctgggcaacagagggagacctcatctctgaaataataataataatagtggtatagatggttcatattttaaccacaacaattatgtctttgtctttaggtttagatcatataaattatagattccaattatacaaatatgcatagttacatactatgaggtaataaccaatacacaataaattggtgatgaagcaaaaccatcagtagtttacaaataaaagaacagcagcctttgaaaacaatgatcaacacaagttacaatgataatatagtaataattgtcttcttgaaaaccacaggcattgcaggtaactggttgaggccatgtgaagtaggtgttctgccgtgatgccacgcactgagtataagctatcaccttagaatgtagaattatgaatccttagaaaactaatcatcctcacaaatacctatttccaataatccttactaactcaagtaatttgccagtaagttgctctaagtcataggcaaaaataaagtctactgcttgttgtttgttcatcagaactagagaggccgggcacagtagctcacgcctataatcccggcactttgggaggctgaggtaggaggatcgcttgagcctaggaattcgagaccagcctgggcaatatagtgaaaccccagctctataaaaaatattttaaaagttagccaggtgtggtggcacatacttgtagtcccagctactcagcatgctgaggtgggaggatcacttgaacccaggaggtcaaggctgcagtgagctatgatcatgccactgcacaccagcctgattgacagagcgagaccctgtctcaaaaagaataataactaaagaaagaaactgcagttttagttcaatctttcacctgtcagaggacttcttgtttcattgatgaacttcagacacacttttaaaaatcactgaataggaggagagatagtcagattgtatttattgatttcagtgctaagtgtaatgaattgctttttttatgaaattattatttttattaagaaacccctaagcaccaagagccataaaaaaaacccgtatcatttgctgttatagcccacagagggaatatgagtagattatatatatatactcccttcccaaaacaaagaaaaattccaaaaacacatgaatgtggctgagcagctggctcacacctgtaatcttagcattttggaggctgaggtaggaggatcacttgaatccaggagtttgagaccagctggggaacatggcaaaaccccatctctaccaaaaaaaaagcagggtatgttgtcatgcatctgttgtcccagctacttgggaggccgaggcaggaagatggcttgagcctaggagttcaaggctgcagagagctatgatcacaccactgtactccagcctgcatgacagagcaagaccttcctgtcttgataaataaatacacacgaatgtgtagggaacacttttaatttctgcattacaatactgtgcaaaacagtagtgaaccctctcagcccacagtgggcacacagctctttttgttaataatgtgtatatgactgcagtgtacctcctgggaatacaatctgtgaaccttagggaatttgtgaaataaccttttctattcggggcattggaaaggagaatcagggtacttgctttggcagcacatatactaaaagagaatcagggtgagatgcctaccaaacaaggtgcacacgtagaagcatgcatcacaaacaagaagtcttagaagccacctgttcgtgtgtgtgtgtgtgtgtgtgtgtgtgtgtgtgtgtgtgtgtgtgtttgcttttggagacaggtctgttacctaggccgcagtgcagtggcatgatcatggctcctcactgcagtctcaaactcctgggctcaaaagatcctcctacttcagcctcccaagtagctgggactacaggcatgcaacttcacgactggctttttttttttctgtagcaatttgttttttttgtttgtttgttttttgagatggaatctctctgcatcacccaggttggagtgcagtggtgcgatctcagctcactggaacctctgcctcccaggttcaagcgactctcctgcctcaacctcccgagtagctgggactacaggcgtgcaccaccacgtccagctaatttttgtaattttagtagagacaggattttgccatgttggccaggttggtctcgaactcctgacctcaggtgatccacctgcctcggcctcccagagacataagccacctcacctggcctttgtagtaacttggatctcagttcttagaagccccaactgataaagatctcaattagaattctcactggacaactcaggaggctgaggcaggaggatggcttgaacccagttgttcaaggctatagtacactataattgtgcttttgcatatccactgcactccagcctgggtaacacagcaagaccccatctctaaaacaaaacaaaacaaaaaacaaaaacaaacaaacaaaaaaaaacagaatccttactcggaatgccaaggcaactatacccataaatcatctctagagtcaacaaaaccagttcaagtaagatctgagaaacatggcatcttgcctatctaaaaggcattgctaatgggcagttttatatcaggtttagcattgtctgtggcacaaattttacagtcttataactctgaccagtagctttaaattaaaaaaaaaacaacaaaaaagtccattccaaataccctttggctgtgttctagcagcaattccatggactgtcgtctcatccagaggcagaatatgaattcaaacagtggtattataactgacctaggattaaaactagaatttgaaaaggcaatcacaattttttttttttttttttttttgagacagagtctctctctgtcacctaggcgggagtagagtggtgcgatctcggctcactgcagcctccgcctcccaggttcaagtgattctcctgcctcagcctcccaagtagctaggattacaggagcatgccaccacacctggctaatttttgtatttttagtagagatggggtttcaccatgttagcgaggatggtctcgatctcctgacctcgtgatctgcctgccttggcctcccaaagtgctgggattacaggcgtggcgtgagccacggcctggccagcaatcacaatttaagctaggatatcaagtggcatggtgctcaatgaatacaaattttgttttacagatgctgaaaattgtggcaaaagatattttagaatacacaagtataagtactaataaaacagctcgaactttaatgtctgctttttagtgtttgagttttttagttaaataaatgaggtaactatttgttatgattttttttttttgatggagtttcgctcttgttgcccaggctggagtgcaatggcatgatcttggctcactgcaacctccatctcccaggttcaagcgattctccggcctcagtctcctgggtagctgggatcacaggcgtctgccaccactcctggctaatttttgtatttttagtagagacagggtttcaccatgttggccagactgttctcgaactcctgacttccggtgatctgcccgcctctgcctcccaaagtgctgggattacaggcttgagccaccatgctcggccctgagttataattttttttcttagttacacattaactgagccccatatagacaagttatttaataaccttcccagagacagtcatggctcctaatctgaacatattatctgctcttatgcttggtcagattgctcagcaaaaacaaagaaatgaacccatccatggccatctgatgcaagggcctagaaatgtcttaaatggtactttgaaaaggataatcatgacatttaagaaattggttttggtaaggttaggctagtaagcctgtgaatttgtttcattattttatttccccatagaaataaggaattggcagggtgcagtggctcacgcctgcaatcccagcactttgggaggccaaggtgggcggatcacctgaagtcaaaagttcgagaccagcctggccgacatggtgaaaccccatctctactaaaaatacaaaaattagccaggcgtggtggtgtgcgcctgtaatcccagctactcaggaggctgaggcaggagaattgcttgaatccaggaggcagaggtggcagtgagccaagatcgcgccactgcactccagcctgggcgacagagcaagacttcgtctcaaaaaaaagaaagaaataaggagttaatattcaagaggcttagaaaactaaataaaccttctttgatttggttgtgttttcaggttagtctaattaaaaatttatccttgcgtttcaggcaatttctcggcatacgcaggagctcctggaaattgaagagccattattcaaacgctccatcagccttccctatagggatattatcggcttatatttagagcaaaaaggtcatactgggataaaatctgattccttgactttatctgaatttgtcaaagcagcaggattacaggattatgctccagaaataactgcccctgaagagaatgaggaattaccttgcactgaaccataggggaaatccacttcacagagcttgaaagatcaaactaaattacttgagggaagaggtatggtcttttttggttttctttttctccttttttttttttttatttttttgagacagagtcttgctctgtcgcccaggctggagtgcaatggcacagtctcagctcactgcaaccttgcgattctcctgtctcagcctcccgagtagctgggattacaggcatccgccatcatgcccagctaatttttgtatttttagtagatatgatgtttcaccatgttggccaggctggtctgaaactcctaacagttgatctgcccgccgtggcgtcccaaagtgctgggattacaagcgtgacctaccgcacctggccctttttctccttttcattaaggatcagttagaactgctggcttcattcctagttgtgtctctgacttatggtaccctccctttctttttgcaatttaaccccttgttaaaacaaagatagtcacgcttatctttctgggtaattataagaattcctgagccgggcaaggtggctcacacctgtaatcctagctctttgggtggctgaggcgggcagatcacctaaggtcaggatttcaagaccagcctggccaacaaggtgaagccctgtctctactaaaaatacaaaaattagctgggcatggtggcacatgcctgtagtcccagctactcaggaggctgaggcagaagaatcatttgaacccaggaaacagaggttatagtgagctgagatggtgccactggactccagcctgggtgacagagtgagactctgtctaaaacaaacaaacaaaacaaagcaaaacaaaattcctgaaaaattctagtaatgcaccttgtaataggaacatgttggggaaatataattaaaaataaaatctcctgccaactccggagagataattctttccacaaatgcagaagagaaacatttttattcttgaataagcattaaactgtgatgcacatcacaggcaagctgctaaagagattgcaaagacaaatctcacccttgtagatggcagagcagatacaatacacgacatacatgttaattatctgtgtccaaaggaaaaataaaacttctatcttgacaacagacagaagttactacttggagccaggtacctaagctaaactcccacagagacagggagacaaggtaccaacctcctcagtgctcacatttcaaagagatgtctccgtggcctccaaaaaagagactgtcctgaggtataaaatggctagagatattcagctttttaaaagatttacatacatctcaaagacatagtaaaaggatttgcagtgacaagttctttaaaggaaatggtggttttttgtttatttttttgagatggagtctcactctgttgcccaggctggagtgcaatggtgtgatctcagctcactgcaacctccacctcccgggttcaagtgattctcctgcctcagcctcctgaatagctgggattacaggcataagctaccactcccagctaattttttttgtatttttagtagagacggggtttcaccatgttggccaggctggtctcaaactcttggcctcaagagatctgcctgcctcggcctcccaaagtggggagattacaggtgtgagccactgcgcctggcctaaaggaaatgttttgcaaaaaaaaaagtggggaagttctctcttccttttggcatcaggaaaaatttaaaagaaaaaaatttttttagatatgtgtgtatctaaatatgtaaatatctaaacatggcttaccactatgaaataggttctgtggtttgcttacaggcttttttatgtggtactttccaggtctttataatacaaaatttaggctagagtctacccatgactgcacttctcaaaagaaattataggccgggtgcagtggatcatgcctgtaatcccagcactttgggaggccgaggcaggtggatcacttgaggtcaggagtttgaaaccagcctggccaatgtgatgaaactctgtctctactaaaaatacaaaaattagccaggtgtggtggtgtgcgcctgtaatcccagctattcggaaggctgaggcaggataatcacttgaacccgggaggtggaggttgcagtgagccaagattgcgccattgcactccagcctgggcaacagagtgagactccatctcaaaataaataaataaataaaaataaaaaaagaaattataaaatatttctcgttacctgaatggctccagttcccctctagttttacagatttaactgctcattctcttcctggactcatattttaattctgaaaacaaccatgggctaacacagtcctgaaggacagtgatgaagctccagttccctacaccagaatgaatagtaaaagatgtttttctgtttttccactgagaaaagcaagagtgcctcaaatgaatattcatgccaagtgttaatatttgatgatgaacctaatattttcccaaattggactaacaaaattgtatcagaaaccattctaacaccataccattgcatttgcctggctcacgattatgtaaaaaaacaaaaggtaaatgattaacctaagaccatagtgatttacatatatagtgaatggttttgttcaaaagccctttagcatttagcaaacagtagttatgttctatgacagagcatagtgacatccctgttgttttcaactcttataactgacaaaaagtatttgcaaaacataaaggaaatcaacaaatttgcagtatagatctatattttgcaaaattagttttagccattaaataccagttttttaaatggtttaaatgggaacagctgtaaataagatagtaccagaacagtcatatatagtcaaaataagcatgatacaagccataattcaattaagatggtttaccataccttcacttctctgtccaaaattgtgagaaaatcaaactgtatctttttccagctacctactgctggcaaatggattgaaacttgatttattggaaaagaagctgcagtatgtaattgtctaaaacttataacattataacttctttaattttagaagagaaataatttgtattaacaagacttttctgcgggagcagcttacttaagttaggttgtgtagtttcactagttgcttctgagagccagatacatattgatggataggaccacttgttttattctacattttaaagagtcatcagtacagttttataattcctgatgtctatcatgtggcaaacacaatacagccacaagactcccacagtcaattgtgataatcagggcacaactattatagggaaaatctgtgagtgggaaaaaatcctgattcctgagttctcttattgggatggaaagcctgtggaaatgactggctgttctttggttagggagatgccaaatgaagcacagtatagatgggtaaggtggtcttggagaacaggactacttgagagatgctggctaaacggagtttccttgagttgcacagcagtcagatcaaaccaggggaaaggcctgaggtgaaaaaaatattgttacttttttatgtctgttcagtatatctgatttggctgttaaacacatcttttaaagaaagttttcctcattaccttttcataaactagaaacattaataccttttcataaactagaaattcagctagaactagtcaatgtgtagatttaagtgtacttaatggtgatttctcacacttatgtacatttctctaagtgcatttggagaggaattcattgttaaagaattattataatattaacattgacaccctttgcagaaaatttttcttttttttctttcttttttttttttttgagatggagtcttgctctgtcgcccaggctggagtgcagtggcgcgatctcggctcactgcaagctctacctcccaggttcatgccattctcctgcctcagcctcccgagtagctgggactacaggcgcccgccactacgcccagccaatttttttgtatttttagtagatacggggtttcaccgtgttagccaggatggtctcaatctcctgaccttgtgatctgcccgtctcggcctcccaaagtgctgggattacaggcgtgagccactgcgcccggctgcagaatatttttctcgaatttagaaagaacatatataagatcgtggacattaagcaaggaagaagtctaattgcttttaagatatcctctttagctgtatagattaaaaagtaggctgggcacagtgactcatgcctgtaatcctagcactttgggaggccaaggcagcaggatcacttgaagtcaggagtttgagaccagcctggacaacataatgagacctcatctgtacaaattaaaaaaaaaattagctggatgtggagggacacacctgtagtcccagctactcaggaggctgaggtgggaaattgcttgagcccagcaggtcgaggctgcagtgagctatgatcacaccactgcactctagcctgggctacagagtgagacccccatctctaaaaaaacagagaggaaagttaatatgcaaatgaatacctaacggggcaacattaagtattagtctatagtgtaattcaagttaaaaagccttaagacatagggtttcaatatttttcaaaagatcaggagagacaggcatgatggtgcgcacctgtagtcccagctactcaggaggctgagagaagaggattgcttgagcccaggagttcaaggccagcctgggcaacatagtgagaccctgtctgttaaaaaaaaaatcaagagtaaggctaaggcaaagatacctgctctcaccagtcttatacagaatagtactagaagttctaggcaatgcaataaggcaagaaaaggaaattagaaggcatggacattggaaaggaagaaatgaaaccgtctctatttatacatgacattattatctatgtagaaaactccaaggaatcttttttttttttttttttgaaatggagtttcgctcttgttgcccaggctgcagtgcgatggtgtgatctcagctcaccacaacctccgcctcctgggttcaagtgattctcctgcctcagcctcccaagtagctgggattacaggcatgcaccaccatgcctggctaattttgtatttttaatagagatggggtttctccatgttcatcaggctagtctggaactcctgacctcaggtgattcacctgcctcggcctcccaaagtgctgggattacaggcatgagccaccgcacccagcccaaggaatctatttttaaaacctcctagaactaatgaattcagcaaggttgcaggatacaaaataaacatacaaatatcaattgtatttatatacaatagtgataaacatgtggacaccaaaattgaaaatgttttttcatttattgtcactccaaaaaatgatatacttagatgtaaatccaataaaacatgtacaagacttgcataataaaaactataaaatgctgatgaaagcaaagaatatctagagaaacatactatattaatgagtgggaaaactcaacaaaattaagatgtcagttttccaaaaattgatctatagatgtaatcacaaaataaaaattattgccaacaccagttgctggtgaggatgcagagaaactggattatacattgctagtgataatataaactggtactactgtgaaaaacaatttggcagtgtcttaaaaaaataaatatgcaactaccaaatgacaataattacactcctggtcattcattccaggtaagtggacacttatgttcacacaaaagcctgtacatgaatgttcataacacccttattcataatagccaaaaactggaatcaacccagatgtccttcaacaggtgaatggttaaacaaattgtgatacagccatgccgtggaatattattcagcaataaaagccaactattaatacacataacaacttggatgaatctccagagacttgctgaatgaaaaaagccagtttcaaaaggtggcatacatatgattccacttatataacattcttgaaatgacaaaattataggaatgaagaacacattagaagttaccaagtttgcagctgtgaggaggcaacatgaagaattcgttagtgaaagaactgttctatatcttaactgtatcaatgtcagtatcctggctgtgatattgtgctacagttttgcaatatctatttccattgatggaaaatgggtaaatgggtacatgagatttcactattatttcttaacaatttcatgtgactccgtatttatctcaaaataaagaaaaaaattatcttggctgggtgcggtggctcacacctgtaatcccagcactttgggaggccaaggcaggcggatcatttgaggtcaggagttcaagaccaggctggccaacatggtgaaaccctgtctctactaaaaatacaaaaaagtcagccaggcttactggctgtaatcctagctactcaggaggcagaggcaggagaattgtttgaacctgggaagcggaggttgcagttagccgagattgcaccactcactccagcctgggtgacagagctaaaactccatctcaaaaaaaaaaaaaaaaaatacttgaattccagtttctggtctgacatgtaagaagctagaagttgccactctatcctaacaataattaaaaagctgaactaaaaaatcaataactcttttagatgtgtaagagaggtagggtcaagggcaaactactctccctaagactgcagggaccagaacacaaatgctcagaagtagcttgctggaggagaaacccatgagctgaaacctctatgggaacccagtgccaagatagggaacccggaactgtaactgacaaattgctggaggttcagagtggacaagtctgagaataaaaatgtcagacttgggggacccaatcactggggaccctcacacttatgatttttacctctaggagctcaaccaggttctcagtgatatctgagaaaaatccccttgtgcttccatcaaagggagaggaaaataaaccattttgaaatatggcagagcattctgttcttagcaaggtctgcccttgggagaaactatttaaccagagccaaaccttctggggttttatctgagcctaactgacctgggggaagagaaatagccagttccagtcaggtctacccttccacgtggaaggaggaatgggctcctcaactccagcccactttagccatcctgttccactgaagaaggagaaaaatcctgagaaacacttgtgaagttcacagtccagagtacaggctcactcaaagactgagacctacccgtaggactatagaacacttcccctcctcaactccttactacattattaaagacctatttacaggccgggtgcgatggctcatgcctgtaatcccagcattttgggaggctgaggcgggcagatcatggtgtcaggagttcgaaaccagcctggccaacatggtgaaaccccatctctactaaaaatacaaaaattagctgggtgtggtggcgggcacctgtaatcccagctactcaggaggctgaggcaggagaatcgtttgaactcaggaggcggaggttccagtgagccaagatcgcgctattgcactccagcctgggcaacagggcaagactccgtctcaaaaacaaacaaaaaaaagcctatttacagcagttctttttacctggtacatcatatctgactatccagaaaaagttaacaggcatactaaaagccaaaaaacaaaaaaccaccaaaacccacaatttgaaaaggtagaacaagcatcagaaccacatatgagaggaatactggaataatcagactgggaatttaaaataactatgactgaggccaggtgaggtgactcctgtaatcccagcaatctgggaggccgaggtgggaggattgtttgagcccaggaattcaagcttgggcaacaaggtgagaccccagtctctacaaataataaaaaaaactagccaagcatggtggcatgtgcctgtggtccagctactcgggagaggtgggaggatcacttgagctcgggagattgtagctgcagtgagcagtgatcatgccactgcactccggcctgggtaacaaagcaagaccctgtctcaaaaaataaaataactatgactaatatgctaaaggatctaatggataaagtagacggcagactacggaagcagaaagatggaagttccaggaaccaaaaataaatactactcattaaaaacactgtgacagatatgaagaatatctttgaggcccctattagtagactgttcatggccgaggaaataatctctgaatctgaggatatctcaacagaaacctccaaaactgaaaagcaaagaaaacaaagacgaaaaatacagaacaaaatatccaaggactgtgggacaactacaaaagatgtaacatgcgcataatgagactagaaggaggagagaaaggacacaagaaatatttgaaacaataatgactgagaatttcccccaaattaatgtcagacaccaaaccacagatctaggaagctcaagaagacaccaagcaggataaataacaaaaacacacaagaaactatacctaaacatatcattttgagactacagaaaaacaaaaaatcttgagataagccagagggaaaaaaaacaccatacccatagaaaaacaaagataagaaagctgatttttaggatcatgcaagcaaggagagagtgcagtgaaatatttaaagtgcaggaagaaaaaaaatcactaacctagaactctgtgcaaagttatccttctaaagtgaaggagaaataaagactttaccaaacaaaaattgagggaatttgttgccagtagacctgtcttgcaagaaatgttcaaagaagttccttaggaggaaaatgatataggtcagaaacacggatctacataaagaaaagaagagcactgaagaaggaacaagtgaagataactttagtttttcttactcctaactgatctaacagataacactgtaaaccagaaagtatctgagacaagcatcagtcaatttagaaagtttattttgccgaggttgtggctatgtgcccgtgacacagcctcaggaggttctgatgacatgtgcccaaggtagtcggggcacagcatggttttatacattttaggaatacaggagacatcaatcactatatgtaagatgtacattggtttggtctggaaaggtgggacaacttcaagtggggcgggggtttccaggtcataggtagataagagacaaacggttttattcttctgagtttttgatgagcctttcactgaatacacaatttacaggaatagtctcttatgacttagaatggcttagtgaagcaatagggcaaatgtttaaatgtatgttgcaaagttgtaggatacaagattaatatgcaaaagtcagtgtcttttctatataccagcaatgaacaagtggaatttaaaattaaaaacacattaccatttatattagaacccccaaaatgaaatacttaggtataaatcaaatgaaatatgtgcaagatctacataaggaaaactatgaaactgatgagagaagtctaaaaacaacaaaataaatatagagatttcatgttcatggagaagaagactcaatactataaagatgccagttcttcccaactgaactacacattcaacgcaatgccaatcaaaatcccaggaaattattttgtggatattgaaaaattgactctatagtttaaatggggccaggtgcagcagctcatgcctgtaatcccagcactttgggaggccgaggtgggtggatcacgaggtcaggagtttgagaccagcctggccaacatggtgaaaccccatctctactaaaatacaaaaattagctgggcatggtggcgggtgcctgtaatcccagctactggggaggctgaggcaagagaattgcttgaacccaggaagcagaggttgcagtgagccaagatggcgccactgcactccagcatgggcaacagaacaagactccacctcaaaaaaaaaaagtttaaatggaagagcaaaagactcagaacaggctgggtgtgacggctcatgcctgtaattccagcactttgggaggctgaggcaggaggatcacttgaggccaggagcttgagaccagcctgggcaacatagcaagatcccatctctacaaaaaaatataaaaaatcagctgggcacaatggtgtgcacctgtagttctgtagttctagctactcaggaagctgaagtgggaggattgcttgagcccagaaggttgaggatgcagtgagccatgatcgtgccactgcaccccagctggggcagcagagcaagaccttgtctcaacaacaaacaagactcagaatagccaactcagtattgaaatggaagaacaaagtcagaggagtaacactacccaacttcaagacatcctttaaagctacagtaatcatgacagtgcagtattggtgaaagacaaatagagtggaatagaatagaaagcccagaaatagacccgcataaatatagttaactgctctttgacaaaggagcaaaagcaatataatggagaaaagacagtctcttcacaaatggtactgaagcacttggatatctacatgcaaaaaagaaaaaatgaatctagacacaaaccttacacccttcacagaagttaagtcaaaatgtgtcacatgcagaactataaaactcctggaagataacataggagaaaatctagatgatcttggctttggcagtgactttatagttgttaacaccaaaggcatgatccatgaaaaaaacaattgacaaggtggacataattaaagaatttaaataactaaaactaaaagtctctgctttgtgaaagacactgtcaagagaatgaaaacataagccacagactagagaaaatatttgcagaagacagataaaggactgttttccaaaacatacaaagaactcttaaaattcaacaataggagccgggcgccatggctcacgcctgtaatcccagcactttgggaggccaaggtgagcggatcacctgaggtcgggagttcaagaccagcctgactaacatggagaaacctcatctctattaaaaatatataaatacaaaaattagccaggcatggtggtgcatgcctgtaatcccagctactcggggggctgaggcaggagaatcacttgaacccgggaggcagaggttgcggtgagccgagatcgtgccattgcactctagcctgggcaacaagagcaaacctccgtctcaaaaaaattcaacaataggaacacaaaccaatttaaaaatgggccagagaccttaacagacacttcaccaaagacaatatacaaatggtcaataagcatatgaaaagatgctacacatcaggccaggcatggtggttcatgcctgtaatcccagtattttgggaggccaaggtgggcatcacctgaggtcaggagtttgagaccagcctgctaacatggtgaaaccccatttctactaaaaacacaaaaaattagccgggtgtggtggtgcatgcctgtaatcccagctacttgggaggctgaggcaggagaatcgcttgaacccaggaggcagagatcacagtgagccgagatcacaccattgcactccagcttgggcaacagaagtgaaactccgtctcagaaaaaaaaaagaatacaaggaaaatttgacaggaaaactatatagtttacaacattaattaaatattacaatcttaaaggagaggagaaacaaaaatctcattaaatgcttaaaagggaaactgataaaatttgaaatagattttcttaaaacttgagaagaataaaattgggatgagtaaattagggttgacaaactactagaaggaaaccttttgtttttattatggaaattttaaaacaaaatagaatgaaacatagaatagtattaagtaaaaaagaatataacaaaaaatagtataacgaaactccatatgcctatcactcagatttaacaattatcaatttatagctaatcttttctcatacaaaaccccacccctactcctttacccccatctattggattattttgaaggcaatcccagacactatattgcttgatagacttatcactaaaaatacaaaaattagccaggcgtggtggtgtgtgcctgtagtcccagctactcgggaggctgaggtgggaagatcacgtgagcccaggaggtggaggttgcagtgagccaacattacacaccactgcattccagcctgggcagcagagtaagaccctctatcaaaaaaataaaaataaaaacaaaaaagttaatggaaataacaggcccaccaagtgctcaacatttaattaaaatagacctacatcatggcacatcataaaatttcaagatactgaggtcaaaagatctcataagcttccagaaaggaaagaaacaggtttcagacaaaggattaagaattagaatggcactgtaactctcagtagcaactctagaagctgaaagacaatgaagcaatgcctcaaaattctcccatccaagtactaaccaggcccgaccctgcttagcttctgagatcagatgatatcaggcacgttcagggtggtatggctgtagatgcaatccctcaaaattttaagggaaaattatttccaacctgcaattctatacctggctatgttctcaataaaatagaacgctagaataaaaacatctcaaagagtctctgaaaattatttcaatgcaccctttctcaggaaggtactacaggacatgttccccccaaattaagaagtaattcatgagagagaaacaagagatgtttccatgacaggaaacaagagatccaatacaacagaaaagtgaggggaatccctgggataatgaagaagaaaaatctccaaaccaaacgtgaatcacaggcatagagaataaactgtccattgatgattgattggaatacaaaagatgaggaagaagaatctaggattacatctagggttctgacttgaacaacttggtgaagcagcatataattaggtaagaaacatcagaagagcaggtttaagagcaggtatgtttttggacatggtgagtttgagtggagatggtgaatacacagttacctaggcacagcattgacatttaggctagagatacagagttatatgctgtcagtgaaaagatgggaacctaagtccccaaagtggaaaagatcaccgggaacaaagtatagaatgaaaagaagtatagcatgaaaagaaaagggcctaggatagagccctgaaaacacccagatttaagggtgaggcagaggagaagctagccaaggaggggccggggagtcaggaagaaaatgaggagaacgggagggatcatgacagcctagagaagagactgcttcaagaaggatggcatgttcaataattaaggaagaaaaagagtttaaagcatccagtggatctagtgacatggaagtcactagtaataagagcaataatctttgcatattagattatcaaagatcaaaaatatttatttgatagttatcagatattaaagaagtggcaccctcatatgctgttggtagaaatgtaaacaagtaccacattttttataagcaatttgggaacacctatcaaatataaaatatgcataaactttgacccagagcttctttcacatatgccaccgaaatactggtacaagtgcacaaagtacaagaatgttcaaagcaggccaggcgcactggctcacacctgtaatcccagcactttggtaggccaaggcgggcggatcacttgaggtcaagagttggagaccagcctggccaacatggcgaaaccctgtatctactaaaaatacaaaaattagccaggcatggtggcacatgcctgtaatcccagctactcgggaggctgaggcacttgaatcacttaaagccgggaggcagaggttgcagtgagccgagatcgtgccactgcactccagcctgggtgacagagcaagactgtctcacaaaataaaataaaataaaataaagaatgtcaaagcagcccgtaatgcaaaattggggatgagaggaggaactacatctctatcaagtggaaaaggagtgaataaatttaatggaataaatgtgtccggtggacacctaggtagctgctcataaatgaagtagctatgattgtactaacatagaatggtagctgtgatacagtaagtaaaaaagcagaatatatagttcccatgtgtctaacactgtatatataggaatagatatgcatatacattataacaatataaatgtttgtaaatgcatagataaaaatataaaaactgttagaggtgaaatctatgaaatgggatttggaaggcaaaggatggcatttacttttccactagttgaaattctttacaaaaaggtataatttttatcaatgtttaaagagaacatgaaaggataaaagaaaaaaagcattaactaagagaagagtctgggagaaatgagaatggccagctgtccaatgcccttacctttcctgagacaaattcttgccataggctttgctgacaaaatctgttaattgcaactttgggcaagatgctgtgtctttcccacagtcttcaaagtgcacggagagaaagagttcactcagaagctgcagcacttgggagtgggccatgtttcttgctgtgcatatgtttagggccgcatagaacactccctccaaccacttgatattgaggattattccccctacacatcaatgagaaggtaaataccagttagcaccaccaaaaatgagttgcagaaaacctagaataaacccctgacagtgaatagccgccttttttccaagacagattggtaatatgaaccacaagataagcaaacattccttcctgagccacaagtgctacttgtgccctttataacacatcatgtgttgaccatcccaaaagtggacagatacaactaatgtagacattgctaatggcaaaaagtgtctctggaatagtcgttgctaatatggagaaggaactggggaaaactacaagattagaacagggaaaagccattttagtccaacattacatcctcctattgaaataagctatctcctcttttggttttaatttgtccttaagaagtccaaatgatcaagcttctcagctcttcctaagtagctctcctgcagtaccttgtgccttacacacacacacacacacacacacacacacacagagagagagagattgatttaataagatagcaatgggccaacaggaaagtaattttcaaaagaatgccagaaatatgttgagccgtgaccagcaggactgtagggacaggtagcttgaagaatcgtaggatcttggagagcagctatgactcccttattggccccccagacgctgacagaatcttcatcatactgatactgaggccgcaagatattggtgtggttcaacagtagtttcagcctggaagtaaagccaagacagggagtgcaatgccaggactggaataaatgacgacataacccactgtgtttacatccaaccccatcaacagactcccccacacagctcagagataaatgcgggtctgggtctgtgctgagagcactaattaactggactgttcatccacctaacaaatccttacttattgaatgttatgtgctaggcactgggctagaaactaagtgtgcagaaataatatttgacacatactttcagtaacttttcatgttattgaccgatggtttctcttctcattgatgcacaaggagaatacttcagtgttcaagtaatgggaataaatgttctattgcaattttaaacctttgtacagcaacaaaaatggtttgtggttactatttgtgggtaagtagggaagttacgagaaagattggctaactatgttcttctacagataaagctgcttcctccttattactggaaacaaccaactctaagagataggggctacagtggaggtgggaggcagaagtcagagataaggagacagagcagttgtgccagttccattctcaccctaacaagatacctgggtagtgggatggcagctacaaagctgtacacaatgctggccttctcaaggctggtgtaaatttctacgcagatattaggcagctgagacggcaagcagcagaggaatatcacatcggcccaactcaccagatcagcgttatggtaaaagcatttgattcccagcttctggagctcacctgggagggataaaggaagacaggaagagcacagtactaaagagtttgacctgaacatcaactatggggagagggtgatcattattttagctcagtaaatcaacccatcttattgctccataaatcagaagatattccttcctacagaccttctaaaagccacgcagcaatgccctaactctattactaaagcagcagtagtacttgaaattataattcatctttttttttttttttttttgagacggagtctcactctgacgcccaggctgcagtacactagcgtaatctcggctcactgcaacctccgcctcccgggttcaagcgattctcctgcctcagctgctcaagtagctgagattacaggcatgcgccaccatgcccagttagtctttgtatttttagtagagacggggtttcactatgttggccaggctggtctcaaattcccaacctcagatgatccgcccatctcgtccgcccaaagtgcagggattacaggcgtgagccaccacgcctggcctataattcacctttatcttacttttagatcaagtgctggaatttttccaatttttttttaagacagggtcttgctttgtcacctgtggtgtgatcatggcttactatagcctcaacttcctgagctcaagggatcctcccgcctcagcctcccaagtagctgggaccactggtgagtgtgaccatgcccagctaatttttttattttgtgtagagacaaggtctcactatgttgcctaggttggcctcaaaccccaggactcaagtgatcctcccacctccgcctcccaaagtcctgggattacaggcatgagccctatgtgctgcccagactttttttttaggaagaaaaaaaatctcagagaagtcttttactccaatgtactgcaggataaccatgtgtcagataatgtacaaaggactttacagtttctaaggtgtaacccccacaaggaccttatgaagcagaaacgagtagcagtcccattttacagatgagactgaggattcaagaagttatatgacttgtccaaagttacagagctgctggcttgaggtggtggaaaagactaggagagtggaaggtataaatcagaggctgagaagggtttgcaaagatttaacagtttctgtaaagtatatacaaattaattttattaggatatctataaatgaagaaagactgataactcatgtagttgcataaaaacactcactggtagttaattttttttttttttttttttttttttttttggctagcgatgggatctcactgttatccaggctggtttccaactcctggcttcaagtgatccccctgccatagcctcccaaagtgctgggattatgggcatgaggcaatatggattttcaaaagtataaacctaaagtgtacactcacatctggtggtatgtcataaatgtcattggaaaacagaatataacagacattggagagtgacttcttatgttaaccactgagagtacatggcaaatgtaatgctaaggttatctagatactgataaacctggaagaaagacagatgatttggtttggctctgtgcccccacccaaatatcatctcgaattgtactccccacgtgttgagggagggacctggtgtgaggtgattggatcatgggggcagtttcccccatgctgttctcatgatagcgagggagttctcatgagagctgatggtttaaacatggcactttcccctgtgtgctctctcctgccaccttgtgaagaaggtgcctgcttctgcttcaccttccaccatgactgtaagtttcctgaggccttcacagccatgcagaactgtgagtcaattaaacctcttttgtttataaattacccagtctcagacagtatctttatagcagtgtgaaaacagactaatacaacaggacaaagtttagaaaacaggcctatctatcattctctcctgtgttgttctcattcttttcatgtgcatagaagctgatgttgagcattttgaattattgtttccttacacaacacatagtgatattttacaactataattttattctaataaatatattgctttgcaaagaatatatatactttgttgaaatatcacatatattagtcctattgatgggataaagatatataccttgagattttttttttttttttgagacagagtcttgctctgtcatccaggctggagtgcgtggtacaattttggctcactgcaacttctgcctcctgggttcgagcaattctcattcctcccctgtagctgggattcgaaggtatgtgccatcatgcctggctaagttttgtatttttagcagagatggggtttcatcatgttggccaggctggtctcaaactcctggcctcaagtgatgcagctgactcagtctctcagagtgctgggattaccggcatgagccaccatgcccagttggtaagattttttttttagtttccttaggaatataggaaaaaaaaaatggccaggtgtggtgacttactcctgcaatacctgcactttcagagggtgaagtgggaggactggttgagcctagcagtttaagactagcctcggcattagagtgacaccctgtctctatttataaaccaaaagaaaaaaagaaaaaaacattacaaatcaataagaaaaataaacctgggcactgtggctcacacctatatcccagcactttgggaggctaaggcaaatggatcacttgaggccaggagttcgagaccagcctggccaacatggcaaaaccctgtctctactaaaatattatacaaaaattagctgggcatggtggtgtgtgcctgtaatcccaggtatgtgaggggctgaggcatgagaatcacttgagcttgggaggcagggaggttgtagtgagccgagatcatgccactacactccagcctgggtgacaaagtgagactccatctcaaaataaataaatacatatatacataaataaatacataaataaagtaagtaagaaaaatacaggcacaccaacagaaaaaatggtcagaagcacctcagaaaaaatgacatagtaataaacctaagaaaataaaactcttctattgattaatgaaagacatattaaaacaagaaaataatttaaagtatattaaaatggtgatgttaaaaatgatcccagcactgacctgtgtgtagtgaaatgggtgttcttatgcaatgttggtaaaaaagtatacctgaaaaccttttgggaggtcaatttgaaaaaatacattagaagtttctttaaattttaaagatatacctaccacatgacccagccatttcactgccacatatttacccaagaaaaatgaaagtagttgcctacatgaacacttatatacatgtattcatggcagctttatttgtaatagccagaaactgcaaacagcctaagtcaaccaaataaataaactgtggaataatcatgcagggaaatactactcagaaataaaaaaggatattgatacattaaaaacgtggatatatttcagctgggcatggtggctcacgcttgtaatcccagcactttgggaggctgaggtgggaggatcacttgaggtcaggagttggagaccagcctggccaacatgatgaaacaccatctctattaaaaatacaaaaaattagctgggcatggtggtgagcgcatgtaatcccaactacttgggaggctggggcaggagaatcgcttgaacccgggaggctgaggttgccgtgagccgagatcacaccactgtactccagcctgggtgacagagtgagactctgtctcaaaaaaaaaaaaaaaaaaaaaacttggatatatttcaaacaaattatgcagtgtgaaagaagttagactaaaaaaacactacaaactgtatgattccatttagataaaattctagaaaatgcacactaatctatggtgacagaaatcagattgttggtttcatgggtggagagcttcagggaagtggacagaaagggattaccaaagacaagtggcaacttttgggggtgatgggatacgttcattaccttgtgatggtttcacagttgtatacgtgtcaaaacatcaaattgtactcttttaactgtgtgccatttattgtatagaaataatattttaggggcaggtgcagtggctcacgcctgtaatcccggcactttgggaggccgaggcaggcagatcacctgaggtcaggagtacaagaccagcctggctaacatggtgaaaccccgtctctactaaaaatgcaaaaaaatttagctgggtgtggtggcgtatgcctgtaattccagctactcaggaggctgaggcgggagaatcgcttgaacccgggaggcagaggttgcagtgagccgagatcgtgctctccacgatctgcactccagcctaggtgacagagcaagactcagtctaaaaaaaaaaaaaaaaaaaaaaaaaaatttaataaagctgtaccaattctttggcctaataactttatttggaaaattatgtacaaggaagttcaactaaataaggcatagttacataaattatggtacatccatactttgggatattatacaaccttaaaatctatttttttacattaatctcttactaatataattaaaattttaaatcctgagatgaaaacagagaaaggaagaatagtgtagggtgtctagtggtcttagccactgctgggcacaactacatagtctgtgcatccaaacaccaggtacagcaagcacaccctgctagggagatgcaagagactgtgctcaaagcctgctggggtaaccttctactgtgggaaagtggaggggcttaacatcattatttcttattgattgattaattgagacagagtcttactctgttgctgaggctggagtgcaatgatgtgatctcacctcactgcaagctccgcctcctgggttcaagtgatttgcctgcctcagccgcctgagtagctgggactacaggaacccaccactacacctggctaatttttgtatttttagtagagactgggtttcaccatgttggccaggctggtctcaaactcctgacctcaggtgatctgcccacctcggcctcccaaagtactgggattacaggtgtgggcaaatcattatttcaaaaaatgttaaacgatacgagaatatgctcatgatacattatgtaaaaaaaaacagaatacaaacaactgtatacagtgtcgattactgatataattagagaaaaaaaaaacacgggaaggaaataacccgagtagattataggtagttgtatccttccttgtagacaaattttctacaatatgcatattattttacattttttattattgaagtataatttacatataatgcaaaacacagatatgaagtgtacagtttgatcagttttgacaaaagcatacacccatttaacccatacctctctctcaagatataaaacattttcatctccccagaaaaagttgctttgggactttctcagtctatctccccagaagaaatcattgttctgatttctatcaccataaatggaatcattacaaaacttttttttttttttttttgagacggagtcttactctatctccaggctggagtgcagtggtgtgatctcagctcactgcaacctctgcctcctgggttcaagcaattctcctgcgtcagcctcctgagtagctgggactacaggcacgcaccatcatgcccagctaatttttgtatttttaatagagacagggtttcactatgttggccaggatggtctcaatctcttgacctcgtcatctgcccgccttggcctcccaaagtgctgtgattacaggcgtgagccaccgcgcccgaccacaaaacatttttttaaagtcagtaaatgtcatttttaaaaatataaggccaactgcaaatgcctggaactgtttaacacccaaccagaccctaactgattcagttagaagatctgaactctgtatggaaagcttccctgtatcaaagatctggaaagatacttcaccaccaagggcacagggaggagacatggatataaaacacatacatggagaaaaaaagtcgctttaaagaacaggagaaaaggccatgcttctaacctttcttagggctagcaagctgagaactccacacgctgtatgcaaggattcctctttggaggaccctttcaaaatggctttgttgacacctacacagcacaaccaagccccctttctaccacacactgctcctcacccagagtctctggcctccgagtggagatccgcaggctttcagcagggatggggccaagctgcagcagtgtgccagccagctgcttcccaaggtggccacctccaatgatgcccaccttaaactcttcaggagtggctgaattaagggagccaattgagagatgtctggaactttgattcttatttaatgatgctctggagaatgaacacacagacacgtacataaatacatgcacacactagtttttcttttttttttttttttttgagacagagtcttgctttgtcgcccaggttagagtgcaatggggtgatcttgactcaccgcaagctccgcctcccaggttcacgccattctcctgcctgtctcccgagtagctgggactacaggtgcctgccaccactcccggctaattttttgtatttttagtagaaacagggtttcactgtattagccaggatggtctccatctcctgacctcgtgatccacccgtgttggcctcccaaagtgctgggattacaggcgagagccaccgcacccggcctagttcttcttaactgtcattctctgacattttctgctttgtcatttaaggtgcttggtggcaccttaagtacttcggagataagacatttcaactgtgtgtcatttatccagcctcactagggaatgaaatgttcctcctgagttaattttccagaaacaaaagtataacccttttcaagggaccaaaatttaaaatgttttaaatgaacatactttgttacatgtattatgcttgcctggttaaacagtctgaatatttaatcatttcactggctcaggacaccactgtgaacagccactattatacagcatactgtaatgtctataacacattgtgggccagtcccctcatgttttgtttgtttctgtgcagacagctttcaatttttttttttattgtggttaaaaaacacatgctgggtacggtggctcacatctataatcccagcactttgagaggccaaggcaggcagatcacttgagctcaggagtttgagaccagcctgggcaacatgtaagacctcgtctctacaaaaaatacaagaattagccaggtatggtggtgcacacctgtagtcccagctacccaggaggctgaggtgggaggattgcttgagcccaggagtttgaggctgcagtgagctgtgctcgtgccactgtactccagcctgagtgacagagcaagaccctgtctcaggaaaacacacacacacacacacacacacaccatgaacttcaccatcataaccatttttaaagtgcacagtacagttgtgttaattatatgcacattgtggctaggcatggtagctgatgcctgtaatcccagcactttgggaggccaaggcgtgtggatcacttgaggtcaaaagtttaagaccagcctggccaacatggtgaaaccccatctctattaaaaatataaaaattagcccagcatgatggtgtaaacctgtagtctctgctactcaggaggctgaggcaggagaatctcttgaacccgggaggtggaggttgcagtgagccaagatccactactgcactccagcctgggcaatagagcaagacttgatctcaaaaaaagaaaatacatatagatagatagatagatagatagatagatagatagatagatagatagacagacagacagacatatagatatagttgtgcaacagctctttagaacctttccatcttgcaaaactggaactctatatgcttttttttttttttcgagacagtctccctccattgcctgagctggagtgctgcggcacaatctcagctcactgcaacctccacctctcacattcaagcaattctctgcctcagcctactgactagctgggattacaggcgcgtgtcaccacaccccacgcccagctaatttttgtatttttagtagagatgaggttctccatgttggccaggctggtctcgaactccccacttcaagtgatccgcccacctccgcctcccaaagtgctgggattataggcatgagccaccacacccgacctgaaactctatacaatttttctctctccccagcccctggaaactaccattctactttctgttccactactttagatacctcatataagtagaattatgtagtattgtctttttgtacatggctaatttcacttagcataatgtcctcaagcttcatccatatcaatttttggattttttttctatcttcatgaaaaatgtcattgggattttgataaggattgcagtgcatctgtagacagcaatctacagggtcataggacaatagcgtgggaaggtcagcagataaacaagtgaacaaaggtctctggttttcctaggcagaggaccttgcggccttccacagtgtttgtgtccctgggtacttgagattagggagtggtgatgactcttaaggagcatgctgccttcaagcatctgtttaacaaagcacatcttgcaccgcccttaatccattcaaccctgagtggatacagcacatgtttcagagagcacagggttgggggtaaggtcaccgatcaacaggatcccaaggcagaagaatttttcttagtacagaacaaaatgaaaagtctcccatgtctacctctttctacacagacacggcaaccatccgatttctcaatcttttccccacccttcccccctttctattccacaaaaccgccattgtcatcatggcccgttctcaatgagctgttgggtacacctcccagacggggtggtggctgggcagaggggctcctcacttcccagtaggggcggccgggcagaggcgcccctcacctcccggacggggcggctggtcgggcggggggctgacccccccacctccctcctggacggggcggctggccgggcggagggccgacccccccacctcactcccggacggggcggcaggccgggcagaggggctcctcacttcccagtaggggcggccgggcagaggcgcccctcacctcccggacagggcggctggccgggcggggggctgacccccccacctccctcccggacggggcggctggccgggcagaggggctcctcacctcccagtaggggcggccctttcttatttttaacgtaggcatttacccctataaagtttgctcatagtactgcttttgttgcaacccataagttttggtatgttgttttcattttcacttaagatattttcaaattttccttgtgatttcctgtttgattcattggttgttcaagagttgtgttgacttccacatatttgtgaactttctagtttttcttctgctatttctagtatcattctattatggtcaaaaaaaaaaaaaaaagacggttggtatgatttgaatcttcttaaatttgttaggacttattttgtgacctaacgtgatctatcctggaaaatgttccatgtgcacttgaaaagaacgtgtattctgctgctgagtggagtgttatgtacttgtccattaggttctaattggtgtgtcatgttgttcaagtcttctgtttccttactaaccttttgtctggttgttctatccattattgaaagttgggtattaaaatctcctactataattgtataccttcagttatgtcaatatttgcctcatatatgtggatgttctgatgttaagtacatatataattgttgtgtcttcctggtgaattggtctttttatcatcatgtcattctttgtctctcatgacagtttttgacttaaaacctattttgtctgatacaagtatgactactcctgttcttttttggttaccatttacgtggaattatctttctctatggtctgactttcagcctatatgtgtcctaacatctaaagtgagtctcttgaagacaagatatacgttggatcttgtttttgtttttgttttttatccattcagccactcggtatcttttgattgatgggtttaatccacttacatttaaaataattactgatagggaaggacttatcactgccagtttgtttttttctctgtgttgcagttttgttcttcttttcctctcttgctgccttcttttgtatttcactgattttttttttttgtaatgacattattttctttttgttgttggtattttctttgtagttaccgtaggaaattgcataaaaatcataaaaatagttgtaacaacctattttaagatgataatgtcaatcatatacaaaaactctacttcatcttcccctacccctgctttttgttatttatctcatgaattatatcttttggatattttgtatccattagcatggttttatagtaataggtttttttttagtatttttatttttgagacagggtctcaccctgtggcccaggctagagtacagtggcgtgaacacagctcacttcagccttgatctcctgggctcaggtgatcctcccgcctcagcctcccaggtagctgggactacaggcacacaccatcatacttggctaatttttgttatttctagtagagacagggttttaccacattgcctaggttggtctcgaacttctggaatcaagcgatccgcctgccttagcctcccaaagtgctggattacaggcgtaagccaccgtgccaagcctatttttaatttttattatttatatttatacttattgatatttataattttattttatacattttattatttctatatttacatttttatatacattttatttatctatttatgagacagggtctcgctctgtcacccaggttagagtgcagtgacatgatcattgctcactgcagcctctactttccaggctcaagcaatcctcccacatcagactaccacgtacctgagaccacaggtgtgtaccactatgcccagctaattgtttttttttttaagagatgttgtctccctatgttgcccaggctagtctcaaacacctaagcccaagcaattctcctgccttggcctcccaaagtgctgagattacaggtgtgagccatcacacttggccagcttttatctttaaatcctataccacaattaaaaatgatttatgtgccacccatcacagtattatgtatatggctatatattcacctttgccagagagctttttatttttgtatacttttgtgttgttgactagcatgttttcatttcaacttaaggattcccttcagcattagttgtaaggcaggtccaggagtgatgaggttttttgttgttgtttatctgggaagctctttctttctctttttttttttttttcttgagatagagttttgctattgtcacccaggctgaagtgcagtggtgcaatctcagatcactgcaacctctgcctccctgggttcaagcaattctcctgcctcagcctcccaagtatctgggattacaggtacctgccaccatgcccagctaatttttgtatttttagtagagacagggtttcaccacgttggccaggctggtcttgaactcctgacctcaggagatctgcccacctcggcctcccaaagtgctggggtcacagatgtgagccaccatgcccagcttctccttagtttttgaagcacaggtttgcaagagatagtattcttggttgacaggtttttttttttctttttcctttttttttttttttttttgagacagagtctcgctctttcgcccaggctggactgcagtggtgcaatcttggctcactgctacctccgcctcccgggttcacgccattctcctgcctcagcctcccaagtagctgggactataggcgcccgccaccacgcccggctaattttttgtatttttagtagagacggtttttcaccatgttagccaggatggtctcgatgtcctgacatcgtgatccgcccccctcagcctcccaaagtgctgggattacaggcgtgagccaccgcacctgaccaacaggttttttttttctttcccctttcagcactttgaatatatcaagcactcccttctggcctgtaatgtttctgctgagaagccaccaatagtcttctgggaactcccttgcatgtgataagttgctttttctttgcagctttcagtattctttgtctttgacttttgatggtttgattataacgtgtctctgtgtggtcctctttgggttcatccaaattggagtcctctgagcttcttgaatttggatgtccatttccttcctcagatctgggatgtttttggccattatttcttcaaataagctctttgcaccttgctctgcctctcttctccttctgacattcccataaggcatatattgacccacttgatagtatcctgtaagtcctctagattttcttcacttttcttttctttttgctcttctgatttcataatttcaaataactggtcttcaaatttgctgattctttcttctgtgtgatcaagtctaatgttgaaccactctagtgagttgtttcaattcaattattgtgctctccagctccaaattttggttcttagtttctctttatgatattattttattcatgtattgttttcctgatttcatcagtttttttttgttttgttttgttttttcagagacagggtctcactatgttgcccaggctggtctcaaactcctgggctcaaataatcctcccacctcagcatcccaaactgctgggattacaggcctgtaatttgtaatttgtaatttgtaattacaaattacaggcctgtaatctgtaatctgtaaactttgcccagcctagttgtttttctgtgttttgtagctcattgagcctctttaagattattactttgaattctttgttaggtaactcacagatctgtttctttagggctggtttctgcagtagtttgttcttatggttgagcaatattgcctttttaatttttggtggaatttgggcatttgaaaaaacagtcaggcctctcccaatctttacagactggcaccatacaggggaagatctttcccaatcagcccagctagagattctggggcctgtcaaatctttccaggaatgtgtcttctctgggcttgagtttggaatttcccaattaaagagttttgcctgtttctattgcaggggctgataatcttttcctcactttggtatctatctgcagtactgcaggttctctgtactgcaacaagccactgagtgatcctttgttttcatccaaaatatgttggttcctcatcagtgctccaagtcatgtgagacagaaaccaatccctcaggcagcccccaaaaaggcagaacagtggacaaacattccatttttctttttccctccaaaggagaagccacaaattaggcattttctcctgatcacctgaggctggcttgaggaaagggatatcttaggtgaactgcaatggcttttcttacccctgtaaatgcagctgttcttggatttgtacctctccagggcactacaatttcttaagtgcttgctggaggtttcataaaggctttttggaccatatattgttgttaagttagtgtcttgaggttacagagtctggagcttcctatttcttcatcttactgataccaatctgagacagatgtcaatttttattgctattagatgtgagtgcattcctttcctacgatacacccactctttctagtttgctatttcaaatctgcagacttgagaaaccagataacttggctttttaagaaggttatgacttatacacataaatggtttataaaaacaaaacagtgttcattcagggtacaactttaaactacaaaaacaaaacaaaaaagaacagaactgagaaactaaggatgaagatttcagaccactatttccagaggttcacttactgttggtgctggatgtgtttccttggcgcaagattaacaaagtcagacttctgaatacataaggtatactttcgttgctatatgacagccttatatttgttctgtatttctgtaaaaaccagtgtcttaaagctctggattttgcttctaagcaacataagtcacactctatttaagccttctctcctggttgaaagagcattttctcttagtgcctgatccttccaaatataaaatgccacctgcaagtttcatatattgttttctcccagtcatattgagtaccaccaataggtttatgcatccttatcagtaagccagtcagtaaattcactgagaagcctgcctccttggacatgtgctgtatctataaacatgttcaattcaaatttggtcccaccatctaggaattaatctaacttcagagaaaaactaagaagtagagtgaggaggtgacatatgctcccagagtgacctggagttgcagaattcagaagcctaattataggtacctgcttcacacacatttcctatttaagtgtctgaagccatattgtagaaagatatcagaatcaagactggactgacagcttttctgcaaatcaatattcctggtttcaaggaagtcactggcacagggcctgtgaagtcctgggtagcttcctgtaagggagcattccactattacctcagccccaaaagaaagaactgattccatttgcattccttgccaatagataaggaatggctagacattagcaactgtggagggcaagctggtggtcatgatgactgagtgaatggatgaataaatgatcatttaatcaatccatccactaaaaggtaatcactactaatccatgctttattatgtaaccacagccaggggaccctggtatagattttcctgtccttttagaccaggagtcattgactctgggttggaaaagataggatgacaatccaccagccaaacttaccctccaatataaaaaaaatttaagacatttgaattctcagcagtgagattcttgtccatcttcctgaatttggatactcggcttacctcaaattatataatagtttgcagaagaaggttgcatgggcacaagcctcgatcatcagtccccgagaacggccctgcaaatacagccagatacgatcttcctctggaaccccatactcaaactgcagggactcaaggtcctggagcatgtccatttccaagccactatttcctgcagtgatagacactaatcaatttggctccctgtcccggtagaagaggggtctatgtaggaggtgtgtgtatgatggtgtgtgtgcccaggtcacaagcactcatgatgatgggcttcagcacctctctactcccagattctgaatttggaattc

SEQ ID NO: 1686 - DNA, 240 bp, Homo Sapiens
gcggcccccgccatcccgccccgccgccctgcgccatggaggagggccctctgccgggcgggctgcccagccccgaggatgcgatggtgacggagctcttaagccccgagggtccgttcgcttcggagaacatcggcctgaaggcccccgtgaagtacgaggaggacgagttccacgtcttcaaagaagcgtacctgggcccggcggaccccaaggaacccgtcctgcacgcgttccaac

SEQ ID NO: 1687 - DNA, 2439 bp, Homo Sapiens
cagcacccagctccccgccaccgccatggtccccgacaccgcctgcgttcttctgctcaccctggctgccctcggcgcgtccggacagggccagagcccgttgggctcagacctgggcccgcagatgcttcgggaactgcaggaaaccaacgcggcgctgcaggacgtgcgggactggctgcggcagcaggtcagggagatcacgttcctgaaaaacacggtgatggagtgtgacgcgtgcgggatgcagcagtcagtacgcaccggcctacccagcgtgcggcccctgctccactgcgcgcccggcttctgcttccccggcgtggcctgcatccagacggagagcggcggccgctgcggcccctgccccgcgggcttcacgggcaacggctcgcactgcaccgacgtcaacgagtgcaacgcccacccctgcttcccccgagtccgctgtatcaacaccagcccggggttccgctgcgaggcttgcccgccggggtacagcggccccacccaccagggcgtggggctggctttcgccaaggccaacaagcaggtttgcacggacatcaacgagtgtgagaccgggcaacataactgcgtccccaactccgtgtgcatcaacacccggggctccttccagtgcggcccgtgccagcccggcttcgtgggcgaccaggcgtccggctgccagcgcggcgcacagcgcttctgccccgacggctcgcccagcgagtgccacgagcatgcagactgcgtcctagagcgcgatggctcgcggtcgtgcgtgtgtcgcgttggctgggccggcaacgggatcctctgtggtcgcgacactgacctagacggcttcccggacgagaagctgcgctgcccggagccgcagtgccgtaaggacaactgcgtgactgtgcccaactcagggcaggaggatgtggaccgcgatggcatcggagacgcctgcgatccggatgccgacggggacggggtccccaatgaaaaggacaactgcccgctggtgcggaacccagaccagcgcaacacggacgaggacaagtggggcgatgcgtgcgacaactgccggtcccagaagaacgacgaccaaaaggacacagaccaggacggccggggcgatgcgtgcgacgacgacatcgacggcgaccggatccgcaaccaggccgacaactgccctagggtacccaactcagaccagaaggacagtgatggcgatggtataggggatgcctgtgacaactgtccccagaagagcaacccggatcaggcggatgtggaccacgactttgtgggagatgcttgtgacagcgatcaagaccaggatggagacggacatcaggactctcgggacaactgtcccacggtgcctaacagtgcccaggaggactcagaccacgatggccagggtgatgcctgcgacgacgacgacgacaatgacggagtccctgacagtcgggacaactgccgcctggtgcctaaccccggccaggaggacgcggacagggacggcgtgggcgacgtgtgccaggacgactttgatgcagacaaggtggtagacaagatcgacgtgtgtccggagaacgctgaagtcacgctcaccgacttcagggccttccagacagtcgtgctggacccggagggtgacgcgcagattgaccccaactgggtggtgctcaaccagggaagggagatcgtgcagacaatgaacagcgacccaggcctggctgtgggttacactgccttcaatggcgtggacttcgagggcacgttccatgtgaacacggtcacggatgacgactatgcgggcttcatctttggctaccaggacagctccagcttctacgtggtcatgtggaagcagatggagcaaacgtattggcaggcgaaccccttccgtgctgtggccgagcctggcatccaactcaaggctgtgaagtcttccacaggccccggggaacagctgcggaacgctctgtggcatacaggagacacagagtcccaggtgcggctgctgtggaaggacccgcgaaacgtgggttggaaggacaagaagtcctatcgttggttcctgcagcaccggccccaagtgggctacatcagggtgcgattctatgagggccctgagctggtggccgacagcaacgtggtcttggacacaaccatgcggggtggccgcctgggggtcttctgcttctcccaggagaacatcatctgggccaacctgcgttaccgctgcaatgacaccatcccagaggactatgagacccatcagctgcggcaagcctagggaccagggtgaggacccgccggatgacagccaccctcaccgcggctggatgggggctctgcacccagcccaaggggtggccgtcctgagggggaagtgagaagggctcagagaggacaaaataaagtgtgtgtgcaggg

SEQ ID NO: 1688 - DNA, 480 bp, Homo Sapiens
  misc_feature (231)..(231): n is a, c, g, or t
ccaaaggccaaaatactattttaattttaagtttctctcctccatgatgtgtttaattacgctgttacaagtaagactaattttttagcatgtgtaacagaccacatgctaaaaaagtttaagggttcagaaaactaaaatttataatttttacatggttatacttaagccagaagtacaagactagaaataagtaacttcaacctaaaatatgctttaaataccacaaangaagaaaaaagaaaaacaaagggaaaaaggatttctcctcatgtaatttttgagtagactatgtcgcaaaaaagcaaaatattaaatatctagttttcacttcaacagaaattattcataaataaaattcactaaataagatataatgagattaggagtatgaatatggggtattcagacttattccattcagatgagaagatgacatctttggagggaaaaaaaaaaaccttaccaaataatataaat

SEQ ID NO: 1689 - DNA, 1643 bp, Homo Sapiens
atggccctgctgccccgagccctgagcgccggcgcgggaccgagctggcggcgggcggcgcgcgccttccgaggcttcctgctgcttctgcccgagcccgcggccctcacgcgcgccctctcccgtgccatggcctgcaggcaggagccgcagccgcagggcccgccgcccgctgctggcgccgtggcctcctatgactacctggtgatcgggggcggctcgggcgggctggccagcgcgcgcagggcggccgagctgggtgccagggccgccgtggtggagagccacaagctgggtggcacttgcgtgaatgttggatgtgtacccaaaaaggtaatgtggaacacagctgtccactctgaattcatgcatgatcatgctgattatggctttccaagttgtgagggtaaattcaattggcgtgttattaaggaaaagcgggatgcctatgtgagccgcctgaatgccatctatcaaaacaatctcaccaagtcccatatagaaatcatccgtggccatgcagccttcacgagtgatcccaagcccacaatagaggtcagtgggaaaaagtacaccgccccacacatcctgatcgccacaggtggtatgccctccacccctcatgagagccagatccccggtgccagcttaggaataaccagcgatggattttttcagctggaagaattgcccggccgcagcgtcattgttggtgcaggttacattgctgtggagatggcagggatcctgtcagccctgggttctaagacatcactgatgatacggcatgataaggtacttagaagttttgattcaatgatcagcaccaactgcacggaggagctggagaacgctggcgtggaggtgctgaagttctcccaggtcaaggaggttaaaaagactttgtcgggcttggaagtcagcatggttactgcagttcccggtaggctaccagtcatgaccatgattccagatgttgactgcctgctctgggccattgggcgggtcccgaataccaaggacctgagtttaaacaaactggggattcaaaccgatgacaagggtcatatcatcgtagacgaattccagaataccaacgtcaaaggcatctatgcagttggggatgtatgtggaaaagctcttcttactccagttgcaatagctgctggccgaaaacttgcccatcgactttttgaatataaggaagattccaaattagattataacaacatcccaactgtggtcttcagccacccccctattgggacagtgggactcacggaagatgaagccattcataaatatggaatagaaaatgtgaagacctattcaacgagctttaccccgatgtatcacgcagttaccaaaaggaaaacaaaatgtgtgatgaaaatggtctgtgctaacaaggaagaaaaggtggttgggatccatatgcagggacttgggtgtgatgaaatgctgcagggttttgctgttgcagtgaagatgggagcaacgaaggcagactttgacaacacagtcgccattcaccctacctcttcagaagagctggtcacacttcgttgagaaccaggagacacgtgtggcgggcagtgggacccatagatcttctgaaatgaaacaaataatcacattgactt
